United States Patent Application Publication US 2005/0228172 A9 - sequence listing, part 122

SEQ ID NO: 567568 - DNA, 584 bp, Homo sapiens
gtcaatattggattttcttgaatgccttttctgccccattgtgttaaatattttttattttatwtttacatggtgatcatacttattgacttgcatatgatgaaacatctttgcatttatggaataaagttcacatcattgtagcaaaataactttctgatttgcttttgaattcagtttgctagtatttcatggaggattattgttccaatattcacccagaatattgaactgtagtttctgtttttgttgtgtcttcactagattttagtttcatgtatttcactgatttcatataattagttagggtgaaatcccaccttgattttttggaatacattcagtaggcttaggaccagcttatcttcgtatatgtggtaaaacttgtctgtgatttcatatgatccagggctttttatgattagtaggtctattattacttattaaatgtcattatacatcttatacatttttgttgttaaagattgctgttattaggccaggtgcggtggctcaggcctgtaatcccagcattttgggaggacaaggtgggcagatcacgaagtaaggagatcgagaccatc

SEQ ID NO: 567569 - DNA, 584 bp, Homo sapiens
gtcaatattggattttcttgaatgccttttctgccccattgtgttaaatattttttattttatttttacatggtgatcatacttattgacttgcatatgatgaaacatctttgcatttatggaataaagttcacatcattgtagcaaaataactttctgatttgcttttgaattcagtttgctagtatttcatggaggattattgttccaatattcacccagaatattgaactgtagtttctgtttttgttgtgtcttcactagattttagtttcatgtatttcactgatttcatataattagttagggtgaaatcccaccttgattttttggaatacattcagtaggcttaggaccagcttatcttcgtatatgtggtaaaacttgtctgtgatttcatatgatccagggctttttatgattagtaggtctattattacttattaaatgtcattatacatcttatacatttttgttgttaaagattgctgttattaggccaggtgcggtggctcaggcctgtaatcccagcaytttgggaggacaaggtgggcagatcacgaagtaaggagatcgagaccatc

SEQ ID NO: 567570 - DNA, 353 bp, Homo sapiens
ttttggcagtagtgattttaaaataaagaacatatttacacaaaattttgtttagtctgtaaaatgtaaagtaaatcaataaatgtgtctttttttacaatgttaagatgatcagtctgttgttttattaagatataattgaccacatgtggtagctcaagcctgtaatcccattattttgggagactgaggtgggtggatcacgaggtcaggtgttcaagaccagcctggccaacattgtgaaactccatctctattaaaaatacaaaaaaattagctaggcgtggtggcgcgtgcctgtaatccyagctacttaggaggctgaggcaggagaattgcttgaactcaggagg

SEQ ID NO: 567571 - DNA, 593 bp, Homo sapiens
tttaactctgtgagatgtatgtacacatcacaaagcagtttctcagaaggcttctttctagtttttctstgaatgtagttcctttttcaccctagtctctcccaaataccctttcacagattctgtgaaaacacttttcccaaactactcaatcaaattaaggtttcattctgtgtgattaatgcacacttcaaaaagcagtttctccaaaagctgtttctagttttttctgaagacattccctttttctccttagacctcaaagcactccaaaatatccgtttgcagatactataaagccagtgttgccaaactgctcagtcaaaagaaatgtttaactctatgagatgaatgctctcattccaaagcagtttctcagaaagctactttctagtttgcatttgaagatatttcctttttcaccataggcctaaaagcactctaaaatttctcttctcatattcaacacaaaaatatttccacactcctcaattaaaagaaaggtttaactctgtgagatgaatgcacacgtcacaaaaatgtttctgagaaagcctctttctagttagtatctgaagatatttcctttttca

SEQ ID NO: 567572 - DNA, 374 bp, Homo sapiens
gagatgaatgcaatcatcacaaagcagtttctcagacagtttctttctatttgttttctaaagacacttcctttttcagcataagcctcaaagcgatctcaaatatccctctgcagattgcctaaaactgcagattgttgccaaactgctcaatcaataaaaaggtctaactctgtgagatgawtgcactcattcccaagatgacagtttctcagaaagcttctatctacttttcatctgaagaaatttgctttttcaacataggctgcaaagcactccgaaatatcccttctcagattcttcaaaaacagtatttccaaactgctccatcaaaaggaatgtttaactctgtgagaagaatgcatacatcacaa

SEQ ID NO: 567573 - DNA, 374 bp, Homo sapiens
gagatgaatgcaatcatcacaaagcagtttctcagacagtttctttctatttgttttctaaagacacttcctttttcagcataagcctcaaagcgatctcaaatatccctctgcagattgcctaaaactgcagattgttgccaaactgctcaatcaataaaaaggtctaactctgtgagatgaatgcactcattcccaagatgacagtttctcagaaagcttctwtctacttttcatctgaagaaatttgctttttcaacataggctgcaaagcactccgaaatatcccttctcagattcttcaaaaacagtatttccaaactgctccatcaaaaggaatgtttaactctgtgagaagaatgcatacatcacaa

SEQ ID NO: 567574 - DNA, 374 bp, Homo sapiens
gagatgaatgcaatcatcacaaagcagtttctcagacagtttctttctatttgttttctaaagacacttcctttttcagcataagcctcaaagcgatctcaaatatccctctgcagattgcctaaaactgcagattgttgccaaactgctcaatcaataaaaaggtctaactctgtgagatgaatgcactcattcccaagatgacagtttctcagaaagcttctatctacttttcatctgaagaaatttgctttttcaacataggctgcaaagcactccgaaatatcccttctcagattcttcaaaaacagtatttccraactgctccatcaaaaggaatgtttaactctgtgagaagaatgcatacatcacaa

SEQ ID NO: 567575 - DNA, 524 bp, Homo sapiens
gaggagccaagatggccaaataggaacagctctggtctacagctcccagcatgagcgacgcagaagacaggtgatttctgcatttccatctgtggtactgggttcatctcactagagagtgaggaggatatakgtcacctcaggatcctgtgatgattgcattagctgcacaaattgtgtgtagagcatgtgtgtttgaacactatgaaatctgggtaccttggaaaaagaacagggtggcagcaatgttcagggaagaagatagataaccttaaactcagactcctggtgagcctggtggaacagagccatatttctcttctttcaaagcaaatgggagaagtatctctgaattctttttctcagcaagaaacatcccagagaaagataatgcatacctgagggtaggcacctgaaatggctgctttgggggtggctgtcttttatggtcacagctgtagagatgaaatgagccccagtctcctgtagctctcccaggcttattaggaggagaaaattcccgc

SEQ ID NO: 567576 - DNA, 524 bp, Homo sapiens
gaggagccaagatggccaaataggaacagctctggtctacagctcccagcatgagcgacgcagaagacaggtgatttctgcatttccatctgtggtactgggttcatctcactagagagtgaggaggatataggtcacytcaggatcctgtgatgattgcattagctgcacaaattgtgtgtagagcatgtgtgtttgaacactatgaaatctgggtaccttggaaaaagaacagggtggcagcaatgttcagggaagaagatagataaccttaaactcagactcctggtgagcctggtggaacagagccatatttctcttctttcaaagcaaatgggagaagtatctctgaattctttttctcagcaagaaacatcccagagaaagataatgcatacctgagggtaggcacctgaaatggctgctttgggggtggctgtcttttatggtcacagctgtagagatgaaatgagccccagtctcctgtagctctcccaggcttattaggaggagaaaattcccgc

SEQ ID NO: 567577 - DNA, 524 bp, Homo sapiens
gaggagccaagatggccaaataggaacagctctggtctacagctcccagcatgagcgacgcagaagacaggtgatttctgcatttccatctgtggtactgggttcatctcactagagagtgaggaggatataggtcacctcaggatcctgtgatgattgcattagctgcacaaattgtgtgtagagcatgtgtgtttgaacactatgaaatctgggtaccttggaaaaagaacagggtggcagcaatgttcagggaagaagatagataaccttaaactcagactcctggtgagcctggtggaacagagccatatttctcttytttcaaagcaaatgggagaagtatctctgaattctttttctcagcaagaaacatcccagagaaagataatgcatacctgagggtaggcacctgaaatggctgctttgggggtggctgtcttttatggtcacagctgtagagatgaaatgagccccagtctcctgtagctctcccaggcttattaggaggagaaaattcccgc

SEQ ID NO: 567578 - DNA, 584 bp, Homo sapiens
gcacattctacaaaaacagtgtttccaaactgctcaataaaagaaacgtttaastctgtgaggagaatgcacacatcactaagcagtttctcagaaagcttctttctggtttttatctgaagttatttcctttttcaacataggcctcatgcactctccaatgtcacatcgcatattctacaaaaatagtgtctccaaactgatcaaagaaaagtttaactctgttagatgattgtatatatcacaagtcagtttctcaaaaacttctttctcattattatccaaagatatttcctttttcaccatatgttcccatgtgctgccaaatatcccttcgcagattctacaaaaaccatgtttccaaactgctgaatcaaaagaaaagtttaactctttgagattatcctacacatcagaaagcagtttctcataacgtttcttttcactttttatctgaagatactttctttttctccataggcttttctgcactacctaaattcacttcacagattttgcaaaaaaggtgttttcaaactgctcagtcaaaagaaatgtttaaagctgcaagatgaatgctcaca

SEQ ID NO: 567579 - DNA, 583 bp, Homo sapiens
ttgcagagtctacaaaagcagtgtttccaaactgatcaatcaaaagaaatgtctaagtctgtgagatraatgtgcacatcacaaagcagtttctcaaaaagcttctttcttgtttttgtccaaagatatttccttcatcccataggcttcattgcactcccatatatctcttggcagatgctataaaaaccttacttccaaactgctcaatcaaaagaaaatttaactctgtgagatgaatgaacacttcacgaacagtttctcagatagcttctgtgtagttcttctcagaagatatttccttttccaccataggcctcgatgcactgccaaatatcccttcactgatcctacaaaaagagtgtttcaaaactgctcaataaaacaagattaacactgtgagttgaactcacacatcagaaagcagtttctcataacgcttctttcccatttttatctgaagatatttccttcttcaccatagccttttttgcgttacctaatatcactttgttgatagcgcaaaaagagtgtttccaaactgctcagtcaaaagaaacttttaacactgggggatgaatgc

SEQ ID NO: 567580 - DNA, 583 bp, Homo sapiens
ttgcagagtctacaaaagcagtgtttccaaactgatcaatcaaaagaaatgtctaagtctgtgagatgaatgtgcacatcacaaagcagtttctcaaaaagcttctttcttgtttttgtccaaagatatttccttcatcccataggcttcattgcactcccatatatctcttggcagatgctataaaaaccttacttccaaactgctcaatcaaaagaaaatttaactctgtgagatgaatgaacacttcacgaacagtttctcagatagcttctgtgtagttcttctcagaagatatttccttttccaccataggcctcgatgcactsccaaatatcccttcactgatcctacaaaaagagtgtttcaaaactgctcaataaaacaagattaacactgtgagttgaactcacacatcagaaagcagtttctcataacgcttctttcccatttttatctgaagatatttccttcttcaccatagccttttttgcgttacctaatatcactttgttgatagcgcaaaaagagtgtttccaaactgctcagtcaaaagaaacttttaacactgggggatgaatgc

SEQ ID NO: 567581 - DNA, 583 bp, Homo sapiens
ttgcagagtctacaaaagcagtgtttccaaactgatcaatcaaaagaaatgtctaagtctgtgagatgaatgtgcacatcacaaagcagtttctcaaaaagcttctttcttgtttttgtccaaagatatttccttcatcccataggcttcattgcactcccatatatctcttggcagatgctataaaaaccttacttccaaactgctcaatcaaaagaaaatttaactctgtgagatgaatgaacacttcacgaacagtttctcagatagcttctgtgtagttcttctcagaagatatttccttttccaccataggcctcgatgcactgccaaatatcccttcactgatcctacaaaaagagtgtttcaaaactgctcaataaaacaagattaacactgtgagttgaactcacacatcagaaagcagtttctcataacgcttctttcccatttttatctgaagatatttccttcttcaccatagccttttttgcgttacctaatatcactttgttgatagcrcaaaaagagtgtttccaaactgctcagtcaaaagaaacttttaacactgggggatgaatgc

SEQ ID NO: 567582 - DNA, 250 bp, Homo sapiens
ttcacagtaggtctcaatgcactccaaaatatcccatcacagattctacaaaaacagtgtttccaaactgctcaaatgtcagaaaggtgaaattctgtgagatgartgcgcacatcccaaagcattttctcagaaagcttctttctagttttcatctgagaatatttcctttttcactgcagacctcaaagtgctcccaaatataacttcctagattctacaaaaacagtgttaccaaagtgctcaatca

SEQ ID NO: 567583 - DNA, 584 bp, Homo sapiens
atttcctttttcaccatatgcctcaatgcrctcccatatatcccttcgcagattctacaaaaacagtgtttccaaactgcctcatcaaaagaatagtgcaactgtgacatgaatctacacatcacaaagcagtttccccaaaagatttgttctggtttttttctgaaagtatttcctttttgaccataggcctcaatgtgttcccaaacatcctttcccaaatcctacaaaaacagttgtttgaaactgctcaatcaaagaaaggtttaactgtgagatgaaaacacacatcacaaagctttctcagaaatctttctagtttttatctgaggatattacatttttcaccataagcctgaatgtatcccaaatatcccttcacagattctacaaaaacagtggttccaaactgctcaatcaggacaaaggaaatctgaggatatttcttttttcaccataggcatccatgtgctcctaaatatacctctgcagattatacaaaaacagtgtcccaaaactgctaagtcaatagaaagttttaattctttgacctgaatgcaaacatcaaaagcagtttcccagaa

SEQ ID NO: 567584 - DNA, 584 bp, Homo sapiens
atttcctttttcaccatatgcctcaatgcactcccatatatcccttcgcagattctacaaaaacagtgtttccaaactgcctcatcaaaagaatagtgcaactgtgacatgaatctacacatcacaaagcagtttccccaaaagatttgttctggtttttttctgaaagtatttcctttttgaccataggcctcaatgtgttcccaaacatcctttcccaaatcctacaaaaacagttgtttgaaactgctcaatcaaagaaaggtttaactgtgagatgaaaacacacatcacaaagctttctcagaaatctttctagtttttatctgaggatattacatttttcaccataagcctgaatgtatcccaaatatcccttcacagattctacaaaaacagtggttccaaactgctcaatcaggacaaaggaaatctgaggatatttcttttttcaccataggcatccatgtgctcctaaatatamctctgcagattatacaaaaacagtgtcccaaaactgctaagtcaatagaaagttttaattctttgacctgaatgcaaacatcaaaagcagtttcccagaa

SEQ ID NO: 567585 - DNA, 553 bp, Homo sapiens
agacataaacagtgtttccaaactgctcaatcaaaggaaaggtttaattctgtgagatgaatgcattcatcacaaagccatttctcagaaagcttcctttaatttttttcttaacatatttcctatttcacaataggcctcaatgcactaccaaatatcccatcacagattctgccaaccagtgtttccaaactactcaatcaaattaaggtttaactctgtgagatgaatgcacagatcacaaagcagtttctcagaaaagttctttgcagattttctctgaaaatattttgtttttcaccatgggcctcaaagtgaacacatatatccctttgtttatactagaaaaaccatgtttccagactgcacaatcaaaagaaaggtttaactcrgggagatgaatgcactggtcaccaagcagtttctcagaaagattccagtttttatctgaagatatttcttttttcacaatgtctacattcactccaaaatatcccttcagagattctaccaacacattgtttcctaactgctcactcaaaagaaaggttta

SEQ ID NO: 567586 - DNA, 585 bp, Homo sapiens
aatgcactggtcaccaagcagtttctcagaaagattccagtttttatctgaagatatttcttttttcacaatgtctacattcactccaaaatatcccttcagagattctaccaacacattgtttcctaactgctcactcaaaagaaaggtttaactctttgtgctgagtgcacacatcacaaaacagtttctcagaaagattctttttaggttttctctgaagacatttcatttttcaccatgagcctcaaagcactctcatatatccctttgtttatactacaaaaaccatgtttccaaactgctcagtcatattaagatttaactttgagagaagaatgcacacatcataaagaagtttctcagaaagtttctttttagtttttctctgaagacatttcctttttcaccacaggcctcaatgtgctcccaaatattccctygcagattctaaaaaaacagtgtttctgaatggctcactcaaaacaaaggtttgcctatgtgagatgaatgcacaaatcacaaagccatttcacagaaaacttctttctattatttacctcaagatatttcatttttcaccat

SEQ ID NO: 567587 - DNA, 341 bp, Homo sapiens
tcacagaaaacttctttctattatttacctcaagatatttcatttttcaccatatgcctcataacgctcccaaatatctcttctcagatttaaaaaagaaaaagtgttacaaacagctccatcaaaagtaaagtttaactctgtgaagtgaatgcacacatcacaaagcagtttccttgaaaatttctttctaatttttatctcaaggtatttycttttcaaccataggcctctatgctctcccatacatcccttcataggttctacaaaaactgggtttctagactgctcaatcaaaatacatgtttaactctgtgagaagaatgcacacatcacaaatc

SEQ ID NO: 567588 - DNA, 341 bp, Homo sapiens
tcacagaaaacttctttctattatttacctcaagatatttcatttttcaccatatgcctcataacgctcccaaatatctcttctcagatttaaaaaagaaaaagtgttacaaacagctccatcaaaagtaaagtttaactctgtgaagtgaatgcacacatcacaaagcagtttccttgaaaatttctttctaatttttatctcaaggtatttccttttcaaccataggcctctatgctctcccatacatcccttcataggttctacaaaaactgggtttctaractgctcaatcaaaatacatgtttaactctgtgagaagaatgcacacatcacaaatc

SEQ ID NO: 567589 - DNA, 331 bp, Homo sapiens
ttctttctagtttttatctgaagatatttctttttccaccataggactcaaagagtgcacaaatattccttcacggatcctaacaaaacagtgtttccaaagtgctcaatcaaaagagagttttaactgttacagatgaatgagcacatcataaagcagtttcccagaaagattcttttaatttttatctgaagatatttcgtttttcaccataggcctcaaatcactccaaaatattccttctcagattgtaaaaaaatcatgtttcctaacttctcaatcaaaaaagggttaactctatgaaattartgtactcattacaaaacagttt

SEQ ID NO: 567590 - DNA, 551 bp, Homo sapiens
tttttatctaaagatatttcctttttcaccttaggcctcaatgcaatctcatatatcccttcgtagattccacaaaaacaatatttctagatggctcaatcaaaagaaagggctaactctgtgtgaagaatgtgcacatcacaaagcagtttctcagaaatttctttctagtttttctctgaagatatttcctttttcaccataggcctcagcactcccatatattcatttgcagattctacataaacagtttccaaattccrcattcaaaagaaaggttttactctcagaagaatgcacacataacaaagcactttctcagaaagcttctttctagtttttctccaaagatatttcacttttcaccataggcccccatgtgctcccatgtatcccttcattgattgtacacaaacagtgtttccaaactgctcaatcaaaagaaaggtttaacactggtggaagaatgcagacatcacaaagcagtttctgagaaagttctttctagtatttatctgaagatatttcctatttctccataggcctcaatg

SEQ ID NO: 567591 - DNA, 335 bp, Homo sapiens
cttctgtctggtttgtatgtaaagatatgccttttacaacgtattcctcaaagagctcccaatatcmacaagcagattctacaaaagcagtgtttcaaacctgctctatcaaaggaaagtttcaactctgtgaattgaacacacacatcacaaagcagtttctaagaatgcttctgtctagtttttaagagaagataatcctttttccaccataggcaacaaatctctccaaattaacactaccaggttctacaaaaagtgtgtttcaacactgctctatcaaaagacaggatcaagactttgagttaaatgcacacatcacaaagcagtttctg

SEQ ID NO: 567592 - DNA, 335 bp, Homo sapiens
cttctgtctggtttgtatgtaaagatatgccttttacaacgtattcctcaaagagctcccaatatccacaagcagattctacaaaagcagtgtttcaaamctgctctatcaaaggaaagtttcaactctgtgaattgaacacacacatcacaaagcagtttctaagaatgcttctgtctagtttttaagagaagataatcctttttccaccataggcaacaaatctctccaaattaacactaccaggttctacaaaaagtgtgtttcaacactgctctatcaaaagacaggatcaagactttgagttaaatgcacacatcacaaagcagtttctg

SEQ ID NO: 567593 - DNA, 335 bp, Homo sapiens
cttctgtctggtttgtatgtaaagatatgccttttacaacgtattcctcaaagagctcccaatatccacaagcagattctacaaaagcagtgtttcaaacctgctctatcaaaggaaagtttcaactctgtgaattgaacacacacatcacaaagcagtttctaagaatgcttctgtctagtttttaagagaagataatcctttttccaccataggcaacaaatctctccaaatkaacactaccaggttctacaaaaagtgtgtttcaacactgctctatcaaaagacaggatcaagactttgagttaaatgcacacatcacaaagcagtttctg

SEQ ID NO: 567594 - DNA, 411 bp, Homo sapiens
ttgaacctttcttttgatagagcagtgttgaaacatactttttgtagaatctgcaagtgtccatttcgagttcttttgtgcgtatgttggaaaaagtgatatcttcacctgaaaaatagacagaagcattccagaaactgctttgcaacatgtgcattcaactcacagtgttgaaccttcctttygagagagcggttttgaaacagtctttttgtagtatctgcaagtggatatttgcagtgatttgaggccgaagaaggaaaaggaaataccttcaaataaaaaactagacagaagcattttcagaaactgccttgtgatgtgtgcattcaactcacagagttgaaccttccttttgagagagaagttttgaaacagtctttttgtagtatttgcaagtggatatttgga

SEQ ID NO: 567595 - DNA, 411 bp, Homo sapiens
ttgaacctttcttttgatagagcagtgttgaaacatactttttgtagaatctgcaagtgtccatttcgagttcttttgtgcgtatgttggaaaaagtgatatcttcacctgaaaaatagacagaagcattccagaaactgctttgcaacatgtgcattcaactcacagtgttgaaccttcctttcgagagagcggttttgaaacagtctttttgtagtatctgcaagtggatatttgcagtgatttgaggccgaagaaggaaaaggaaataccttcaaataaaaaactagacrgaagcattttcagaaactgccttgtgatgtgtgcattcaactcacagagttgaaccttccttttgagagagaagttttgaaacagtctttttgtagtatttgcaagtggatatttgga

SEQ ID NO: 567596 - DNA, 492 bp, Homo sapiens
gttagtgacgttttgcattcctctcacagagttaaaccttcctttttattgagcagtttggaaacagagtttttgtagaatatgccaagagatatttgggagagcattgaagcctatggtgacaagggaaatatcttcagataaaaactagaaagacrgtttctgagaaactgctctgtgatctgtgcattcttctcatagagttaaactttctttagattgagcagtctggaaacactgtttttgtagaatatgtgaaaggatatatgggtgtgcattgaggcctatggtgaaaaagggaataccttcagagaaaaactatagagaagctttctgagaaacagctttgtcatgtgtgcacttaactcacagagttaaatctttcttttaattgagcagtttggaaaccctgttttggtagaaactgcgaaaggatatttgggagtgcattgaggcctgtggtgaaaaaggaaatatcttcagataaaaact

SEQ ID NO: 567597 - DNA, 492 bp, Homo sapiens
gttagtgacgttttgcattcctctcacagagttaaaccttcctttttattgagcagtttggaaacagagtttttgtagaatatgccaagagatatttgggagagcattgaagcctatggtgacaagggaaatatcttcagataaaaactagaaagacggtttctgagaaactgctctgtgatctgtgcattcttctcatagagttaaactttctttagattgagcagtctggaaacactgtttttgtagaatatgtgaaaggatatatgggtgtgcattgaggcctatggtgaaaaagggaataccttcagagaaaaactatagagaagctttctgagaaacagctttgtcatgtgtgcactyaactcacagagttaaatctttcttttaattgagcagtttggaaaccctgttttggtagaaactgcgaaaggatatttgggagtgcattgaggcctgtggtgaaaaaggaaatatcttcagataaaaact

SEQ ID NO: 567598 - DNA, 492 bp, Homo sapiens
gttagtgacgttttgcattcctctcacagagttaaaccttcctttttattgagcagtttggaaacagagtttttgtagaatatgccaagagatatttgggagagcattgaagcctatggtgacaagggaaatatcttcagataaaaactagaaagacggtttctgagaaactgctctgtgatctgtgcattcttctcatagagttaaactttctttagattgagcagtctggaaacactgtttttgtagaatatgtgaaaggatatatgggtgtgcattgaggcctatggtgaaaaagggaataccttcagagaaaaactatagagaagctttctgagaaacagctttgtcatgtgtgcacttawctcacagagttaaatctttcttttaattgagcagtttggaaaccctgttttggtagaaactgcgaaaggatatttgggagtgcattgaggcctgtggtgaaaaaggaaatatcttcagataaaaact

SEQ ID NO: 567599 - DNA, 532 bp, Homo sapiens
  misc_feature 1, 2, 3, 4, 5, 6, 7, 8, 9, 10, 11, 12, 13, 14, 15, 16, 17,18, 19: n = A,T,C or G
nnnnnnnnnnnnnnnnnnnatctgcaagtggatatttggagcgatttgaggcctatgatggaaaaggaaatatcttcacatacaaactagacagaagcattcacagaaactgctttgtgatgtgtgcgttcaaccgacagatttgaactttccttttgagagggaggttttgaaacagtctttttgtagtatctgcaagtggatatttgtagtgacwtggggcctcacatggaaaaggacataccttcacatacaaactagacagaagtattctcagaaactccattgtgatgtgtgcactcaactcacagagttgaaccttccttttgagagagcagttttgaaacagtctttttgtaatggctgcaggtggatatttggagcaattcgagtactatgatggaaaaggaaatatcttcacatacaaactaaacagaagcattctcagaaacttcttgtgatgtgtgcattcacctaacagagtggaaccgttcttttgatagagcagttttgaatcagtcttttggtagga

SEQ ID NO: 567600 - DNA, 532 bp, Homo sapiens
  misc_feature 1, 2, 3, 4, 5, 6, 7, 8, 9, 10, 11, 12, 13, 14, 15, 16, 17,18, 19: n = A,T,C or G
nnnnnnnnnnnnnnnnnnnatctgcaagtggatatttggagcgatttgaggcctatgatggaaaaggaaatatcttcacatacaaactagacagaagcattcacagaaactgctttgtgatgtgtgcgttcaaccgacagatttgaactttccttttgagagggaggttttgaaacagtctttttgtagtatctgcaagtggatatttgtagtgacttggggcctcasatggaaaaggacataccttcacatacaaactagacagaagtattctcagaaactccattgtgatgtgtgcactcaactcacagagttgaaccttccttttgagagagcagttttgaaacagtctttttgtaatggctgcaggtggatatttggagcaattcgagtactatgatggaaaaggaaatatcttcacatacaaactaaacagaagcattctcagaaacttcttgtgatgtgtgcattcacctaacagagtggaaccgttcttttgatagagcagttttgaatcagtcttttggtagga

SEQ ID NO: 567601 - DNA, 532 bp, Homo sapiens
  misc_feature 1, 2, 3, 4, 5, 6, 7, 8, 9, 10, 11, 12, 13, 14, 15, 16, 17,18, 19: n = A,T,C or G
nnnnnnnnnnnnnnnnnnnatctgcaagtggatatttggagcgatttgaggcctatgatggaaaaggaaatatcttcacatacaaactagacagaagcattcacagaaactgctttgtgatgtgtgcgttcaaccgacagatttgaactttccttttgagagggaggttttgaaacagtctttttgtagtatctgcaagtggatatttgtagtgacttggggcctcacatggaaaaggamataccttcacatacaaactagacagaagtattctcagaaactccattgtgatgtgtgcactcaactcacagagttgaaccttccttttgagagagcagttttgaaacagtctttttgtaatggctgcaggtggatatttggagcaattcgagtactatgatggaaaaggaaatatcttcacatacaaactaaacagaagcattctcagaaacttcttgtgatgtgtgcattcacctaacagagtggaaccgttcttttgatagagcagttttgaatcagtcttttggtagga

SEQ ID NO: 567602 - DNA, 532 bp, Homo sapiens
  misc_feature 1, 2, 3, 4, 5, 6, 7, 8, 9, 10, 11, 12, 13, 14, 15, 16, 17,18, 19: n = A,T,C or G
nnnnnnnnnnnnnnnnnnnatctgcaagtggatatttggagcgatttgaggcctatgatggaaaaggaaatatcttcacatacaaactagacagaagcattcacagaaactgctttgtgatgtgtgcgttcaaccgacagatttgaactttccttttgagagggaggttttgaaacagtctttttgtagtatctgcaagtggatatttgtagtgacttggggcctcacatggaaaaggacataccttcacatacaaactagacagaagtattctcagaaactccattgtgatgtgtgcactcaactcacagagttgaaccttccttttgagagagcagttttgaaacagtctttttgtaatggctgcaggtggatatttggagcrattcgagtactatgatggaaaaggaaatatcttcacatacaaactaaacagaagcattctcagaaacttcttgtgatgtgtgcattcacctaacagagtggaaccgttcttttgatagagcagttttgaatcagtcttttggtagga

SEQ ID NO: 567603 - DNA, 480 bp, Homo sapiens
tgaaactttcctttgatagagcagttttgaaacactgcttttgtagaatctgcttgtggatattgggagctctttgaggaatacgttgtaaaasgcatatcttcacatacaaactagacagaagcattctcagaaactgctttgtgatgtgtgcattcaactcacagagttgaaccttccatttgagagagcagtgttgaaacagtctttttgtagtatctgcaagtggatatttggagcgatttgaggcctatgatggaaaaggaaatatcttcacatacaaactagacagaagcattctcagaaactgctttgtgatgtgtgcgttcaaccgacagatttgaactttccttttgagagggaggttttgaaacagtctttttgtagtatcggcaagtggatatttgtagtgacttggggcctcagatggaaaaggaaataccttcacatacaaactagacagaagtattctcagaaact

SEQ ID NO: 567604 - DNA, 413 bp, Homo sapiens
cgttgaacctttcttttgatagagcagtgttgaaacatactttttgtagaatctgcaagtgtccatttcgagttcttttgtgcgtatgttggaaaaagtgatatcttcacctgaaaaatagacagaagcattccagaaactgctttgcaacatgtgcattcaactcacagtgttgaaccttccttttgagagagcggttttgaaacagtctttttgtagtatctgcaagtggatatttgcagtgatttgaggccgaagaaggaaaaggaaayaccttcaaataaaaaactagacggtagcattttcagaaactgccttgtgatgtgtgcattcaactcacagagttgaaccttccttttgagagagaagttttgaaacagtctttttgtagtatttgcaagtggatatttgga

SEQ ID NO: 567605 - DNA, 413 bp, Homo sapiens
cgttgaacctttcttttgatagagcagtgttgaaacatactttttgtagaatctgcaagtgtccatttcgagttcttttgtgcgtatgttggaaaaagtgatatcttcacctgaaaaatagacagaagcattccagaaactgctttgcaacatgtgcattcaactcacagtgttgaaccttccttttgagagagcggttttgaaacagtctttttgtagtatctgcaagtggatatttgcagtgatttgaggccgaagaaggaaaaggaaacaccttcaaataaaaaactagacggwagcattttcagaaactgccttgtgatgtgtgcattcaactcacagagttgaaccttccttttgagagagaagttttgaaacagtctttttgtagtatttgcaagtggatatttgga

SEQ ID NO: 567606 - DNA, 579 bp, Homo sapiens
tcactctgtagcccaggctggagggtagtggtgagatcatagctcactgtaaccttgaactcctgggctcaagcgatcctcctccctcagcctccagagtagctgggataacaggtgcatgccactatgtctgactagtttttttttttagagatggaagtcttactatgttgcccaggctagtctcaaactcctggcctcaaatgatccttccacctcagtctctcaaagtgctaggattaggctaggtgactaggagccaccacgcctagcctaaattattattttaatcctattcagttctgttgaataaaatgytgataacattaattctttattccctaaagaaatattatttacacgcttttctaatatttctattgagtttttcccattcctttgacaaaaggatttcattgttgtggatttatcagcatgtcaccattttaatttttcataattatgttattctattttatcaaacttaatgtgaggtttgtctcacattaaaatacacatggtattttaaactcataaagtgtttatgaaaattaatatcattttttgataccccccacc

SEQ ID NO: 567607 - DNA, 579 bp, Homo sapiens
tcactctgtagcccaggctggagggtagtggtgagatcatagctcactgtaaccttgaactcctgggctcaagcgatcctcctccctcagcctccagagtagctgggataacaggtgcatgccactatgtctgactagtttttttttttagagatggaagtcttactatgttgcccaggctagtctcaaactcctggcctcaaatgatccttccacctcagtctctcaaagtgctaggattaggctaggtgactaggagccaccacgcctagcctaaattattattttaatcctattcagttctgttgaataaaatgttgataacattaattctttattccctaaagaaatattatktacacgcttttctaatatttctattgagtttttcccattcctttgacaaaaggatttcattgttgtggatttatcagcatgtcaccattttaatttttcataattatgttattctattttatcaaacttaatgtgaggtttgtctcacattaaaatacacatggtattttaaactcataaagtgtttatgaaaattaatatcattttttgataccccccacc

SEQ ID NO: 567608 - DNA, 556 bp, Homo sapiens
aaaacctatcagatagcagccaatttctcagcagtgatcctacaagctagaagggattggggtcctatctttagcctccttaaacaaaacgattatcagccaagaattttgtatccagtgaaactaagcttcataaatgaaggaaagatacaatctttttcagataaacaaatgctgagagaattcgccattaccaagccagcactacaagaactgctaaaaggaactctaaaygaaatagcatgatgaatagaatagtccctcacatatcaatattaacattgaatgtatataatggcctaaatgctccagttaaaagatacagaatggcagaatgaataagaactcaccaatcaaatatctgctgacttcaagagactcacctgacacatgaggactcacataaacttaaggtaaaggggtggaaaaagatattccaacaccaaaagcaatcaatcaggggtagctactcttatatcagacaaaacaaactttaaagcaacagcagttaaaaaagacaatgaaggacattatataatgataaaatgactagtcc

SEQ ID NO: 567609 - DNA, 490 bp, Homo sapiens
tttcaatttttccacatccttgtcaatrcttgttattatctttctttttgattatagtcgttctagtggatgtgaagtggtatctcatcgtggttttgaattgcagttccctgattactaatgatgtaccttttcatgtgtttttgccatttgcatatctttttcaatgaaatatatgcagatgataataatatctttaggaagaaaaaatgcatgttattggtaattcagataaaaagactgggagcaaggattgttaataggagattaacatttgactagagaaatccaaggaaaagatttaattctgtgtggttgttatagctttcgtgtattgaaaaaaagacattagaggaaacagggatgtgtgtataataatatatgcatacatgtacacacctcatatatacaaataaatgtacaattatatattgaaaacatatatatatatatacatataaaatatatatatattttctcttcactgcct

SEQ ID NO: 567610 - DNA, 490 bp, Homo sapiens
tttcaatttttccacatccttgtcaatgcttgttattatctttctttttgattatagtcgttctagtggatgtgaagtggtatctcatcgtggttttgaattgcakttccctgattactaatgatgtaccttttcatgtgtttttgccatttgcatatctttttcaatgaaatatatgcagatgataataatatctttaggaagaaaaaatgcatgttattggtaattcagataaaaagactgggagcaaggattgttaataggagattaacatttgactagagaaatccaaggaaaagatttaattctgtgtggttgttatagctttcgtgtattgaaaaaaagacattagaggaaacagggatgtgtgtataataatatatgcatacatgtacacacctcatatatacaaataaatgtacaattatatattgaaaacatatatatatatatacatataaaatatatatatattttctcttcactgcct

SEQ ID NO: 567611 - DNA, 490 bp, Homo sapiens
tttcaatttttccacatccttgtcaatgcttgttattatctttctttttgattatagtcgttctagtggatgtgaagtggtatctcatcgtggttttgaattgcagttccctgattactaatgatgtaccttttcatgtgtttttgscatttgcatatctttttcaatgaaatatatgcagatgataataatatctttaggaagaaaaaatgcatgttattggtaattcagataaaaagactgggagcaaggattgttaataggagattaacatttgactagagaaatccaaggaaaagatttaattctgtgtggttgttatagctttcgtgtattgaaaaaaagacattagaggaaacagggatgtgtgtataataatatatgcatacatgtacacacctcatatatacaaataaatgtacaattatatattgaaaacatatatatatatatacatataaaatatatatatattttctcttcactgcct

SEQ ID NO: 567612 - DNA, 490 bp, Homo sapiens
tttcaatttttccacatccttgtcaatgcttgttattatctttctttttgattatagtcgttctagtggatgtgaagtggtatctcatcgtggttttgaattgcagttccctgattactaatgatgtaccttttcatgtgtttttgccatttgcatatctttttcaatgaaatatatkcagatgataataatatctttaggaagaaaaaatgcatgttattggtaattcagataaaaagactgggagcaaggattgttaataggagattaacatttgactagagaaatccaaggaaaagatttaattctgtgtggttgttatagctttcgtgtattgaaaaaaagacattagaggaaacagggatgtgtgtataataatatatgcatacatgtacacacctcatatatacaaataaatgtacaattatatattgaaaacatatatatatatatacatataaaatatatatatattttctcttcactgcct

SEQ ID NO: 567613 - DNA, 608 bp, Homo sapiens
aacaatatattcaacaacatgaaagtttatgctcagtaaatccttaaatctaagaataaaaatacaactattagtttattcaatttggagggagatcctctataaagatagggcaaacaaaataatcatagtcttaatttaagaaagactggatttagggcaagaatcatgagacaaatgaaagcactttaaaatactgargttatagttacattggaatgctgtgccaactttaaaaataatgagacaaatctttagattgttttagggaatcatctctaaaatctgtgtctatgattacacacacatacacattactgaaaactgtgtaatgcctgagagtattaaaaatgtataaactcacctataactacatacacatttatgcttgcaaatgcattgaaagttttaaaaaaaattatccaagaaacttatgacagtttctgggaatctggatgcctggtgagcaaggagaaaaatagacttattttctaataaatatccttttgtatcttctaaattttatgccacatggatagtttaactatttttatttctcataatatatttatatataaatgtgtgcctatatatcaataaatatcata

SEQ ID NO: 567614 - DNA, 535 bp, Homo sapiens
ttaaattattaataagttgcatctgttgcctaaaaatataatttgaaatcatatctgccaataatcaatgatttaacstaggctctagtttttaaaagtttctcttggctgccatgtagtgagtatcctttatgtcctggatatcatgctacacgaaccttttgtaattcttatccacagtaggagattagaaagaatcctgatttcttgcttcttatcaacaatgtagaactttcttctggttctttccttgtacaaggtaagcagtgtgaacctttgaaaggtcattatgaacctccagttaaccttccagcaactgtcctagcctttcaattttatgttattatgtaaacaataaaacaatgaagattaatttattttaataataaagaacttcattgacaacctgcttatggttagacactatgtcaattgctgaagacaaaaatgaagctcacatcacttgtgaggctgcctttgtctctgaggaagcagaatgagtaagtaaataaatacaatacagtgagctaacaac

SEQ ID NO: 567615 - DNA, 600 bp, Homo sapiens
actaagagggtagatcttaggtattctcaccagactcacaaatacgaaaaagatagctatttaaggtgatggatatatcaattagcttgattttgataatcattttctgtgtatacacatccaaaaatgtcatgttatacactctgaacttatacaataatkttcaattatatgttgctaaaggtttgggtatagtttgaccctaccaaaaacatatgttggaatttgatccccagtgtggtacgttgggagatggggcccagtggtagatgtttggatcatagaggcagattccttatacatagattagtgcccttttctaggagtgagttgtcattctcataggactgaataagttactagaaagtgcatcgttataaaagtgagtttggcttcctctctcatctgccatgtgatctctttgcacgtgcccactccctttccactttctgctataagctgaagcagcaagaggccctcaccaaatacagatgcccaatcttgaaatctgaaccatcagaattgtgtgccaaatacatatattttatttataaattacccagtctctggtgtactgttatagcaacataaaaaagatga

SEQ ID NO: 567616 - DNA, 600 bp, Homo sapiens
actaagagggtagatcttaggtattctcaccagactcacaaatacgaaaaagatagctatttaaggtgatggatatatcaattagcttgattttgataatcattttctgtgtatacacatccaaaaatgtcatgttatacactctgaacttatacaataatgttcaattatatgttgctaaaggtttgggtatagtttgaccctaccaaaaacatatgttggaatttgatccccagtgtggtacgttgggagatggggcccagtggtagatgtttggatcatagaggcagattccttatacatagattagtgcccttttctaggagtgagttgtcattctcataggactgaataagttactagaaagtgcatcgttataaaagtgagtttggcttcctctctcatctgccatgtgatctctttgcacrtgcccactccctttccactttctgctataagctgaagcagcaagaggccctcaccaaatacagatgcccaatcttgaaatctgaaccatcagaattgtgtgccaaatacatatattttatttataaattacccagtctctggtgtactgttatagcaacataaaaaagatga

SEQ ID NO: 567617 - DNA, 421 bp, Homo sapiens
agcaaatgacttatttccagaataagcaactctctgaactcagtagtaagaaaacaatcaaattagaaatcaggcaaaagatttraaaagatatttcatggaagataaaaggatggcaattaattacatgactagatctcaatattattagtcattagggaagtgcaaagtaaagccatgaggagatactactgctcacatattagactggctagaataacatactggtaacattgtaccacatgctggagagaaggcagagaaaatgcatctctcatacattgccaagtgggaaggttaaatggcatagccactgtggaaaactgcttagtagttttcttataaaattaaatgtacacttcccatatggcccagcaattgcctgggtattcactggagaaatgaaaacttatgttcacac

SEQ ID NO: 567618 - DNA, 421 bp, Homo sapiens
agcaaatgacttatttccagaataagcaactctctgaactcagtagtaagaaaacaatcaaattagaaatcaggcaaaagatttaaaaagatatttcatggaagataaaaggatggcaattaattacatgactagatctcaatattattagtcattagggaagtgcaaagtaaagccatgaggagatactactgctcacatattagactggctagaataacatactggtaacattgtaccacatgctggagagaagkcagagaaaatgcatctctcatacattgccaagtgggaaggttaaatggcatagccactgtggaaaactgcttagtagttttcttataaaattaaatgtacacttcccatatggcccagcaattgcctgggtattcactggagaaatgaaaacttatgttcacac

SEQ ID NO: 567619 - DNA, 514 bp, Homo sapiens
ctagaaatgccctgagtaccaatagaggaatgaatgcccagctcttttcatttgttgttttgtttttctttaaaattgcatttttaaagaggtaatacatacatattgtgcaaaatttataaggtataaaacagtatatggcataaaagtcaacgtccctcctaccccagcccagctaccagcttctctcctctgtgataactgctgatttcttttgcatctttccagagaaaggtagatttaccccctcttccctacctttttttttcttttacctaaatggtagcattctaaacccattattctgtctcctagagatcattagatactggtatatgtacagatgtgtctcattcttctcctttttccccctccttctcctcctctgcctacttcctttcctttctccacctcttcttctccttttctttcccttgtaaagatatatttattaattcatgtaaagggggttcagtggtttgartgtgtgtgtccatccaaaattcatgttgga

SEQ ID NO: 567620 - DNA, 557 bp, Homo sapiens
attgcttttcagatgggtaattcacaaatattttctcccattctgtgggttttctcttcactttgtttccttcactttaaaaaagctttctgacytgctgtaattccatttgttcatgtttgctttggttgtctgtgcttatggggcattatttaagaaatttttgctcaaaccatgccctaaagggtttccccagtgttttcttgtaaaattttgatagtttgaggtgttaggtttaagtttttaatttattttaatttgatttttgtatgtggcaagaaatagggttctagtttcactcttctgcctatggcttgccagttttcccagccctatttattacagaaactgtcttattttttcttgtatgttatcaacacttttgttcaaaataagtttagtttagctgtatgagtttgtttctaagttctctatttcattccatttgtctttgtctttgtattctagtgtcatgctgttttaattactataacttgatagtataatttaaaaccaggtaatgggattcctccagttttggtttatatactcagaat

SEQ ID NO: 567621 - DNA, 557 bp, Homo sapiens
attgcttttcagatgggtaattcacaaatattttctcccattctgtgggttttctcttcactttgtttccttcactttaaaaaagctttctgacttgctgtaattccatttgtycatgtttgctttggttgtctgtgcttatggggcattatttaagaaatttttgctcaaaccatgccctaaagggtttccccagtgttttcttgtaaaattttgatagtttgaggtgttaggtttaagtttttaatttattttaatttgatttttgtatgtggcaagaaatagggttctagtttcactcttctgcctatggcttgccagttttcccagccctatttattacagaaactgtcttattttttcttgtatgttatcaacacttttgttcaaaataagtttagtttagctgtatgagtttgtttctaagttctctatttcattccatttgtctttgtctttgtattctagtgtcatgctgttttaattactataacttgatagtataatttaaaaccaggtaatgggattcctccagttttggtttatatactcagaat

SEQ ID NO: 567622 - DNA, 557 bp, Homo sapiens
attgcttttcagatgggtaattcacaaatattttctcccattctgtgggttttctcttcactttgtttccttcactttaaaaaagctttctgacttgctgtaattccatttgttcatgtttgctttggttgtctgtgcttatggggcattatttaagaaatttttgctcaaaccatgccctaaagggtttccccagtgttttcttgtaaaattttgatagtttgaggtgttaggtttaagtttttaatttattttaatttgatttttgtatgtggcaagaaatagggttcyagtttcactcttctgcctatggcttgccagttttcccagccctatttattacagaaactgtcttattttttcttgtatgttatcaacacttttgttcaaaataagtttagtttagctgtatgagtttgtttctaagttctctatttcattccatttgtctttgtctttgtattctagtgtcatgctgttttaattactataacttgatagtataatttaaaaccaggtaatgggattcctccagttttggtttatatactcagaat

SEQ ID NO: 567623 - DNA, 557 bp, Homo sapiens
attgcttttcagatgggtaattcacaaatattttctcccattctgtgggttttctcttcactttgtttccttcactttaaaaaagctttctgacttgctgtaattccatttgttcatgtttgctttggttgtctgtgcttatggggcattatttaagaaatttttgctcaaaccatgccctaaagggtttccccagtgttttcttgtaaaattttgatagtttgaggtgttaggtttaagtttttaatttattttaatttgatttttgtatgtggcaagaaatagggttctagtttcactcttctgcctatggcttgccagttttcccagccctatttattacagaaactgtcttattttttsttgtatgttatcaacacttttgttcaaaataagtttagtttagctgtatgagtttgtttctaagttctctatttcattccatttgtctttgtctttgtattctagtgtcatgctgttttaattactataacttgatagtataatttaaaaccaggtaatgggattcctccagttttggtttatatactcagaat

SEQ ID NO: 567624 - DNA, 351 bp, Homo sapiens
gcacttctgggaaggcccctggaagtttagagtcatggcaaaagttgaagcagaatcttgcacatcacagggcaaaaagcaggagcaraaaacagaggggcgagttgttacacacttttaaataaccaggtcttatgggaactcactcactatcatgaagatagtaccaagtgggatggtgctaagccatttatgagtaatccaccccaatggttaaatcacctggcccacctccaacatggagaattacatttaaatatgagatttgggaggggacacacgttcaaaccctatcagaggagtctttatgtttttccaaatataagattacatcactggcaaaaacaataa

SEQ ID NO: 567625 - DNA, 351 bp, Homo sapiens
gcacttctgggaaggcccctggaagtttagagtcatggcaaaagttgaagcagaatcttgcacatcacagggcaaaaagcaggagcaaaaaacagaggggcgagttgttacacacttttaaataaccaggtcttatgggaactcactcactatcatgaagatagtaccaagtgggatggtgctaagccatttatgagtaatccaccccaatggttaaatcacctggcccacctccaacatggagaattacatttaaatatgagatttgggaggggacrcacgttcaaaccctatcagaggagtctttatgtttttccaaatataagattacatcactggcaaaaacaataa

SEQ ID NO: 567626 - DNA, 351 bp, Homo sapiens
gcacttctgggaaggcccctggaagtttagagtcatggcaaaagttgaagcagaatcttgcacatcacagggcaaaaagcaggagcaaaaaacagaggggcgagttgttacacacttttaaataaccaggtcttatgggaactcactcactatcatgaagatagtaccaagtgggatggtgctaagccatttatgagtaatccaccccaatggttaaatcacctggcccacctccaacatggagaattacatttaaatatgagatttgggaggggacacacrttcaaaccctatcagaggagtctttatgtttttccaaatataagattacatcactggcaaaaacaataa

SEQ ID NO: 567627 - DNA, 519 bp, Homo sapiens
aaatggtgttaagaatgaatatttacatggaaaacaatacagttggacccttactttacaccatataaaaaacttaatttaaaatggactaaacatctaattgtaagagctaaaactataaaacccttagaagaaacataggaaaaatgtttcttaacatagaatctggcaataatttcttggatatgacagtgaaagcacagacaacaacaacaacaaaaatacataaaaagaacttcatcaaagtgacaagctgttatgtatctgaagatatgatcaatagattgaaaatacaattcacrgagggaaagtaaatattcacacattatgtatttgataagtaattaatatccaggctatataaagacctcagcaacaacaacaacaaaacaatcaaatttaaacatgagcaaaggttttagaatacacatttctctaacgaagatatgcaaatgaccagcaagcacaggataaggtgctcagcatcactaatcgtgagaaaaatgtaaatccaaacca

SEQ ID NO: 567628 - DNA, 564 bp, Homo sapiens
taattggttttaaagatttaagtcagaaatgttagtgattttggcatgagagagaaatgtttttcccaagagtcaccagcccctccctcttccaacagatacttctaattacccctgacatttattccctctgggcccagagamcacctatgagtctttctctacccagcgtattagacagttcttaagaattaactggagttgacccgtggtatgagacctacacatcatgataattcatggcccctttttgaatgataactttacatcaatgaatctaagttagaaactggagaaataagtccagactaggatgaaaggaacaaacctggtggcacagaacacagtgaaatgtgatgaaatcaaactgcagggctatagtcagtctccaggtgaaaactatttatgtgaacagaaatgtttcttttttatctctcacatgtgaataagaacatgaggtatctgtctttctgagcctggcttctttcacttaacatcatgatcttccagttccatccatgttgctgcaaatgacatgatttcattcttttttatagccaaata

SEQ ID NO: 567629 - DNA, 669 bp, Homo sapiens
tctaggcccctttatcctatcctcattttcttcatagcattaatatacaatatcagagtaagaaacctgatatatataaacatatatatttatatggctatatamatttatatatggctatataaatatatatggctatataaatatatacatatatatattttatattgatatatataatatatatcttatatggatatatatccacataaaatccatataaatccatatatatccatataaaaatatacataatatggatatttaaaatatatataatatagaaaaacaatatatattaattataagtaatattttaatattaataaccaataaacattactgatgtataaataatatatattatatactatataaaaatatatactatatctattattatctgatttttttgccccatccttatccttatcccagtatattgcagttgtgtgtgtatctatttatatctactttccatgaaggcagatgatcatgtccacccggtacaccacagtgtctccactgctaaacagcagctggcacatagcagagatcaacacatattttttgttttcactaattacttgccattcttctaacatcaaatgtattttcaaccttctaagcttttgataatactagtttttagattcaaaatactgtttt

SEQ ID NO: 567630 - DNA, 655 bp, Homo sapiens
aggatttgaccttcttatcagtacttgctgagtactacasggaacatgctgtttgccaaggtttacatgatatagagatggtttctacttccaacatgtttttatgtgctatgcttaggtggtccatcttagcagctatatttacagtgccagaagactttgaaggtatggcaaagagcttcagtgtggactaaagatacctaaaaatataaaaactaaacataatagccttcaaagtagaatttcacttggcaaaattcctgataaccttactatctggctactagacctaaaaaagaatcctaacctaatgataaatttctaaacctaggaattgagttatagttaatgtcaatggcaaatgccctcaaaatagtgacattctggaggcactttctgtttattagccataattaccatcttttaaatcccatttttcagcactagagataaaagtagggaagataaagtacactagactagaataaaattctggaaatcatcaacaacatcattttgtagaacagcagcccatattagttgacttgatgaacaaaattcgccctaagagtaaatgaaaaggtggcaggtctcttggttcctggtctacacttgctgcctttaaagcagaacaaatttgaacataaatttgtgg

SEQ ID NO: 567631 - DNA, 455 bp, Homo sapiens
gtctaagtggctttaagaagattaaaatcatatcaagtatcttttgtgccacaatgctatgaaattagaaatcaataagaggaacgaaacctagaaaatttgaaaacatttggaaatcaaaccacatgctcttgaataaccagtgagccaaagaagaaactaaaaagaatattaaaacattttgagacaaatgaaggtggaatgcagcaaaagtagtaataagaaaaaagttcatggcctacattaaaaaaagacagaaarccaggcacagttgtatgtgcccgtagtcccagctacctgcaggttgaagtgggaggatcacttgtgcccaggagtttacagctgtagtgtgctatgtgcccctatgaatagccattatgcttcagcctggacaacatagtaagatccccatgagacagacaaataaataaataaataaatgagacaaataataa

SEQ ID NO: 567632 - DNA, 594 bp, Homo sapiens
agaatattttgaaattagattttggtgatgattgcataattctgtgaataaacaccactgcattgtaaaattttaaaaggtgaattgtgcagtaagtaaatgggatctcaataaactagttgtttaaaaaggcacaggctctgcccctagagtttgtgattcaagtttgggcaacactgaggctaaggtgatgtgtaaactgtgggaatttttgtgagctattaattatgctattgtgtcttcagaagattgatgtcaaaatgcaaatatagtatctcagaagaggaagataataaacaccatcccacagatatgaattaaattatgaggttcctgtccatcctgtgggctctgagggactgaaagccagtcatgagcattttagtggagaaagtgggagaaatggctgacaatggggaggtaggaagtgaagagacctagaagggaaatttagcaggagaaagggactccaggartacataagtacctgaagctcactgtttgtggactaagcctggctatctctctcaacttaagcatcaggggaaataatgatagttaacatttattaagcacttattttgtagcaggaaa

SEQ ID NO: 567633 - DNA, 625 bp, Homo sapiens
attctgcctgccagataaacaaaataaacctttcctatgagtgactaatgcagtcaagcctgaaaaagtaatcacatgttccagaaaacttcagaaaaatgcatgaataattttaggagttttctgactaatgacaaagaagtggaagactttgcctagtttttcaggtgagtgggtggcattgaagkaataaattgaagaattaatacaaactccaggagggatccaagatggccagttagaagcagctgcagtcagcagcactcacagagagaagtgaaaacgggtgaattcagcaccttcaactgaagcatccaggttctcgcactgggactgactaggaaaacagctcaacccatagagaacgaaaaaaagcatacagggccaatgggtgccaaggagccaaaggaattcccacccaaccaaaggaagcagtgagtgattatgcaaccctgcccagaaaaccacacttctcccaaggatctttagaacccacaaatgaagagattcccttgtgagcccataccatcaggaccttaggtccaatacacagagttgtgtggagtcttggcagacagtcactcaggcacacacagagatccaagaggtttttttgtttgtttgt

SEQ ID NO: 567634 - DNA, 625 bp, Homo sapiens
attctgcctgccagataaacaaaataaacctttcctatgagtgactaatgcagtcaagcctgaaaaagtaatcacatgttccagaaaacttcagaaaaatgcatgaataattttaggagttttctgactaatgacaaagaagtggaagactttgcctagtttttcaggtgagtgggtggcattgaagtaataaattgaagaattaatacaaactccaggagggatccaagatggccarttagaagcagctgcagtcagcagcactcacagagagaagtgaaaacgggtgaattcagcaccttcaactgaagcatccaggttctcgcactgggactgactaggaaaacagctcaacccatagagaacgaaaaaaagcatacagggccaatgggtgccaaggagccaaaggaattcccacccaaccaaaggaagcagtgagtgattatgcaaccctgcccagaaaaccacacttctcccaaggatctttagaacccacaaatgaagagattcccttgtgagcccataccatcaggaccttaggtccaatacacagagttgtgtggagtcttggcagacagtcactcaggcacacacagagatccaagaggtttttttgtttgtttgt

SEQ ID NO: 567635 - DNA, 519 bp, Homo sapiens
caggtgtctggtgagggtctgattcctggtttgcagatgaccttcttcttgctgtastctcatatggaggagagaagaaagagagagagaattagggtggggtagggagagggagaaagagaaacagagagagagagagagagatgctctgatgtctcgtcttacaagggccctaattccatcctgaggctccaccttcatgacctaattaattcccaaaggccccacctcctaacggcatcaccttatgggttagggttttgacatataacttctttttgttggtagggggaacccaaacatgcagtctgtaacatatattgtgtttatgtttaaattttcatgtttaaattttgggaaattaaatttattaatcttttcctttgagatttttcacagaaaaattacatattttggcctttccatgtaagtttcaaatgaaaagaactggatttgtgaggaattattttattactggacagagctgtgttctgttttgtcaataagaatgctcgtcag

SEQ ID NO: 567636 - DNA, 519 bp, Homo sapiens
caggtgtctggtgagggtctgattcctggtttgcagatgaccttcttcttgctgtagtctcatatggaggagagaagaaagagagagagaattagggtggggtagggagagggagaaagagaaacagagagagagagagagagatgctctgatgtctcgtcttacaagggccctaattccatcctgaggctccaccttcatgacctaattaattcccaaaggccccacctcctaacggcatcaccttatgggttagggttttgacatataacttctttttgttggtagggggaacccaaacatgcagtctgtaacatatattgygtttatgtttaaattttcatgtttaaattttgggaaattaaatttattaatcttttcctttgagatttttcacagaaaaattacatattttggcctttccatgtaagtttcaaatgaaaagaactggatttgtgaggaattattttattactggacagagctgtgttctgttttgtcaataagaatgctcgtcag

SEQ ID NO: 567637 - DNA, 420 bp, Homo sapiens
gttgttgggagcagagtttgtcataaccaatccttgcttcatttctcttgctgcacttgacccttcatcccctacagtcaaaaggtaggaaacatcttacacctccatgtgccctgcagcttcctgtcactctgttctattcatggtgtttcttttgccaggaaagtgactcccttcccttttcttcctgacaattacagcctcatcctgcagcattgaagtkcttccttacacagcctcttacatgggatattctcttttgtactagttaatgtacccaatatgtatgttcattattgcattggtgataattcttatttttgtgtttgtatttgcctttgttttcagccctgtttcccttgttagaatgttggcatattttatgcctgatataagtgttaataaattttttatgaattc

SEQ ID NO: 567638 - DNA, 555 bp, Homo sapiens
tttcaatagggaagtcacacaatcagttttaaatttttcaggggcaatagagttcattacatttcccttcccaattatctcccagacattatataaggtgctagaaatatagtggtgactaagacatggtctgttgcagcatggtgataatagtagagtaataggtacagacccccaacaggtaattgaaatatcatatgataagagttttagacaacatgttaacttattctgcatcacaagccacyctcaaatttagtgttttaagtaatcatttactaactcataattctgtgggttgcctgtttggttctcgtgacttggatggacctaaataacttcttcagaagtcccttatatatttagttaggaaagtggctggcaactcagtgtcctagcagacctcactcagatgtctagtggttggcaggggcatgtagggaaacagtggtggctggctaagttttactcatcaaacaggctggccataacttctttacacagaggataaagagatcaatggttaggaaaagatcgattttcaactcacaatca

SEQ ID NO: 567639 - DNA, 555 bp, Homo sapiens
tttcaatagggaagtcacacaatcagttttaaatttttcaggggcaatagagttcattacatttcccttcccaattatctcccagacattatataaggtgctagaaatatagtggtgactaagacatggtctgttgcagcatggtgataatagtagagtaataggtacagacccccaacaggtaattgaaatatcatatgataagagttttagacaacatgttaacttattctgcatcacaagccactctcaaatttagtgttttaagtaatcatttactaactcayaattctgtgggttgcctgtttggttctcgtgacttggatggacctaaataacttcttcagaagtcccttatatatttagttaggaaagtggctggcaactcagtgtcctagcagacctcactcagatgtctagtggttggcaggggcatgtagggaaacagtggtggctggctaagttttactcatcaaacaggctggccataacttctttacacagaggataaagagatcaatggttaggaaaagatcgattttcaactcacaatca

SEQ ID NO: 567640 - DNA, 555 bp, Homo sapiens
tttcaatagggaagtcacacaatcagttttaaatttttcaggggcaatagagttcattacatttcccttcccaattatctcccagacattatataaggtgctagaaatatagtggtgactaagacatggtctgttgcagcatggtgataatagtagagtaataggtacagacccccaacaggtaattgaaatatcatatgataagagttttagacaacatgttaacttattctgcatcacaagccactctcaaatttagtgttttaagtaatcatttactaactcataattctgtgggttgcctgtttggttctcgtgacttggatggacckaaataacttcttcagaagtcccttatatatttagttaggaaagtggctggcaactcagtgtcctagcagacctcactcagatgtctagtggttggcaggggcatgtagggaaacagtggtggctggctaagttttactcatcaaacaggctggccataacttctttacacagaggataaagagatcaatggttaggaaaagatcgattttcaactcacaatca

SEQ ID NO: 567641 - DNA, 616 bp, Homo sapiens
acatgttaacttattctgcatcacaagccactctcaaatttagtgttttaagtaatcatttactaactcataattctgtgggttgcctgtttggttctcgtgacttggatggacctaaataacttcttcagaagtcccttatatatttagttaggaragtggctggcaactcagtgtcctagcagacctcactcagatgtctagtggttggcaggggcatgtagggaaacagtggtggctggctaagttttactcatcaaacaggctggccataacttctttacacagaggataaagagatcaatggttaggaaaagatcgattttcaactcacaatcactgctaagtcaagtttgctaatgtcccatttgctgaagtaagtcacatgctaatacaaataagtcacattcccaagtcactgtaggagtgaactaccaaggatcatggctactgcggaagggattttagcagccattctgcaaacaatctggcctaatttccctctgcccacaaaaaatttatatccctcccacatcacaaatatagtcatgctctgcataatggcactttggtcaacgacagactacatttacgacagtggtcccacaagattata

SEQ ID NO: 567642 - DNA, 532 bp, Homo sapiens
ataagcacaaaatttttctctttcaaatttgyattttgcatattgagacatccagagttcatatgaagatagggtattactttgtgtattatcaaatgaattaaaatgtaaatcttagctgacaaagtctaataacagcgctgcaattaacatagttcatttcaagggttgttttttcagtttagaaactgacagctgtagaagtaaactgtgctcttcttttcagaatccccattatgtagcataatgtttttcactgtggtcaaaaaatacataatatgagatctgccctcttaaatttttaagtgtaagttacagtattgttaattataagcataagggtgtacagcagatctctagaactttctcaccttataaaactaaaactttacacccatcgaacagcaactcctcatttgtccctccccacaacccctgacaaacgaccattctgctctctgtttctgtaagtttggctactttagatatctcatgtaagcagaatcatgcagtatttgtccttttgtgattg

SEQ ID NO: 567643 - DNA, 532 bp, Homo sapiens
ataagcacaaaatttttctctttcaaatttgtattttgcatattgagacatccagagttcatatgaagatagkgtattactttgtgtattatcaaatgaattaaaatgtaaatcttagctgacaaagtctaataacagcgctgcaattaacatagttcatttcaagggttgttttttcagtttagaaactgacagctgtagaagtaaactgtgctcttcttttcagaatccccattatgtagcataatgtttttcactgtggtcaaaaaatacataatatgagatctgccctcttaaatttttaagtgtaagttacagtattgttaattataagcataagggtgtacagcagatctctagaactttctcaccttataaaactaaaactttacacccatcgaacagcaactcctcatttgtccctccccacaacccctgacaaacgaccattctgctctctgtttctgtaagtttggctactttagatatctcatgtaagcagaatcatgcagtatttgtccttttgtgattg

SEQ ID NO: 567644 - DNA, 505 bp, Homo sapiens
ctcctcatttgtccctccccacaacccctgacaaacgaccattctgctctctgtttctgtaagtttggctactttagatatctcatgtaagcagaatcatgcagtatttgtccttttgtgattggcttattttacttagctaatgtcgtaccagttcattcatgttgttgcacagagcagggcttctttttgaatatttaataatattcatatatattatactatatcatattatattatattatattatattatattatattatatatcacaatctctatccattcattcattgatggatatttagtttgcttcaacatcttggctaytgtgaatggagctgcagtgaacacgggagggagaatatctatttgagatcctgattttaatttttttggataagtaacccaaagtaggattggtggatcatatggtaattctatttttatttatttattttttttgagacagagtctcacactctcgcccaagctggagtgcaatg

SEQ ID NO: 567645 - DNA, 505 bp, Homo sapiens
ctcctcatttgtccctccccacaacccctgacaaacgaccattctgctctctgtttctgtaagtttggctactttagatatctcatgtaagcagaatcatgcagtatttgtccttttgtgattggcttattttacttagctaatgtcgtaccagttcattcatgttgttgcacagagcagggcttctttttgaatatttaataatattcatatatattatactatatcatattatattatattatattatattatattatattatatatcacaatctctatccattcattcattgatggatatttagtttgcttcaacatcttggctattgtgaatggagctgcagtgaacacgggagggagaatatctatttgagatcctgattttaatttttttggataagtamcccaaagtaggattggtggatcatatggtaattctatttttatttatttattttttttgagacagagtctcacactctcgcccaagctggagtgcaatg

SEQ ID NO: 567646 - DNA, 566 bp, Homo sapiens
ctgatacaatatcagtcatgtcacccctctgctcacccttttcaytgacttgccacatgactcagagtaaaggccagcatccttacaatggcctgcaaggccctatgtgacttgggccctttcacctccctgacctcactgttcaccactttcctggggtttggaatgttccagctgtactcacctccttgatgttcctttgatactctaggtatgctcccagctcagggatgacagtgtactcactatttttagtccctagaatgtatttcctccaactatctacatggttcttctcttcactttcttcagatctttattcaaatgtaccttcaatggctactctatgtaatacatcagaatcccaccccaacacttaaaatccttttttcctacattatattgactcttcagcaatttgataacatgtcatacattttacttgttttgctgttccttctttcctcactggaacgtaggttccatcaaagcaggcatttttgcctattttattcacttttacattccccaaatctaaaacagtacttggaacaaagtaaatactg

SEQ ID NO: 567647 - DNA, 551 bp, Homo sapiens
gaggcttggctgcagccccttccctccccagcccaggtagaccctcttcccctgtgctcccctgatgatctgtgggttgctctccctgggacagcacagcacatgcttcttcttccaaagggaacactctttgagggaaggaactgtgtcttgctgactgtcccgatctgtattgtccagcacagtgtggcacatggggcatccataaatattcactgaatgaattaatatatagttgcgattttataataatagcatgaggtccccatgcccaagaaagagtatrggaaacacgagaccacattaaaataccatggcaagtaagctccagagaagttatattgaaagagagtcagggtttaagatcgtctcacaggcccgttccgtgggacttgaagtttttgagagtttccctgaagggtaaatgcaaacctctgcttgagtttttattaagaatgtctgggccgggcgcagctggctcacgcctgtaatcccagcactttgggaggcctaggcgggcagatcaggaggtcagaatatcgagaacatcc

SEQ ID NO: 567648 - DNA, 566 bp, Homo sapiens
agcactctgtgtctagctcaaggtttgtgaacacactaatcagcaccctgtgtctagctcagggtttgtggatgcaccaatcggcactctgtatctagctaatctggtggggacttggagaatctttatgtctagttaagggactgtgaatgmaccaatcagcactctgtatctagcttaaggtttgtaaatgcaccgatcagcactctgtgtctagctcagggtttgtaaatacaccaattgacactctgtatctagctaatccagtggggacatggagaacttttgtgtctagctcaggattgtaaatgcaccaatcagcgccctgtcaaaatggaccaatcagctctctgtaaaacagaccaatcggctctctgtaaaatggaccaatcagcaggatgtgggtggggacagataagagaataaaagcaggctgcctgagccagcagtggcaacttgctcaggtccccttccacactgtggaagctttgttctttcgctctttgcaataaatcttactactgctcactctttgggtccacactgcctttatgagctgtaacagt

SEQ ID NO: 567649 - DNA, 566 bp, Homo sapiens
agcactctgtgtctagctcaaggtttgtgaacacactaatcagcaccctgtgtctagctcagggtttgtggatgcaccaatcggcactctgtatctagctaatctggtggggacttggagaatctttatgtctagttaagggactgtgaatgcaccaatcagcactctgtatctagcttaaggtttgtaaatgcaccgatcagcactctgtgtctagctcagggtttgtaaatacaccaattgacactctgtatctagctaatcyagtggggacatggagaacttttgtgtctagctcaggattgtaaatgcaccaatcagcgccctgtcaaaatggaccaatcagctctctgtaaaacagaccaatcggctctctgtaaaatggaccaatcagcaggatgtgggtggggacagataagagaataaaagcaggctgcctgagccagcagtggcaacttgctcaggtccccttccacactgtggaagctttgttctttcgctctttgcaataaatcttactactgctcactctttgggtccacactgcctttatgagctgtaacagt

SEQ ID NO: 567650 - DNA, 566 bp, Homo sapiens
agcactctgtgtctagctcaaggtttgtgaacacactaatcagcaccctgtgtctagctcagggtttgtggatgcaccaatcggcactctgtatctagctaatctggtggggacttggagaatctttatgtctagttaagggactgtgaatgcaccaatcagcactctgtatctagcttaaggtttgtaaatgcaccgatcagcactctgtgtctagctcagggtttgtaaatacaccaattgacactctgtatctagctaatccagtggggacatggagaacttttgtgtctagctcaggattgtaaatgcaccaatcagcgccctgtcaaaakggaccaatcagctctctgtaaaacagaccaatcggctctctgtaaaatggaccaatcagcaggatgtgggtggggacagataagagaataaaagcaggctgcctgagccagcagtggcaacttgctcaggtccccttccacactgtggaagctttgttctttcgctctttgcaataaatcttactactgctcactctttgggtccacactgcctttatgagctgtaacagt

SEQ ID NO: 567651 - DNA, 566 bp, Homo sapiens
agcactctgtgtctagctcaaggtttgtgaacacactaatcagcaccctgtgtctagctcagggtttgtggatgcaccaatcggcactctgtatctagctaatctggtggggacttggagaatctttatgtctagttaagggactgtgaatgcaccaatcagcactctgtatctagcttaaggtttgtaaatgcaccgatcagcactctgtgtctagctcagggtttgtaaatacaccaattgacactctgtatctagctaatccagtggggacatggagaacttttgtgtctagctcaggattgtaaatgcaccaatcagcgccctgtcaaaatggaccaatcagctctctgtaaaacagaccaatcggctctctgtaaaatggaccaatcagcaggatgtgggtggggacagataagagaataaaagcaggctgcctgagccagcagtggcaacttgctcaggtccccttccacactgtggaagctttgttctttcgctctttgcaataartcttactactgctcactctttgggtccacactgcctttatgagctgtaacagt

SEQ ID NO: 567652 - DNA, 434 bp, Homo sapiens
ttctttcgctctttgcaataaatcttactactgctcactctttgggtccacactgcctttatgagctgtaacagtgactgcgaaggtttgcagcttcactcctgaagccagcgagaccacaaacccacygggaggaatgaatgaccccagacgcaccgccttaagagctataacactcaccgcaaaggtttgcagcttcactcctgagccagcaaaaccacaaacccaccataaagaagaaactccaaacacatccaaacatcagaaggaacaaactctggacatgccacctttaagaactgtaacactcactgcgagagtccgcggcttcattcttgaagtcagtgagaccaagaacccaccaattctggacacagaaggatcacgcagcaatatttgttgttctgcagcctccactggtgatacccaggaaa

SEQ ID NO: 567653 - DNA, 434 bp, Homo sapiens
ttctttcgctctttgcaataaatcttactactgctcactctttgggtccacactgcctttatgagctgtaacagtgactgcgaaggtttgcagcttcactcctgaagccagcgagaccacaaacccaccgggaggaatgaatgaccccagacgcaccgccttaagagctataacactcaccgcaaaggtttgcagcttcactcctgagccagcaaaaccacaaacccaccataaagaagaaactccaaacacatmcaaacatcagaaggaacaaactctggacatgccacctttaagaactgtaacactcactgcgagagtccgcggcttcattcttgaagtcagtgagaccaagaacccaccaattctggacacagaaggatcacgcagcaatatttgttgttctgcagcctccactggtgatacccaggaaa

SEQ ID NO: 567654 - DNA, 434 bp, Homo sapiens
ttctttcgctctttgcaataaatcttactactgctcactctttgggtccacactgcctttatgagctgtaacagtgactgcgaaggtttgcagcttcactcctgaagccagcgagaccacaaacccaccgggaggaatgaatgaccccagacgcaccgccttaagagctataacactcaccgcaaaggtttgcagcttcactcctgagccagcaaaaccacaaacccaccataaagaagaaactccaaacacatccaaacatcagaaggaacaaactctggacatgccacctttaagaactgtaacactcacygcgagagtccgcggcttcattcttgaagtcagtgagaccaagaacccaccaattctggacacagaaggatcacgcagcaatatttgttgttctgcagcctccactggtgatacccaggaaa

SEQ ID NO: 567655 - DNA, 621 bp, Homo sapiens
tatatctaggaacaagattctggggtcatcagcattgttctgttcaactccaccaattgcatttgtgaatttcttatgaatattctttgcacacttattatcgggtggtttgtgttttattattgacttgtatctgtcctatttactctggatgttagttctgttgtaaatattctctcttagtctgtatataggcccttttattttacaaagtttaaagtttttatgcagtcaaatctgtaattctttttctttatggtttctggttttatatcttgcttagaaagtccttctctatctcaagattgtaaaatactctcttatgtcttgtctcctttttttttttttttttttttagacaggatctcactctgtttccaggctggagtacaggatatgatcatggctaactgtagcctcaacctcctaagcccaagcgatcctcccctctcagcctctttagtaggtgggactacaggcatgcaccgtcatrcctggctaattttttaattttttgtagggacagggtcttgctatgatgcccagatggtctcgaactcctgtgcgcaagcgatcctcccgcctcagcctcccaaagtgctgggattacaggtgtgagcc

SEQ ID NO: 567656 - DNA, 424 bp, Homo sapiens
agtattaattcaaatctaaagtatataaaaagataaacatcatgtgtaggattggtttataactagaacattattatttaaacctaagaaagtcagtcaatacaagtcaccatactcatagcatataatgaaaattttaagtaaaattttaagatctgaatatatgcaaaaggagtagttkctgtaatataacattcattcataatttaaaaagtaaagcattgtagataaggaattaatctagcaaacaccatgttttctgttttttacctgccttgctatttattttatattatccttttgattaatttataaactttatagtttgttttgtacacagtcatggtatcacagttaaaaagaaaacatggatgtgcttgattttatctggcatttgtttctaaaaaaaagtttataaaattat

SEQ ID NO: 567657 - DNA, 416 bp, Homo sapiens
aaggagagagaagaaaagcaacagagaatccagaaaattttaggccaaagaagtcaaagttgctattaaaagccctcagcgaccaaaagctcttcatgaaacaggtttgctaatatttaatttgaaactgtttctgttgctatgataccattcttaccttttcatcttcttcagtaacatttaataaaccaatttcttgggttgaaaggtgtgtgtgtgtgtgtgtgtgtgtgtgtgtgtgygcgcgcgcgcgcatgcatggtgttgttttgtttcacattattttttctcaaaagcaagaagtgggcttattttcaagtccagactgacataattcagggcaaaaattgcatatataagatgccaaaaaggcccactaaacaaggaagtaaatgtttcaaccatgagaatatgaa

SEQ ID NO: 567658 - DNA, 600 bp, Homo sapiens
tttattttcatcaactgaagtgtaataaatattaccttctgaattttgtcataatatttttcatttctgttgccttggttttgctctatggtgacttatacgttgccttgataggtggtgctctattacactgaaatgtatttaataactatttcctgataaggtggatatgtgtgggttggtgggtgaggtattttttggccttttaggatgctaattattattgtcaaattatttttcctttgctatccagttgttaagggaaactgcccccttcttttctgcctttccttaacagatgccatgcttttcagattgctacagtaaactttctgagaamctttcctgtggttagtgctctgatatgccaggatgtgttttcagtatttgtaaacttttgtttacaaaaatatcttctttttctagcagtgcttaaggtaaaatttatacctatgctggaggcagtggctcacgcctgtaatcctagcactttgggaggctgtgacaggtggattgtctgagctcagaagttcgagagtagcctgggcaaaatggtgaaaccccatatctaccaaaatacaaaaaaattagctgggagtg

SEQ ID NO: 567659 - DNA, 545 bp, Homo sapiens
gggtaggaatgtaggttggctctgccacattgcggtacaactaaataatgtctagtaaagtgaaaaataccggtaagccacagtttaaaattgtcatttagctatttatctataaaataatatttcaaatgttttgtaaaaaataagatcttgaaaaacattagaggtarcattttgtgtaacagccaaacagaaaattaaatgttctcaaataccatgtagcgaataagtaaattatgcattattcacatcacagcatattgaatagaagtttaaatgaatgaatcatcacatctatattggcactcactgctctcaaaatcatacctgcaaatttcacaataatgagataataaattgatgtaaagtttaatacataagtgcaaccatgtttgatattaattatcattactcaattataaactaaaattgtaacaatatgcatgagaatttagaaaacaaattaatcatagtggctatctctgtgagaaagaaaggtaaatgaaaataggcaggcataaaaaagtgagcaatatttcatatat

SEQ ID NO: 567660 - DNA, 492 bp, Homo sapiens
ttactgaatttggaaattgccctaaaattttaatttatgcatttttatacactgctgaatatttatgactttgtaaggtaaatataggagctctatgtgaccatcatgtgtaccccttttgaaggtacacttaccatgaagacaaactgatatgtcacccctaactaaggataaatgcacattcttttaattttacattcagtgtaagttttgttatggttaaagacagtgaacagagaaaatattccttattgatatagtattcrtagttcattcttactgtgaggtcttccctggcatttctatttcaagtactccaaagctatccttctctgtctctggcagttaacacaacccataattattttatttgatttcttttttttgctactaatatattgaaattttgccttattgtattttcagtttggcacaaaataattgctcaataagttcagatacacctccacaattctttatgtatagccttga

SEQ ID NO: 567661 - DNA, 530 bp, Homo sapiens
acagtggtttggatataacagacaatcaatgagcatttgaaccttatttacccttggttgcattctaggtatcttgcagcaaatttttccattaatcgatcgattttctgagcttcccctggaagacgaaatccttctagaaacatacgaagggctgaaacgaagtcttttcctgaaaagtcatgttggtccacatatgcatacatgacttctttgttaaatttatcattatctcccaggaactcacccacttgagtctaaagtaaaaacagagatagaaattgatattttctttcttttttttttttttgagacagagtcttgctctgttgcccaggctggggtgcagtggcacgatctcrgctcactgcaacctctgcccccaggttcaagcgattctcctgcctcggcctcccgagtagctgggattaaaggcgcctgctactgcgcccagctaattttttttgtattttcaatagagacagggtttcaccatcttggccaggctggtctcctgacctcaggtaatc

SEQ ID NO: 567662 - DNA, 453 bp, Homo sapiens; identical to SEQ ID NO: 162652

SEQ ID NO: 567663 - DNA, 401 bp, Homo sapiens
tggcaatagccacaaagcaagcaggaaacgggcccagtaccagcaaagctattgactttttttttttttcttagagatagggtctcactctattgcccaggctggaggtgcagtggtgccatcttagctcactgcagccttggcctcctgggctcaagygatcctcctgcctcagcctcccaagtagctgggaccacaggcacatgtcaccatgcccagctaattttttttttttttttttttgaggagtcttgccctgttgcctaggctggagtgcaatggcacattcttggctcactgcaacctccgtgagatggtttggctctgtgtccccgcccaaatctcatcttgaattgtactcccgtaatccccacgtgttgtgggaggaaccagtgggagac

SEQ ID NO: 567664 - DNA, 401 bp, Homo sapiens
tggcaatagccacaaagcaagcaggaaacgggcccagtaccagcaaagctattgactttttttttttttcttagagatagggtctcactctattgcccaggctggaggtgcagtggtgccatcttagctcactgcagccttggcctcctgggctcaagtgatcctcctgcctcagcctcccaagtagctgggaccacaggcacatgtcaccatgcccagctaattttttttttttttttttttgaggagtcttgccctgttgcctaggctggagtgcaatggcrcattcttggctcactgcaacctccgtgagatggtttggctctgtgtccccgcccaaatctcatcttgaattgtactcccgtaatccccacgtgttgtgggaggaaccagtgggagac

SEQ ID NO: 567665 - DNA, 390 bp, Homo sapiens
acaaagcaagcaggaaacgggcccagtaccagcaaagctattgactttttttttttttcttagagatagggtctcactctattgcccaggctggaggtgcagtggtgccatcttagctcactgcagccttggcctcctgggctcaagtgatcctcctgcctcagcctcccaagtagctgggaccacaggcacatgtcaccatgcccagctaattttttttttttttttttttgaggagtcttgccctgttgcctaggctggagtgcaatggcacattctyggctcactgcaacctccgtgagatggtttggctctgtgtccccgcccaaatctcatcttgaattgtactcccgtaatccccacgtgttgtgggaggaaccagtgggagac

SEQ ID NO: 567666 - DNA, 390 bp, Homo sapiens
acaaagcaagcaggaaacgggcccagtaccagcaaagctattgactttttttttttttcttagagatagggtctcactctattgcccaggctggaggtgcagtggtgccatcttagctcactgcagccttggcctcctgggctcaagtgatcctcctgcctcagcctcccaagtagctgggaccacaggcacatgtcaccatgcccagctaattttttttttttttttttttgaggagtcttgccctgttgcctaggctggagtgcaatggcacattcttggctcactgcaacctccgtgagatggtttggctctgtgtccccrcccaaatctcatcttgaattgtactcccgtaatccccacgtgttgtgggaggaaccagtgggagac

SEQ ID NO: 567667 - DNA, 589 bp, Homo sapiens
aaaagttaaagcatatacttagtggggtggggtggggggaagataatttatgtactaggaaaggaaattttttatatgcaaaacaaatttatagatttctcagtgacaagtttaatcctatagtcagtcaaggtaacatttatatgtggaggtaaaataaaaatattatcaaataagttaggattcagaagtatgccaccacattatctttctgagaagaaaacttctgaggcaatattctagccatatgaaaaatgaatcataatgagaccttggaaataataagaaacaatgataagcaatgaaattagtaaaatatttggttatatttaaatgaatgttgttaaagtgattttgaagactaaaacacattttaattaaaaattcttgaaatatatggcacattaagttgaaaatattaaaaatttatgtagaaataaaatttcagatgacttccrtaacatctgtgtggtgagagagggtggtagttaaagttaaaattctcatttcgtttgagaaaaattatagatagtttcattcttaatatttatagaggaaaagttttaaattgtaaaacattcaaagtaaa

SEQ ID NO: 567668 - DNA, 550 bp, Homo sapiens
gaatagtgaatgataaatagcattgacctcaacaagattgcctaggttcaacactcaactctgccatttacaagctgtgtaatcacagataaattaccaaacttctctgtgcttccgtcaaacagagatgataataataatatctatgtcataaaagtgttatggagattatatgagtgaatatttctaaagtacagagagcacttaataatacctagtaatccccatgtaggagtttattaataaactatataaatctagccttagtgttctaccatggatttagagttttttaaaaaggaccaaaaattaatccactggaagctttatttgaataaattaatgaattataacaccatgagaaattgattttccatagttttgatagtaacttctctggacctttgcataaatctctggatttgcatgcaagcaaatgtctaattctgaaagacagaaagacttgattctgtatccggtcttttaagaaagcttgagaaaattaccataacytctccaagtgatggttttctcacctgttaatcagaag

SEQ ID NO: 567669 - DNA, 551 bp, Homo sapiens
tcttgcttaagacaggccttggtgatcaaacatcacctaggaaatggtggaggatgargaacctgatcagatactaagaatgatcagatattgaggatgagggtttcttgctaaagtgacttagcaggattctttgctaaaactagattttataagatgtgcacagatgggcctaatagaaagtttagaagcctgattaaagtttggctaagcaaattatcttggtcaattgtgaaataatagaaccgactctttttttaatatataaacactgtcccaatacaatttgtcaaaacttcattaattacctttgatatagagaatcatctctatattagtttttcaaaaatacatgtgattttgctttgtgaacttcctattttgttccatttttctattaatctaccacgagtcaatattgttttagttattatattttttatcacgttgacattgtttgaaaacaatcttttcaccttgctttctttcttcagaataaccttgcctattattagctcctttcctttttctgctaattttagaatcgtcct

SEQ ID NO: 567670 - DNA, 551 bp, Homo sapiens
tcttgcttaagacaggccttggtgatcaaacatcacctaggaaatggtggaggatgaagaacctgatcagatactaagaatgatcagatattgaggatgagggtttcttgctaaagtgacttagcaggattctttgctaaaactagattttataagatgtgcacagatgggcctaatagaaagtttagaagcctgattaaagtttggctaagcaaattatcttggtcaattgtgaaataatagaaccgactctttttttaatatataaacactgtcccaatacaatttgtcaaaacttcattaattacctttgatatagagaatcatctctatattagtttttcaaaaatacatgtgattttgctttgtgracttcctattttgttccatttttctattaatctaccacgagtcaatattgttttagttattatattttttatcacgttgacattgtttgaaaacaatcttttcaccttgctttctttcttcagaataaccttgcctattattagctcctttcctttttctgctaattttagaatcgtcct

SEQ ID NO: 567671 - DNA, 654 bp, Homo sapiens
gtgttgggggagggacctggtgggaggtgattggatcatgggggcagattttcctcttgctgttcttgtaagagtgagtgagttttcaagagatttgatggtttaaatgggtgtagtactccccccctcacattttctctctctcctgccaccatgtgaagaaagtccttgcttccccttcaccttctgccataattggaagtttcctgaggcctcccagtcatgcttccttttaagcctgcagaattgtgtgtcaaaaattaaaccttttttattcataaattacccagtctcaagtagttcttcatagcagtgtgaacatggactaatacctaggaggaggaagaggcaaccagaagttatttgtgggaaaggagacaaaagtgactgagaacaaaactaagttcaggactacacggcagcagttggtgtagagttggatttggataaccagggaattaagtagattgtcaacgaactgctgctgaaaggactttagggagagtggttcctagggaagctggagagcataaacaaggactcatgaccakcctaggataagcctcttgccaggtctgttcatggatctgtacaatcttcaacaggaatagaggataggactttgaacatattatggccattttaatagcaagg

SEQ ID NO: 567672 - DNA, 652 bp, Homo sapiens
tttgccaaatataaagcatttggtggctattttttaattgcatgggttaattgcggatattttaattgcatgggctaatttgtggatatatagtgtgttttatttgtcttttaccaaatataaatcatttggctttatcaaatataaagcatttggctattttttaattgcatgggctaatttgtggatatgattaagcagaaaacagattgtctcaaatacctgcttgattgaccaagcttgtagctgttaccatttcttctctttcyatgaaacaagggaaatcacaaagaagaaaagaatatagacagaaattgcctcaccagaagcatgtattcagcaccaccctctgactaagatcttaagacttccaaggcaacccaaagtactgcctcacatggaaatgtcaggcaaaacagcttttgagattctctttgtaaggtgaacacctgcctgaaaggtgctgcccatttatctatcaacccaaagaaaagaggattatcctcagaaactttcatgagtataatgaaaataactctgaactctccttgggtaataatgaggcacagattttttttattattattattatactttaagttttagggtacatgtgcacaataatgtgcaggttagttacatatgtatacat

SEQ ID NO: 567673 - DNA, 584 bp, Homo sapiens
caggcagatttctaagatctttgattccagtccctggcttccagacagtacctgtggacccacccggggactgaggaaactcactaacctgatgaaaaagacaagcctggttggttttgttacctgctgattatagagtcctagggccttgagcaaacagaagcagtagccaggtagtggttacactgggctttgggtgagaccaagtgctgtgttggcttcagttctgacccagtgcagtctcagtggtagtggccacagaggtgtttatgtctagcttcaggcagctcagcagatagagagagactctgtttgtttgggagaaattaaaggaagagaacaagagtttctgtttctgycactttcaacttttccccactaagtataatgttgactatgagtttatcatagatggctttattaccttaaagtatgtcccttctatgccgattttacagaaggttttaatcataaaacgatgctggattttgtcaaatgctttttatgcagctctattgaggtaatcatatgatttttgtttttaattctgtttatgtggtgtatcacatttattgacttgcata

SEQ ID NO: 567674 - DNA, 460 bp, Homo sapiens
catatgatttttgtttttaattctgtttatgtggtgtatcacatttattgacttgcatatgttaaaccatgcctgcatttctggtatgaaacccacttgatcatggtggataatttttttgatatgttatttgaatactcacagtcaactgatcttcaaaagagcaaaaaaaaaaaaaaaaaamaacaaaacaaacaaacaaaaaaaacataaactgggaaaaggcccccctattcaacaaatgatgctgagataactggcaagccacgtgtagaagaataaaattggatccttatgtctcaccttatacaaaaatcaactcaagatggatcaaagacttaaacctaagacctgaaaacataaaatttctagaagatatcagaaaaactcttctagacattggcttaggcaaagagtttatgacgaagaacccaaaaacaaatgcaacaaagataaatag

SEQ ID NO: 567675 - DNA, 490 bp, Homo sapiens
attcttggaagtacctatatctttcctttacctctcttatcacagtttttaattatacattcatctgagtcattatctaatatttgccaaaaactcccacactctaaaccccacaatgtagttactgggtctggcatttgctaatgtggtttcttcacctaatccagtgcctggcatttaaaggtacttagtaaatattcataaatttaaaaaatgagggcaggaatgaacaaaaacaaaagaagtgggctgtcatctattaatgaaaatatagtctaattgagggccgtaggagtggacactgtcctggtgtagtgctcaactgaaaattaagaatggagaaaaatccattgaaaaatgtggatggtgaaacattaaaagaaaaaccagggatatgactgggctgttagtgttaatcaattggctctcatgccyaccttttatctataaaatcaccaaattcactctgagaaatatgtaaaccaatgca

SEQ ID NO: 567676 - DNA, 558 bp, Homo sapiens
aatgattacctatttatacctcatgttatttttggccaatgttttatttatactatatttcagactcctttcttttgatattacttctgtagtcaggattaatacttattacactaagcaatgtacttagcaatttctttgttaaacatcatatcatgtattttacttctcctattctgtttattttcctctaagaaatgtccttcaatcttcctctaaggctyaaatttctagattttccagggagaggcatttgggcttttatatatattacctattgttatatcagaaaagtaagaatttttaagtacatcaatgttattactgacttgtcaatattgaatttgtggacaacatatctatgacataaataattaatacctgtaattgtgattgacaaataatcttttaaaaaactttcaattggagtaaaatacacataatgtaaaatttatcatttaaccatttttaaatggacagtctcatgatattgagtccattcacaatgttatacaatcattatcatcatctattccagagctcatttcattatgcaaa

SEQ ID NO: 567677 - DNA, 471 bp, Homo sapiens
gggcaaggtggcgggcgcctgtagtttcaggaggctgaggcaggagaatggcatgaacccgggagtcggactttgcagtgagccgagatcgggccactgcactccagtytgggtgatagagcgagactccgtctcaaaaaaaaaaaaaaaaaaaaaaaaaagaagaagaagaaagaaagaaaaataatctgaggaactgtattgaagatttggtaagtggtagattggacaggaaaagctctggataataaactttaattaatatatgtaaaatacaagaaggtatttaactgaagatgctgctaagagaatataaagaaatctgatgccaaaaacagttcaagtaaagattgatagaactttagagaatatgtgactctgaagttctcctttcattaacctgagaagttaatatagaaacaaaagcacatggcaaagtaggcagagtaaatgatttagttcagtctgaat

SEQ ID NO: 567678 - DNA, 521 bp, Homo sapiens
ggctaacacggtgaaaccccgtctctactaaaaatacaaagaattagccgggcaaggtggcgggcgcctgtagtttcaggaggctgaggcaggagaatggcatgaacccgggagtcggactttgcagtgagccgagatcgggccactgcactccagtctgggtgatagagcgagactccgtctcaaaaaaaaaaaaaaaaaaaaaaaaaagaagaagaagaaagaaagaaaawtaatctgaggaactgtattgaagatttggtaagtggtagattggacaggaaaagctctggataataaactttaattaatatatgtaaaatacaagaaggtatttaactgaagatgctgctaagagaatataaagaaatctgatgccaaaaacagttcaagtaaagattgatagaactttagagaatatgtgactctgaagttctcctttcattaacctgagaagttaatatagaaacaaaagcacatggcaaagtaggcagagtaaatgatttagttcagtctgaatt

SEQ ID NO: 567679 - DNA, 521 bp, Homo sapiens
ggctaacacggtgaaaccccgtctctactaaaaatacaaagaattagccgggcaaggtggcgggcgcctgtagtttcaggaggctgaggcaggagaatggcatgaacccgggagtcggactttgcagtgagccgagatcgggccactgcactccagtctgggtgatagagcgagactccgtctcaaaaaaaaaaaaaaaaaaaaaaaaaagaagaagaagaaagaaagaaaaataatctgaggaactgtattgaaratttggtaagtggtagattggacaggaaaagctctggataataaactttaattaatatatgtaaaatacaagaaggtatttaactgaagatgctgctaagagaatataaagaaatctgatgccaaaaacagttcaagtaaagattgatagaactttagagaatatgtgactctgaagttctcctttcattaacctgagaagttaatatagaaacaaaagcacatggcaaagtaggcagagtaaatgatttagttcagtctgaatt

SEQ ID NO: 567680 - DNA, 593 bp, Homo sapiens
ctcttctataatttgatgtaaakataagaaggggaaaaagtagttgttattttttgtgatcagacttgacttctaggactgagaagctgttgtccttactacatgagatgggtttttagaagagtataaaatagtttaactttgtgtcaaatgtatttatcatgtgcctattatcaggattccatcttcatgggtattctttacttaaaactcaagtgctttttaatattttaaatatataagattgatataaaatgtcaatagattcttttttgcaaaaagatctttagaagccattactggtaaattgccaaattctaattgaatgaaaaatttttatgacagttttatcatacaaattatatatttattgttcttttagtgcacattatctggtatattacaggtctgttgtcaatgtctgtagatggtttgaattttttaaaaaagtggtaaatgccaagttttaatgtcgttcctcaagttgtagaaaatgatcattgaaaattaatttctatttaataattgaacaataatacaattttggagtttgaaataatcattaagatttaactgacactaaagtttttgca

SEQ ID NO: 567681 - DNA, 494 bp, Homo sapiens
catgtggccaaaaactatatgaaagaaaagctcaacatcactgaacattagagaaattcagatcataaccacaatgagataccgtctcacaccagtcaaaacgggtatcattaaaaagtcaaaaaatatcaggtgctggcaaggttacagagaaaaaggaatgcttatatactgttggtgagaatgtaaattarttcatattgtggaaaatagtgtggcaattactcaaaggcaaaaatcaaaactactattcaacctagcaatttcattaaggggtgtataccccccaaaacgtaaatcattctgtcttaaagacaaacaaatgtatattttcattgtagttattcacaattgccaagatacagaatcaacataagtgtctatcagtgatttactggataaagaaaatttagtacatatacaccatgagatactatgcagccatacaaagaataaaattatgccatttgcaggaacatgggtggagctggagg

SEQ ID NO: 567682 - DNA, 557 bp, Homo sapiens
agactatctgacttagagagattggagtgatgcagccacaagcygaggaatacctacagtctttagaagctgcaagaagcaaataatacattatttgctataacctctggaaggagtgtagcattggaaaaaccttaacttacaacttttggcctatataactgtgagagaataaatttctgtagatttaggtcactcaaattgtcgtaatttttcacagcagccacagaaaaataatacattgccatttcctcactttgtgcattacatgtgtgttttggcaatcttatgtcattagatttaggaccttgaatgtggaaattacatctggtacctttttctgttagactcagtacctaaatccttatacatagtaagggccaggagaaagtttccaaatagattagtgaatggcatcatcagtgagagaattatttttgacacagttcctaattgtaatgattaggaatataaggccgggcatggtggctcacgcctgtaatcccagcactttaggaggttgaggcaggtggatcacctgaggtcgagagttcgag

SEQ ID NO: 567683 - DNA, 478 bp, Homo sapiens
ggacataaagatggcaacaatagacactggggactcctagatgggggagaaagggacaaagattgaaaaactaactattgagtactcttcttagtacctgggtgagaggatcaatcaaacccaaaaccttagcatcatgcaatatacccagataacaaacctacacatgtacccctgaatcaaaaataatagttgatttattaaaaaaaaaaaaaaggaagtaacagattytggattctacaccctccttttgtcccatggacaaagacttatcacagagtctgttcagggcaatgaaaaaaggaaaaaaaaaaaaaaacaaacccctttaagttatctctcttactggttgccctaagtttcaaacacctccaaagcctacagacataggtcatttcctaagaaacacacgaaggaaactaacattgattaagtgcttaatatgggtgcaggtgtgtgtacaatcagaactcaatag

SEQ ID NO: 567684 - DNA, 544 bp, Homo sapiens
aatcctagcaagttatttttgtgactattgagggggtaaaagatccaagataactaatacaatattgacaaagaacaaagatctagggctgatactacacaactttaagacatgctgtagagccacaaaaataaagacagtgtggcattggtaaaagaataggcaaatagattgatggaacagaagagagagcccagaaacaaacccgcataaatatagtcaactgatttttcacagaggagtaaaagcaatctggttaaaaaacatagtctttccaacaaatggtactgccmcaactagacattcataatgcaaaaaaaaaaaaaaaaaaaaaaaaaaatctaaacacagactttatacccttcacaaaaattagctcaaaatggaccatagacctgaatgtaaaatacaagattataaaattcctagaacataacaagagaaatctagatgaccttgagtttagtgattactgtttagacaaaaacctaaggcacaatccatgaaacaaagaattggtaagctgggctttattaaaattaaa

SEQ ID NO: 567685 - DNA, 596 bp, Homo sapiens
atgtgtagccactttgttcctatgaaatatatgtcagatgtcattcccattttgttactgaggaaatagccctgttgctgaggatgggcctaaagactcactgtaaaatcataatagtataggaggaacttgcaaatgattaggcatttgaatgtctactatgtgctagggctttgctagggaaakcacatttgcctatacatagcaaaatcaccaatcccaagcgggaaagtcaggggtagttctaatagcgttgagaagttatgagggtctggcagatattaagtctccctggaactagaaaattcagaagtcttttgtgatatatgtttgaaagatcagaagaatggtagcatagtttcatttcaaagaagaacaattcaatatttcagtataagtcaaatactttttatagatttcttgtttaatcttctaaccaccctgtgaggtagatgttttccccctctcgaagactaaaaaactgtgatataaagagattaggtaactcaccacaatcagtaaagtagcaatgaaagacttccaggaagatcaagttgaagtacttgtctattctccttccacttagtacaataaaa

SEQ ID NO: 567686 - DNA, 596 bp, Homo sapiens
atgtgtagccactttgttcctatgaaatatatgtcagatgtcattcccattttgttactgaggaaatagccctgttgctgaggatgggcctaaagactcactgtaaaatcataatagtataggaggaacttgcaaatgattaggcatttgaatgtctactatgtgctagggctttgctagggaaatcacatttgcctatacatagcaaaatcaccaatcccaagcgggaaagtcaggggtagttctaatagcgttgagaagttatgagggtctggcagatattaagtctccctggaactagaaaattcagaagtcttttgtgatatatrtttgaaagatcagaagaatggtagcatagtttcatttcaaagaagaacaattcaatatttcagtataagtcaaatactttttatagatttcttgtttaatcttctaaccaccctgtgaggtagatgttttccccctctcgaagactaaaaaactgtgatataaagagattaggtaactcaccacaatcagtaaagtagcaatgaaagacttccaggaagatcaagttgaagtacttgtctattctccttccacttagtacaataaaa

SEQ ID NO: 567687 - DNA, 584 bp, Homo sapiens
gaccctaccaaacatttagtacattgttctttgtcactctaccagtaaaatcagggcaatggcctctaccattagattagaagagccattttgtggaccaaagagacatagaaagatcctttctctgtgtttttgggcagaatcaggaatataaagcagagaactacaaagcaagactctggtatttgttttccttcactgcctcaattttaaacatcttccctcttggactccaaattgatatggtacaaagtcacgtatgtgtctactgtggaaagagttcaytctgaattttgagccgatccatctgtgctttttaaaatcaactttgttccatggactcctgactactttacactaatgaatccaggccctaaatcttagatcctgcaagttaacatggaagtaagcatttgaaaagtataaatacaatgtgcatgtcactcaaatgcttagcatttcatctaccaggacaagtataatttagcaaacatgggaagattttattggaaccctttgttcttatcttttaaaagcttttaaggagaaaaacaaatttcttgttatactggtccatgcaatga

SEQ ID NO: 567688 - DNA, 526 bp, Homo sapiens
atcctaagcaaacagaacaaaacaggaggaatcacattacctgattttaaattatgctacagagctataatagtcaaaacagtgtggtacttgcataaaaacagacacatagaccagtggaacagaatagaaaacccagaaaaaaatctacayatgtacagtaaattcattttcaacaaaggtaccaagaacattcactggggaaaagatagtctcttcaatatatggtgcttgcaaaactggatatccatatgcagaagactgaaactagaaccctacctcttgccatatacaaaaatcaaataaaagtggattaaagacttaaatctaagacctcaaaccatgaaacggttacaagaaacactggggaaaatctctaggacattggtctggggaaaaatttcttgagcaataccccacaagcacaggcaaccaaagcaaaaatggacaaatgggatcacatcaagttaaaaagcttccgcatagcaaaggaaacaatcaacaaagtgaagagacaacccacaga

SEQ ID NO: 567689 - DNA, 631 bp, Homo sapiens
gctgttctcgtgatagtaaattagtctcatgagatctgatggttttataaaggggactttctttgccttctgccattcatgtaagatgtgacttgctcctccttgccttctgccaagattgtgaggcctccccagctgtgtggaactgtaagtccattaaatcctttttcctgtataaatgacccagtctcatgtatgtctttatcagcagcatgaaaaccgactaatatgaagtaatttttccaataataaatgagagttagcatctattcataagtgtatttgacatacagatgttctgtgaactgtctattattttttaaactttaaaaatattttcctgttaggttatttttattttgttctattgataggtaaatatttttcttaaattatgacataaatcctttattgttttagtattgcaaatatactatctgagcctatgtcttttctttgtttatgaagtctttgcattgtacaggtttttaattaaaatgatcaaatatatgtctttttctttacaatttttgctttgtgctgttgcttaagggacacctcttttgccctacatgccccaaaatatttttatatwttttaatgctttgcctttcatgtttaggcaatccat

SEQ ID NO: 567690 - DNA, 624 bp, Homo sapiens
gaattgcaaaaaaaatatatgtgaacagaaaacaaaagaaaatttgaaacaaaattcaagaayaaaataatacatttgacaaatagaaacaatttttaaaaatccaagaaataaataatacaatagttaaattgaaaaactcattagaaaatttcaatagcagaattgatcagacagagaaaaaagtgagcttgaagacagaagatgaacaattacaatggcagatatgataagatctgctgtcactggggagggaatgtcctgggtccaaaatctgtggctcacattgccaagttggaaaaggtaaaggatgaataacttgccattaaactggattaaatgtacactgttgagttttctatatataaaaatcacataaaaaataaacctgtacagaccaacaacaagtaatgagatcgaagcagtaacaaaacatatgctatcaaagaaaagcccagaacgtgattggcttactacttaattctaccaaacatttaaagaagagccaatactagattctactcaaactgtttcaaaagattgaaaagggagggttacttccaatctcattttatgaagctagaattaccattataacaaaatcaggcaagcacacaacaaaag

SEQ ID NO: 567691 - DNA, 624 bp, Homo sapiens
gaattgcaaaaaaaatatatgtgaacagaaaacaaaagaaaatttgaaacaaaattcaagaataaaataatacatttgacaaatagaaacaatttttaaaaatccaagaaataaataatacaatagttaaattgaaaaactcattagaaaatttcaatagcagaattgatcagacagagaaaaaagtgagcttgaagacagaagatgaacaattacaatggcagatatgataagatctgctgtcactggggagggaatgtcctgggtccaaaatctgtggctcacattgccaagttggaaaaggtaaaggatgaataacttgccattaaactggattaaatgtacactgtygagttttctatatataaaaatcacataaaaaataaacctgtacagaccaacaacaagtaatgagatcgaagcagtaacaaaacatatgctatcaaagaaaagcccagaacgtgattggcttactacttaattctaccaaacatttaaagaagagccaatactagattctactcaaactgtttcaaaagattgaaaagggagggttacttccaatctcattttatgaagctagaattaccattataacaaaatcaggcaagcacacaacaaaag

SEQ ID NO: 567692 - DNA, 624 bp, Homo sapiens
gaattgcaaaaaaaatatatgtgaacagaaaacaaaagaaaatttgaaacaaaattcaagaataaaataatacatttgacaaatagaaacaatttttaaaaatccaagaaataaataatacaatagttaaattgaaaaactcattagaaaatttcaatagcagaattgatcagacagagaaaaaagtgagcttgaagacagaagatgaacaattacaatggcagatatgataagatctgctgtcactggggagggaatgtcctgggtccaaaatctgtggctcacattgccaagttggaaaaggtaaaggatgaataacttgccattaaactggattaaatgtacactgttgagttttctatatataaaaatcacataaaaaataaacctgtacagaccaacaacaagtaatgagatcgaagcagtaacaaaacatatgctatcaaagaaaagcccagaacgtgattggcttactacttaattctaccaaacatttaaagaagagccaatactagattctactcaaactgtttcaaaagattgaaaagggagggttacttccaawctcattttatgaagctagaattaccattataacaaaatcaggcaagcacacaacaaaag

SEQ ID NO: 567693 - DNA, 486 bp, Homo sapiens
ctcttaattgggatgggcaccatctaatcatctgtcagcatagctagaataaagcagtcagaagaaggtgggagaggctgacttgctgagtcatctggccctcatcgttctcccatgatggatgcttcctgccctcaaacatcaaactccaaattcttcagcttttggactcttggacttacaccagtgatttgccaggggatgtcaggccttcggccacaggctgaaggccacactgtaggcttccctacttttgaggatttaggacttggacaggcttcctggctcctcagcttgcaaacagcctactgtgggacttcaccttgtgactgtgtgagacaattctcctcaaaastccccttcatatattcatctacccaatttgttctgtctttcgttgctgttgtttttttgttttgagactgagtcttgctctgtcgcccaggctggagtgcagtggtgcaatctctgctcactgcaacctcc

SEQ ID NO: 567694 - DNA, 639 bp, Homo sapiens
  misc_feature 367, 370: n = A,T,C or G
ttcctcttgttggctgatacgggaataggcagatatattgagggactacagattggatctagtgtattgaatctagtgtattttttaaattggatctagtgtattcaaactccaaaagatagttcatttattatttagtcctttctgcgtatgtggtcaaacaggttttgaatgatttstgcctgtatcatgggcatagtggctctttcttatcttctacttagacttttgacagctttacagaagtccatatggccaccagattttgccaacaaatttgtgctgcaccatgggtagcatggtttaccttttctcttctacttatctatttaatgctttaaatctgggtcatctactgtggtaaagnggntgccatatggactcccttctggaggtaccacatttaaaaaataattttatataaaattaaggaaggcacagaagtttcttatcttcatttagcagacaaggctgcagtaaagataacctaaacgacttggtcaaggtagagcaaagattagcatcatgtgttctattctggatctttaaacaaagtaattttctgtcccctctgatagagttgctaaggaggagagagctccttcagcataacatgctttcaggagaaaatttgttcaa

SEQ ID NO: 567695 - DNA, 559 bp, Homo sapiens
agtgtaaacaaagccgccaggaagttcagactgggcaaagcccactgcagtgccacaaagccagggtagccagactgactctctagattcctcctctctgggcagggcacctctgaaagaaaggcagcaggcccaatcaagggcttacagataaaactcccacctccctggsacagagcacctgagggagggggtggctgtgggcgcagcttcagcatacttaaatgttcctgcctgccagctctgaagagagcagtggatctcccagcatagccctggagctccgctaagggacaggctgcctcctcaactgggtccctgaccctggagcctcctgatggggagacacctcccagctggggtcaacagacacctcatacaggagagctccaactggcatctggtacgaagcttccagaggaaggagcaggtagcaatctttgctgttctgaagcctccactggtgatacccaggcaaacagggtctggagtggacccccagcaaactccagcagacctgcagaagaggggcctgactgttagaaggaaaactaacaaa

SEQ ID NO: 567696 - DNA, 559 bp, Homo sapiens
agtgtaaacaaagccgccaggaagttcagactgggcaaagcccactgcagtgccacaaagccagggtagccagactgactctctagattcctcctctctgggcagggcacctctgaaagaaaggcagcaggcccaatcaagggcttacagataaaactcccacctccctgggacagagcacctgagggagggggtggctgtgggcgcagcttcagcakacttaaatgttcctgcctgccagctctgaagagagcagtggatctcccagcatagccctggagctccgctaagggacaggctgcctcctcaactgggtccctgaccctggagcctcctgatggggagacacctcccagctggggtcaacagacacctcatacaggagagctccaactggcatctggtacgaagcttccagaggaaggagcaggtagcaatctttgctgttctgaagcctccactggtgatacccaggcaaacagggtctggagtggacccccagcaaactccagcagacctgcagaagaggggcctgactgttagaaggaaaactaacaaa

SEQ ID NO: 567697 - DNA, 559 bp, Homo sapiens
agtgtaaacaaagccgccaggaagttcagactgggcaaagcccactgcagtgccacaaagccagggtagccagactgactctctagattcctcctctctgggcagggcacctctgaaagaaaggcagcaggcccaatcaagggcttacagataaaactcccacctccctgggacagagcacctgagggagggggtggctgtgggcgcagcttcagcatacttaaatgttcctgcctgccagctctgaagagagcagtggatctcccagcatagccctggagctccgctaagggacaggctgcctcctcaactgggtccctgaccctggagcctcctgatggggagacacctcccagctggggtcaacagacacctcatacaggagagctccractggcatctggtacgaagcttccagaggaaggagcaggtagcaatctttgctgttctgaagcctccactggtgatacccaggcaaacagggtctggagtggacccccagcaaactccagcagacctgcagaagaggggcctgactgttagaaggaaaactaacaaa

SEQ ID NO: 567698 - DNA, 540 bp, Homo sapiens
gcagcttggttttatacattttagggagacataagttacaggaaaatatataaattagtacatgcaatgtatacattggtgtggccaagaaaggtgggacatcttgaagcagggggacttcctggttacaggtggattcaaagatttcctgattgacaattggttgaaagagtgaagctctgcctgaaaagttgaagtcagcttgagttaaggtaagaggggttgtggaagccaaggttcttgtcaggtagatgaagcctccaggtagcaggcttcagaaagatgtgaatatctcttattggaccttaaaaagtgtcagactctccagaaaggatctagtaagggaaggagattctctgcagactgtaaatttcccccacaagagaaagctttgcaaggccatttcaaaatatgtcaaagaaatatatttgggggtaaaatacttttatttccttcacggcctgctatctgtcatgtgatgctgtaccagagtcaggttaaaattyggtatcctattgctacagagtctgcttcatcagt

SEQ ID NO: 567699 - DNA, 592 bp, Homo sapiens
gacttttaaaaaattgactgacaaagttcaaaaaaacttattccctgatcatttctttatgctgccaatgtcactcacatccaagatctctgacctgcaattcttctaactaaacttttacagcgttgactgtcattcaaagaaacataaatcccatcctctgggagttatatgtgctttacggagagcattgctatatttcaaatgattctgtttgttttatgattcatcagaaaagtaagtacatgaaaaatagcctgaattcaggctaagataatgtatgtattttattgatatcagtctcacttataaatgcatcatttagtgttaattgtttttagagcagtagatatatacagcagaactgaacaagtaaaagtggccatcctatcctcaaataaattacagaattagcacataaggatcattgcaactttcagacatgagtttatgtatcctggaacatactgatttccaagaattgtataaattgatgcttttaagtgcctttgccaattaatactagttgttttcartgtctgactagggtatgaaagagaactaaaattgttatttaaaatacttttaaata

SEQ ID NO: 567700 - DNA, 638 bp, Homo sapiens
aagtaacagcttaaacatttatagtttattttaatgtatatattgataaaaatatatcaatttagatgatatcaaatatgtcaagtacytaagaattaatataacaaaagctgtgaaaaacctataccataaatttgtaaaaattgattgacaagctaattttaaaattggtatgaaactacaaagaaataagatagcaaaaatggttttgaagacgacaaaaactagaggccttatattgccagacatcaagctaattacaaaagtatagtaatcagtatgctgttggcaaataggatatactcattgaatagagcaatttgcttcaaagctaaaagtggaaattggtatagtgatgcaactacagagaaagagcgagagagagatagaaatgggaggaagtcaggagaaagagaaagtggtgaaggtggggagaagggggaatatgcagcattatgtgaaataatgtcttgtcccctcatttcagagtgtatttgtttccaagttatgacaaataatttgttttcatgatttgttatctaggccatatctacctagtcggccataaatactctgtggctttaagtaaagtccatgtgtgagtgattcccaaatctgtatctttggctctaatttct

SEQ ID NO: 567701 - DNA, 517 bp, Homo sapiens
caatggtgatagccagagaaacagcaggtgtagcttctctggtgttggcctgaaggtgacataaatggcctttaagagatgagttctttttgctcagaagcttcaaatttgttctccccactgccttcttcctccattcccccmaaaaaacctactatattttacatttccaaaacatcattctttcccttattgtcaatgtcttcagtttggctgatttccagcaaagatgcctctcacctaactgggcctttccccagccatgtagacattgtcttggaagcacacgtacacactcaaacaacttaatttaaattaggttaccagcagtgtaattatggacaagctactggacactttttgcctgagctctccatcagtaaaataaaaatagtttacctcatagggttattatgcttgttacaacattatgagtgttaaaatccaagcataatgtcaggttcttaaccttttcttctcttactcctgttatacttcctcttccttcctttctttc

SEQ ID NO: 567702 - DNA, 517 bp, Homo sapiens
caatggtgatagccagagaaacagcaggtgtagcttctctggtgttggcctgaaggtgacataaatggcctttaagagatgagttctttttgctcagaagcttcaaatttgttctccccactgccttcttcctccattcccccaaaaaaacctactatattttacatttccaaaacatcattctttcccttattgtcaatgtcttcagtttggctgatttccagcaaagatgcctctcacctaactgggcctttccccagccatgtagrcattgtcttggaagcacacgtacacactcaaacaacttaatttaaattaggttaccagcagtgtaattatggacaagctactggacactttttgcctgagctctccatcagtaaaataaaaatagtttacctcatagggttattatgcttgttacaacattatgagtgttaaaatccaagcataatgtcaggttcttaaccttttcttctcttactcctgttatacttcctcttccttcctttctttc

SEQ ID NO: 567703 - DNA, 517 bp, Homo sapiens
caatggtgatagccagagaaacagcaggtgtagcttctctggtgttggcctgaaggtgacataaatggcctttaagagatgagttctttttgctcagaagcttcaaatttgttctccccactgccttcttcctccattcccccaaaaaaacctactatattttacatttccaaaacatcattctttcccttattgtcaatgtcttcagtttggctgatttccagcaaagatgcctctcacctaactgggcctttccccagccatgtagacattgtcttggaagcacacgtacacactcaaacaacttaatttaaattaggttaccagcagtgtaattatggacaagctactggacactttttgcctsagctctccatcagtaaaataaaaatagtttacctcatagggttattatgcttgttacaacattatgagtgttaaaatccaagcataatgtcaggttcttaaccttttcttctcttactcctgttatacttcctcttccttcctttctttc

SEQ ID NO: 567704 - DNA, 434 bp, Homo sapiens
ttgtatactgatggaagttcctttgtagaaaaaggacttcaaaaagtggggtatgcagtggtcagtgataatggaatccttgaaagtaatccccacactccaggaactagcactcaactggcagaactaatagccctcactcaggcactagaattaggagaacgaaaaagggtaaatatatatacagactctaagtatgtctacctagtcctccatgcccacgcagcaatatggagagaaagggaatgcctaacttccaagggaacacctatcaaacatcaggaagccattargagattattattggctgtacagaaacctaaagaggtggcagtcttacactgccggggtcatcagaaaggaaaggaaaaagaaatagaagggaacagccaagcggatattgaagccaaaagagccgcaaggcaggaccctcc

SEQ ID NO: 567705 - DNA, 590 bp, Homo sapiens
atatatcaatttatatatataatattaaaatttgtgttgtggacaggtacttaggcaactctcagataatattgttcctagtgccactacttattataatgtttctaaaattaattaaagaagctagaagaaactagcaagtctctcagtcacagtagaggttaaactttgtcttttatgtaagaaatggacaattataattacagattgatggatagttgtgaattcaaatcaattttcagttatctgcacaagcttgaggtactaggtaggaacgaacatggatttataaagtataaatacttccaaaccaatttaatttgctcctgtgataaacttagaggcaatgtagataaggggaaagcaatatatttaatctgtggactacagtgattgttttgattttaacccatacagcgcctattaaaaaaataaataaataaaaattttgagactaaacaagccaattcccagctatctacaggaggtgtgccmggaacacaatgctctgagataatgcatgtcaatcgttacccctaggaatcaatccaaaagatgataaatataaacatatttgtgaacattttgaa

SEQ ID NO: 567706 - DNA, 610 bp, Homo sapiens
gatatttaaatataggattttttttgataaattgatacatgagatacacatttccctacactatttgcaactagtttaataaataggaatgataatgaaaatctgtctgtcaacagaaaggataaattttacaaagaaaaagattttgcttcacacaagtattttttaacaggttataacatgcatgtataaaaacacattaataatgttatgtggctaacattaaacargagagaaactaagaaaatcaataatgcaagagaattttatgatcatcttgctaacactagaaatttatacagtggtgccataatttcttgctatataaaatatctgcagattagaagtgtaaaacatatccctcccaaaacacataaaataatacaagttttatggaaaaaaatcatattaagaaatatgttaaacaatatatctataatggaaaactttaaaatataagtctgagacattgccccgaaacatttttatttgaatttattacaatgtatgattactaaaatatctaggcaaaggtaatctgaatgccatttttatagcctgtgtaaatgaaaaaggtgccaaagaagaaaataagtttcaagaccaaaaa

SEQ ID NO: 567707 - DNA, 610 bp, Homo sapiens
gatatttaaatataggattttttttgataaattgatacatgagatacacatttccctacactatttgcaactagtttaataaataggaatgataatgaaaatctgtctgtcaacagaaaggataaattttacaaagaaaaagattttgcttcacacaagtattttttaacaggttataacatgcatgtataaaaacacattaataatgttatgtggctaacattaaacaggagagaaactaagaaaatcaataatgcaagagaattttatgatcatcttgctaacactagaaatttatacagtggtgccataatttcttgctatataaaatatytgcagattagaagtgtaaaacatatccctcccaaaacacataaaataatacaagttttatggaaaaaaatcatattaagaaatatgttaaacaatatatctataatggaaaactttaaaatataagtctgagacattgccccgaaacatttttatttgaatttattacaatgtatgattactaaaatatctaggcaaaggtaatctgaatgccatttttatagcctgtgtaaatgaaaaaggtgccaaagaagaaaataagtttcaagaccaaaaa

SEQ ID NO: 567708 - DNA, 610 bp, Homo sapiens
gatatttaaatataggattttttttgataaattgatacatgagatacacatttccctacactatttgcaactagtttaataaataggaatgataatgaaaatctgtctgtcaacagaaaggataaattttacaaagaaaaagattttgcttcacacaagtattttttaacaggttataacatgcatgtataaaaacacattaataatgttatgtggctaacattaaacaggagagaaactaagaaaatcaataatgcaagagaattttatgatcatcttgctaacactagaaatttatacagtggtgccataatttcttgctatataaaatatctgcagattagaagtgtaaaacatatccctcccaaaacacataaaataatacaagttttatggaaaaaaatcatattaagaaatatgttaaacaatatatctataatggaaaactttaaaatataagtctgagacattgccccraaacatttttatttgaatttattacaatgtatgattactaaaatatctaggcaaaggtaatctgaatgccatttttatagcctgtgtaaatgaaaaaggtgccaaagaagaaaataagtttcaagaccaaaaa

SEQ ID NO: 567709 - DNA, 500 bp, Homo sapiens
aactatatttatttccagatgacatgatcttatatatagaatatgctacagagcacactaaaaaaatagaattaataaatgtgttcagcaaggttgtaggatatgacaccaatatgcaaaaatcagttgcaaatctatacatgagcaataaacaatttgaacgttgttttaaaaatttcatttacaataccattcaaaagaataaaatacatagaaataaakttaacaaagaagaaccaatatttccatgctgaaaaatcacaaaaccttaatttaaaaaaagagacatcaataaataggaagacatactatgttcatggattgagagatttaataccattaaaatgaaaatactccccaagatgatctatagactcaatccctatcaaaatttcatcaatcttttttgtagaaaatgaacagtcaatcctgaaacccacatgaaattacaagggaccttgaatagccaaccaacctgaagagaaagaacagagttgaaa

SEQ ID NO: 567710 - DNA, 453 bp, Homo sapiens
gaattctaggcagtgccctgcaggattttttggaattttgttggaaaagtgcagctgtaagttagagaggtaacccagaatgaggcaaagttattcatgcgtgtgtctctcccccaaccattcattaaagcttccatgcatgttacaaaggaaatcccctccatctgtgtgaaaggttttttccactgcctttgaaaacacctgcagaattaaaatgcctctaaagtcatatcctgccatcagagcagttaagaagtcagagggatggacgcaggccatctgtcaatcacatgaaaggcttgataaaaaacattgcacagcctctgtgcctctgtggcatgcatgttattgatgctaaatggtatcatatgttacattgtcttaatgctattagattacatcatatttaataataacatttcatgraagattagactgattagctgctcagtc

SEQ ID NO: 567711 - DNA, 453 bp, Homo sapiens
gaattctaggcagtgccctgcaggattttttggaattttgttggaaaagtgcagctgtaagttagagaggtaacccagaatgaggcaaagttattcatgcgtgtgtctctcccccaaccattcattaaagcttccatgcatgttacaaaggaaatcccctccatctgtgtgaaaggttttttccactgcctttgaaaacacctgcagaattaaaatgcctctaaagtcatatcctgccatcagagcagttaagaagtcagagggatggacgcaggccatctgtcaatcacatgaaaggcttgataaaaaacattgcacagcctctgtgcctctgtggcatgcatgttattgatgctaaatggtatcatatgttacattgtcttaatgctattagattacatcatatttaataataacatttcatggaagaktagactgattagctgctcagtc

SEQ ID NO: 567712 - DNA, 540 bp, Homo sapiens
acaaaccacatttcttttaggaagcaggtatctttcttcttcagcaatgttcaataaaagccacgtttaaattccttcatttayggtaaagtccatcatcatgtttcatccttagtaataaaacaagtgaaataatcatgaatggaactcaccgacttgtgtttgtataaagaggcttagagtaccgctgcttggctagcgatgcgatgtctcccaaggggttgtcaacatcatcagcatttgtagactgcacatgaccactgttagaatggaaaggaaagaaggcatatatttctgtataagaaacatagaagaaaccattgaacagtattctaacttccaaaggaaatttatttgccaaagtagatcaaaggctcaaaatgcaaaatgtaaagcataatgatagaacaattttccttaaaaaatataaagataattttctcttcttcagaatgagcggtggcatgctccttgatcttaagtttgagccagagtgacagtaagggctgttttgtgtttctgaacaaagaagcgggctgt

SEQ ID NO: 567713 - DNA, 532 bp, Homo sapiens
ttcttcctcaaatagagaggtcaataaaaaatcacttagtttttatattttttcttcaatttttttccacttaatttttagacataactagaattaattttgrgattttgtattcagtgaaagtgaactttttttctgcacaaatagttaacccattacaagatatctattgaaaatctttccttttcctgctaatttattattgcatcttcaacatatacatcagaatttaatgtgctagttctagcttcaggactagctattctatttcaggactagctattctattaatattacaggactagtcattctatttcaattattgcccttttattattataccagagctgcactgtgtaatcatttctaaaaaaaaaaacaaaaacaaaaacaaacaaaaaaaaccaaaaacttttaactttctattatggagaatttcaagtatatacaaaatcaatagtcattctaaaatcacaagtgctcatcactcaggttcaacgtaattatttcatttaagtttcatatttttaaa

SEQ ID NO: 567714 - DNA, 587 bp, Homo sapiens
ttctttaaaaggcaagtcagtgttggcagtcttctagaatttgagtggggaactaaggcttattgggccccctctgtgtctcaagcactgtgtggcaagtaatgccactgcctccttattggtgtctcctagtccacacttgtcccgattcttctgttcctccaccctgcagccaaatactgatttccaaatgcaaagctaatcataagattctgctttggggagggtgaaaattcttaatacggtccacaggagctaattttcttgtaaactgcaacctcaacctcctgggctcaagcaatcctcctgcctcagcctcccaagtagctggtactacgggtgcatgccaccatatctggctaatttatttttaatagagacaaagtctcactgtgttgcctaagctggtcccaaacccccaaactcaagcgattttcctgccttgstctcccgaattgctggaagtgctgggattgcagatgtgagccactgtgtccagccctgcatccttctaatagggacccctgagattagattgaacccatctagatatttcaggaaaaattctccatctcaaaatcctcaac

SEQ ID NO: 567715 - DNA, 423 bp, Homo sapiens
aatattgtatactgaaaatttgctaagagagtmgcttttagtggctcttaccacatacacacaagggtaactatgcaagatgacagatatgttaatgtacttgactatagtcaaaattttactatttgtaattatatcaaaacatcatgttgtgtacctgagtattgacaattttaaaaaagagaaggccctagtaagaatgagatctttgatggactgaagccttccgtccattcctacaagacatgggttggctccatcttcacctgcaatctcatctcatggccctgccccctcattagatgccccattaatgcccctgaactcatcaagtcagtgtcagattcaggatacagtctacgttgtccttggcctggatgctcctcacacctagagcctcattcaaatgtgctcttcttcaaa

SEQ ID NO: 567716 - DNA, 613 bp, Homo sapiens
ttgaaagtgcttaaagaaaaacagacaacmatgaatcctatcttttaaaattgaagggcaatacaaaaaaactgtcttttaaaattgaagggcaagacaaaatagagacagagagagagagaatttgctcccagcacaccagccttacaaaaagtatttaagaaatttcttcatgctgaaaccaagtgacctcagatagtaatttgagtctacataaacagagaaagagcattaagtaaaggtaattatgtaattataacagatattataaatacatacttttattttttctcttaattgacttaaaaagcaattgtacaaattatatatatatatacacacacacacatatcatatatatatatacatgcacacacatatatatatatatatatacacacacaatgtagtatattgttgggcctataacatataaaaatgtaaaatatgaaatacatttgctaataacagcaccaagtaggtgggcagagtcaaaactataagaggttaatgaaataataacagatggtaaagtgataattacaaaaatatattgctggatttgtaactttaatatgtaaaataataataccacagaaaaggaaaaagggca

SEQ ID NO: 567717 - DNA, 540 bp, Homo sapiens
tcccagcgccttgggaggccaaggaaggagaatcacttgaggccaggagtttgtgaccagcctgggcaacatagtgagaccgcagatctactaaaaatttaaaaattagctgggcatggtggtgcrtgcccgtatgtctggaggctgaggcaggaggatcgcttgagcccaggatctggaggctgaggcaggaggatcgcttgagcccaggatttggaggctgcagtgagctatgattgtgccactgcactccagtgtgggtgacagagtgagaccctgtctctatttaaaaaaagagagacaagatgatcaggatgagcgcagtggctcacgcctataatcccagcactttgggaggccaaagcaggtggatcacatgaggtcaggagtttgagaccggcccagcctagatggtgaaaccccgtttctactagaaatacaaaaatcagctgggtgtggtggggcacgcctgtgatcccagctactcgggagactgaggctggacaattgcttgaacctgggaggcagaagttgctgtga

SEQ ID NO: 567718 - DNA, 540 bp, Homo sapiens
tcccagcgccttgggaggccaaggaaggagaatcacttgaggccaggagtttgtgaccagcctgggcaacatagtgagaccgcagatctactaaaaatttaaaaattagctgggcatggtggtgcgtgcccgtatgtctggaggctgaggcaggaggatcgcttgagcccaggatctggaggctgaggcaggaggatcgcttgagcccaggatttggaggctgcagtgagctatgattgtgccactgcactccagtgtgggtgacagagtgagaccctgtctctatttaaaaaaagagagacaagatgatcaggatgagcgcagtggctcacgcctataatcccagcactttgggaggccaaagcaggtggatcacatgaggtcaggagtttgagaccggcccagcctagatggtgaaaccccgtttctactagaaatamaaaaatcagctgggtgtggtggggcacgcctgtgatcccagctactcgggagactgaggctggacaattgcttgaacctgggaggcagaagttgctgtga

SEQ ID NO: 567719 - DNA, 535 bp, Homo sapiens
agtgtcataatatcacccttccactgagtactgccgacagctggggggtaaagaaaagtcattgggacacactgttgtctccacatgccactgtgtctgtctgcaaatgtaggcaggctggggtcctgccccagggaagacagagtcataacagagtaataaagaagcatgtttgagacacaggagtgtctatgtctatcctcattcctccctcacagccatcaccagagcatgtttcttgcaccaggtcaayagacagtaagagacagtaagagaggcatgaaaagcccattgtccacacatgttgcagcttctttttggagaatgttttccaggccttttatgttctgtctctgattctcagaactctgcaaggtcagtgtgaccatcctgctccaaatctaagaaaacagaggtttccagaggaaggagaaattgtgcccagggtcacacagcttgcaagaggcagagtggaagttgattccagctctgcctgcaggaccctctcatttcccctctgtttcccttcttgaca

SEQ ID NO: 567720 - DNA, 535 bp, Homo sapiens
agtgtcataatatcacccttccactgagtactgccgacagctggggggtaaagaaaagtcattgggacacactgttgtctccacatgccactgtgtctgtctgcaaatgtaggcaggctggggtcctgccccagggaagacagagtcataacagagtaataaagaagcatgtttgagacacaggagtgtctatgtctatcctcattcctccctcacagccatcaccagagcatgtttcttgcaccaggtcaatagacagtaagagacagtaagagaggcatgaaaagcccattgtccacacatgttgcagcttctttttggagaatgttttccaggccttttatgttctgtctctgattctcagaactctgcaaggtcagtgtgaccaycctgctccaaatctaagaaaacagaggtttccagaggaaggagaaattgtgcccagggtcacacagcttgcaagaggcagagtggaagttgattccagctctgcctgcaggaccctctcatttcccctctgtttcccttcttgaca

SEQ ID NO: 567721 - DNA, 388 bp, Homo sapiens
cggcaaaccatccaccctggtgttgactgactttaacaaggttcagttcacagagattgagggcagaaaaaggaaacggcctmaaaagggtaagtttgctgtgttgccctcacaccacttgattcatggtcgtgatcctaaggatctcacctgatacttggttttataggaaggatgtgtaaaattcccagaacgctaggaaacagggacgaaaacacttcaaagagaaagttaatgaacttgtttctgaccacagggcatccttcagcacatgctgtctggagtggcctcaaacaaggagtgtgtggtgaggtgctgacaatgcaatgggagcagggtcctgtccccacgctaaagaagctcacagtttaatgcaaatgagaagcca

SEQ ID NO: 567722 - DNA, 388 bp, Homo sapiens
cggcaaaccatccaccctggtgttgactgactttaacaaggttcagttcacagagattgagggcagaaaaaggaaacggcctcaaaagggtaagtttgctgtgttgccctcacaccacttgattcatggtcgtgatcctaaggatctcacctgatacttggttttataggaaggatgtgtaaaattcccagaacgctaggaaacagggacgaaaacacttcaaagrgaaagttaatgaacttgtttctgaccacagggcatccttcagcacatgctgtctggagtggcctcaaacaaggagtgtgtggtgaggtgctgacaatgcaatgggagcagggtcctgtccccacgctaaagaagctcacagtttaatgcaaatgagaagcca

SEQ ID NO: 567723 - DNA, 637 bp, Homo sapiens
ccaacagctcaactgaactttcctaaatggaattgttaaaaagtggtaaatttaaaaacttcccctggctcacgtggtggctcacgcttgtaatcccagcactttgggaggctgaggcgggtggatcatttgaggtcgggttttgagactagcctggccaacatggtaaaacccygactctactaaaaatacacaaattagctgggcatggtcgtgggcacctgtaatcccagctacttgagaggctgaggcaggggaatcacttgaagccaggaggtggaggttgcagtgagccgagatcacaccattatactccagcctgggcaacagagggagactcctcttgggggtgagaaaagaaaaaaaaaaaaagcttcctccaatttataccaaaaattctctgttcaggactaagtggcatagagaatgttaaatgtgcctagatatcttcataactcatatattttctgttttctacatatcttgaaaggcattgccaaatgacgtgtaattatctaggcagtaaaactgaaacatacttcctcttcccttgaatatcaaaaagcattgtggtattagtacttttatcttggatcattgttcagaaggaggttcagcccccagacaaccacatttt

SEQ ID NO: 567724 - DNA, 558 bp, Homo sapiens
tctgaaatggaaatgatggagttagagaaccatacaacaatggtaatkatttcagaaatacggtgttgagcagaataaagcagacacaaaagagtacctatggcatggcatgcatctgtatacgtgaaattccagaataagcaagctaacctatgataagaaagagactggctgggaagagtgagagttcactttctggggtgacataatagtgtagatcttggctgggcacggtggttcacgcctgtaatcccaacactttgggaggctgaggcgggcggatcacctgaggtcgggagttcaaaaccagcctgaccaacatggagaaaccctatctctactaaaaatagaaaattagctgggagtggtggcacatgtctgtaatcccagccactcgggaggctgaggcaggagaatcgctcgaacctgggaagcagaggttgcggtgagctgatattggcccattgcactccagcctcagcaacaagggagaaactgtctcaaataaataaataaataaataaaataatgtagatcttgaaagggggttggtttatg

SEQ ID NO: 567725 - DNA, 558 bp, Homo sapiens
tctgaaatggaaatgatggagttagagaaccatacaacaatggtaattatttcagaaatacggtgttgagcagaataaagcagacacaaaagagtacctatggcatggcatgcatctgtatacgtgaaattccagaataagcaagctaacctatgataagaaagagactggctgggaagagtgagagttcactttctggggtgacataatagtgtagatcttggctgggcacggtggttcacgcctgtaatcccaacactttgggaggcygaggcgggcggatcacctgaggtcgggagttcaaaaccagcctgaccaacatggagaaaccctatctctactaaaaatagaaaattagctgggagtggtggcacatgtctgtaatcccagccactcgggaggctgaggcaggagaatcgctcgaacctgggaagcagaggttgcggtgagctgatattggcccattgcactccagcctcagcaacaagggagaaactgtctcaaataaataaataaataaataaaataatgtagatcttgaaagggggttggtttatg

SEQ ID NO: 567726 - DNA, 549 bp, Homo sapiens
aattgactcagggaggcctcgggaaacttacaatcatggcagaagggaaagcaaacatgtccttcttcacatggcggcagmaaggggaagaatgagcaaaagaagaaaaagccccttataaaaccatcagattttgtgagaactcattcactatcataagaacagcatgaagataactgcccccatgattaaattacctcccactgggtcccttccatgacacatggggattgtgggaactacaattcaagatgagatttgggtggggacacagccaaaccatgtcaacctgtgtcacccttgagggacttgggggtcaaagggaactggtgcagacatgaagctcaagcttcctgttgtaccatgaaaaataaagtcctttatctctcaatccagagtctcatgtcttctgcccacatccataaaactcgctagcctccatgtaggataatatcttagaccagcacagttcttgacactctagaagtgaatttgttggatcaaaaagcatgaacaattgctaaaactcttaatatgtcttgtcaatta

SEQ ID NO: 567727 - DNA, 549 bp, Homo sapiens
aattgactcagggaggcctcgggaaacttacaatcatggcagaagggaaagcaaacatgtccttcttcacatggcggcagcaaggggaagaatgagcaaaagaagaaaaagccccttataaaaccatcagattttgtgagaactcattcactatcataagaacagcatgaagataactgcccccatgattaaattacctcccactgggtcccttccatgacacatggggattgtgggaactacaattcaagatgagatttgggtggggacacagccaaaccatgtcaacctgtgtcacccttgagggacttgggggtcaaagggaactggtgcagacatgaagctcaagcttcctgttgtrccatgaaaaataaagtcctttatctctcaatccagagtctcatgtcttctgcccacatccataaaactcgctagcctccatgtaggataatatcttagaccagcacagttcttgacactctagaagtgaatttgttggatcaaaaagcatgaacaattgctaaaactcttaatatgtcttgtcaatta

SEQ ID NO: 567728 - DNA, 549 bp, Homo sapiens
aattgactcagggaggcctcgggaaacttacaatcatggcagaagggaaagcaaacatgtccttcttcacatggcggcagcaaggggaagaatgagcaaaagaagaaaaagccccttataaaaccatcagattttgtgagaactcattcactatcataagaacagcatgaagataactgcccccatgattaaattacctcccactgggtcccttccatgacacatggggattgtgggaactacaattcaagatgagatttgggtggggacacagccaaaccatgtcaacctgtgtcacccttgagggacttgggggtcaaagggaactggtgcagacatgaagctcaagcttcctgttgtaccatgaaaaataaagtcctttatctctcaatccagagtctcatgtcttctgcccacatccataaaactcrctagcctccatgtaggataatatcttagaccagcacagttcttgacactctagaagtgaatttgttggatcaaaaagcatgaacaattgctaaaactcttaatatgtcttgtcaatta

SEQ ID NO: 567729 - DNA, 487 bp, Homo sapiens
cccaggctggagtgcagtggtgtgatcccggctcactgcaacctctgcctcctgaattcaagtgatgctcctgcctcagcctctcaagtagctgrgattacaggtgtgcatcaccatgcccagctaatttttataattttagtagagatggggtttcaccatgttgaccaggctggtcttgaactcctgacctcaagtgatcctcctgccccggcctcccaatcatggtgggattataggcttgagcccctgtgcctggcctagaaagctaacttcttaattgcaagctactttcatcaatataatgcatttgtctcactccttaaaggactcctgtcacagtggattggcaatgaactggtcagacacaagaggcagtggagtattagtaaaatacacgtggatttggagtcagacctacctaggtttaaatgctggttttatcgcatactagttgtatgccttcattggggtttcccaagaatca

SEQ ID NO: 567730 - DNA, 487 bp, Homo sapiens
cccaggctggagtgcagtggtgtgatcccggctcactgcaacctctgcctcctgaattcaagtgatgctcctgcctcagcctctcaagtagctgagattacaggtgtgcrtcaccatgcccagctaatttttataattttagtagagatggggtttcaccatgttgaccaggctggtcttgaactcctgacctcaagtgatcctcctgccccggcctcccaatcatggtgggattataggcttgagcccctgtgcctggcctagaaagctaacttcttaattgcaagctactttcatcaatataatgcatttgtctcactccttaaaggactcctgtcacagtggattggcaatgaactggtcagacacaagaggcagtggagtattagtaaaatacacgtggatttggagtcagacctacctaggtttaaatgctggttttatcgcatactagttgtatgccttcattggggtttcccaagaatca

SEQ ID NO: 567731 - DNA, 487 bp, Homo sapiens
cccaggctggagtgcagtggtgtgatcccggctcactgcaacctctgcctcctgaattcaagtgatgctcctgcctcagcctctcaagtagctgagattacaggtgtgcatcaccatgcccagctaatttttataattttagtagagatggggtttcaccatgttgaccaggctggtcttgaactcctgacctcaagtgatccycctgccccggcctcccaatcatggtgggattataggcttgagcccctgtgcctggcctagaaagctaacttcttaattgcaagctactttcatcaatataatgcatttgtctcactccttaaaggactcctgtcacagtggattggcaatgaactggtcagacacaagaggcagtggagtattagtaaaatacacgtggatttggagtcagacctacctaggtttaaatgctggttttatcgcatactagttgtatgccttcattggggtttcccaagaatca

SEQ ID NO: 567732 - DNA, 607 bp, Homo sapiens
aagaagaaagtctgaactactccctgcaggaagagtagacaaggtaaagagccctagaaaagattcgtccccgtgctttcctctagaatgaggactccagtaatttataccagtgctggagcacaggcttgacaatggctggagctcagcctccacagtatctgttgtgattagtgctcaaaagyataaagcataactggaactaagaagaaacaagatgctcaaggtctccccttcagccttccttccaagtaacagaatcatgatttgatgatttgaccccttcttctaccacctcaatattgaaatctgtttccaattcccgttaccttagagaacaccatcagatgtccattgtatatctcagattcatttctttccaaaaacgaatttaacttgccttccaaataattttactcctaatttttagctcactttctccatgaatatcatcgccattcacccagttacccaaaccaagagcctgaacaacatctttgagtccttctccatcacaccctacattcaaccaattgccaccttctcttttatatacctccttaagtcacggccttaatttgggaatgatcgtttctcatttggactt

SEQ ID NO: 567733 - DNA, 426 bp, Homo sapiens
tgcggtgaaacgggcagcgattccagrgccatcacaactcctggctgaaaccaaacatgacagatttaccattgggcaggctgctccatttattatttaacactcgcaataaatatttgcatgacccagtgctggagggaacgctctgtgataactcactgcattttcctgccaaacaccagcacagtcggattccgaagctgcagcagagaatattttatgctattctaaaaatccaggtgatggccccttgttagaaaaccttttctcatccatttccatagaggaaaaaaggagcagggagaccttagctccgagaagcaactagaggaggaagaagaggaggaggaagatgctgacaggtgacatttacttagcacctactgagtgccaggccctaagctaaggacttcacactcattcatt

SEQ ID NO: 567734 - DNA, 467 bp, Homo sapiens
cccaggctagagagcagtggcatggtctctgcccactgcaacttctggctcctcagttcaagygattctcctgcctcagcctcccgagtagctggaattacaggcgcacaccaccatgtccagctaatttttgtatttttatagagatggggtttcaccatgttggccaggctggtcttgaactcctgacctcaggtgatccacctgcttcggcctcccacagtgctgggattacaggcatgagccactgcacccgaccctatagtcaataataatttaatcgcacattttaaaataactaaaagagtacaattggattgtttgtaacacaaaggataaaggtttgaggtaatggataccccattttacatgatgtgattattacacatcgcatgcctgtatcaaaacatctcatgtaccccataaatatatatacctactatgtactaatgaaaattaaaatttaa

SEQ ID NO: 567735 - DNA, 467 bp, Homo sapiens
cccaggctagagagcagtggcatggtctctgcccactgcaacttctggctcctcagttcaagcgattctcctgcctcagcctcccgagtagctggaattacaggcgcacaccaccatgtccagctaatttttgtatttttatagagatggggtttcaccatgttggccaggctggtcttgaactcctgacctcaggtgatccacctgcttcggcctcccacagtgctgggattacaggcatgagccactgcacccgaccctatagtcaatartaatttaatcgcacattttaaaataactaaaagagtacaattggattgtttgtaacacaaaggataaaggtttgaggtaatggataccccattttacatgatgtgattattacacatcgcatgcctgtatcaaaacatctcatgtaccccataaatatatatacctactatgtactaatgaaaattaaaatttaa

SEQ ID NO: 567736 - DNA, 467 bp, Homo sapiens
cccaggctagagagcagtggcatggtctctgcccactgcaacttctggctcctcagttcaagcgattctcctgcctcagcctcccgagtagctggaattacaggcgcacaccaccatgtccagctaatttttgtatttttatagagatggggtttcaccatgttggccaggctggtcttgaactcctgacctcaggtgatccacctgcttcggcctcccacagtgctgggattacaggcatgagccactgcacccgaccctatagtcaataataatttaatcgcacattttaaaataactraaagagtacaattggattgtttgtaacacaaaggataaaggtttgaggtaatggataccccattttacatgatgtgattattacacatcgcatgcctgtatcaaaacatctcatgtaccccataaatatatatacctactatgtactaatgaaaattaaaatttaa

SEQ ID NO: 567737 - DNA, 556 bp, Homo sapiens
tgtatcctactatagatattcttttgcaatctgggtttttttttaactctacactgtgtttttgagatttcacagtgttgatrcaagactttttcaatttcagaagttgatttttttaagattagatagatatatggatgttctcactgatatgtgggagctaaactatgaggacccaaaggcataagaatgatacaatgggctttggggacttggatggaagagtgggaggggccaagggataaaagactacaaatatgttgcagtgtatactgttcaggtgatgggtgcaccaaaatctcacaaatcaccactaaagaacttactcatgtaaccaaacaccacctgtaccccaataccttatggaaaaataaaaataataataaacatctaaacataagaaaaacaaggaaggaaaaaaaatagatggatatataacatttgtgcatcagggccgggcatggtggctcacgcctgtaatcccagcacttgggaggccgaggcgggcagatcacttgaggtcaggagttcaagaccaggctggccaacatggtga

SEQ ID NO: 567738 - DNA, 556 bp, Homo sapiens
tgtatcctactatagatattcttttgcaatctgggtttttttttaactctacactgtgtttttgagatttcacagtgttgatgcaagactttttcaatttcagaagttgatttttttaagattagatagatatatggatgttctcactgatatgtgggagctaaactatgaggacccaaaggcataagaatgatacaatggrctttggggacttggatggaagagtgggaggggccaagggataaaagactacaaatatgttgcagtgtatactgttcaggtgatgggtgcaccaaaatctcacaaatcaccactaaagaacttactcatgtaaccaaacaccacctgtaccccaataccttatggaaaaataaaaataataataaacatctaaacataagaaaaacaaggaaggaaaaaaaatagatggatatataacatttgtgcatcagggccgggcatggtggctcacgcctgtaatcccagcacttgggaggccgaggcgggcagatcacttgaggtcaggagttcaagaccaggctggccaacatggtga

SEQ ID NO: 567739 - DNA, 556 bp, Homo sapiens
tgtatcctactatagatattcttttgcaatctgggtttttttttaactctacactgtgtttttgagatttcacagtgttgatgcaagactttttcaatttcagaagttgatttttttaagattagatagatatatggatgttctcactgatatgtgggagctaaactatgaggacccaaaggcataagaatgatacaatgggctttggggacttggatggaagagtgggaggggccaagggataaaagactacaaatatgttgcagtgtatactgytcaggtgatgggtgcaccaaaatctcacaaatcaccactaaagaacttactcatgtaaccaaacaccacctgtaccccaataccttatggaaaaataaaaataataataaacatctaaacataagaaaaacaaggaaggaaaaaaaatagatggatatataacatttgtgcatcagggccgggcatggtggctcacgcctgtaatcccagcacttgggaggccgaggcgggcagatcacttgaggtcaggagttcaagaccaggctggccaacatggtga

SEQ ID NO: 567740 - DNA, 556 bp, Homo sapiens
tgtatcctactatagatattcttttgcaatctgggtttttttttaactctacactgtgtttttgagatttcacagtgttgatgcaagactttttcaatttcagaagttgatttttttaagattagatagatatatggatgttctcactgatatgtgggagctaaactatgaggacccaaaggcataagaatgatacaatgggctttggggacttggatggaagagtgggaggggccaagggataaaagactacaaatatgttgcagtgtatactgttcaggtgatgggtgcaccaaaatctcacaaatcaccactaaagaacttactcwtgtaaccaaacaccacctgtaccccaataccttatggaaaaataaaaataataataaacatctaaacataagaaaaacaaggaaggaaaaaaaatagatggatatataacatttgtgcatcagggccgggcatggtggctcacgcctgtaatcccagcacttgggaggccgaggcgggcagatcacttgaggtcaggagttcaagaccaggctggccaacatggtga

SEQ ID NO: 567741 - DNA, 550 bp, Homo sapiens
ataaatgggtgcatgacagaagttaaagacyattatcgggtatcaagtaccatagcactttttggaggcagaagagcttgacaaatgggcatagtgtacatagtaaatgatggtaagggtaaaggataaaatgtatcatcttcctgtcatcagaatgggaccagcactgtgtaaggtgggcatgttaatgacatgatatataagacagcttttgctacaataacaaggaactccctaggcctggcacggtggctcatgcctataaccccagcactttgggaggctaaggcgggtggattacctgaggtcaggagtttgagaccagcctggccatcatggcgaaaccctgtctctaccaaaaaatacaaaaattagccaagcaaggtggcactgcctgtaatcccagatactcgggaggctgaggcactagtggtgcttgaacccaggaggcagaggttgcagtgagccgagatcactccactgcactccagcctgggtgacaaagtgagactccatctcaaaaaataacaataacttaaaaaaagagaaa

SEQ ID NO: 567742 - DNA, 550 bp, Homo sapiens
ataaatgggtgcatgacagaagttaaagactattatygggtatcaagtaccatagcactttttggaggcagaagagcttgacaaatgggcatagtgtacatagtaaatgatggtaagggtaaaggataaaatgtatcatcttcctgtcatcagaatgggaccagcactgtgtaaggtgggcatgttaatgacatgatatataagacagcttttgctacaataacaaggaactccctaggcctggcacggtggctcatgcctataaccccagcactttgggaggctaaggcgggtggattacctgaggtcaggagtttgagaccagcctggccatcatggcgaaaccctgtctctaccaaaaaatacaaaaattagccaagcaaggtggcactgcctgtaatcccagatactcgggaggctgaggcactagtggtgcttgaacccaggaggcagaggttgcagtgagccgagatcactccactgcactccagcctgggtgacaaagtgagactccatctcaaaaaataacaataacttaaaaaaagagaaa

SEQ ID NO: 567743 - DNA, 550 bp, Homo sapiens
ataaatgggtgcatgacagaagttaaagactattatcrggtatcaagtaccatagcactttttggaggcagaagagcttgacaaatgggcatagtgtacatagtaaatgatggtaagggtaaaggataaaatgtatcatcttcctgtcatcagaatgggaccagcactgtgtaaggtgggcatgttaatgacatgatatataagacagcttttgctacaataacaaggaactccctaggcctggcacggtggctcatgcctataaccccagcactttgggaggctaaggcgggtggattacctgaggtcaggagtttgagaccagcctggccatcatggcgaaaccctgtctctaccaaaaaatacaaaaattagccaagcaaggtggcactgcctgtaatcccagatactcgggaggctgaggcactagtggtgcttgaacccaggaggcagaggttgcagtgagccgagatcactccactgcactccagcctgggtgacaaagtgagactccatctcaaaaaataacaataacttaaaaaaagagaaa

SEQ ID NO: 567744 - DNA, 273 bp, Homo sapiens
aaatgcctccttaggtgattgcagcattgtgcaaacagcaaagtgcatttacmcaaaccttgtatagccttgtatagcctataaacacctaggctgtatggcgtagcctattgctcctaggctacatacctgtacagcctgatactttactgaatataccataagcagttgtaacacaatgtaagtacttgtgtacctgaacatagagaaggtacagtaagaatagagtataagatattttaaaatggtactcctgtatagggcacttaccat

SEQ ID NO: 567745 - DNA, 273 bp, Homo sapiens
aaatgcctccttaggtgattgcagcattgtgcaaacagcaaagtgcatttacacaaaccttgtatagccttgtatagcctataaacacctaggctgtatggcgtagcctattgctcctaggctacatacctgtacagcctgatactttactgaatataccataagcagttgtaacacaatgtaagtacttgtgtacctgaacatagagaargtacagtaagaatagagtataagatattttaaaatggtactcctgtatagggcacttaccat

SEQ ID NO: 567746 - DNA, 273 bp, Homo sapiens
aaatgcctccttaggtgattgcagcattgtgcaaacagcaaagtgcatttacacaaaccttgtatagccttgtatagcctataaacacctaggctgtatggcgtagcctattgctcctaggctacatacctgtacagcctgatactttactgaatataccataagcagttgtaacacaatgtaagtacttgtgtacctgaacatagagaagrtacagtaagaatagagtataagatattttaaaatggtactcctgtatagggcacttaccat

SEQ ID NO: 567747 - DNA, 273 bp, Homo sapiens
aaatgcctccttaggtgattgcagcattgtgcaaacagcaaagtgcatttacacaaaccttgtatagccttgtatagcctataaacacctaggctgtatggcgtagcctattgctcctaggctacatacctgtacagcctgatactttactgaatataccataagcagttgtaacacaatgtaagtacttgtgtacctgaacatagagaaggtacagtaagaatagagtataagakattttaaaatggtactcctgtatagggcacttaccat

SEQ ID NO: 567748 - DNA, 413 bp, Homo sapiens
ggaaccagaacaggacataaagtgagcttgtacatccaacagccatgagtaacatcaaaaaggttgtagcctggccaacacggtgaaaccccatctctacaaaaaatacaaaaagtagttgggcttggtagcatgcacctttaatcccagctacttgggaggytgaggcaggagaatcacttgaacccaggggtcagaggttgcagtgagctgagatcgtgccactgcactccagccagggtgacagaaggagaacctgtctcaaaaaagaaaaaaaaagacaggttgcaacccatcctccaagataccccccatacatctaaaacaattagattaaacagactaaacatgtttctatcctctgtctcatgtctctcaggcagcagggcttcccatgtattttatgctagcag

SEQ ID NO: 567749 - DNA, 413 bp, Homo sapiens
ggaaccagaacaggacataaagtgagcttgtacatccaacagccatgagtaacatcaaaaaggttgtagcctggccaacacggtgaaaccccatctctacaaaaaatacaaaaagtagttgggcttggtagcatgcacctttaatcccagctacttgggaggttgaggcaggagaatcacttgaacccaggggkcagaggttgcagtgagctgagatcgtgccactgcactccagccagggtgacagaaggagaacctgtctcaaaaaagaaaaaaaaagacaggttgcaacccatcctccaagataccccccatacatctaaaacaattagattaaacagactaaacatgtttctatcctctgtctcatgtctctcaggcagcagggcttcccatgtattttatgctagcag

SEQ ID NO: 567750 - DNA, 413 bp, Homo sapiens
ggaaccagaacaggacataaagtgagcttgtacatccaacagccatgagtaacatcaaaaaggttgtagcctggccaacacggtgaaaccccatctctacaaaaaatacaaaaagtagttgggcttggtagcatgcacctttaatcccagctacttgggaggttgaggcaggagaatcacttgaacccaggggtcagagkttgcagtgagctgagatcgtgccactgcactccagccagggtgacagaaggagaacctgtctcaaaaaagaaaaaaaaagacaggttgcaacccatcctccaagataccccccatacatctaaaacaattagattaaacagactaaacatgtttctatcctctgtctcatgtctctcaggcagcagggcttcccatgtattttatgctagcag

SEQ ID NO: 567751 - DNA, 599 bp, Homo sapiens
tttaatcccagctacttgggaggttgaggcaggagaatcacttgaacccaggggtcagaggttgcagtgagctgagatcgtgccactgmactccagccagggtgacagaaggagaacctgtctcaaaaaagaaaaaaaaagacaggttgcaacccatcctccaagataccccccatacatctaaaacaattagattaaacagactaaacatgtttctatcctctgtctcatgtctctcaggcagcagggcttcccatgtattttatgctagcaggcactgtcccacacccacctgaagccacggtgtcttaaggcttcttctctcataaaacgtgcctttggatccactaccaacaacttcttgacaaggtccagtgctaaagcaacaattgggcaaatcacagtgaaaaggataaatatattatcagtaatagtatgccagaattaacaagtcaccatccagaaagagcagagagggtctgagatcatcagggagtcagcagacaggaccccctaatcttcctcactctctgtattcagagtcctgtgagaagaccaggaatgataatgacactccctgtctcctgctgctgggacat

SEQ ID NO: 567752 - DNA, 413 bp, Homo sapiens
ggaaccagaacaggacataaagtgagcttgtacatccaacagccatgagtaacatcaaaaaggttgtagcctggccaacacggtgaaaccccatctctacaaaaaatacaaaaagtagttgggcttggtagcatgcacctttaatcccagctacttgggaggttgaggcaggagaatcacttgaacccaggggtcagaggttgcagtgagctgagatcgtgccactgcactccagccagggtgacagaakgagaacctgtctcaaaaaagaaaaaaaaagacaggttgcaacccatcctccaagataccccccatacatctaaaacaattagattaaacagactaaacatgtttctatcctctgtctcatgtctctcaggcagcagggcttcccatgtattttatgctagcag

SEQ ID NO: 567753 - DNA, 450 bp, Homo sapiens
attccattccatttcattccattccagttgatggctttccgtttgattgtattcctttcatgtkccttcaattcgagtccattgcattccattccatttgatagcatttgattcaactctattccattcaactctattctattccattccatttctttccatctgattcaattccactttattcctttccattccattccattcaattccattcgtttccattccatttgtctccattcctctccagtccattccaatcgagtccattccattccagtccattccattcgattccattccattcgattgtattccatactatcggattgcttttgattcctttctattcgaataaattccttttgagagcatgcctttcgagtccatcatgtttgggtccattccatccaagtccattacatttgggtccattctattccattccgttcc

SEQ ID NO: 567754 - DNA, 491 bp, Homo sapiens
actttttcgtatttcaggagttacactgtttgtgatatggtacatgacctggtcaatcttaggctctgaagctctccctggtggaaatttatttggattgttaattattttttatagtgccattattgggggaaaaaatttacaactcattagaatacctttagtgccgccatttccacctcttcttggtaagcatataattagctctcttttctttattattgactatatgcaaattttgaacattttcttgttgaattagttataattcagcaatatttcaatgtagtatgttttatatagtttcttcatgtgtgtatttactgcgtgtgtgtgtgtgtgtacagatcctttatatgggcatttatttctctctctgtctacatatatacacacacaagttttacccaaaatttatttttgaaataaatttaatatccttagcacattattcctgttgctttwttgtttaatagaacctttaaaaattt

SEQ ID NO: 567755 - DNA, 386 bp, Homo sapiens
tgaaccaaggagaaaattgaaaagttctcycttttaaaatgaattatgcagtttttaagttattttctttggcatgttagtattgtatttatacttatcacgttaatcaaacagttcatatcaaaaagtcaatgggaaaacactaataggacactattattatactatgtattaggaaagttcaggaaggtagcattagctatttaatcacagtaaaattggtcttttaataattaaaatacaataatattttatgaaagatgaaattgtttataatccaacctatgatgacatataaaatataatagagttcaaagtccagtgggacaatctgttgaaatgagattttgtttagtgaaacttcttatgaaaaaagactttatagt

SEQ ID NO: 567756 - DNA, 386 bp, Homo sapiens
tgaaccaaggagaaaattgaaaagttctctcttttaaaatgaattatgcagtttttaagttattttctttggcatgttagtattgtatttatacttatcacgttaatcaaacagttcatatcaaaaagtcaatgggaaaacastaataggacactattattatactatgtattaggaaagttcaggaaggtagcattagctatttaatcacagtaaaattggtcttttaataattaaaatacaataatattttatgaaagatgaaattgtttataatccaacctatgatgacatataaaatataatagagttcaaagtccagtgggacaatctgttgaaatgagattttgtttagtgaaacttcttatgaaaaaagactttatagt

SEQ ID NO: 567757 - DNA, 386 bp, Homo sapiens
tgaaccaaggagaaaattgaaaagttctctcttttaaaatgaattatgcagtttttaagttattttctttggcatgttagtattgtatttatacttatcacgttaatcaaacagttcatatcaaaaagtcaatgggaaaacactaataggacactattattatactatgtattaggaaagttcaggaaggtagcattagctatttaatcacagtaaaattgrtcttttaataattaaaatacaataatattttatgaaagatgaaattgtttataatccaacctatgatgacatataaaatataatagagttcaaagtccagtgggacaatctgttgaaatgagattttgtttagtgaaacttcttatgaaaaaagactttatagt

SEQ ID NO: 567758 - DNA, 386 bp, Homo sapiens
tgaaccaaggagaaaattgaaaagttctctcttttaaaatgaattatgcagtttttaagttattttctttggcatgttagtattgtatttatacttatcacgttaatcaaacagttcatatcaaaaagtcaatgggaaaacactaataggacactattattatactatgtattaggaaagttcaggaaggtagcattagctatttaatcacagtaaaattggtcttttaataattaaaatacaataatattttatgaaagatgaaattgtttataatccaacctatgrtgacatataaaatataatagagttcaaagtccagtgggacaatctgttgaaatgagattttgtttagtgaaacttcttatgaaaaaagactttatagt

SEQ ID NO: 567759 - DNA, 560 bp, Homo sapiens
tatctaccatccatttgtcttatgtttgaattcctcaaaataagtctctaactactgtctctagatcctaactccttttcatttcttaattcagcaaattttgtctctgcttatccattccaatgacactcatagcaaagttcatccattacatagttactacaaaatccagtgaatttttaaattaatgtttatrataaaatactcaaatgtacttttattttaaaaattagaactttataaataaaggaggaatgaccttaaactatgccttcaaatcataatgcccataactccacccaaagtgacaactcttaggagtttttttcttttccaatttttattttggctcaaggggtacatcagcaggctgtgttatatggataaattgcatgtcacaggggtttggtatgcagattactttgtcacccaggttgtaagtataatacccaataggtagtttttctattctccccctccttccaccctccaccctcaaattcacctagtgacgattgttcccttctttctgtccatgtgtactcagtgtttagctccca

SEQ ID NO: 567760 - DNA, 560 bp, Homo sapiens
tatctaccatccatttgtcttatgtttgaattcctcaaaataagtctctaactactgtctctagatcctaactccttttcatttcttaattcagcaaattttgtctctgcttatccattccaatgacactcatagcaaagttcatccattacatagttactacaaaatccagtgaatttttaaattaatgtttataataaaatactcaaatgyacttttattttaaaaattagaactttataaataaaggaggaatgaccttaaactatgccttcaaatcataatgcccataactccacccaaagtgacaactcttaggagtttttttcttttccaatttttattttggctcaaggggtacatcagcaggctgtgttatatggataaattgcatgtcacaggggtttggtatgcagattactttgtcacccaggttgtaagtataatacccaataggtagtttttctattctccccctccttccaccctccaccctcaaattcacctagtgacgattgttcccttctttctgtccatgtgtactcagtgtttagctccca

SEQ ID NO: 567761 - DNA, 560 bp, Homo sapiens
tatctaccatccatttgtcttatgtttgaattcctcaaaataagtctctaactactgtctctagatcctaactccttttcatttcttaattcagcaaattttgtctctgcttatccattccaatgacactcatagcaaagttcatccattacatagttactacaaaatccagtgaatttttaaattaatgtttataataaaatactcaaatgtacttttattttaaaaattagaactttataaataaaggaggaatgaccttaaactatgccttcaaatcataatgcccataactccacccaaagtgacaactcttaggagtttttttcttytccaatttttattttggctcaaggggtacatcagcaggctgtgttatatggataaattgcatgtcacaggggtttggtatgcagattactttgtcacccaggttgtaagtataatacccaataggtagtttttctattctccccctccttccaccctccaccctcaaattcacctagtgacgattgttcccttctttctgtccatgtgtactcagtgtttagctccca

SEQ ID NO: 567762 - DNA, 560 bp, Homo sapiens
tatctaccatccatttgtcttatgtttgaattcctcaaaataagtctctaactactgtctctagatcctaactccttttcatttcttaattcagcaaattttgtctctgcttatccattccaatgacactcatagcaaagttcatccattacatagttactacaaaatccagtgaatttttaaattaatgtttataataaaatactcaaatgtacttttattttaaaaattagaactttataaataaaggaggaatgaccttaaactatgccttcaaatcataatgcccataactccacccaaagtgacaactcttaggagtttttttcttttccaatttttattttggctcaaggggtacatcagcaggctgtgttatatggataaattgcatgtcacaggggtttggtatgcagattaytttgtcacccaggttgtaagtataatacccaataggtagtttttctattctccccctccttccaccctccaccctcaaattcacctagtgacgattgttcccttctttctgtccatgtgtactcagtgtttagctccca

SEQ ID NO: 567763 - DNA, 312 bp, Homo sapiens
ctgctgtgaatgccattatttcattcctttttatagctgagtagtattccgtccatggtctgtgtgtgtatatatatacacacatacatatatatatatatacatatatacacatatatgtgtgcatatacacayatatatatatacaccacattttctctatgcattctttgattgatgggcatttgagctagttccatatccttcacaattgcaaattgtgctgcaataaacgtatgtgcaagtgtttttttcatataatgacttcttttcctctgggtagatacccagtagtgggattgctagatcaaa

SEQ ID NO: 567764 - DNA, 586 bp, Homo sapiens
ttaaattaattttcattctctcagttttgttttaggtgctgtctctcctgttgttgttgtcctttacaygatggtgttgcaagaaaatggatatggtgttgaggaagacattccaacctactaatggctgctagcagtatggatgacattctggctatcactggattcaatacatgcttgagcatagtcttcttctcgggtaaacaagaaaatataacaaccaccagatcattcatgaccttttttgttagttctttaaacagggtttctggctttgcttcttcatttattaaccaagactgttcaatttaacatctttttaatctccatagaaagctcattccagaccaaggaagatatttcagtggcttaagataccactacttaacacacatgatctcactttaataatcatgtgacaattaatttgatacaccatattattactatttatatgcttatgttgcttttgaattttatcagttctcattagaaaaaattaagcagcagtattatttgtactactaatattttaataggcatttttgaaatgtgcctttttggccatcctaataaacaactggtt

SEQ ID NO: 567765 - DNA, 586 bp, Homo sapiens
ttaaattaattttcattctctcagttttgttttaggtgctgtctctcctgttgttgttgtcctttacatgatggtgttgcaagaaaatggatatggtgttgaggaagacattccaacctactaatggctgctagcagtatggatgacattctggctatcactggattcaatacatgcttgagcatagtcttcttctcgggtaaacaagaaaatataacaaccaccagatcattcatgaccttttttgttagttctttaaacagggtttctggctttgcttcttcatttattaaccaagactgttcaatttaacatctttttaatctccatagaaagctcattccagaccaaggaagatatttcagtggcttaagataccactacttaacacacatgatctcactttaataatcatgtgacaattaatttgatamaccatattattactatttatatgcttatgttgcttttgaattttatcagttctcattagaaaaaattaagcagcagtattatttgtactactaatattttaataggcatttttgaaatgtgcctttttggccatcctaataaacaactggtt

SEQ ID NO: 567766 - DNA, 586 bp, Homo sapiens
ttaaattaattttcattctctcagttttgttttaggtgctgtctctcctgttgttgttgtcctttacatgatggtgttgcaagaaaatggatatggtgttgaggaagacattccaacctactaatggctgctagcagtatggatgacattctggctatcactggattcaatacatgcttgagcatagtcttcttctcgggtaaacaagaaaatataacaaccaccagatcattcatgaccttttttgttagttctttaaacagggtttctggctttgcttcttcatttattaaccaagactgttcaatttaacatctttttaatctccatagaaagctcattccagaccaaggaagatatttcagtggcttaagataccactacttaacacacatgatctcactttaataatcatgtgacaattaatttgatacaccatattattactatttatmtgcttatgttgcttttgaattttatcagttctcattagaaaaaattaagcagcagtattatttgtactactaatattttaataggcatttttgaaatgtgcctttttggccatcctaataaacaactggtt

SEQ ID NO: 567767 - DNA, 330 bp, Homo sapiens
tggatcacatgaggtcaggagttcaagaccagcctggccaacgaacatggtgaaaccccgtctccactaaaaatacaaaacttagccrggcacggttgtgggcatctgtaatcccagctactcaggaggctgaagcagaagaatcacttgaacccaggaggcggaggctgtagtgagctatccagcctgggcaacagagcgagactctgtctcaaaaaaatttttttaattaaaaaaataatacttagaagaacatatagggaaatatttgtacctaatcttcatattttcttaagcttaaaagtgtaattgttgatctaaaaggtatat

SEQ ID NO: 567768 - DNA, 330 bp, Homo sapiens
tggatcacatgaggtcaggagttcaagaccagcctggccaacgaacatggtgaaaccccgtctccactaaaaatacaaaacttagccaggcacggtkgtgggcatctgtaatcccagctactcaggaggctgaagcagaagaatcacttgaacccaggaggcggaggctgtagtgagctatccagcctgggcaacagagcgagactctgtctcaaaaaaatttttttaattaaaaaaataatacttagaagaacatatagggaaatatttgtacctaatcttcatattttcttaagcttaaaagtgtaattgttgatctaaaaggtatat

SEQ ID NO: 567769 - DNA, 330 bp, Homo sapiens
tggatcacatgaggtcaggagttcaagaccagcctggccaacgaacatggtgaaaccccgtctccactaaaaatacaaaacttagccaggcacggttgtgggcatctgtaatcccagctactcaggaggctgaagcagaagaatmacttgaacccaggaggcggaggctgtagtgagctatccagcctgggcaacagagcgagactctgtctcaaaaaaatttttttaattaaaaaaataatacttagaagaacatatagggaaatatttgtacctaatcttcatattttcttaagcttaaaagtgtaattgttgatctaaaaggtatat

SEQ ID NO: 567770 - DNA, 330 bp, Homo sapiens
tggatcacatgaggtcaggagttcaagaccagcctggccaacgaacatggtgaaaccccgtctccactaaaaatacaaaacttagccaggcacggttgtgggcatctgtaatcccagctactcaggaggctgaagcagaagaatcacttgaacccaggaggcggaggctgtagtgagctatccagcctgggcaacagagcgagactctgtctcaaaaaaatttttttaattaaaaaaataatacttagwagaacatatagggaaatatttgtacctaatcttcatattttcttaagcttaaaagtgtaattgttgatctaaaaggtatat

SEQ ID NO: 567771 - DNA, 532 bp, Homo sapiens
gtcttggtaacttgcatgttacaaggaatctcttcatttctcctaggttatccaacttgtcagtatataatcattcatagtagactcttagaatcctttttatttctgtaatatctgttgcagtgtcttctcttttgttcctaaaagaagttgagtcttcttttttttcttaaatattctagctaatgatttgtcaattttgttgaactttgaaacaactactagtttcactggattttttctattctctagccttttttttttttttttttttttgagatggagttttgctcttattgcccaggctgtagtgcaatggcgtgatctccgctagctgcaacctccgcttcccagttcaagtgactctcctgcctcagcctccagagtagctgggattacaggcatgcaccaccatgcctggctaattttgtatttttyagtagagacacgtttctccctgttgctgaggctggtctcgaactcccgacctcaggtgatccacttgccttggcctcccaaagtgctgggatta

SEQ ID NO: 567772 - DNA, 550 bp, Homo sapiens
ttgctctgtcagccaggctagagtgcagcctggaactcctgagctcaagggacctcctctctcaggctactgagtacttggactataggtacacaacacatacccggctaatttcttattttcttgtgaagatggggtttcactctgttgcccaagttrctctcaaatcttgggctcaagcaatccttctgccttggcctcccaaagtgctaggattaaaggtgtgagcccaccatgcgctgcctgttatatttagtagaaaatatatctaaaaatatacttatgtactatattgaatccactacccagagcttaactgaactatttttgtgactcattctgtttttttttattttttgctttttacttattacaatgaactacaagtatggatatattaatattaattaatataaaatatactggaatcttttgtatttttttttccttttttcttcaccaaaagcagaaacttaaatacactgaaatcttaaatgacccttgaatgtttctgggactgaccctggaacaaaattttttatgttgttat

SEQ ID NO: 567773 - DNA, 550 bp, Homo sapiens
ttgctctgtcagccaggctagagtgcagcctggaactcctgagctcaagggacctcctctctcaggctactgagtacttggactataggtacacaacacatacccggctaatttcttattttcttgtgaagatggggtttcactctgttgcccaagttactctcaaatcttgggctcaagcaatccttctgccttggcctcccaaagtgctaggattaaaggtgtgagcccaccatgcgctgyctgttatatttagtagaaaatatatctaaaaatatacttatgtactatattgaatccactacccagagcttaactgaactatttttgtgactcattctgtttttttttattttttgctttttacttattacaatgaactacaagtatggatatattaatattaattaatataaaatatactggaatcttttgtatttttttttccttttttcttcaccaaaagcagaaacttaaatacactgaaatcttaaatgacccttgaatgtttctgggactgaccctggaacaaaattttttatgttgttat

SEQ ID NO: 567774 - DNA, 366 bp, Homo sapiens
gtagaaaatatatctaaaaatatacttatgtactatattgaatccactacccagagcttaactgaactatttttgtgactcattctgkttttttttattttttgctttttacttattacaatgaactacaagtatggatatattaatattaattaatataaaatatactggaatcttttgtatttttttttccttttttcttcaccaaaagcagaaacttaaatacactgaaatcttaaatgacccttgaatgtttctgggactgaccctggaacaaaattttttatgttgttattacattgttcttttcatgttaaaatcatttgtttctttttcatatagtacatcaaagaagaattgttaata

SEQ ID NO: 567775 - DNA, 296 bp, Homo sapiens
atgtatatgaaagtgttgatatagactaaaaaattgaataattaagaaagtagttagttgtcacagtaggagtgaagtgaaaagcttcccctttcaccctctgaagattacctgaaatgaactgaccatacacagattaataaaakaaagggtatacaaacttacttaacctgcaaaaacatgagagctatacacaaagaataagacttgaagatggctcagatcttaaacgctctcctcataggcaatagatatatagacccaggatgcagacattattttgtaaataatttcct

SEQ ID NO: 567776 - DNA, 296 bp, Homo sapiens
atgtatatgaaagtgttgatatagactaaaaaattgaataattaagaaagtagttagttgtcacagtaggagtgaagtgaaaagcttcccctttcaccctctgaagattacctgaaatgaactgaccatacacagattaataaaataaagggtatacaaacttacttaacctgcaaaaacatgagagctatacacaaagwataagacttgaagatggctcagatcttaaacgctctcctcataggcaatagatatatagacccaggatgcagacattattttgtaaataatttcct

SEQ ID NO: 567777 - DNA, 451 bp, Homo sapiens
ttatgaatattttagaataatatatttttaagcccaaacctcaccaaatgttttttctaaaacaaatactttttgttgttgtttgtttgtgtttgatactgtgtctcactctgtcacccaggtatggagtgcagtggtgcaaccatggctcactgcagccttgacctcctgggctcaagtgattctcctacctcagccttccaartagctgggctacaggcatgcaccatcatgccctggtaattaaagaaaaaaaaatttttgttagagaccaagtctcattatatcaccctggctagtcttgaactcctggaatcaactgatcctcataccttggcttcccaaattattgggattataggtgtgagccacagtgcctgaccacatatttctatacttcactgaggaaaggaaggtgctaggaaaattggttaagaactattttttaaaa

SEQ ID NO: 567778 - DNA, 554 bp, Homo sapiens
ttcctttggaagctggatgggacagacaaattacaggaaggtgagagatggaactgcacaggaaaaaagtttgtctttgtcactttaatcttatcattactagagaatatttatgaatattttagaataatatatttttaagcccaaacctcaccaaatgttttttctaaaacaaatactttttgttgttgtttgtttgtgtttgatactgtgtctcactctgtcacccaggtatggagtgcagtggtgcaaccatggctcactgcagccttgacctcctgggctcaagtgattctcctacctcagccttccaagtagctgggctacaggcatgcaccatcatgccctggtaattaaagaaaaaaaaatttttgttagagaccaagtctcattatatcaccctggctagtcttgaactcctggaatcaactgakcctcataccttggcttcccaaattattgggattataggtgtgagccacagtgcctgaccacatatttctatacttcactgaggaaaggaaggtgctaggaaaattggttaagaactattt

SEQ ID NO: 567779 - DNA, 451 bp, Homo sapiens
ttatgaatattttagaataatatatttttaagcccaaacctcaccaaatgttttttctaaaacaaatactttttgttgttgtttgtttgtgtttgatactgtgtctcactctgtcacccaggtatggagtgcagtggtgcaaccatggctcactgcagccttgacctcctgggctcaagtgattctcctacctcagccttccaagtagctgggctacaggcatgcaccatcatgccctggtaattaaagaaaaaaaaatttttgttagagaccaagtctcattatatcaccctggctagtcttgaactcctggaatcaactgatcctcatrccttggcttcccaaattattgggattataggtgtgagccacagtgcctgaccacatatttctatacttcactgaggaaaggaaggtgctaggaaaattggttaagaactattttttaaaa

SEQ ID NO: 567780 - DNA, 451 bp, Homo sapiens
ttatgaatattttagaataatatatttttaagcccaaacctcaccaaatgttttttctaaaacaaatactttttgttgttgtttgtttgtgtttgatactgtgtctcactctgtcacccaggtatggagtgcagtggtgcaaccatggctcactgcagccttgacctcctgggctcaagtgattctcctacctcagccttccaagtagctgggctacaggcatgcaccatcatgccctggtaattaaagaaaaaaaaatttttgttagagaccaagtctcattatatcaccctggctagtcttgaactcctggaatcaactgatcctcataccttggcttcccaaattattgggattataggtgtgagccacagtgyctgaccacatatttctatacttcactgaggaaaggaaggtgctaggaaaattggttaagaactattttttaaaa

SEQ ID NO: 567781 - DNA, 554 bp, Homo sapiens
ttcctttggaagctggatgggacagacaaattacaggaaggtgagagatggaactgcacaggaaaaaagtttgtctttgtcactttaatcttatcattactagagaatatttatgaatattttagaataatatatttttaagcccaaacctcaccaaatgttttttctaaaacaaatactttttgttgttgtttgtttgtgtttgatactgtgtctcactctgtcacccaggtatggagtgcagtggtgcaaccatggctcactgcagccttgacctcctgggctcaagtgattctcctacctcagccttccaagtagctgggctacaggcatgcaccatcatgccctggtaattaaagaaaaaaaaatttttgttagagaccaagtctcattatatcaccctggctagtcttgaactcctggaatcaactgatcctcataccttggcttcccaaattattgggattataggtgtgagccacagtgcctgaccacatatttctwtacttcactgaggaaaggaaggtgctaggaaaattggttaagaactattt

SEQ ID NO: 567782 - DNA, 290 bp, Homo sapiens
tggctcatggttccatagactatataggaagcatggtggtttctgtttctggggagtcctccaacacttactggcagggtaattttgaagaagtcatrataagatggttgttacaattaaatgaaataatcaaattggaagagcttagttagctgtcttccctaaatgaatcactgacaagtaagagtgtgattgattttcctaccagtcaggactcaccccttgaagctataggagggtaaacctctgaagaccatacaatttagggaacactaacacctcaaaaaact

SEQ ID NO: 567783 - DNA, 290 bp, Homo sapiens
tggctcatggttccatagactatataggaagcatggtggtttctgtttctggggagtcctccaacacttactggcagggtaattttgaagaagtcatgataagatggttgttacaattaaatgaaataatcaaaktggaagagcttagttagctgtcttccctaaatgaatcactgacaagtaagagtgtgattgattttcctaccagtcaggactcaccccttgaagctataggagggtaaacctctgaagaccatacaatttagggaacactaacacctcaaaaaact

SEQ ID NO: 567784 - DNA, 536 bp, Homo sapiens
accagggacaatggagacagagtacttgggattcatcactggagtcctcaaagcatcttccaagggcataataaggaaggactcaaacacctttgaatctccgtgagaccaggcatgaggtcttttgaaagagttctttaactggagtgaatgtcaaagagaagtataataaaataaaagacstgagtagggtcccccttgttcataaaatgacactacctaaatcaccaaatctcactgagccttggtttaactcaagaggttccatgccactataagaggtggtaactgccaactgataggaaatattttcatatgcatagtatagtgccccatatttatgaacttcttaagagtcttcaaaaagctttctatatacattatcctttactttctaacttttctaaatacaaggtgagagagacacaagtgttctatcaaaacagaatcttggccgggcacagtgactcacgcctgtaatcccagcactttgggaggcagaagcgggtggctcacttgaggtcagcagttcgaga

SEQ ID NO: 567785 - DNA, 613 bp, Homo sapiens
acttttctaaatacaaggtgagagagacacaagtgttctatcaaaacagaatcttggccgggcacagtgactcacgcctgtaatcccagcactttgggaggcagaagcgggtggctcacttgaggtcagcagttcgagaccaacatggccaacatggcaaaactccatctctactgaagatacaaaaaattagccaggtgtggtaacaggtgcctgtaattccagctacttgggaggctgaggtcagagaattgcttgaacccaggaggcggaggttrcaatgagcagagatcacaccactgcactccagtctgggcaacaagagcaaaacttcatctcaaaataaaaaaaaaaataaaataaagacttttgcaaggaccatgtcccacccagaatggtgcctgcctttctacagtttttcagaaagaggaaacattttctgcttctcttgctgaggttttttttaaccacccattaggaatgtatagatttcaggattgaacactgcgattccctcagcactaaaggagtaaaatttcaaacagagctgaaagtgcaatgtggaaagctcaggctgaggaaggttcttagccagtagaccaagggcagaaag

SEQ ID NO: 567786 - DNA, 334 bp, Homo sapiens
tacaaaaatgtttcaaaataaccagatgaaaatcatccttatgccagaaagacttgttgtttttttttttttwttactagaaatgaaacagtatttgttgtattgacatacttaggcttagacctatgtttaacaagaaagcctaataataacactgtggttagactgtagcctatttttccaaatcatcattttattattaaggaaagaaaggatcaaatacctttcattcatctgatatgatcctttaaaacacattccactaatgagtcacatttggaacagctgaaaatcttttaataaaactttttaaagatgagctcatggcttagtg

SEQ ID NO: 567787 - DNA, 334 bp, Homo sapiens
tacaaaaatgtttcaaaataaccagatgaaaatcatccttatgccagaaagacttgttgttttttttttttttttactagaaatgaaacagtatttgttgtattgacatacttaggcttagacctatgtttaacaagaaagcctaataataacactgtggttagactgtagcctatttttccaaaycatcattttattattaaggaaagaaaggatcaaatacctttcattcatctgatatgatcctttaaaacacattccactaatgagtcacatttggaacagctgaaaatcttttaataaaactttttaaagatgagctcatggcttagtg

SEQ ID NO: 567788 - DNA, 610 bp, Homo sapiens
ttcatctgatatgatcctttaaaacacattccactaatgagtcacatttggaacagctgaaaatcttttaataaaactttttaaagatgagctcatggcttagtgtatatttcacaagcttaattaggtcaaatggaaggaactcagatgagtagttgcccaatcagagcccattatttgtaagtcatcagcccccttcatgaccttaaaactccacyctgacctaattattccaaacctatatacaacaaagtgaaaggattaattttcattcatcaacctctcaatcccagattttcaaagaaaaaacctatgtaaggaatacttaccaaaaccagacaggaaaattagagcctgcatacttaagagtcaaatttgttccactacagccaggtcacatacaattacatcatttggttcttcatacactctggaactgaccaggacagagtttagcatagaaaaactgtaagaaataggttccaagacatagaaattgccaagtccaaaaggctatgaaaaaaactaatgtaaatgagagactcccctccctttgttttaaagaaatggacccatcagagaaatgcaaatcaaaaccacaatgagatac

SEQ ID NO: 567789 - DNA, 628 bp, Homo sapiens
attgccaacaatcatattctttataaggcacagagaagatttttctgaagaataagtatgtgaacctgaaaagtaatcaccacttggtagtgacaatatggatagggtgaagggcgtcaccaagaagcaatgaaaagatacatttgcagttaaattygaaaaccatgatggttaatacatatagtaataaagaatactttctcctatttcaaaattattttagaatttaagatagaagctaaaatacctagggataatgatatgactatcaaaaattaaaaattaaaggacattttgagtattataagttaagaatgagaacttattacccaatgaacaggggataattcattatgctccatatccattgaattaaaagacaggcccattacctggataatttgaaagtttaattttatttaaaagtcttgtttcattcatcaagctaaaggattagctcccagaaatattctaggattgcatatccccaactctgtaggaagtatagaaagaatgttataagggccaccatctaaacattattatgtaaataatttagtaccattccatttgcctttgtagatttaaaaatgtaaatggctttcgcatattaggaaacatcattttt

SEQ ID NO: 567790 - DNA, 628 bp, Homo sapiens
attgccaacaatcatattctttataaggcacagagaagatttttctgaagaataagtatgtgaacctgaaaagtaatcaccacttggtagtgacaatatggatagggtgaagggcgtcaccaagaagcaatgaaaagatacatttgcagttaaatttgaaaaccatgatgkttaatacatatagtaataaagaatactttctcctatttcaaaattattttagaatttaagatagaagctaaaatacctagggataatgatatgactatcaaaaattaaaaattaaaggacattttgagtattataagttaagaatgagaacttattacccaatgaacaggggataattcattatgctccatatccattgaattaaaagacaggcccattacctggataatttgaaagtttaattttatttaaaagtcttgtttcattcatcaagctaaaggattagctcccagaaatattctaggattgcatatccccaactctgtaggaagtatagaaagaatgttataagggccaccatctaaacattattatgtaaataatttagtaccattccatttgcctttgtagatttaaaaatgtaaatggctttcgcatattaggaaacatcattttt

SEQ ID NO: 567791 - DNA, 628 bp, Homo sapiens
attgccaacaatcatattctttataaggcacagagaagatttttctgaagaataagtatgtgaacctgaaaagtaatcaccacttggtagtgacaatatggatagggtgaagggcgtcaccaagaagcaatgaaaagatacatttgcagttaaatttgaaaaccatgatggttaatacatatagtaataaagaatactttctcctrtttcaaaattattttagaatttaagatagaagctaaaatacctagggataatgatatgactatcaaaaattaaaaattaaaggacattttgagtattataagttaagaatgagaacttattacccaatgaacaggggataattcattatgctccatatccattgaattaaaagacaggcccattacctggataatttgaaagtttaattttatttaaaagtcttgtttcattcatcaagctaaaggattagctcccagaaatattctaggattgcatatccccaactctgtaggaagtatagaaagaatgttataagggccaccatctaaacattattatgtaaataatttagtaccattccatttgcctttgtagatttaaaaatgtaaatggctttcgcatattaggaaacatcattttt

SEQ ID NO: 567792 - DNA, 628 bp, Homo sapiens
attgccaacaatcatattctttataaggcacagagaagatttttctgaagaataagtatgtgaacctgaaaagtaatcaccacttggtagtgacaatatggatagggtgaagggcgtcaccaagaagcaatgaaaagatacatttgcagttaaatttgaaaaccatgatggttaatacatatagtaataaagaatactttctcctatttcaaaattattttagaatttaagatagaagctaaaatacctagggataatgatatgactatcaaaaattaaaaattaaaggacattttgagtattataarttaagaatgagaacttattacccaatgaacaggggataattcattatgctccatatccattgaattaaaagacaggcccattacctggataatttgaaagtttaattttatttaaaagtcttgtttcattcatcaagctaaaggattagctcccagaaatattctaggattgcatatccccaactctgtaggaagtatagaaagaatgttataagggccaccatctaaacattattatgtaaataatttagtaccattccatttgcctttgtagatttaaaaatgtaaatggctttcgcatattaggaaacatcattttt

SEQ ID NO: 567793 - DNA, 514 bp, Homo sapiens
ctgatttggaaaggagacagtcaaattgtccctgtttaaagacaatgtgatcttatacacggaaaaaaataagaygctaccaaaagcttcttagggtgatacatgaaattaataaagttgcaggatataaataaacatacaaaaatcagtagcatttctatatattgatagtaaactagctgaaacaagaaattaagaaagcaattccttttacaatagctacaaaaatgtacttagaaataaatttaagcaaggaagtaaaagatttctacaacaaaaatgacaaatattaatgaaagattttaaggaacccccaaaaaggaaagacatccatgtttatagattgaaaatactaaatattcttaaaatgacccactatcctatgtgatttacaaatttagtacaatcactagcttgtatttttaaaagcacctttgctacatattcttaagatattcaatgacaatgcctggatttaagtttgaggtattattatatctattttatattgggc

SEQ ID NO: 567794 - DNA, 514 bp, Homo sapiens
ctgatttggaaaggagacagtcaaattgtccctgtttaaagacaatgtgatcttatacacggaaaaaaataagatkctaccaaaagcttcttagggtgatacatgaaattaataaagttgcaggatataaataaacatacaaaaatcagtagcatttctatatattgatagtaaactagctgaaacaagaaattaagaaagcaattccttttacaatagctacaaaaatgtacttagaaataaatttaagcaaggaagtaaaagatttctacaacaaaaatgacaaatattaatgaaagattttaaggaacccccaaaaaggaaagacatccatgtttatagattgaaaatactaaatattcttaaaatgacccactatcctatgtgatttacaaatttagtacaatcactagcttgtatttttaaaagcacctttgctacatattcttaagatattcaatgacaatgcctggatttaagtttgaggtattattatatctattttatattgggc

SEQ ID NO: 567795 - DNA, 514 bp, Homo sapiens
ctgatttggaaaggagacagtcaaattgtccctgtttaaagacaatgtgatcttatacacggaaaaaaataagatgctaccaaaagcttcttagggtgatacatgaaattaataaagttgcaggatataaatmaacatacaaaaatcagtagcatttctatatattgatagtaaactagctgaaacaagaaattaagaaagcaattccttttacaatagctacaaaaatgtacttagaaataaatttaagcaaggaagtaaaagatttctacaacaaaaatgacaaatattaatgaaagattttaaggaacccccaaaaaggaaagacatccatgtttatagattgaaaatactaaatattcttaaaatgacccactatcctatgtgatttacaaatttagtacaatcactagcttgtatttttaaaagcacctttgctacatattcttaagatattcaatgacaatgcctggatttaagtttgaggtattattatatctattttatattgggc

SEQ ID NO: 567796 - DNA, 616 bp, Homo sapiens
cagtctcgctctgtcacccaggctggagtgctgtggcgcgatctcggctcactgcaagctccgcctcctgggttcacgccattctcctgcctcagtctcccgagcagctgagaatacaggcgcctgccaccacgcctgctaatttttgtatttttagtagagacagggtttcacggtgttagccaggatagtctccatctcctgacctcgtgatcctcccayctcagcctcccaaagtgctgagattacaggcgtgagccagcacgctcagcctgtttctcctaaatctaaagactcaatataataatcaagagaacgcctcagcaccgcgcctagcacttagtaggtagtgatcaagagagaagacctcttaagtggttttaatggttaaggaccacaggttctcaagaaagggaaatctcaattcaagtcccacctccatctcttggaaactgagaaaccttgaactagtcactcagaggagccaaagatccttgatttctacatgtgcaaaaggggagtgtggcagtagcactgcagagggttgactgagctttcagggtgatgatgactatatgatcatgcctctcttaatcatgggatggttctgagaaat

SEQ ID NO: 567797 - DNA, 616 bp, Homo sapiens
cagtctcgctctgtcacccaggctggagtgctgtggcgcgatctcggctcactgcaagctccgcctcctgggttcacgccattctcctgcctcagtctcccgagcagctgagaatacaggcgcctgccaccacgcctgctaatttttgtatttttagtagagacagggtttcacggtgttagccaggatagtctccatctcctgacctcgtgatcctcccacctcagcctcccaaagtgctgagattacaggcgtgagccagcacgctcagcctgtttctcctaaatctaaagactcaatataataatcaagagaacgcctcagcaccgcgcctagcacttagtaggtagtgatcaagagagaagacctcttaagtggttttaatggttaaggaccacaggttctcaagaaagggaaatctcaattcaagtcccacctccatctcttggaaactgagaaaccttgaacwagtcactcagaggagccaaagatccttgatttctacatgtgcaaaaggggagtgtggcagtagcactgcagagggttgactgagctttcagggtgatgatgactatatgatcatgcctctcttaatcatgggatggttctgagaaat

SEQ ID NO: 567798 - DNA, 543 bp, Homo sapiens
tcagtttcacttggctaaagtcaagttgtaaagtactgatttcttcaggaggctctgaagggaaaacccattttcttgcctttttctgcttttagtggttacctatattccctggattgtggccctttcctccatttttaatgcacaccactccaatctctgcacagtgctatggtttgaatgtgttccccaaagttcatgtgttggaaatttaatccccaatgcaagtgttgagaggtgggacttttaagaggagattaggtcatgaaagatctgccctcattaatagagtaatgatgttatctcagcagagggttaattatcatgsggatgggttcctaataaaaggattgagttcagccccctttctctcttgatgtgataccttccatcatgggatgacacagcaagaagaccctcaccagaagcaggccctttgatcttgaccttcccagcctccagaactgtaagaaataaacttgttctttataaattacccagtctcagatattgcatagcaatacaaaaaagactaagacactc

SEQ ID NO: 567799 - DNA, 543 bp, Homo sapiens
tcagtttcacttggctaaagtcaagttgtaaagtactgatttcttcaggaggctctgaagggaaaacccattttcttgcctttttctgcttttagtggttacctatattccctggattgtggccctttcctccatttttaatgcacaccactccaatctctgcacagtgctatggtttgaatgtgttccccaaagttcatgtgttggaaatttaatccccaatgcaagtgttgagaggtgggacttttaagaggagattaggtcatgaaagatctgccctcattaatagagtaatgatgttatctcagcagagggttaattatcatgcggwtgggttcctaataaaaggattgagttcagccccctttctctcttgatgtgataccttccatcatgggatgacacagcaagaagaccctcaccagaagcaggccctttgatcttgaccttcccagcctccagaactgtaagaaataaacttgttctttataaattacccagtctcagatattgcatagcaatacaaaaaagactaagacactc

SEQ ID NO: 567800 - DNA, 543 bp, Homo sapiens
tcagtttcacttggctaaagtcaagttgtaaagtactgatttcttcaggaggctctgaagggaaaacccattttcttgcctttttctgcttttagtggttacctatattccctggattgtggccctttcctccatttttaatgcacaccactccaatctctgcacagtgctatggtttgaatgtgttccccaaagttcatgtgttggaaatttaatccccaatgcaagtgttgagaggtgggacttttaagaggagattaggtcatgaaagatctgccctcattaatagagtaatgatgttatctcagcagagggttaattatcatgcggatgggttcctaataaaaggattgagttcagccccctttctctcttgatgtgataccttccatcatgggatgacacagcaagaagaccctcaccagawgcaggccctttgatcttgaccttcccagcctccagaactgtaagaaataaacttgttctttataaattacccagtctcagatattgcatagcaatacaaaaaagactaagacactc

SEQ ID NO: 567801 - DNA, 543 bp, Homo sapiens
tcagtttcacttggctaaagtcaagttgtaaagtactgatttcttcaggaggctctgaagggaaaacccattttcttgcctttttctgcttttagtggttacctatattccctggattgtggccctttcctccatttttaatgcacaccactccaatctctgcacagtgctatggtttgaatgtgttccccaaagttcatgtgttggaaatttaatccccaatgcaagtgttgagaggtgggacttttaagaggagattaggtcatgaaagatctgccctcattaatagagtaatgatgttatctcagcagagggttaattatcatgcggatgggttcctaataaaaggattgagttcagccccctttctctcttgatgtgataccttccatcatgggatgacacagcaagaagaccctcaccagaagcaggccctttgatcttgaccttcccagcctccagaactgtaagaaataaacttgttctttataaattacccagtctcagwtattgcatagcaatacaaaaaagactaagacactc

SEQ ID NO: 567802 - DNA, 527 bp, Homo sapiens
caattcatcttttcatctcatcatttcatttaaccattttatttcattttatcttttcatctcatcatttcatcatttcatttcaactattcatttcatcatttcatttgattatttcatcatttcatcatctcacttcatctcatcatttcatttcatcattttatatcatttcrtttcatcattacatcttttcatcatttcatttcatttcatgatttcacttcattttttcatttcatttcctcatttcattgcaccatttcatcacttcatcatttcatcatttcatttcatcattccatttcatcatttcatcatttcatttcatctcatcatttcatttcatcatttcatttcctcatttcaccattacatttcacctcatcatttcattttatcatttcatttcatcatttcatttattcatttcttcatttcgtttcatcatttcatcatttcctttcatttcatcatttcatttcatcatttcatctcatcatttcatctcatcatttcatttcatc

SEQ ID NO: 567803 - DNA, 527 bp, Homo sapiens
caattcatcttttcatctcatcatttcatttaaccattttatttcattttatcttttcatctcatcatttcatcatttcatttcaactattcatttcatcatttcatttgattatttcatcatttcatcatctcacttcatctcatcatttcatttcatcattttatatcatttcatttcatcattacatcttttcatcatttcatttcatttcatgatttcacttcattttttcatttcatttcctcatttcattgcaccatttcatcacttcatcatttcatcatttcatttcatcattccatttcatcatttcatcatttcatttcatctcatcatttcatttcatcatttcatttcctcatttcaccattacatttcayctcatcatttcattttatcatttcatttcatcatttcatttattcatttcttcatttcgtttcatcatttcatcatttcctttcatttcatcatttcatttcatcatttcatctcatcatttcatctcatcatttcatttcatc

SEQ ID NO: 567804 - DNA, 527 bp, Homo sapiens
caattcatcttttcatctcatcatttcatttaaccattttatttcattttatcttttcatctcatcatttcatcatttcatttcaactattcatttcatcatttcatttgattatttcatcatttcatcatctcacttcatctcatcatttcatttcatcattttatatcatttcatttcatcattacatcttttcatcatttcatttcatttcatgatttcacttcattttttcatttcatttcctcatttcattgcaccatttcatcacttcatcatttcatcatttcatttcatcattccatttcatcatttcatcatttcatttcatctcatcatttcatttcatcatttcatttcctcatttcaccattacatttcacctcatcatttcattttatcatttcatttcatcatttcatttattcatttcwtcatttcgtttcatcatttcatcatttcctttcatttcatcatttcatttcatcatttcatctcatcatttcatctcatcatttcatttcatc

SEQ ID NO: 567805 - DNA, 480 bp, Homo sapiens
tggtagtctctatccccagtgccacactgttttgagtaacatgattgtgagtaacttttgacgttaggaaatttctcattatgaaattagagctttgaacatttttttctcttttttttgcgatcgttttgactattcttggttccttgagatttcacttgaattttagaatgttagtttctgtttccatttaaaaaaagttattgggcttttgattgggattgcactgcatttatagataattttaggagaaattgccacattagtacttttaagagagtttccaagatggcttactggatgcagccagsaagtgttgctcccaaagagaaagaccacaattttgactacatcaacatagtttgaatagatatttggagagaaaatgcatagtgtggatggagaaaaggtgcgttttctaagactgaagagcaaggaagctggggtgcccttatggggtgcctgaacgctatgactgct

SEQ ID NO: 567806 - DNA, 614 bp, Homo sapiens
gtgctgtccttgtcattttgagtactcacgagatgtggtggtttaaaagtgaagcatacccctccctgatctttcctgtttcaactcctaccatgtgagattcctgcagctctttcatttttcatcatgattataagctactttagatgttaatattgttacaaaatttcactgaattttcttgtaaaattacctgacaaagtttatgttattataccattaatgtgataaataaatatattatgacattacaacatattatgatatcataattcatatgtattatgacatcacaatatattatgacatcataatgcacacacaacatgacatcataatatattatggcatcataatttatactacaacatcacaatatatcatgacatcataatgcacatgtattatgacatcaaaattcatagrcattatcacgtcacagtatattgtgacaccatcatcagtatgtgttatgacatcacaatatattatgacattatacttcatatgtattatggcatcacagtacattatgacatcgtactttgtatataatatgatgtatcatgaattattatgtaattgatatgtattacatatctattagatggctc

SEQ ID NO: 567807 - DNA, 614 bp, Homo sapiens
gtgctgtccttgtcattttgagtactcacgagatgtggtggtttaaaagtgaagcatacccctccctgatctttcctgtttcaactcctaccatgtgagattcctgcagctctttcatttttcatcatgattataagctactttagatgttaatattgttacaaaatttcactgaattttcttgtaaaattacctgacaaagtttatgttattataccattaatgtgataaataaatatattatgacattacaacatattatgatatcataattcatatgtattatgacatcacaatatattatgacatcataatgcacacacaacatgacatcataatatattatggcatcataatttatactacaacatcacaatatatcatgacatcataatgcacatgtattatgacatcaaaattcatagacattatcacgtcacagtatattgtgacaycatcatcagtatgtgttatgacatcacaatatattatgacattatacttcatatgtattatggcatcacagtacattatgacatcgtactttgtatataatatgatgtatcatgaattattatgtaattgatatgtattacatatctattagatggctc

SEQ ID NO: 567808 - DNA, 584 bp, Homo sapiens
atcttacacattgtttattttacttgtattatatatttattctttcctagaatatcagcttcaagtgggcagaattatttgttttgttttagtcattgcagcacctcctagaacatctgctacacagggcaagattaatacataataaatcactgggctcaaattcacacaactatacacagtgcttttccatgaacctcatcataggcccacataaacttgatttgcacaaaatgagtttttcttaactcgatcctatgtggcagggtggtgtcttctgaactccaaacaaattcctaaaggttagcttactcaaatgaattgaaaatgtaagtccacacaaaaacctgcacaaaaaagtttacagtaatattaattgtagttttcacaaaacttggaagcaaccaagatcatgtattcaccaaagtcagwggtacaaaattattatacaaaaatcaattatacttctatacacttgcaacgaaatatctaataatgcagttgaggcaaaaacaaatccatttacaatagcaattaaataataaatacatagaaataaatttttaaaaatgtgaaagaaactt

SEQ ID NO: 567809 - DNA, 629 bp, Homo sapiens
ctgttgggctgactacctcacccagcacccggccacgccagagagaatcttggatgctgctttcccacaggctgtagtgccttccaagttaggccaccctaataacacttctcccgcagggactccacggtgtccagctctccagcctggggtttctcatcacccagtgattccaaaagaaacgatctacaatggcatgactaagttccagaaacaaataaacaaaatactgagggaagcccattggtcactttgattcttcaaaggtgacaattgtccctccctgaaatcttatgagtgcatgaacagactattctaatgtaaatgaaattcacactaaaactgattgaaagatgattctgtttccaaggtactttgtattctcaaattgcatctgcttaccctggccccctcaaaatggaagagtgatgactatttgtcttcgtarcactgtggggacacagagccttaaatggaagagtgtcaaaagcaacattccataaagggctgtcacttccaattttcaagcgaggttggaaaccaaccatgatgtatgaaacactgttggccaaagtgcacaattagtaatacaaaatgaataatataaactattgtaaatatgtgtagac

SEQ ID NO: 567810 - DNA, 585 bp, Homo sapiens
cttgaagatcttgctcactggaagcagacagctggtggatgggtcaggagagctgcctactgccaatgcaggagtccactcagtgtaggcccgctgccccactcagtggcctggatarcctgctgaggctgcagcttcttccagtttttgagcaataggggcatgcatcatttccgaaggttttcaggcaatccctggtgacctctggcagggggtggttatcttggcaatctccagcagggcctatggacttgctcccaggcaaaacccagcgatccccgtgcctacccaggcactaagcatttgtggtggggctttctggaagctcgccttctcctgctggctcttcgttttccccaccccggtacttctggtcattctccctgtcatcatcacaatgagacagctgggtgctggagactcagaaactgccatgcagaccttgagtccttcccaggcccagccaacagggcagagaatccaggagaaaagtcattttcacctcctgaaggaccagagctgaccaggcacctagaagctgtgccccgctgcaggctgccggtggagctcatgacaaggccggaa

SEQ ID NO: 567811 - DNA, 585 bp, Homo sapiens
cttgaagatcttgctcactggaagcagacagctggtggatgggtcaggagagctgcctactgccaatgcaggagtccactcagtgtaggcccgctgccccactcagtggcctggatagcctgctgaggctgcagcttcttccagtttttgagcaataggggcatgcatcatttccgaaggttttcaggcaatccctggtgacctctggcagggggtggttatcttggcaatctccagcagggcctatggacttgctcccaggcaaaacccagcgatccccgtgcctacccaggcactaagcatttgtggtggggctttctggaagctcgccttctcctgctggctcttcgttttccccaccccggtacttctggycattctccctgtcatcatcacaatgagacagctgggtgctggagactcagaaactgccatgcagaccttgagtccttcccaggcccagccaacagggcagagaatccaggagaaaagtcattttcacctcctgaaggaccagagctgaccaggcacctagaagctgtgccccgctgcaggctgccggtggagctcatgacaaggccggaa

SEQ ID NO: 567812 - DNA, 593 bp, Homo sapiens
tgccatgcagaccttgagtccttcccaggcccagccaacagggcagagaatccaggagaaaagtcattttcacctcctgaaggaccagagctgaccaggcacctagaagctgtgccccgctgcaggctgccggtggagctcatgacaaggccggaacgtgaagcactcccttgtctgtccttttttcctgaaggctggagcttgcccggccaatgtcacccttcaggacagggaatcagagctttgcatggctgccttaccccaccagagcagtgccacagagaatcatggctgaggctttcctgtgggctgcagtgcctgaccctttagggtccccacaaaaacacctttcctgcaaataatccacmgtgtcctgcttgccagcctaggcttcctcatcagttggtgatttcaatgaaaacaaactacagtggaatgaacaaattctaaatcaggaacacacaaagaatctgtggaaagtccatttgtcatctagatttttaaaagatacacattttcccttcttgttatattcagtagtgcatgaagccaatattataatagatgtgcaactcacactaaagctgactaaa

SEQ ID NO: 567813 - DNA, 555 bp, Homo sapiens
aggcagcagccagccctgcctgggccgcggccgccggcctcatgagcctggcattcctgtcgccccctctccccatagcttgcctcctccttctcacagtcgggcgcccggctcctcgagacgcaggaccacctcagatctccagtcctgcacctgccggctgagcaaacgaggagacggggagaaaagctgtctgtcgttcctgaaggaacaggacctccgcactccaagaaggaatcgggcgcccagtgggggctgcaggagcagaggacggtggcggcagtagcaggagaggcaggagtaggagcagtggcttctctggaggtggcactgtctgcccccttgagcctcttcctaacgcagtcttgattcaaaatccctgctcaccacggatgcacagtcacagctgaagattgtagttatctaggaggattctttcttagttgtaaatctatgttttatataggagttttttcgttgtttctctcattcttttttgaaatttcatattactatttttttttyttttttggtaagttccttgacattcgtgtt

SEQ ID NO: 567814 - DNA, 618 bp, Homo sapiens
tgtttttttttttcttttttttcacttctatttgtagcctacacagacctattggactgaacaaagcagggtgaatgcaggaataaaagacaagagacaaaggggtatatttggaaaaaggggtcaggggcaccttgcctctagtgaacaaggtacctgagctttacacagccctccatatttattaggtaaragagatagtgagaagcggggggtggttttccaccagcagcttgattcacagctgactcgagagactacattcttagaacaataggcactggatttctcagtagataacttcaaggagcctggtgccagggaatgaggccctcagcaaaccttttggtggcagggcagtgtgagtttgcccacatcctgcattcatgataaacagtttgctgtttgatcatatagcctccagtggaatgctgagttggtcatgtcccatgggccttcagcttcctgaatctattcactgtgatgagtgttttctatatgtctgttcggtttacagagtttgctactgatagtcggataattatgtctcttactatttttgcatagctatttctttcttcatctgggtcgatcttagctttatacatttggaaaccc

SEQ ID NO: 567815 - DNA, 618 bp, Homo sapiens
tgtttttttttttcttttttttcacttctatttgtagcctacacagacctattggactgaacaaagcagggtgaatgcaggaataaaagacaagagacaaaggggtatatttggaaaaaggggtcaggggcaccttgcctctagtgaacaaggtacctgagctttacacagccctccatatttattaggtaagagagatagtgagaagsggggggtggttttccaccagcagcttgattcacagctgactcgagagactacattcttagaacaataggcactggatttctcagtagataacttcaaggagcctggtgccagggaatgaggccctcagcaaaccttttggtggcagggcagtgtgagtttgcccacatcctgcattcatgataaacagtttgctgtttgatcatatagcctccagtggaatgctgagttggtcatgtcccatgggccttcagcttcctgaatctattcactgtgatgagtgttttctatatgtctgttcggtttacagagtttgctactgatagtcggataattatgtctcttactatttttgcatagctatttctttcttcatctgggtcgatcttagctttatacatttggaaaccc

SEQ ID NO: 567816 - DNA, 618 bp, Homo sapiens
tgtttttttttttcttttttttcacttctatttgtagcctacacagacctattggactgaacaaagcagggtgaatgcaggaataaaagacaagagacaaaggggtatatttggaaaaaggggtcaggggcaccttgcctctagtgaacaaggtacctgagctttacacagccctccatatttattaggtaagagagatagtgagaagcsgggggtggttttccaccagcagcttgattcacagctgactcgagagactacattcttagaacaataggcactggatttctcagtagataacttcaaggagcctggtgccagggaatgaggccctcagcaaaccttttggtggcagggcagtgtgagtttgcccacatcctgcattcatgataaacagtttgctgtttgatcatatagcctccagtggaatgctgagttggtcatgtcccatgggccttcagcttcctgaatctattcactgtgatgagtgttttctatatgtctgttcggtttacagagtttgctactgatagtcggataattatgtctcttactatttttgcatagctatttctttcttcatctgggtcgatcttagctttatacatttggaaaccc

SEQ ID NO: 567817 - DNA, 618 bp, Homo sapiens
tgtttttttttttcttttttttcacttctatttgtagcctacacagacctattggactgaacaaagcagggtgaatgcaggaataaaagacaagagacaaaggggtatatttggaaaaaggggtcaggggcaccttgcctctagtgaacaaggtacctgagctttacacagccctccatatttattaggtaagagagatagtgagaagcggggggtggttttccaccagcagcttgattcacagctgactcgagagactrcattcttagaacaataggcactggatttctcagtagataacttcaaggagcctggtgccagggaatgaggccctcagcaaaccttttggtggcagggcagtgtgagtttgcccacatcctgcattcatgataaacagtttgctgtttgatcatatagcctccagtggaatgctgagttggtcatgtcccatgggccttcagcttcctgaatctattcactgtgatgagtgttttctatatgtctgttcggtttacagagtttgctactgatagtcggataattatgtctcttactatttttgcatagctatttctttcttcatctgggtcgatcttagctttatacatttggaaaccc

SEQ ID NO: 567818 - DNA, 564 bp, Homo sapiens
catcagcccttgcttcagtaccttctcattccactctgtcactaaatgtttatgacctcaagaaaatttgaagaagcataagcaagtgcaattccattggtaccagggctgtaagggcggggccagatgggtgaacctcactggggataaatagaaattgtgtacaagatggacatttcaaggttggtttcaagaaacgcagggaaaactaactttcataggtgacagtatgcacaagttaagcttcctaacagccacaagttcacaggttcttctatctaaatgtggcaatgtgtgacgatgtctgaatggccataatacacatacatagagtaatttatagcattcatttttgtattagaaattgtgcatttcagccacaagttttttrtacatgatggatagtcccacattgcttgaagattggaagagagagcactttatgaaatgtccttttggacacattttcattgacgtttctatgtcccaagaggcaatgagacaagtcatgataaactggccgtgtcttctggggttacacctgaacttcttggtgtcaggacc

SEQ ID NO: 567819 - DNA, 602 bp, Homo sapiens
atctgctctcaatgacaattattcagttttaatggggtcctgggggtgggaacagataaatttgagaccacaaagtaccttagaataagaattcaccctttagtcagctttagtgtgagttgcacatctattataatattggcttcatgcactactgaatataacaagaagggaaaatgtgtatcttttaaaaatctagatgacaaatggactttccacagattctttgtgtgttcctgatttagaayttgttcattccactgtagtttgttttcattgaaatcaccaactgatgaggaagcctaggctggcaagcaggacacggtggattatttgcaggaaaggtgtttttgtggggaccctaaagggtcaggcactgcagcccacaggaaagcctcagccatgattctctgtggcgttgccctggtggggtaaggcagccatgcaaagctctgattccctgtcctgaagggtgacattggccgggcaagccccagccttcaggaaaaaaggacagacaagggagtgcttcacgttccggccttgttccggccttgtcatgagctccaccggcagcctgcagtggggcacagcttctaggt

SEQ ID NO: 567820 - DNA, 559 bp, Homo sapiens
agcctcccaatccaccctgttactaaatatttccactcctaacaatatagggggaagcaggagcaagtgcagtttcactgcaccagtgctgtgaggatggggccagaagggtcctgcccagtaggattcaataggaattatatagaaataaacatctcaatgtttgtttggacggattgacatggagaaatttaattttgataggttctagtacacagaagttaagcttcctaacagccatgagtttacagcttcctctttctgaatttggcagtgttttttgatgtccaaattgccacgatgtccacacatatttacaatagtttatattattcattttgtattactaattgtgcactttggccaacagtgtttcatacatcatggttggtttccaaccttgcttgaaaattggaagtgacagccctttatggaatgttgcttttgacactcttccatttaaggctctgtgtccccacagtgctacgaagacaaatagtcatcactcttccattttgagggggccagggtaagcagrtgcaatttgagaatacaaagt

SEQ ID NO: 567821 - DNA, 275 bp, Homo sapiens
ggcacccgtgggagctcagcccttgccgcctcaaccctttttggattcttttctccccagactgtcccagagttcaggtcttctcrtctcttgtctgcccagtgaaggcacaagggtggaaaggtgagggtgtggagtcaggagctttgttccagtgctgggcatagtgagaagtcaaaagagaggttatgatctcattgtgcttgaaggggagaggccaaagcctaagacattctgcctttttaggggaattacctttcaaggcttatttggtc

SEQ ID NO: 567822 - DNA, 275 bp, Homo sapiens
ggcacccgtgggagctcagcccttgccgcctcaaccctttttggattcttttctccccagactgtcccagagttcaggtcttctcatctcttgtctgcccagtgaaggyacaagggtggaaaggtgagggtgtggagtcaggagctttgttccagtgctgggcatagtgagaagtcaaaagagaggttatgatctcattgtgcttgaaggggagaggccaaagcctaagacattctgcctttttaggggaattacctttcaaggcttatttggtc

SEQ ID NO: 567823 - DNA, 275 bp, Homo sapiens
ggcacccgtgggagctcagcccttgccgcctcaaccctttttggattcttttctccccagactgtcccagagttcaggtcttctcatctcttgtctgcccagtgaaggcacaagggtggaaaggtgagggtgtggagtcaggagctttgttccastgctgggcatagtgagaagtcaaaagagaggttatgatctcattgtgcttgaaggggagaggccaaagcctaagacattctgcctttttaggggaattacctttcaaggcttatttggtc

SEQ ID NO: 567824 - DNA, 425 bp, Homo sapiens
tggtcttcactagcctttacatctgaggatgaaggagttgaggctctgttacatggatgtctaaagagatcataactctcacattgaaygacacagagactgatagctctagcacagtacctaggtaatgtgactctctcttgctacgtgtgcccttcctacataaggaaatgtgacataccactgggccaagcacccaggaaatgtgactctcccgcctgtggcctgcctgtattgggcaatgttgtgacacatctcagagctgagcacctaggtgatgtaactccttttttgggagctgtcaatggaagggattgtgacatatgtttggccaatcacctagatgatgtgactctcttgcctataactcaaattggggagaaattatatcttgacaatattgagattttatgatcatgcacatt

SEQ ID NO: 567825 - DNA, 425 bp, Homo sapiens
tggtcttcactagcctttacatctgaggatgaaggagttgaggctctgttacatggatgtctaaagagatcataactctcacattgaacgacacagagactgatagctctagcacagtacctaggtaatgtgactctctyttgctacgtgtgcccttcctacataaggaaatgtgacataccactgggccaagcacccaggaaatgtgactctcccgcctgtggcctgcctgtattgggcaatgttgtgacacatctcagagctgagcacctaggtgatgtaactccttttttgggagctgtcaatggaagggattgtgacatatgtttggccaatcacctagatgatgtgactctcttgcctataactcaaattggggagaaattatatcttgacaatattgagattttatgatcatgcacatt

SEQ ID NO: 567826 - DNA, 425 bp, Homo sapiens
tggtcttcactagcctttacatctgaggatgaaggagttgaggctctgttacatggatgtctaaagagatcataactctcacattgaacgacacagagactgatagctctagcacagtacctaggtaatgtgactctctcttgctacgtgtgcccttcctacataaggaaatgtgacataccactgggccaagcacccaggaaatgtgactctcccgcctgtgscctgcctgtattgggcaatgttgtgacacatctcagagctgagcacctaggtgatgtaactccttttttgggagctgtcaatggaagggattgtgacatatgtttggccaatcacctagatgatgtgactctcttgcctataactcaaattggggagaaattatatcttgacaatattgagattttatgatcatgcacatt

SEQ ID NO: 567827 - DNA, 425 bp, Homo sapiens
tggtcttcactagcctttacatctgaggatgaaggagttgaggctctgttacatggatgtctaaagagatcataactctcacattgaacgacacagagactgatagctctagcacagtacctaggtaatgtgactctctcttgctacgtgtgcccttcctacataaggaaatgtgacataccactgggccaagcacccaggaaatgtgactctcccgcctgtggcctgcctgtattgggcaatgttgtgacacatctcagagctgagcacctaggtgatgtaactccttttttgggagctgtcaatggaagggattgtgacatatgtttggccaatcaccyagatgatgtgactctcttgcctataactcaaattggggagaaattatatcttgacaatattgagattttatgatcatgcacatt

SEQ ID NO: 567828 - DNA, 581 bp, Homo sapiens
actgggtaatttataatgaaaagaagtttggttggctcacaattctgcaggctgcagcggaagcatggcagcatcagcttggcttatggggagccctcaggaaactaacaaccatggmagaaggaagagggggagcaaggcatcttacatggaagaacaggagcaacacagagagcggggaggtgctacccattcttaaacagccagatctcatgagaacgttatcgcaagacagcacaaggggctggtgttaaaccattcacaaggatctatccccattatccaatcacctctcagcaggccccacctccaacattgaagattacagttccacatgtgattggggcagaatcacagatccaaaccatattgctatttccatgtcacatagtcatcagattcaccaaagtcagtgcaaaaaaaaatttaagatcagttagagagaaagggcaggttactcacagagtgaattccatcagactagcagcagacctctcagcagactccttgcaaccagaagaggttaggggcctatctgcagagtttttaaaggaaaaaaaattaaccaataattttatatc

SEQ ID NO: 567829 - DNA, 581 bp, Homo sapiens
actgggtaatttataatgaaaagaagtttggttggctcacaattctgcaggctgcagcggaagcatggcagcatcagcttggcttatggggagccctcaggaaactaacaaccatggaagaaggaagagggggagcaaggcatcttacatggaagaacaggagcaacacagagagcgrggaggtgctacccattcttaaacagccagatctcatgagaacgttatcgcaagacagcacaaggggctggtgttaaaccattcacaaggatctatccccattatccaatcacctctcagcaggccccacctccaacattgaagattacagttccacatgtgattggggcagaatcacagatccaaaccatattgctatttccatgtcacatagtcatcagattcaccaaagtcagtgcaaaaaaaaatttaagatcagttagagagaaagggcaggttactcacagagtgaattccatcagactagcagcagacctctcagcagactccttgcaaccagaagaggttaggggcctatctgcagagtttttaaaggaaaaaaaattaaccaataattttatatc

SEQ ID NO: 567830 - DNA, 581 bp, Homo sapiens
actgggtaatttataatgaaaagaagtttggttggctcacaattctgcaggctgcagcggaagcatggcagcatcagcttggcttatggggagccctcaggaaactaacaaccatggaagaaggaagagggggagcaaggcatcttacatggaagaacaggagcaacacagagagcggggaggtgctacccattcttaaacagccagatctcatgagaacgttatcgcragacagcacaaggggctggtgttaaaccattcacaaggatctatccccattatccaatcacctctcagcaggccccacctccaacattgaagattacagttccacatgtgattggggcagaatcacagatccaaaccatattgctatttccatgtcacatagtcatcagattcaccaaagtcagtgcaaaaaaaaatttaagatcagttagagagaaagggcaggttactcacagagtgaattccatcagactagcagcagacctctcagcagactccttgcaaccagaagaggttaggggcctatctgcagagtttttaaaggaaaaaaaattaaccaataattttatatc

SEQ ID NO: 567831 - DNA, 531 bp, Homo sapiens
ccaaagataccaaaatccatggacgctcaggtcccttatgtaaaatggcatagtatttgcatataacctacttacaccctcctgtgtaattaaaattatctctaaattacttataataacgaatacaatgtagatactgtataaatagttgttatactatattgtttggggagtaatgacaagaaaaatgtctgtacatgttcagtacagaaacaatcattgtagacctcactacatttttttctttttttttttaatttgaaatgtttgtgcgtacatagtagatatatatatttatggggtacatgagatattttgataygggaattcaatgcttaataatcacatgagtgtacatggggtctccattttctcaagcatttttatcttttgtgttatgattcagttatactgtttcagtaattaaaaaatgtacaattacattattgactctagtcaccctgttgtgttatcaaatactagctcttattcattctgtctatgtttttgcaccaaccaaccatcatttcc

SEQ ID NO: 567832 - DNA, 520 bp, Homo sapiens
aagtgtgtctgggcagggtaattttgaatgacatcattcaaagtgcatkttcccacttgcaactggagagagatcagtatgtcaaaagtctgtacttggtaagaatttggctgctaagttgtgccataatttgtcttttgagccttttttcctttgggtaagttgagctctacattttgtcttgccattcatgacagtaaaaatgtggttttctgggggctgaacctcctgaacaatgatccaagataaaagtactaataccacaatgcttttttatattcaagggaagaggaagtatgtttcagttttaccacctagataattacacgtcatttggcactgcctttcaagatatgtagaaaacagaaaatatatgagttatgaagatatctaggcacacttaacattctctatgccacttagtcctgaacagagaatttttggtataaattggaggaagctttttttttttttttttcttttctcacccccgagacgagtctccctctgttgcccaggc

SEQ ID NO: 567833 - DNA, 520 bp, Homo sapiens
aagtgtgtctgggcagggtaattttgaatgacatcattcaaagtgcatgttcccacttgcaactggagagagatcartatgtcaaaagtctgtacttggtaagaatttggctgctaagttgtgccataatttgtcttttgagccttttttcctttgggtaagttgagctctacattttgtcttgccattcatgacagtaaaaatgtggttttctgggggctgaacctcctgaacaatgatccaagataaaagtactaataccacaatgcttttttatattcaagggaagaggaagtatgtttcagttttaccacctagataattacacgtcatttggcactgcctttcaagatatgtagaaaacagaaaatatatgagttatgaagatatctaggcacacttaacattctctatgccacttagtcctgaacagagaatttttggtataaattggaggaagctttttttttttttttttcttttctcacccccgagacgagtctccctctgttgcccaggc

SEQ ID NO: 567834 - DNA, 520 bp, Homo sapiens
aagtgtgtctgggcagggtaattttgaatgacatcattcaaagtgcatgttcccacttgcaactggagagagatcagtatgkcaaaagtctgtacttggtaagaatttggctgctaagttgtgccataatttgtcttttgagccttttttcctttgggtaagttgagctctacattttgtcttgccattcatgacagtaaaaatgtggttttctgggggctgaacctcctgaacaatgatccaagataaaagtactaataccacaatgcttttttatattcaagggaagaggaagtatgtttcagttttaccacctagataattacacgtcatttggcactgcctttcaagatatgtagaaaacagaaaatatatgagttatgaagatatctaggcacacttaacattctctatgccacttagtcctgaacagagaatttttggtataaattggaggaagctttttttttttttttttcttttctcacccccgagacgagtctccctctgttgcccaggc

SEQ ID NO: 567835 - DNA, 520 bp, Homo sapiens
aagtgtgtctgggcagggtaattttgaatgacatcattcaaagtgcatgttcccacttgcaactggagagagatcagtatgtcaaaagtctgtacttggtaagaatttggctgctaagttgtgccataatttgtcttttgagccttttttcctttgggtaagttgagctctacattttgtcttgccattcatgacagtaaaaatgtggttttctgrgggctgaacctcctgaacaatgatccaagataaaagtactaataccacaatgcttttttatattcaagggaagaggaagtatgtttcagttttaccacctagataattacacgtcatttggcactgcctttcaagatatgtagaaaacagaaaatatatgagttatgaagatatctaggcacacttaacattctctatgccacttagtcctgaacagagaatttttggtataaattggaggaagctttttttttttttttttcttttctcacccccgagacgagtctccctctgttgcccaggc

SEQ ID NO: 567836 - DNA, 473 bp, Homo sapiens
tgtgtgtgtgtgtgtgtgtgtgtgtgtgtgtgtgtgtgtgagacagagtcttgctctgtygctcaggctggactgcagtggcatgatcttggctcaccgcaacctccacctcctgggttcaagcaattctcctacctcagcctcccgagtaactgggattacaggtgcgtgccaccatgcctggctaatttttgtatttttagtagagacagggtttcaccatcttggtcaggctggtcttgaactcctgaccccgtgatccacctgcctcggcctcccaaagtactgggattatttatacgcatgagccaccgtgcccagccgtcattcttatattattatttcctaggtgtctttcctgaagactatcttctggtctcgaaatggacatgatggatccatggatgtacagcagagagcctggaggtccaaccgcagtagacagaaaggtatggctctgttggagtccccat

SEQ ID NO: 567837 - DNA, 423 bp, Homo sapiens
attcattttcacagtctttcatgttttggtcatattacattgtattttgctgccatatgactgatctctttttgttaaatgtgagatactygttaaaaaatatttagcaatgaattgaggcctagtggcatgttatcttgctgcagaagagatgggagtctacttctgggggatggtcacgggtcctccatacaggctgcaattgaggtcatcggtgcaggctcagtccctacaaaggccagggtatttcctgtccacctctattctgatgcatgactcttctgggtctcaaccagagccagtggacttcagtacgggtcgctttcattggcagaccctcaatccacttgttttccatctaatcccacgcatgtgtgcaaaagctgctgtgcttctttgcatctcagtagttccttctggaat

SEQ ID NO: 567838 - DNA, 309 bp, Homo sapiens
gcctagtggcatgttatcttgctgcagaagagatgggagtctacttctgggggatggtcasgggtcctccatacaggctgcaattgaggtcatcggtgcaggctcagtccctacaaaggccagggtatttcctgtccacctctattctgatgcatgactcttctgggtctcaaccagagccagtggacttcagtacgggtcgctttcattggcagaccctcaatccacttgttttccatctaatcccacgcatgtgtgcaaaagctgctgtgcttctttgcatctcagtagttccttctggaattcagc

SEQ ID NO: 567839 - DNA, 411 bp, Homo sapiens
gaattcaatgcttgggtcacctccagattcattttcacagtctttcatgttttggtcatattacattgtattttgctgccatatgactgatctctttttgttaaatgtgagatactcgttaaaaaatatttagcaatgaattgaggcctagtggcatgttatcttgctgcagaagagatgggagtctacttctgggggatggtcacgggtcctccatacaggctgcaattgaggtcrtcggtgcaggctcagtccctacaaaggccagggtatttcctgtccacctctattctgatgcatgactcttctgggtctcaaccagagccagtggacttcagtacgggtcgctttcattggcagaccctcaatccacttgttttccatctaatcccacgcatgtgtgcaaaagct

SEQ ID NO: 567840 - DNA, 425 bp, Homo sapiens
attcattttcacagtctttcatgttttggtcatattacattgtattttgctgccatatgactgatctctttttgttaaatgtgagatactcgttaaaaaatatttagcaatgaattgaggcctagtggcatgttatcttgctgcagaagagatgggagtctacttctgggggatggtcacgggtcctccatacaggctgcaattgaggtcatcggtgcaggctcagtccctasaaaggccagggtatttcctgtccacctctattctgatgcatgactcttctgggtctcaaccagagccagtggacttcagtacgggtcgctttcattggcagaccctcaatccacttgttttccatctaatcccacgcatgtgtgcaaaagctgctgtgcttctttgcatctcagtagttccttctggaattc

SEQ ID NO: 567841 - DNA, 602 bp, Homo sapiens
gacccctcccccatctcagtctcccacactcctcgcaaggacaggtcctctctggaaccttcacaaacctgatttctggtcctccccaaccagctccctgtccctgcttctgggcgctccttccttcctgagctcccagggttcctcaaggtcacttttggcgacaaaacataaaaaacaaatgatggcaggatggcaggaagaacctcatacccaagcagagtgccaggttttayagcctccgctcagccattcatatcctaagcaacaaaacatcagcaggatgcggaaggtcccgatagtaaaccatctccatcacatccatgtagccatccgtccatcaacctgtatctcaggaacaaatgtagatacattcattttaagcaagcatggtacatttacaaaaattaacctgacttattttgttccagcaaatctcaatatatttgagagcaatcaaatcacacagcacgtttctgatcatataactgtgctagaagtcaatgattaaaagctaattcaaaattattatttgcttggaaattcaaagtgcccttataagacataaacataagaaagaatccaaaatgaaacaagattgc

SEQ ID NO: 567842 - DNA, 391 bp, Homo sapiens
aaatatacaggtccttagaggctgctctgccaacaaaaccataatgcaggaacaaacatcacaactatgccaaataatcaatcctacaatgtccaaaattttactttaaaactggaatttccagacttcctttctgcattaaccagtttaactagatagtaatgaaatatccctctactttatgctgtgatagtttatttatttatttgagacagagtttcgctcttgttgcccaggctggagtgcartggcgcgatctcagctcaccacaacctccgcctcccaggttcaagtgattctcctgcctcagcctcctgagtagctgggattacaggcatgtaccaccacgcccagctaagtttgtatttttagtagagacgggagtttctcc

SEQ ID NO: 567843 - DNA, 391 bp, Homo sapiens
aaatatacaggtccttagaggctgctctgccaacaaaaccataatgcaggaacaaacatcacaactatgccaaataatcaatcctacaatgtccaaaattttactttaaaactggaatttccagacttcctttctgcattaaccagtttaactagatagtaatgaaatatccctctactttatgctgtgatagtttatttatttatttgagacagagtttcgctcttgttgcccaggctggagtgcaatggcrcgatctcagctcaccacaacctccgcctcccaggttcaagtgattctcctgcctcagcctcctgagtagctgggattacaggcatgtaccaccacgcccagctaagtttgtatttttagtagagacgggagtttctcc

SEQ ID NO: 567844 - DNA, 391 bp, Homo sapiens
aaatatacaggtccttagaggctgctctgccaacaaaaccataatgcaggaacaaacatcacaactatgccaaataatcaatcctacaatgtccaaaattttactttaaaactggaatttccagacttcctttctgcattaaccagtttaactagatagtaatgaaatatccctctactttatgctgtgatagtttatttatttatttgagacagagtttcgctcttgttgcccaggctggagtgcaatggcgcgatctcagctcaccacaacctccgcctcccaggttcaagygattctcctgcctcagcctcctgagtagctgggattacaggcatgtaccaccacgcccagctaagtttgtatttttagtagagacgggagtttctcc

SEQ ID NO: 567845 - DNA, 391 bp, Homo sapiens
aaatatacaggtccttagaggctgctctgccaacaaaaccataatgcaggaacaaacatcacaactatgccaaataatcaatcctacaatgtccaaaattttactttaaaactggaatttccagacttcctttctgcattaaccagtttaactagatagtaatgaaatatccctctactttatgctgtgatagtttatttatttatttgagacagagtttcgctcttgttgcccaggctggagtgcaatggcgcgatctcagctcaccacaacctccgcctcccaggttcaagtgattctcctgcctcagcctccygagtagctgggattacaggcatgtaccaccacgcccagctaagtttgtatttttagtagagacgggagtttctcc

SEQ ID NO: 567846 - DNA, 607 bp, Homo sapiens
cattctcattttcccttggtgaattcagtcaatccttttgctctctgttcgtattatgcaaatataaaaataaaaataatcctgataatgtgtcctgctgaaagaagaaaaaaactatctgatctcactgggatccaatgcagtatgactctcccttatccatttttaaacaagttctaattctgaacactttccccttgctaaagtccctaaacagatctctttgctacacatcccaccagaatgtcaaatagcatctgtccagcttgcttgcaaagtcctcctctccagctcccagtataccagggtctgtgcatagtcttctttcctttctcctcactgtcttagaggcaaggtctgttcttttctctgaggctaacccctttgccacctttctctgggcctccctgtggcagcaatcagtctttctcwgtcctttgcaagtcctttctcttaacaacaagatactagtatcttctttattacaaagaaattctgtagtctgctatacttacctcccttcttactcacgttctccaaagcttgaaatcatgctctgcctccaggtcctcacttcttatactaaaatctggctttgtttcctcca

SEQ ID NO: 567847 - DNA, 231 bp, Homo sapiens
gaggagtccaagtggaccccaggcrtgtttcctatagtccctttaagaaaaccatgtttttgcaacatttttaaatcaggagatttcatatacatttctttatttctggttttcatggaaaacttctgtgttctcatcttccgactggctcactcagccacacagggaggctctctcccagcgtctccctaccacagggcctttgcacaggctgtggttgctgtggaatgt

SEQ ID NO: 567848 - DNA, 540 bp, Homo sapiens
tacctaatgctagatgacacgttagtgggtgcagcgcaccagcatggcacatgtatacatatgtaactaacctgcacaatgtgcacatgtaccctaaaacttagagtataataaaaaaaaaaaaaaatttaaaaaaaaaaaaaataaataaaggtctttggagcttgaraaggtagcttgaagcttatcttgtatgtaaaacactgaagagcctttggtgtggtctgatttgaatttaagaataatttacatagaaatacagaggatggaaaaaataaagctgcacagctggaaacttgcaattatttacataaaatcatcatcactaatatttccataacattaagtatatgccaggcaatttctaggtgatttacaagatttactaatttacaagaggaggatatgaaacagatatgtacatatgtaaatgaaaacatgtttcccatatcatatggtaatattagagaaattctaccagtagataatgttgcctcccaagagaataatgaatggggcacattaccgtgataaaagcaa

SEQ ID NO: 567849 - DNA, 540 bp, Homo sapiens
tacctaatgctagatgacacgttagtgggtgcagcgcaccagcatggcacatgtatacatatgtaactaacctgcacaatgtgcacatgtaccctaaaacttagagtataataaaaaaaaaaaaaaatttaaaaaaaaaaaaaataaataaaggtctttggagcttgagaaggtagcttgaagcttatcttgtatgtaaaacactgaaragcctttggtgtggtctgatttgaatttaagaataatttacatagaaatacagaggatggaaaaaataaagctgcacagctggaaacttgcaattatttacataaaatcatcatcactaatatttccataacattaagtatatgccaggcaatttctaggtgatttacaagatttactaatttacaagaggaggatatgaaacagatatgtacatatgtaaatgaaaacatgtttcccatatcatatggtaatattagagaaattctaccagtagataatgttgcctcccaagagaataatgaatggggcacattaccgtgataaaagcaa

SEQ ID NO: 567850 - DNA, 509 bp, Homo sapiens
atatatatgcatatgcacttgtagaccatatgtcmccttgcatttttaaaacacatgcatattatactgtatccttttttcgatattcatcttcagatagaaggcctaagagactgttgagtattacattttaaaaaattaagttttaatttacaataaaatgccaaaattttatagtatgcaggttgatgactttgtaagcaactaaaaattattttaattaatatactttatttttaaaattttaaattttcttttatttttaatagggtctattttttaaagcagttttaggtttacagtgaaatgcagcagaaaatacggagtttccggatatcaccttgctcctcctcctgcccccacagtttcccctattgtttagcatcttggttaagtgaggtccatttgttacagttgatgagccatattaatccatcgttactatttgtggtctgtagtttagggttcactctctgtgtcctacatcctgtgggttttgacagatgtat

SEQ ID NO: 567851 - DNA, 583 bp, Homo sapiens
gcagtttctctcatgctgttctcatgatagtgagtgagttcttaggagatctgatggttttataagggtcttgcatttccccagyttgcactcactctgtcctgccaccccgtgaagaaggtgccagcttctccttttctttccgccatgattgtaagtttcctgaggccttgccagcaatgtgaaactgtgagtcaattaaacctctttcctttataagttacctactctctggtagttctttatagccacatgagaatggactaatacagaccttatgtgaaaacactctaagacggtgtagacctctcttagggtaggaagtaatttgatccatcctgagagattttattaacagagcttcctttatgtcaatatttgggaaactatgctactatcaacaacccacagaatgaggatgctggtccctgagtggccttcttatctttggaacagctgggaaatcatcatacgtaatcaaatacaatattctgagaagttttttttttaaaaaatcttcaatattcacctcatggaacttgaggaatcctaaaatcaacttgaaatttccttcttgggaaat

SEQ ID NO: 567852 - DNA, 583 bp, Homo sapiens
gcagtttctctcatgctgttctcatgatagtgagtgagttcttaggagatctgatggttttataagggtcttgcatttccccagcttgcactcactctgtcctgccaccccgtgaagaaggtgccagcttctccttttctttccgccatgattgtaagtttcctgaggccttgccagcaatgtgaaactgtgagtcaattaaacctctttcctttataagttacctactctctggtagttctttatagccacatgagaatggactaatacagaccttatgtgaaaacactctaagacggtgtagacctctcttagggtaggaagtaatttgatccatcctgagagattttattaacagagcttcctttatgtcaatatttgggaaactatgctactatcaacaacccacagaatgaggatgctggtccctgagtggccttcttatctttggaacagctgggaaatcatcatacgtaatcaaatacaatattctgagaagttttttttwtaaaaaatcttcaatattcacctcatggaacttgaggaatcctaaaatcaacttgaaatttccttcttgggaaat

SEQ ID NO: 567853 - DNA, 583 bp, Homo sapiens
gcagtttctctcatgctgttctcatgatagtgagtgagttcttaggagatctgatggttttataagggtcttgcatttccccagcttgcactcactctgtcctgccaccccgtgaagaaggtgccagcttctccttttctttccgccatgattgtaagtttcctgaggccttgccagcaatgtgaaactgtgagtcaattaaacctctttcctttataagttacctactctctggtagttctttatagccacatgagaatggactaatacagaccttatgtgaaaacactctaagacggtgtagacctctcttagggtaggaagtaatttgatccatcctgagagattttattaacagagcttcctttatgtcaatatttgggaaactatgctactatcaacaacccacagaatgaggatgctggtccctgagtggccttcttatctttggaacagctgggaaatcatcatacgtaatcaaatacaatattctgagaagtttttttttwaaaaaatcttcaatattcacctcatggaacttgaggaatcctaaaatcaacttgaaatttccttcttgggaaat

SEQ ID NO: 567854 - DNA, 451 bp, Homo sapiens
aaaaaagtttttcagaccaccaaggtgataaggcaatttctgttttctagtttcacatcattcatgagttcatctggtttaaatcttcttttgccctcattcctcaraatatttgcttaaattatggcaacactccgttgaaaataaaggctgaatacctgataattatctgcagtgctgctaaaaagaaacagtgcaaatacaaatagaaaggaactacttggcgtctcatttacagtctccttatgcacattgattccacttatattcttttctattactattaatattacaaaatgtaaccttattgaacatttacagctatgcctcgttctttgtctaatcatctcaggtgttatcataggtgaacaggaagtgctactgaagtgtttcccacgggacttaaagaaagactgaagggtaaatgtcatcttagaacttacaaatgcaa

SEQ ID NO: 567855 - DNA, 571 bp, Homo sapiens
attttaaacttttttggcttttactttttaaacttttttgttaaaaactaagacacaacacacacatattagcctaggcctacacagtgtcaggatcatcaatatcactgtcttccacctccatatcttgtcccactggaaggttgttagaaacaatagcattcatggagctgtcatctcctatgataacattgccttcttctgaaatatgtcctaaaggacctgcctgaggctgttttacagttacctttttttaataagtaggaggagtacactctaaaataacaatgtaaaaatagtctagtaaatacataagccagtaacataatcatttattatttttatcaagcattatgtactgtgcataattttatgtgctatacttttatacaactggcagcacagtggayttgtttataccagcatcaccacaaacacatgagtaatgaatcgtgttatgatgttatgatggctatgacatcactaggtgacagaaacttttcagctccattataattttacaatactgtcacatatgtagtttgtggttgacttaaatatccttatgcaa

SEQ ID NO: 567856 - DNA, 429 bp, Homo sapiens
ttattaactctcatgttagtcccatggtttacattttttgtgtgtgactttttcttgtggtttatttgcagttgtactgtcacacatgtaggaactccttctctggaccatatgggagcttaatcaggagttttatattaggttgtaaaacactgagaattggagagaaagagagatasaaattacttggaggatgttatagtaaagaaaggtccaatgaggattctcaatacaagtttgaaatataattttgggttaaaaccacatgttttaaggtaagttacgttgccccttacataataataaagatatgatgcccatttcagggaagctgcaatggtttaactccctgaggatggttaattttttccattttaaacatgtagtttcaggtttattaaaaatattttcttgtagattatctatgat

SEQ ID NO: 567857 - DNA, 568 bp, Homo sapiens
catgtggggaaggagtagaggtctccaaatcaatttcccaaattctgcaattcaattcccaaatctccaattcaagtggttttctcccttttctgaacttgccataaaaatcgtggcaaatttctccagtgtttcctccaaatgatcatcatttttgaatggctgccagcacaaaagtatttatttcttcagtgaatggataaacaaatgaatctaacttggcttcttgagggcagaaatgtatcttaaatatctttctatttatcaggagctatgtagtgcatgaggaatgcacaggtctgccgtatggtttctgtgtttctttttcttcattggttctgactccttcgtcctgacataatttattggaagaaatttcactgcagggtagcttgtcttcyaaagcctcgttttgtccacccattctttctggatgtttttcttccacttcatgggataactttctcttctttaggtttaacactttgaggaagtagttgaatattccctgtttgcaagacttgggttcatgagaatcttggaggtttctagtccccattcagttgtg

SEQ ID NO: 567858 - DNA, 225 bp, Homo sapiens
ccactgtcttgaaggaaaggacttggtccttgaaacctttatcttctgctcaccaaagagcccttgggccctgaataatcagcaggaatacccaggtaatatgtcaagggccttgggtgaggctctgagacttgctggcttcaggtaacakcatggcacaggagggtagggcactaagtgagcttttaggatgtctgattccaggacttgacacagatggcattt

SEQ ID NO: 567859 - DNA, 314 bp, Homo sapiens
gactaacacagcctcagaataaaccaaacctgctgatacctcgatcttggacttctagcctccaaaattgtgagaaaataaatttctgttggttaagtcacccagtctgtggtattttgttatagcagccctagcaaactcatataatttccaggtcagaattgaatccagaccaaaagttcttctttgctttatcctcagagaagaaactgttattaaaacaattaaaaattaatcagtccatacatccagtrtgataagacttccatcatgaatgctatttctaatagatgtacctagagttgaagtttcca

SEQ ID NO: 567860 - DNA, 569 bp, Homo sapiens
aagtgaaagcaaatattctgcttatttaagtttcttaaggcatttattaygaagagtgggggtgaaagttagtactcagaatttgttatcactctttagtacggtaaaggagttttgcccatggttcctggaacaagggactatggagttggatgaatgggagataattggcagagattttaaaaaggcgtataaagatggagcaaaaattccagttttttttggtcaatgtgagtgataataaaggcagcttttgagccatttcaaacagatgatgaggtagattcagatgaggaagaggaggacgagtgtaaagaactaatttcagattctgaatgtgaggaacagaaaccggaggaaattaaagaaagggaaactgaaagaagtatgttttactagcccgttggctccacctgctgaattaagtgaatggccacctcttctctctcccattaatgggcgagaaaatgaattagctgaaaaacaccactcctgtagttgcaacattaaaacctggagcaattggtggtgctatacaaaattctattcaaaaagctagagccgaggga

SEQ ID NO: 567861 - DNA, 569 bp, Homo sapiens
aagtgaaagcaaatattctgcttatttaagtttcttaaggcatttattatgaagagtgggggtgaaagttagtactcagaatttgttatcactctttagtacggtaaaggagttttgcccatggttcctggaacaagggactatggagttggatgaatgggagataattggcagagattttaaaaaggcgtataaagatggagcaaaaattccagttttttttggtcaatgtgagtgataataaaggcagcttttgagccatttcaaacagatgatgaggtagattcagatgaggaagaggaggacgagtgtaaagaactaatttcagattctgaatgtgaggaacagaaaccggaggaaattaaagaaagggaaactgaaagaagtatgttttactagcccgttggctccacctgctgaattaagtgaatggccacctcttctctctcccattaatgrgcgagaaaatgaattagctgaaaaacaccactcctgtagttgcaacattaaaacctggagcaattggtggtgctatacaaaattctattcaaaaagctagagccgaggga

SEQ ID NO: 567862 - DNA, 563 bp, Homo sapiens
ggaccatgtcttactcatcttcctatccctggcctgctggtgttggtagcgctcagcagttgtgcagtgatttttgaatgaatgaaaccacttaccctttgcctcctgtccccagcccctaccatccctggccctcatcaggtcctgacagctgagttacctgtgtgctcaatcctgccatactcccagcccaatctggagacaggaattcttgttcaagctgccaccgctctgcccactgtccaaagcaactcaccgcccaccccccatagtccacccctgggttgrccactagtgttccacagctgctacttgagtcacagcttctccaccatcccacaccctttgggggttcctgaaacctggagtcttgcacctcaggtttcaccaccgcgttcctgctttatctaagggagtttcctcatttcagataagcagtctggtaagtgctccatcctctcaccctttggcatgctcctgtggcccactacagagaaactctcctctcagcctcctcctttgttcttgtccccactcactctcccatccttgctttttcctaa

SEQ ID NO: 567863 - DNA, 580 bp, Homo sapiens
tctcaagagtaaggaccatgtcttactcatcttcctatccctggcctgctggtgttggtagcgctcagcagttgtgcagtgatttttgaatgaatgaaaccacttaccctttgcctcctgtccccagcccctaccatccctggccctcatcaggtcctgacagctgagttacctgtgtgctcaatcctgccatactcccagcccaatctggagacaggaattcttgttcaagctgccaccgctctgcccactgtccaaagcaactcaccgcccaccccccatagtccacccctgggttggccactagtgttccacagctgctacttgagtcacagcttctccaccatcccacaccctttgggggttcctgaaacctggagtcttgcacctcaggtttcaccaccgcgttcctgctttatctaagggagtttcctcatttcagataagcagtctggtaagtgctccatcctctcaccctttggcatgctcctgtggcccactacagrgaaactctcctctcagcctcctcctttgttcttgtccccactcactctcccatccttgctttttcctaaaaatc

SEQ ID NO: 567864 - DNA, 596 bp, Homo sapiens
gtttgctcttagcaaaaaggcctcgttattttaatagcacgctcctctatttcttcatgtttccctctcttcagatggaaacttgaactacgtgctggcaagaatgtggctgacaacacggtgacctggatctgcctccaggggtgctggcagagcagggctctcacgcagggttaggagatgcacagaattcaaggcttccgagtgacagttagcagaacctgaatgggctgctcatcaaggaaaaagccctgatggagtccaggaactcaagtcccagttctggttccttcgccattcagctgtgccatcatgggcacatcacttagcctcactggagttcagtttcctcagtagtaaaatgtggtaaggtaaggggaaggactaataatttatcttcacttacaactctgagttattattctatgaaaaaaatatgttggctgggcatgttggctcatgtctctaatcccagcactttgggagtytgagacaggaggattgcttgagccaggagttcaagaccagcctgggcaacatagcgagatcctgtctctacaaaaaataaaaaagaaaaaacatgtcatcatatttcc

SEQ ID NO: 567865 - DNA, 624 bp, Homo sapiens
acactttaagtaatttaaatttatgacaaagttttctgaagatataagcagatcctgttagatacagatgcacatacaattcttatgaacawtttcatgcactgtagcatgatcaaaatatctgaccagagcctgtcactgcaccttgtagacattcttacaaacagctcttatctaatcctcataacccatcacctgtcacccataagggacaactaaaccatggatccacatgattactgaaggcttgtttcttcattggctgcaggaatctcatgaaaatcatgtcttcatatatagcaaaactttgggcttatgcatccttctaggaagaataagcagttaatgggcatgaaaggcctttgaaccctatgtagccctgcacgtgtgcaagctgctcttttaagtggacagcaaaagacagtggcagacgtcaggctgggctccagatccagctctaccttaatagtcaggtgatctctatcaggtcatttgtattctctgaacctcaggtttcttgtctgccaatggaaattataataatgcctgccctgctgtgaagttcagatgagctcatggatgtgaacaccttctgagggtcacagagcgacacttgaatgccag

SEQ ID NO: 567866 - DNA, 508 bp, Homo sapiens
gtggccaccttctccaggagctccttccccatctttcgattcgaaatcacttacgccatccttagagtcctcaaaccagttcatccaccccctctggccctaatttcgtctgcacatctaggggtagattatctctgggatctttaagaaaagaccttctaacttgatcatatctctctctgtcttgtagatgattttttaaggtcccacttatgtccctcactcatctacaggctccatgaagtcagatatcaaacatttccattgctacattctccaggcctaatctgsatcctcccagagtggctcttcagtgaacatctactgaattgaacagacatgcacagagcagatggacagcactagggacttgtcctctggccccagaggcccatgaaagagtatccaggcaggctggactatgctgggaagggggaaggcctgggccctcatcgaaagggaaggaccccaaaaggaagagaaacccatcaacatcctgttaactaaa

SEQ ID NO: 567867 - DNA, 568 bp, Homo sapiens
ctttacagtctttttctaaggaaaattaaagaaaaatgcactgcttaggaaaatgtatgtcggaaatccgaagtgatcttagcctttagccagatgttttatgtgtgaacrtgattgtcactgcatcaggttcagttgtgtacacctggggttcagggggtgcttgggtaaaagtctctctaccttctattttctctcctgtactgagatatggcatcctctgagggaggaaatacaatcggttaagtaaggtaaggtttgacttggggagaggagcctttctctcttttcctggtgacactgccccttgagaccctcctctcaaatttactgtcggctaaatactgtcccacatagggacatttacattttaggaacacatttttaaatgaaagactcaagttcctttaagatttaatggaatagtggcattccaagcttcttaacaggtaggatgcaagatctttggaggcaaaataaagctggatgcgagcctccactggataactccataacacacctccttcctgcatttctcctttttctacctcctccattcttcaaggtc

SEQ ID NO: 567868 - DNA, 613 bp, Homo sapiens
aagtgtgaagctggtacttcaacaaatggctctaaaattggagaatcagcagcctggaattaagccagactagctgggaaaagtattagagtcttggtagttcaaaggtgttttttaaagaggagagcccaactcttgatggattggaccactgacaccaagaaggggctgcaggtgtttgattatggtgacagtaatttttaaaaaatatgttcatttgttatttaaatttttttcattgtatgagattttttcattaattttctttatttttaattggagcttttaatcttttctttactaatttgcaagtgctctttatataggaaagttattaattttttgtgtataatacacgtttccatatttttcctgtaataacaattataatgtttattgagaatgtacaacatgccaggtgttatggtaacagcattaggtatgtgtttcaaaaaggtctttatcttatcctgataataactctgtgaggcagtcattattattattatcatcattatcattattcccattttacagacaggtcatcgaggtttggagaggttgaacatcctgtgyaaggtcacacagccagtgagtggacgagctagaattc

SEQ ID NO: 567869 - DNA, 613 bp, Homo sapiens
aagtgtgaagctggtacttcaacaaatggctctaaaattggagaatcagcagcctggaattaagccagactagctgggaaaagtattagagtcttggtagttcaaaggtgttttttaaagaggagagcccaactcttgatggattggaccactgacaccaagaaggggctgcaggtgtttgattatggtgacagtaatttttaaaaaatatgttcatttgttatttaaatttttttcattgtatgagattttttcattaattttctttatttttaattggagcttttaatcttttctttactaatttgcaagtgctctttatataggaaagttattaattttttgtgtataatacacgtttccatatttttcctgtaataacaattataatgtttattgagaatgtacaacatgccaggtgttatggtaacagcattaggtatgtgtttcaaaaaggtctttatcttatcctgataataactctgtgaggcagtcattattattattatcatcattatcattattcccattttacagacaggtcatcgaggtttggagaggttgaacatcctgtgcaaggtcacacarccagtgagtggacgagctagaattc

SEQ ID NO: 567870 - DNA, 444 bp, Homo sapiens
gaattcctgcctttcccagaaatgagtccagggtgtctgacctcagcttcagatcccatgaaggattcttctaacatctgcgatctaaccctccagtgacaagcaggtggaccaccacattcatagccccatctccccagtccaagcaatctcagccaatggtaaggtgaattatcatctcctggagctttttctaacaggatcatttgcatgcatataataacagcagtttgcataattaaggagagtcatacaaagtattcagttttctaagagatawggaatttaagttacaaaatagatcagacctggaagatgacttagcatttaaacagtgttccagccagcaaactgtaacctgtgcttggagaacttcagagaaaccatgacaggcctcattgttttagtaacacacaaaccagagtagctgatgataatgagcag

SEQ ID NO: 567871 - DNA, 597 bp, Homo sapiens
aaattgatttgtatttcatatcaagagagtggacagtttttgatacaaactctttggaaagaaatttggcaatataaacaagaaatcataaarttattatactctttgattcagtaaagtccctcctagaagtctatgaaggaaagtgattcttttcttaaaaagaagtgtgatacacccactcagtgagctatttgtagacattaaaaatgagattataaaaacatgactgttaagatgcttacagatgagtgttgtacacccaactaaaagtggcttaaagtttaaataatgtctccacataacaaaaagaccagagaaatctgggtggggtggctcacccctctaatctcagcactttgggaggctgaggcaggcagatcacttaaggccaggagttcgaaaccagcctgggaaacatggcaaaaccccgtctctacaaaaaaatataaaaattagctgggcatggtggcacgcatctacagtcccagctactcgggaggcttaggcatgagaatcacttgagcggggaggtgtaggttgccgtgagctgagattgcaccactgcactccagcctggacaatagagggagactg

SEQ ID NO: 567872 - DNA, 597 bp, Homo sapiens
aaattgatttgtatttcatatcaagagagtggacagtttttgatacaaactctttggaaagaaatttggcaatataaacaagaaatcataaaattattatactctttgattcagtaaagtccctcctagaagtctatgaaggaaagtgattcttttcttaaaaagaagtgtgatacacccactcagtgagctatttgtagacattaaaaatgagattataaaaacatgactgttaagatgcttacagatkagtgttgtacacccaactaaaagtggcttaaagtttaaataatgtctccacataacaaaaagaccagagaaatctgggtggggtggctcacccctctaatctcagcactttgggaggctgaggcaggcagatcacttaaggccaggagttcgaaaccagcctgggaaacatggcaaaaccccgtctctacaaaaaaatataaaaattagctgggcatggtggcacgcatctacagtcccagctactcgggaggcttaggcatgagaatcacttgagcggggaggtgtaggttgccgtgagctgagattgcaccactgcactccagcctggacaatagagggagactg

SEQ ID NO: 567873 - DNA, 539 bp, Homo sapiens
aaatacaaatccactgtgcataataacaataatacattagctttcatatattaggttggtgcaaaagtaatcgcggtttttgccattacttttaatggcacaacaatcccatgaaatagataccttgttagactcctttacagtgatccaaggatatagctaaccagagatatcactggggctaaaattctgatctttccaatctttccagaggaaacagggagaattaagtgcattgtaaatttgatccattcaatgtagtatagattggagatgactaataattgattcctggaagatctccatggatgtgctacaatgcttcattgccaccagccctttccctcaggatgggcccttactttagtctgaagttgtattgccaaatgtattcctaggagagccaagggagcatatgagcatgcttctctgcaaagatttacatattgctttgtgcagatctgttgccatattttaaaagtttaaattccrggcacataaactacagtaagatccctgttctctaaggatgagttttg

SEQ ID NO: 567874 - DNA, 534 bp, Homo sapiens
tcctgattttcatgtttattattttatttaaaaaagtttcactcatctaaattcccaaataaggtaatatttagttttccacagttytgaacttaacagagtttgtgtttttcttttttttcttttcttttttttttttttgagactgagtctcaatccgtcacccgggctagcgtgcaatggcacagtcacggctcattgcagcgttgacctcctgggcttaggcagtcctcctgcctcagctgggaatacaggtgtgtaccatcacatctggctagattttttttttttttttttttttttttggtagaaataaggtttcattatgttgcccaggctggtctcttttccctttatttatgatgccctaaattaaaaaaatttttcttcaaacatgaacagaaaggtactgaactcctatgtacccatcacttagtttcagcagttatcactcagccaatcttgtttcatctgtactactcctcccccagttggattatttaggcttgtgtcactgatgtcattcgtctgtaa

SEQ ID NO: 567875 - DNA, 595 bp, Homo sapiens
ttattgttctagttaaaaatgactattttgttccttaagaataaagatgtttattaagatattagacacaaatgaactgctttggagtttccatgattgaagattttgaaaatgaaataatttttataatttttaaatacagtatgaaataaaagtgctttataagaaattacgttataacacatagcacaaatgattgtgtcccatatgattaggtaatacaatgagatatatgcattattttraattgtcagaaatttattatagtaaacttagattactatttttcttgtggctgttttttattattcaaatactgtatgcttattctagaattggattaagaaaaggagaagaaatacggaatttataattcaactattctagtcctgtgaatatgtgtatttttctttatacgattgagatcatattatgcagtaatactttataagttttttatacttaatttgtttacagtctacattattgactatacttttacattatatatttacattgacagtttaaaggttgcatagtcaaagtggctttgccattttaccaagcagaaatattatacaactttgacaagtta

SEQ ID NO: 567876 - DNA, 588 bp, Homo sapiens
ctatttccaattactctgaagtccaattgctcttccttgatggtttattgtgtatcttaaaataaaccttgctcttacttcagtacatttgcctcttgccctgactagaagcaaaactggtacaaagattagggatatacagagcagggcttcaaagaaaatgtggatttggccatgaaattagggtaaggagtacaatgagaattctgggaggaaagagagcaaaacaggatgcatacagtgatagcagttactaaagttatctgtgattgcttggaacccagaatatgtgattgcaaggcttttgagcattagatagctaaatgtactttttttcagcctttaataaagtatagaaaaagcaatgagctagagtatggtacagcatcaaaccatacaacttttctggaaaataattygatattatgaattaagagactataaagagaattaaatagagtactttgattcagtaaatctctttttaggactcgaccctaagaaaacatccagacatgcaaacaaagatcacaattagtattaagatgtttattgcaccattatgtaaagcaataaaaaagcaaacaa

SEQ ID NO: 567877 - DNA, 588 bp, Homo sapiens
ctatttccaattactctgaagtccaattgctcttccttgatggtttattgtgtatcttaaaataaaccttgctcttacttcagtacatttgcctcttgccctgactagaagcaaaactggtacaaagattagggatatacagagcagggcttcaaagaaaatgtggatttggccatgaaattagggtaaggagtacaatgagaattctgggaggaaagagagcaaaacaggatgcatacagtgatagcagttactaaagttatctgtgattgcttggaacccagaatatgtgattgcaaggcttttgagcattagatagctaaatgtactttttttcagcctttaataaagtatagaaaaagcaatgagctagagtatggtacagcatcaaaccatacaacttttctggaaaataattcgatattatgaattaagagactataaagagaattaaatagagtactttgattcagtaaatctctttttaggactcgaccctaagaaaacatccagacatgyaaacaaagatcacaattagtattaagatgtttattgcaccattatgtaaagcaataaaaaagcaaacaa

SEQ ID NO: 567878 - DNA, 569 bp, Homo sapiens
gaattcagcgatatttctcctatttgcttttgaaagtagagaaatatggctctgttccacccagcccacaggcagccagactttaaggttatctcccttgttccctgaacattgctgttatcctgttcttttttcaaggtgcccagatttcatattgtttaaacaatttgtgcagttaatgcaatcatcacagggtcctgaggagacattcatcctcagcttacgaagatgacgggattaagagattaaagtaaagacaggcataggaaatcataagagtattgactggggaagtgataaatgtccatgaaatcttcacaatttatgttcagagaytgcagtaaagacaggtgtaagaaattatgaaagtattaatttggggaactaataaatgtccatgaaatcttcacaatttatgttcttctgccatagcttcagcctgtccctccgtttagggtccttgacttcctgcaacataacaacatacaccaagtcctcttatacaacagtacacttcaatagctagtttatcctgtatgcacaatgtctaggtgccaaaatattttttg

SEQ ID NO: 567879 - DNA, 592 bp, Homo sapiens
ctgttccacccagcccacaggcagccagactttaaggttatctcccttgttccctgaacattgctgttatcctgttcttttttcaaggtgcccagatttcatattgtttaaacaatttgtgcagttaatgcaatcatcacagggtcctgaggagacattcatcctcagcttacgaagatgacgggattaagagattaaagtaaagacaggcataggaaatcataagagtattgactggggaagtgataaatgtccatgaaatcttcacaatttatgttcagagactgcagtaaagacaggtgtaagaaattatgaaagtattaatttggggaactaataaatgtccatgaaatcttcacaatttatgttcttctgccatagcttcagcctgtccctccgtttagggtccttgacttcctgcaacataacaacatacaccaagtcctcttatacaacagtacacttcaatagctagtttatcctgtatgcacaatgtctaggygccaaaatattttttgaataaaggataaccagtaagttatacgaattcttctgggaactggaaactttcagttttactttctatatttca

SEQ ID NO: 567880 - DNA, 528 bp, Homo sapiens
ctgtggttaggtatgtgtcttttactctcgtattagactaccaggttcctacacttcttcaataaactccctgaaatcaagactatgtcttgtaattctttttttttttttttaatacccacaaagcttagcacacctatgtgttcaacatttgctaaatgtataaactggttgatcattttcaaggtttggtgttaccataactctaggactgaaattttattctacaatagagttaagacatatctaaatgccataaaagaggttatacaacattattttctaatttttaaatgaatggttttccatttatttccaaccttttgttggtattttaatttaaaaaaaaaattgaatgtcagaataccaggtacgttttcctgaaaagctacaggtaatgtttgcatattatattttttcaacattctaagagtgtctgttatttaatgaagaagtcctgtgrttaaaaagtaacttttgcaaagaaaacagtcactcaataatttatccttcgtattatgccattcc

SEQ ID NO: 567881 - DNA, 541 bp, Homo sapiens
tgcctgctgcaccggcgcacaaatgcgggagggcaagggtgcttgtgaggcgggggagggcaccggggggaacgcgcgagccgggagcgtgcagcaagggagcgggccagcgcgcgcgcccaccgcgggggagcgaggtagagccctccycccgcggcaaagctctcagctcagtctttcttccccccatcacccgcgtttgcgcgtgcgcgcgccgtggtttccagggcaattgcgcgcgccacgccgacccgccgtcccgtgattgcgcgcgcagacgtgcgggagttcccttggagcctcccgggctgtagccgctgcggactggggcggaggtgggggcgggggcgagtggggtgcaggtcgctcggggccacgcagcagtcggacgccggggacgcgccacgagccggttttgctgtgttgaacgtattccagaatacagtgtgcaatggtcagtgccgttgacctcagaaggacacccgtcaccgggaatttccacctggagatatcttagatatcttcagtcttttcgaaagtg

SEQ ID NO: 567882 - DNA, 541 bp, Homo sapiens
tgcctgctgcaccggcgcacaaatgcgggagggcaagggtgcttgtgaggcgggggagggcaccggggggaacgcgcgagccgggagcgtgcagcaagggagcgggccagcgcgcgcgcccaccgcgggggagcgaggtagagccctccccccgcggcaaagctctcagctcagtctttcttccccccatcacccgcgtttgcgygtgcgcgcgccgtggtttccagggcaattgcgcgcgccacgccgacccgccgtcccgtgattgcgcgcgcagacgtgcgggagttcccttggagcctcccgggctgtagccgctgcggactggggcggaggtgggggcgggggcgagtggggtgcaggtcgctcggggccacgcagcagtcggacgccggggacgcgccacgagccggttttgctgtgttgaacgtattccagaatacagtgtgcaatggtcagtgccgttgacctcagaaggacacccgtcaccgggaatttccacctggagatatcttagatatcttcagtcttttcgaaagtg

SEQ ID NO: 567883 - DNA, 541 bp, Homo sapiens
tgcctgctgcaccggcgcacaaatgcgggagggcaagggtgcttgtgaggcgggggagggcaccggggggaacgcgcgagccgggagcgtgcagcaagggagcgggccagcgcgcgcgcccaccgcgggggagcgaggtagagccctccccccgcggcaaagctctcagctcagtctttcttccccccatcacccgcgtttgcgcgtgcgcgcgccgtggtttccagggcaattgcgcgcgccacgccgacccgccgtcccgtgattgcgcgcgcagacgtgcgggagttcccttggagcctcccgggctgtagccgctgcggactgrggcggaggtgggggcgggggcgagtggggtgcaggtcgctcggggccacgcagcagtcggacgccggggacgcgccacgagccggttttgctgtgttgaacgtattccagaatacagtgtgcaatggtcagtgccgttgacctcagaaggacacccgtcaccgggaatttccacctggagatatcttagatatcttcagtcttttcgaaagtg

SEQ ID NO: 567884 - DNA, 470 bp, Homo sapiens
aaacaacaattattattatttcgtatgttctgcgaattgagtggtaagttctgctggtttcactcatacaactgcagwgaactgcggtagaaggtccaagatggcctcatgtctagcagttgatactagtttttgtctggggcgcctcagctcccctttatgtggcatattgccctccatagtttagaccaacgtttgtacatggcagtctcatgcttagccttgaagggcagagtcacttctatcatattccttggtcaaaacaagtcacagagccagcacagattcaagaactaggaaaacaaatccacctttcaatgggaagaacagaaaagtcacattgaaaatgggtatagaagaagttatcggcatctttacaaaaaaatctgtatcacagcctcaaactctagctttgaccatctctgtggcctctgatttgttatatttgcttttgctttaggtaagaatgc

SEQ ID NO: 567885 - DNA, 598 bp, Homo sapiens
gcaacacccacaattcttcctgagacatgactttctctcaaaatttagttgtttttatctttttacccattttctgagtgaacccttgagatctttttttcctaagcaatttggtctaactaaaaagatttattagagctgtgttagttttctattgctgcctaataaattaccacaatcttattggcttaaaacaccacacattcatcacctctagttctgtcagtcagmagtctgggcagtgtgacactgttcattgctcagggtctcataaggctgaaatccagacttcagctggtctgaatgcctttctgaagctcagcatcctctttcaactcatgtggttgtaggacggaggtctctggtttcctgttgacttttctccagggatcacatttaacccctagaggctgtcctctggttcttacatctccaaagccagccacaaaatttcacattcctcagatctctctaacctcgtttaagggttcacctggttatcaagaccatccaggaaaatttttataaactttttgataaaattttgataagctttttgataaacaaaatctcctgattaggggccttaattacattt

SEQ ID NO: 567886 - DNA, 598 bp, Homo sapiens
gcaacacccacaattcttcctgagacatgactttctctcaaaatttagttgtttttatctttttacccattttctgagtgaacccttgagatctttttttcctaagcaatttggtctaactaaaaagatttattagagctgtgttagttttctattgctgcctaataaattaccacaatcttattggcttaaaacaccacacattcatcacctctagttctgtcagtcagaagtctgggcagtgtgacactgttcattgctcagggtctcataaggctgaaatcmagacttcagctggtctgaatgcctttctgaagctcagcatcctctttcaactcatgtggttgtaggacggaggtctctggtttcctgttgacttttctccagggatcacatttaacccctagaggctgtcctctggttcttacatctccaaagccagccacaaaatttcacattcctcagatctctctaacctcgtttaagggttcacctggttatcaagaccatccaggaaaatttttataaactttttgataaaattttgataagctttttgataaacaaaatctcctgattaggggccttaattacattt

SEQ ID NO: 567887 - DNA, 570 bp, Homo sapiens
gggtggaaaataacatggaaagtgatgtaaagtgcaggagtccccaaragcattcccacttctgacaccaactacaattctgaggggtccctagctccaaacccaggttcagtaatttgctagatggcctcagagaattcattaaaagctattgtgcttatggttgtggtttgtttcagtaaaaggatagagattaaaataagccaagggaagaggtgcattgggcaggggtccaagagagttccaagaactacctcccactttcctctcccagtggggtcacgtggacagtgcctacttctcccagaaatgatgtgccacaatacacatggggaattgccagccggggaagctcagccaagtcttgatgttcggagatttggaacttagtcataaagacatttttggtcaccgacatgtcctgaggcttagtctccaatctcctccagagagtagagctgatatgtgcagtgatcctaaagcccctactcgtaaattacattattaggtgtggtctatctggtatggttcaaacaccctcaggcaaacaaagatagtcttatcaggcag

SEQ ID NO: 567888 - DNA, 572 bp, Homo sapiens
gagtgagacttcgtctcaaaaaaaaaaattttaaatgtattgggggctgggcacagtggctcacacctgtaatcccaacactgtgggaggccaaggtgggcggatcacttgaggtcaggagttggagactagcctagccaacatgtcaaaaccctgtctctactgaaaaatacaaaaataagccgggcatggtggcacatgcctgtagtcccagctacttgggaggctgaggcacaagaattgcttgaacccrggaggcagaggttgcagtgagctgagataacaccactgcactccagcctgggtgacagagcaagactccatctcaaaaaaataattaaatgaataagctaaaatatattgggtatttactttgtgttcatgcctgggctaagcattttatgaatagtaataataataataatggctaatatattaagagtttgggcatttacaatgtgccttgtgtaagcatattaaaataatggtgatattaacaataataatggctggtatgtaccaggcatctgctgtattgctgtgctaaccagttaatgatatataatgataac

SEQ ID NO: 567889 - DNA, 598 bp, Homo sapiens
gagggataagccaggaactaggttgtcagggatcatctggggcagacagatcagcccccaggacctgaagctgatgggagcaagagagggtttagagtcrgccatggttctaaatagctgtggggtttcttctagcaacttcccttctctttgtgtttataagggatattaaggtttacctagagggacaggtaaaaaaatgagaggtctgcatgtcaattcctggtacatagtcatcctttgctaccaagtgaagttggggaaacaggtatcagcggtgaactatgcagggagaagagattgggcagtgggatggttaaggtctgggttcaaaccccagctctgctacctgtaggctaggttaccttgggtaggtcacttctcctcatagctcatcctcagcccagctgaagaatgaacggagcaacaactgcctgaagggtgatgtggggattagagacacgtcttggaggaaaaggggacttgcagcattctcagcatagagtagaccagagtttctcaacctcagcactatcagcattgggaccataattctctgatggggaagaggaggtagtaaggctgtcctgtgcattgt

SEQ ID NO: 567890 - DNA, 598 bp, Homo sapiens
gagggataagccaggaactaggttgtcagggatcatctggggcagacagatcagcccccaggacctgaagctgatgggagcaagagagggtttagagtcggccatggttctaaatagctgtggggtttcttctagcaacttcccttctctttgtgtttataagggatattaaggtttacctagagggacaggtaaaaaaatgagaggtctgcatgtcaattcctggtacatagtcatcctttgctaccaagtgaagttggggaaacaggtatcagcggtgaactatgcagggagaagagattgggcagtgggatggttaaggtctgggttcaaaccccagctctgctacctgtaggctaggttaccttgggtaggtcacttctcctcatagctcatcctcagcccagctgaagaatgaacggagcaacaactgcctgaagggtgatgtggggattagagacacgtcttggaggaaaaggggacttgcagcattctcagcatagagtagacmagagtttctcaacctcagcactatcagcattgggaccataattctctgatggggaagaggaggtagtaaggctgtcctgtgcattgt

SEQ ID NO: 567891 - DNA, 573 bp, Homo sapiens
tacttcatacactgtgtgcattggctttttgtaattactgtccagtttatcctgtaccattgctacacacacaaaaaagccaaccagtgcttaktgtccttaaaacctgtagcttttcttcctcagtcatggttaatgttcttctaaaacacagcaccagtaccgaactgtttcttcaagtttaggactaaggtttagttggcaaaaagagtgacaatctgtaaaacagggatccccataaccctggccacagactaatgccgtggcctgttagtaaccacagcaagaggtgagtggtgagtgagcaaatgaagtttcatttgtatttatagccactcccctttgcttacattaccacttgagctctacctcctgtcagatcagcagcagcattagattctcataggagtgcaaactctattgtgaactgtgcatgcaagagatcttggttgtgagctccttatgagaatctaatgactgatgatctgtcactgtctcccatcgccaccagatggaactgtctggttgcaggaaaacaagcttaggtctcccactgattctacattatgggga

SEQ ID NO: 567892 - DNA, 547 bp, Homo sapiens
tgggacatgacaagaatgcccactttcaccattgttattcaacatagtacttgaagtcctagctagagcaatcagacaagagaaagaaataaagagcaatagagagcatcctgattggaaagaaagaagtcaaattatctttgtttgcaaatcatatgattttatatttggaaaaacctaaagaattcaccaaaaaaaactattagaactgacaaacaagttcagtaaaattgaaggatacataatcaacatacaaaaattattagcatttctatatgccaacaatgaacaatctgaaaaaaagtyaaaaaagtaatcccatcttcaatagccacaaataaaattaaatacttaggaattaacttaaccaaagaagtgaaagagctctacaataaaaactataaattgataaggacacacaaaaaatggaaagacgttcccttttcatggattggaagaatcaatattgttaaaatgttcatactactcaaagcaatgtaaagatccaatgcaatccctatcaagataccagaagtagaaaataaaa

SEQ ID NO: 567893 - DNA, 538 bp, Homo sapiens
actgttggcgggagtgtaaattagttcaattgttgtggaagacagtgtggcaattcctcaaagacctaaaggcagaaataccattcaacccaacaatcccattactacatatatacccaaaggaatataaatkgttaaattataaagatacacgcacacgtatgtttattgcagcactatttacaatagcaaagacatgtaatcaatccaaatgcacatccatgatagataggattaaaaaaatgtagtacataggtaccatggaatactatgcagccataaaaaggaatgagatcatgtcctttacagggacaggatggagctggaggccattatcagtagcaaactaatgcaggaacagaaaaccaaataccatgtgttttcatttataagtgggagctgaatgatgagaacatatagacacatggtggggggaaacaacacacactggggcctgtcgaagggtgggggatgggaaaagggagagcatcaggcaacatagctagtggatgctgggcttaatttttaggtgatagga

SEQ ID NO: 567894 - DNA, 548 bp, Homo sapiens
gctgggtggcgttctatccacagatgcaccatgttgcttaaccctcactgttggatatctagattgtttccagtttgctatggtgaacacagccataatgaaccatcttgaccttgcagctttgtcccatacgggtactgttgatcacagggtgacttgtggaaccttccattaaatatttattgaagacctatgggtcaggtgtggtggctcacacctgtaatcccagcactttgggaggccgaggcaggaggatcacctgaggtcaggagttcgaaaccagcctggccaacatggtgaaaccctgtctctactaaaaatacaaaagaaataaataattagctgggcatggtggtgcacacctgtgatcccagctaatcgggaggctgaggcaggagaattgcttgaacccgggaggtggaggttgcagtgacctcagattgcctcactgcactccagcctaggcaacagagcgagactccatctcaaaaaacaaacaaamggccctatgcagtgcggggccccaggcaaggctcagaccctgcctc

SEQ ID NO: 567895 - DNA, 548 bp, Homo sapiens
actatttccaggtgacttactgaaagtcttcmtttgatcctgtcactctccctttcaggactcttccagcaggtcacaactcacatatctgcaggagccaggagctattcaaatggagaaggcagggggatcctgggcaaggagggtatagatatatcctcacctgcatgcgcagtgacttctgagctcctcacagttgttatcatgtgaaaatataggccagggttggcaggctttctgatttttcaagagaacacagaaattagacttttaaaaagttgattcaataaatatgacaaggtatattagggttctctggaagaacagaattaatggaatatatatatatatatatatagacacacacacatatatataaagggtagtttattaagtattaactcacgtaatcacaacgttccacaataggccatctgtaggctgagaagcaaggagagccagtccaagttccaaaactgaagaacttggagtccaatatttcagagaaggaagcatccagcatgggagaaagatgtaggctgggaggc

SEQ ID NO: 567896 - DNA, 588 bp, Homo sapiens
gataacttcctatagctttgatatcagcacttgctgcttcactttgcatttttgtgttgtggagatggcattttccttaaacctcatgagacagtctctgctggcttcaaccttttcttctgcagcttcctcatctctatcaatctttatagaattgaagagagttaaggccttgttctgaattaggcttttcttaagggaatgttgtggctggtttgatcttctatccagactactcaaactttctccacttcagcaacaaggctgtttcaatttcttatcatttgtattcactggagtagcactttttatttccttcaagaatattacttttgcattcacaacttggctgtttggtacaagaggcctagctttctgtctgtcttgacttttgacatgccttactaagcaagcttaatcttttctagctttttatttaaagtaagagatgtgctgctcttcacctcacttgaacacttagaggtcattgtattaattgacctaatytcaatattgctgtgtctcagggatggggaggactgaggagaaagagagagatagggaatggccagttggtggagcagtcag

SEQ ID NO: 567897 - DNA, 529 bp, Homo sapiens
ttttttttttatccattctgccaatctatgtcttttgactggggagtttagtccacttacatttaaagtaactactgacaggcaaggatttactattgccattttggtaattgttttcttgatgtcttatagcttttctgtctctcatttcctctcttactgacatcttttgtgtttacttgagtttttgtagtgacacactttgattttyttctcatttccttttgtgtatattcaataaatatttgccttgtggttaccatgggaattaaatatgatatcttgtagttctagcaatctatttaatactgataacaacttaattttaatcacatacaaaaaccctactcccatgacattataaggccaataatgaaaattaaatgtaaaaatccttcccctttacagttctatcccagccagcccctccccacactttatgttattgatgtcatcaataacatttttgtatattgcttaattaacatttatttaacatagatattgtaaatatatgttaacatatatt

SEQ ID NO: 567898 - DNA, 576 bp, Homo sapiens
tatatatctgcatattacaatcatttcagaagattttttaaaatagtagtacttggatgcaaccagagattctgattgagctgaaatggggataatccaaagaaatatatttaaagaaaaaaacaaggtcttgctctgtcaccgagctggagtgcaggagcgtgattaaagttcactgtatcctggacctcctgagctcaagtgatattcccaactcagcctcccaaggagctgggaccacgggcaggtaccaccatgcccagctaattttttgattttttgtagagataaggtytcactatgttgcccagactactttcaaactcctgggcacaagtaacccccctgcctcagcctcccaaagtgctgtgattacagatgtgagctattgcacccagctaatttttttttgattgagcatgacatattttattttccaaagaactcctaacatatacccacacctacgtatccatgaaatgtcagtattcctccattgggacttctttgggtttttttccctccttatttatgtaaaagaattacagaattaccatgagacccagcaattctact

SEQ ID NO: 567899 - DNA, 619 bp, Homo sapiens
tatataccacattttctgtatccactcrttggttgatgggcactttggttggttccatatctttgcaattgcaaattgtgctataaacacgcatgtgcatatgtctttttcatataatgacttctttttatttgggtagatacgcagtagtgggattgctggatcgaatggtagttctacttttagttcttgaaggaatctctatactgttttccatagcagctgtactaatttacattcccaccagcagtgtaaaagtgttcccacaaccatgccaaaatctattgttttctgatttttttaacaatgacaatttttgcaggagtaaggtaatatctcattgtggttttaatttgcatttccttgatgattagtgatattagtgccctttaaaaagcaactccagtagggttctccagaagagtcccattctccatgtgaggccccatcaagaagacagccatctatgaagcctcaccagacaccaaatttgttggtgacttgatcttgcattcccagtctccagagctctaagagataatatctattgtttataacccacccagtttatggcattttgttacagcagcctgaatgggctaagacagtatgtgtgtaa

SEQ ID NO: 567900 - DNA, 623 bp, Homo sapiens
gtagcatgtgaaattaatattcaaagctttcttcattgtattttactgattttttttcagaattaacattctgatgttcagtaagacataaatagagatgacatatttgtctataatcattatagtcttaaaagtcctcctctcataaaatggcttaataccaatacaaatgacagtcactaagtcatgtaaatctcaaatcattcaacccttataatctaatgaatacgattaaacagacatagatttaagatactttccaaaaaaaaaaaatagaggcaggatgtattgaaacaagacatgccaaataaattgtatgacatagttcaaggcttttctagattaattacatgatttttgtggaaatacaacagaattttgctaatgatgaaagatttccaaaatgaattatatataaattcttgtgggtttttgtttttgagatggagtcttgttctatcacccaggctggagtgcagtgatgtgatcttggctcactgcaacctccacctcccaggttcaaggaattctcatgcctcggcctcccgagtagctgggactacaggcgtgtgctaccaygcccggctaatttttgtatatttagtagagacagggtttcacca

SEQ ID NO: 567901 - DNA, 606 bp, Homo sapiens
ggctggtgtcgaactcctgacctcgtgatccacccgccttggcctcccaaggtgctgggattacaggcgtgagccaccgagcctggcctgtaacagtttttgttaatgcccatttagattgttactgctgttccaggaaatgtgtttctgtatatatcagaattagctacttcttttatttctgtagcagacagtccaaaaagtgagattactcattccaaatgtaggcacattttcatttgactggctagtttgatgcttcctggcagtgtcagagatggtctgttcctagccagcaatgaatattcccrtgctatatagtgttgaatttttgtttatctgaggggcaaactttggcaggggtccgttgggatatgctaacaataagataactagtaaatagaagcttttcttaacccaaatgggtagatccgtcgtgattatgttggaatttcaggagttctagaaatgaatgtgcagatggttgcacaatatgaatacaatcaaagatggttaaaatagtaatacatttatgttatgtatgttttaccataattataaataaatgaaaaaatgaatgaatgagtcactcctaaaaattagtaa

SEQ ID NO: 567902 - DNA, 614 bp, Homo sapiens
gtggaagacaaaagaaaaaggattttaaatgtatccaataggtagacaccaaaattcccaatgtcaccacataggctgaaaaataacctatattcaatatcttaaagtaattatgaataaccttatactttcaakaaaatcagggtacaaatcattaatagggtgtctgaccctaaatgctctgaataactgcttaagcatccattttcctacttgaacttgtctttttgtgaggtagccttcaatgctccttaaataatacaattaggaggtctcattactgactcatatgatttgattctgtgtctgtattggttggaactcacatcaacactctataaagaagggttatactatttaggtaggaattacaggctggacagcccactcctgctccaatccaactcactccagaattagctgtttactcttctgggaaagtttcatttaataatgagtccattgattaaaataaattgtgaaaaccactgaactagaagttgcccaaaatggtttttaattctaaaatccaatcatttgcctgaaggtgattttgttagtccattttaattgctataaaagaatatctgagacgggataatttattttaaaaa

SEQ ID NO: 567903 - DNA, 436 bp, Homo sapiens
ttcctgttgagataaaatgagatcaactatgtgacatgattttgaaaaccatattatattggtgcatgaatgtatatgtgtgtgggtgtaggtagtttacagacagaatgtgtaacataggcatgtggcttgtaactgaaacttttacaaaacctagttcattctcattctataaaagtgtgtacacacgtgcatatacacacacacactgtgataatgtatctgtgtatttgagggttataaatatttagttgtagagttctgacaaagyagtaaaatagtctcacttcatctggataaagatcaccatctggaactataaaaattgcaatgattccaaattgttgaatagttggattgcatatttacttttcagtagtatgttggcatgcatgtagatccagccttcctttcaacaaagaacagtggtggaaga

SEQ ID NO: 567904 - DNA, 554 bp, Homo sapiens
gaaaaggataaccttttcaacaaatggtgctgagataattggctagccacacataggagaatgaaactagatcctatctctcaccgtatacaaaaatcaactcaagatggattaagggcttaaacctaagacgtgaaactatgaaattttagaagataactttggaaaaacccttctagacattggcttaggcaaggatttcatgaccaagaacccaaaagcaaatgcaataaaaacaaagataaatagctgggacctcattaaactttacgagcttttgcagggcaaaaggaacagtcagcagagtaaacagacaacccacagagtgggagaaaaatcttcacaatctatacctctgacaaagggtagtatccagaatctacaasgaccccaaacaaatcagtaagaaaaaaacaacaatcccatcaaaagtaggctaagggcatgagtaggcaattcacaaaagaagatatacaaatggcaagcaaacatatgaaaaaatgctcaacatcactaatgatcaggaaatgcaaatcaaaaacacaaaatgtgat

SEQ ID NO: 567905 - DNA, 331 bp, Homo sapiens
ttcattctcttacctgtggcttgccaattaatcccagaaccatttgttgaatagggtgacctttccccactttatttttctgtttgttttgtcaaagatcagtttgctataagtattttgggtttatttctaggttctctattctgtttcattaatttaactaaagrgcttctgcacaggaaaaggaacagttggcagagtaaacaggcagcccacacagtgggagaaaatattcacaatctatatatctgacaaaggactaatattgagaatctgcaaagaactcaaacaaatcaggaagaaaaaaacaaacaatcccatcaaaaagtgg

SEQ ID NO: 567906 - DNA, 615 bp, Homo sapiens
ggtctgttcatgcctttggcccactttttaatggggttgtttgttttttgcttgttgaattgttcacattccttacagattccggatattagacctttgtcagatgcatagtttgcaaatattttctcccattctgtaggtagtctgtttacgctgttgatagtttcttttgctgtgcagaagatctttagtttaattaggtcccacttttcaatttttctttctgttgcaactacttttgaggattcagtcataaattctttctcgaggccaatgttctgaatggtgtatcctaggttttcttctagtggtcttataatttgaggtcttacatttaaatttttaatccatcttgagttaatttttgtatatgatgaaaagtaggcatcaagttttattcttctgcatatgtctagtcagcttttccagcaccatttattaaataggggaatcctttctccattgcttatttttgtcgactwtgttgaagttcaggtggatgtagatgtatggctttatttgtagttgttctattttgttccattgttctattatctttttgtaccagtgccgtgttgttttggttactgtcaccatatagtatagtttgaagtc

SEQ ID NO: 567907 - DNA, 469 bp, Homo sapiens
gttgcaacatttatttgctgacaacttctacattttttgtgacaatgtttatgttgaaagtgtttcagttctttctctgccatgttatatcaaactaccaccacatttcgtggcttaaaacaatcatttgttgttgttcatgatttgtagattgtagatcttctgtgtcacatggtattggctggggagctagacttggtggttggaaggtccagaattgcttcactcccatggctgacagttggtctctacctgggtcttaaatggggctgtcagctgaaaccctcatttttctttgatgtggatctctcccatgtgactgcttggacttcctcagaatatgtcagctaggttccaagaatgrgcattcttagagaacaatcaccaatatgcaaatgcttatgaagcctctgctttgcaacatttaataatatcaatttgtgaggaggagggactgctcctcaactca

SEQ ID NO: 567908 - DNA, 464 bp, Homo sapiens
gatagattgatagataggtagataggtagatagatagatagatagatagatagatagatagatagatagatagatagatggatgcatggtactattttgctattttatttactaccaggtttattcacaatattaagacaaaaagataaaacaagttacatgctcagtagttaaatataattctgccctaattcattacttcagaataaacagtgcatcatttaattgagcaaaaacacctaattattttaataaaggtagtctatatgcttctgaattataatgatttcatttgggagtgttaaagataaatggtttataataagaggtaaccatygcagctatgttaacataaggaatttcaaagtctaagtcagagctgcccaagtacatatacaatttatgatgaaactacatatgcaatattaaatgtttagtattcacactagaaattataaaggaaa

SEQ ID NO: 567909 - DNA, 464 bp, Homo sapiens
gatagattgatagataggtagataggtagatagatagatagatagatagatagatagatagatagatagatagatagatggatgcatggtactattttgctattttatttactaccaggtttattcacaatattaagacaaaaagataaaacaagttacatgctcagtagttaaatataattctgccctaattcattacttcagaataaacagtgcatcatttaattgagcaaaaacacctaattattttaataaaggtagtctatatgcttctgaattataatgatttcatttgggagtgttaaagataaatggtttataataagaggtaaccattgcagctatgttaacataaggaatttcaaastctaagtcagagctgcccaagtacatatacaatttatgatgaaactacatatgcaatattaaatgtttagtattcacactagaaattataaaggaaa

SEQ ID NO: 567910 - DNA, 433 bp, Homo sapiens
cattctggctaacacggtgaaaccccatctctactaaaaatacaaaaaattagctgggtgtgatggcaggtgcctgtagtcccagctacttgggaggctgaggcaggacaatggygtgaacccaggaggcagagcttgcagtgagccaagatcatgccactgcactccagcctgggcgagagtcagactccgtcttaaaaagaaaaaaaaaaaaaagacatacaaatggccaacagacatattttttaaatgcttaatattgctaaccattagggaaatgcaaggtaaaaccacaagaaggtagcatttcacacctgttagaatgactattataaaaatgatgaaagataagtattggcaagaatgtgacaaaaagggaacccttggtggttcaaccttctattattgctaggaatgtaaattaggacagcta

SEQ ID NO: 567911 - DNA, 552 bp, Homo sapiens
ttttatcaggggcataagtagggatgagagagaactaaatgttaaaaagctttacacatcttgtctaagtaaatattacacaaagattttttttttttgaggcgaaatctcgctctgtcacccacgctgcagtgcaatggcatgatctcggctcactgcagcttctgcctccccagttcgagtgattctccttcctcagcctcccaagtagctgggattagaggcgcctgctaccacacctagctaatttttgtatttttagtagagatggggtttcatcatgttgaccagagtggtcttgaactcctgacgtcaggtaatgcacccgcctcagcctcccaaagtgctggcagaaagactggcaaacattacagaaagattactgaaaatgttatagattaataagaaggtgggtatatctcttactgcacaaatcgtctcacaaataaccactatgaactctggacaaaacactgrtaattacctcaaagcacttcacagcaaaaaaaagcaagcagacactggagagaggtcgacatctggaagaaggaa

SEQ ID NO: 567912 - DNA, 618 bp, Homo sapiens
aacaagcatatggaaaaatgctcatcatcactaattatcaggaaaatgcaaatcaaaaccacagtggaataccacttcactcctgcaagaatggacataataaaaaaaatttaaaaaatagatgttagtgytgatgtggtgaaaagggaacacttttacagtgctggtgggaatgtaaactagtacaaccactatggaaaactgggtggagttttcttaaagaactaaaggtagatctaccatttgatccagcaatcctaccactaggtatctacgcagaggaaaataagtcattatatgaaaaagatacttgcacacacacgtttatagcggcacattttacaattgcaaaaatatggaaccagcccaaatgcccatcaatatataaacatatatatgttatatatatgtttataatatataaaacataatttatatatatgtttataacatacattataaacatatatacaaatttatgtgtatatatacacacacacaccatggaatactactcagccacaaaaggaatgaaataatggtgtttgcagcaacgtggaaggaattggtatttgcagcaacctggaaggaattggagattatcattctaagtgaagt

SEQ ID NO: 567913 - DNA, 618 bp, Homo sapiens
aacaagcatatggaaaaatgctcatcatcactaattatcaggaaaatgcaaatcaaaaccacagtggaataccacttcactcctgcaagaatggacataataaaaaaaatttaaaaaatagatgttagtgctgatgtggtgaaaagggaacacttttacagtgctggtgggaatgtaaactagtacaaccactatggaaaactgggtggagttttcttaaagaactaaaggtagatctaccatttgatccagcaatcctacyactaggtatctacgcagaggaaaataagtcattatatgaaaaagatacttgcacacacacgtttatagcggcacattttacaattgcaaaaatatggaaccagcccaaatgcccatcaatatataaacatatatatgttatatatatgtttataatatataaaacataatttatatatatgtttataacatacattataaacatatatacaaatttatgtgtatatatacacacacacaccatggaatactactcagccacaaaaggaatgaaataatggtgtttgcagcaacgtggaaggaattggtatttgcagcaacctggaaggaattggagattatcattctaagtgaagt

SEQ ID NO: 567914 - DNA, 618 bp, Homo sapiens
aacaagcatatggaaaaatgctcatcatcactaattatcaggaaaatgcaaatcaaaaccacagtggaataccacttcactcctgcaagaatggacataataaaaaaaatttaaaaaatagatgttagtgctgatgtggtgaaaagggaacacttttacagtgctggtgggaatgtaaactagtacaaccactatggaaaactgggtggagttttcttaaagaactaaaggtagatctaccatttgatccagcaatcctaccactaggtatctacgcagaggaaaataagtcattatatgaaaaagatacttgcacacacacgtttatagcggcacattttacaattgcaaaaatatggaaccagcccaaatgcccatcaatatataaacatatatatgttatatatatgtttataatatataaaacataatttatatatatgtttataacatacattataaacatatatacaaatttatgtgtatatatacacacacacaccatggaatactactcagccayaaaaggaatgaaataatggtgtttgcagcaacgtggaaggaattggtatttgcagcaacctggaaggaattggagattatcattctaagtgaagt

SEQ ID NO: 567915 - DNA, 484 bp, Homo sapiens
gtaaaatccaaataaagtctggacttcagttaatagtaatgtgccaatgttaacttctgagttttggcaaatgaatcatagttatgtaagatgttaacgttgggagacactgggtaaaaggtatgcagaaactctctgcattatctttacaactctatgcaaatctaraagtattccaaagtaaacagtttattgaaagctttgtggatgaacttatgctttggagaataactcactggcagcactatgaggtaatctctatcataaagcaagtgtgccatagcaaaataagcactagtctaagaggtaggagctccatgtctgaggcccaggtctgtacatactttaagctgtgatcttgcattggccatttaacctcctatagaatgaatacctacatctgtgagatgctctgcatctctcacaggggtattaggaagatcatatacaaagatgctctggagaatgcaatgaaaacctaaaa

SEQ ID NO: 567916 - DNA, 544 bp, Homo sapiens
actcgcactctctgccatgtgaggacacagtgacaaggctgccacctgcaagccagggacagagccctcaccaggaatggaatcccctggcactttgatcctggacttctagcctgcagaactgtgagaaataaaatgttgttgtttaagtcatctggtgttttgttatgatggcccaagctgtccaagacggtaaggttatgccaaggtgcaggtgagaggtacatgtgcaagtatgcctgaagtaggtttgaaagcctatgaaggatcattactgatttgcatcatcacacctggcaggaacctacccggtgacattccctcagccatgagaggaaacaatcctgccgcttttacattaagatcgtggagctattactcactgcagagttaaggcccttttttwaaattttattattattgtactttaagttttagggtacatgtgcacaatgtgcaggttagttacatatgtatacatgtgccatgctggtgtgctgcacccattaactcctcatttagcattaggtatatctcctaatgc

SEQ ID NO: 567917 - DNA, 623 bp, Homo sapiens
tactctggagcaacttcaatgaaattctcgaccaggtaagttaaccatgtttttttaaaaagcaaagatatctcaaaggagtgtgatttatattctstctgttttctactcgccgtgccttctgattttctcaagttgctgaaaagataatggcttttcattgctcttctgtcgtgtttcacaataagttgcctccacctgttttgacatctgtagtttggagcttgcaaggacctgcttttactcagtagatggatattttaccagtaagcattggctgttctaacaccttgtttctccaggttatgtgtttatttcctgttaattttcttccacgtactgtactcgagcatcctgcaccactgccttctttctaagcctaagattcttctcagcttgaaacttccacttatccttgtttttacatatttttttctgacccttagttcatcatgttttaactattcctgccttgctttgttcttccagtcttagtaaaggaacctgtttcctgtgattcagcaattatgaagtacatttctaacagcttgacatctttattattagaagtcctgtcactttcatgctatctcaggacatctcagtttttaacaaacaaaatc

SEQ ID NO: 567918 - DNA, 623 bp, Homo sapiens
tactctggagcaacttcaatgaaattctcgaccaggtaagttaaccatgtttttttaaaaagcaaagatatctcaaaggagtgtgatttatattctctctgttttctactcgccgtgccttctgattttctcaagttgctgaaaagataatggcttttcattgctcttctgtcgtgtttcacaataagttgcctccacctgttttgacatctgtagtttggagcttgcaaggacctgcttttactcagtagatggatattttaccagtaagcattggctgttctaacaccttgtttctccaggttatgtgtttatttcctgttaattttcttccacgtactgtactcgagcatcctgcaccactgccttctttctaagcctaagattcttctcascttgaaacttccacttatccttgtttttacatatttttttctgacccttagttcatcatgttttaactattcctgccttgctttgttcttccagtcttagtaaaggaacctgtttcctgtgattcagcaattatgaagtacatttctaacagcttgacatctttattattagaagtcctgtcactttcatgctatctcaggacatctcagtttttaacaaacaaaatc

SEQ ID NO: 567919 - DNA, 284 bp, Homo sapiens
ttcttattttattttcatccagtttagaacccmacatccagcatttcaatatctttgcctcctttattccctcagtcttctattgcctttgcctagaaatcttggatcaatccaactgtccaaattttcccctgcaacacccaggcttctctctctctatatatagatatatacatatatagatatagatatagatagatatagatatacatagatatatagatagatatagatatagatatatatagctatatctagatattgatgtatctatacctacacag

SEQ ID NO: 567920 - DNA, 557 bp, Homo sapiens
ctgaacagaaccaatgtgcatcttacatgtattgattgatgtcttatgtctccctaaaatgcataaaaccaagctgtggcctgactgcctyaggcacaggttctcaggatctcctggggctgtgtcacgggccatggtcactcatatttggctcagaataaatctcttcgaatattttacagagtttggctcttttcatccacatattatatgaaatagaatttgtaatcagaccaaatgagataatccagaaagcacgtaaaagatatttgatgtgaatgtgtgtctctgtgcatatttatttagttatttttatattttgcttttagttaagatgccatatgataatgatgcaagacagacctggattaaagcccacccctctatatcactcaagctgtgtgatcatgagagcctcatctataaaacagagggaataaagtctacttccaatgcttgtgactggatgacataatgtatatatctcctaattttacattcaccagttagatgtcccataagcatacactgagtgctcaaaaaattcactacttaac

SEQ ID NO: 567921 - DNA, 624 bp, Homo sapiens
gtggaacagtggtctgtggggctgtaagcgagggccttaaatcctgcatgaaacacctgcctcctccccatggagacttgcgaccaccctctccttgccagagtctctcaggggacagtcatcttttcttaggaaccataactggttggggacaaacacattacacatttgactctccrgattctcaaaaatgtttggggaggacacactcagaaaaaataaagacgctatactaatctaggaattagaggctcacagtgttgaaatttggggattctcagaactgagacatgtcttgagggtacaaagatataaaggcatagtttctctacttatagagaccaaaattaattagagtaaaaataacagtgatgatgaaatgcagtattgattcttctgtgtcaaggtctctgctaaacactgtacacactttatccattttaacttttcagcaatcatatgaatcaagtacaattattatcaatttttagatgaaggaaatgaagcttgtaatgataatgttacttatctaaactgataagttttggagctaatagaatccagacagtccagaggtcacctgcttcatcactgtgctcactgacttcctaacagtactgagga

SEQ ID NO: 567922 - DNA, 489 bp, Homo sapiens
gttgagcgcaccatgattgcgccactgtactccagcctgggcaacagcaaaaccctgaccaaaaaaaaaaaaaaaaagaaagaaagaaaagaagaaacaacaacagcaacaacaaaacctgggcagatgaggcaaatcctggcttcyctggaatctgaccctctggtctgctggtttgtatcttgtctaatccccatttcatagttaaaagctttttaacctcattatttcctttcagtcttatcaacctggcagcatgggagttattctcgcatttcatagaagcggaaattgaggcccatgagggcgaaggtgctttcccgaggtcacagagctggcaagggagcagcaggattgactccgcagcccctgcgtttccatcgcagtgcccgccacatagtaggaactctacacatggcgccttctgggggccgcctggctttctggaaaggatccgaagtggtttggtgagcaccggctttggaattc

SEQ ID NO: 567923 - DNA, 489 bp, Homo sapiens
gttgagcgcaccatgattgcgccactgtactccagcctgggcaacagcaaaaccctgaccaaaaaaaaaaaaaaaaagaaagaaagaaaagaagaaacaacaacagcaacaacaaaacctgggcagatgaggcaaatcctggcttctctggaatctgaccctctggtctgctggtttgtatcttgtctaatccccatttcatagttaaaagctttttaacctcattatttcctttcagtcttaycaacctggcagcatgggagttattctcgcatttcatagaagcggaaattgaggcccatgagggcgaaggtgctttcccgaggtcacagagctggcaagggagcagcaggattgactccgcagcccctgcgtttccatcgcagtgcccgccacatagtaggaactctacacatggcgccttctgggggccgcctggctttctggaaaggatccgaagtggtttggtgagcaccggctttggaattc

SEQ ID NO: 567924 - DNA, 489 bp, Homo sapiens
gttgagcgcaccatgattgcgccactgtactccagcctgggcaacagcaaaaccctgaccaaaaaaaaaaaaaaaaagaaagaaagaaaagaagaaacaacaacagcaacaacaaaacctgggcagatgaggcaaatcctggcttctctggaatctgaccctctggtctgctggtttgtatcttgtctaatccccatttcatagttaaaagctttttaacctcattatttcctttcagtcttatcaacctggcagcatgggagttattctcgcatttcatagaagmggaaattgaggcccatgagggcgaaggtgctttcccgaggtcacagagctggcaagggagcagcaggattgactccgcagcccctgcgtttccatcgcagtgcccgccacatagtaggaactctacacatggcgccttctgggggccgcctggctttctggaaaggatccgaagtggtttggtgagcaccggctttggaattc

SEQ ID NO: 567925 - DNA, 489 bp, Homo sapiens
gttgagcgcaccatgattgcgccactgtactccagcctgggcaacagcaaaaccctgaccaaaaaaaaaaaaaaaaagaaagaaagaaaagaagaaacaacaacagcaacaacaaaacctgggcagatgaggcaaatcctggcttctctggaatctgaccctctggtctgctggtttgtatcttgtctaatccccatttcatagttaaaagctttttaacctcattatttcctttcagtcttatcaacctggcagcatgggagttattctcgcatttcatagaagcggaaattgaggcccatgagggcgaaggtgctttcccgaggtcacagagctggcaagggagcagcaggattgactccgcagcccctgcgtttccatcgcagtgcccgccacatagtaggaactctacacatggcgccttcygggggccgcctggctttctggaaaggatccgaagtggtttggtgagcaccggctttggaattc

SEQ ID NO: 567926 - DNA, 614 bp, Homo sapiens
tccctcattcctatagctggtatttctcctgcagaaactggatgctcaataaatatctgttaattatgcactggtagcatggtcttcaaatgagttactaaatgaaattatcagaaatgatcacagccatatcaaatttgkgcatatggaaatatcagaaagacatatgctgaaatataacagttatctaaggtggcaggaatatgggcaaacacaaagctattattctacagcaaatatttgttacacttagaaattaaaaagtaaaatatattttcttaaaaaaaatgccccagtaatgcatatggtaggtcctactggtaactttcttctgatagaagttaatcacttctctcagcttctgcgtctgcagattgaaaacagagagcacaatatctgtctgacatactctaagatttgaacaggatgatgtatgtatcagtctgttttcatgcagctgataaagacatacctgagactaggcaatttacaaaagaaagaggtttaatggacttacagttccacatggctggggaggcctcacaatcatggcagaaagcaaggaggagcaagtcacatcttacatggatggcagcaggcaaagagagagcttg

SEQ ID NO: 567927 - DNA, 614 bp, Homo sapiens
tccctcattcctatagctggtatttctcctgcagaaactggatgctcaataaatatctgttaattatgcactggtagcatggtcttcaaatgagttactaaatgaaattatcagaaatgatcacagccatatcaaatttgtgcatatggaaatatcagaaagacatatgctgaaatataacagttatctaaggtggcaggaatatgggcaaacacaaagctattattctacagcaaatatttgttacacttagaaattaaaaagtaaaatatattttcttaaaaaaaatgccccagtaatgcatatggtaggtcctactggtaactttcttctgatagaagttaatcacttctctcagcttctgcgtctgcagattgaaaacagagagcacaatatctgtctgacatactctaagatttgaacaggakgatgtatgtatcagtctgttttcatgcagctgataaagacatacctgagactaggcaatttacaaaagaaagaggtttaatggacttacagttccacatggctggggaggcctcacaatcatggcagaaagcaaggaggagcaagtcacatcttacatggatggcagcaggcaaagagagagcttg

SEQ ID NO: 567928 - DNA, 539 bp, Homo sapiens
gcaacctctgcctcccaggttcaagtgattctcatgcctcagcctcccaagtagttgggattacaggcacgtgccaccacatctggctaattttggtatttttagtagagatggggtttcaccacactggccaggcttgtctcagactcctgacctcaagtgatccaccagcctcggcctcccaaagtgctgggattacagatgtgagccaccatgcccagcctcttttgagtttctgattagcctctccaaaggagrcaatcaaatatgcttttatctcagtgagcagaatagaatgggaggcagatttgccctaagcagtccccagcttgccttttccctttagcttagtgatttttggggctccaagatttattttcttgtcacaggccaaacttaaaatattccaagaggcagctttaggctaaacttgatttaacagtgatcaaattatcttttattggccccatgtttcagatgagaaaagggatgtgaagaaaagtaggatgagtcgcctaaagtcacatggtgagtgtgcc

SEQ ID NO: 567929 - DNA, 539 bp, Homo sapiens
gcaacctctgcctcccaggttcaagtgattctcatgcctcagcctcccaagtagttgggattacaggcacgtgccaccacatctggctaattttggtatttttagtagagatggggtttcaccacactggccaggcttgtctcagactcctgacctcaagtgatccaccagcctcggcctcccaaagtgctgggattacagatgtgagccaccatgcccagcctcttttgagtttctgattagcctctccaaaggagacaatcaaatatgcttttatctcagtgagcagaatagaatgggaggcagatttkccctaagcagtccccagcttgccttttccctttagcttagtgatttttggggctccaagatttattttcttgtcacaggccaaacttaaaatattccaagaggcagctttaggctaaacttgatttaacagtgatcaaattatcttttattggccccatgtttcagatgagaaaagggatgtgaagaaaagtaggatgagtcgcctaaagtcacatggtgagtgtgcc

SEQ ID NO: 567930 - DNA, 608 bp, Homo sapiens
aagaaaagctcctgtcttccaaggtagctataccactttgcattctcacaagtaatgaatgagagttcctgttgctctatatctttgtcagcatctgatgttttcagtgttctgtttcgtggccattctactagacaaatagatgcgtagtggtatctgattgttttaattctcatttgcctaataacatatgatgtggagcatattttcatatgtgctatggtctaaatgcttgtggcccccccaggattcaaatgctgaaacctaatcatcaagttggtaagattaggaggttgggcctttgggaaggtgattaggtcatgagagtggagtcctcatgaatgaaattagtacccttataaaataggccccagggagcttgtttgccccttccaccatgtgaagacatarcaagaaggcaccgtctatgaaccagaaagcagccctcaccaggtattgaatctgccagcatcttaatcttggacttcctagcctccagaattgtaagaaaaaatttctgtttataagccatgcagtccaagatattttgttatagcaacacaaatagtctgagacaatatgcttatgtgctatttttatatgttttt

SEQ ID NO: 567931 - DNA, 506 bp, Homo sapiens
actccatctcaaaaaaaaaaaaaaaaaaaagaaaagaaagcagtgtttggtgataactagatgggcatttttaaaaagtcactctgttatctgtgctagaagaaaccaagactggaaccagagaccaaatgaggtgctgttgacatgatccaggtgacagctaaagttgtcaaatggaaatagaaagaacccaatggtttatgaacaacttaggagatagaaacaactggattttttaattcattaaatacagagagagrcaagagcaaaaggtgtacaagataaatacaagggctatggcttgggagctgaatgagcagtaggatcaattttttgggaaaagtttgtggtttggacatgagtttcagatgtctgacaagcagtcaggcagggatgtttggaacgtaagagtctggagctcaagagggaaattagggcaagagataaaaatttgagaaccatagttgaagatgacgatggcaacaaggacggcatgagatggatca

SEQ ID NO: 567932 - DNA, 242 bp, Homo sapiens
ttcttttttctctttctccaaactaatgacaacatgagggttatcccttgttcagcttccccagttttgtaggtggtggattaaaacattttcgttagcatttcctgtttattaatgagcttgacctttgcctcacatttcttgcaaatacttatttctttttgtttargtagattgtttattcatgaccttagccttttttttctattatggtgatcatcttttcctttgtttattatgaa

SEQ ID NO: 567933 - DNA, 514 bp, Homo sapiens
ctgtccctgtaatccaatcacttcccaccaggtttctcccttaacactgggagattacaattccagatgaggtttgagtggggacacaaagctaaaccatstctccaactttctaaccattcttttattctgaatatagaaaaggcaactactctcttagccacttttccagtgatgttctaggaaccattcctgaaggatccctggaaagcctccacagagctctcttcagctactcccacaattttaagagtacataatatgttaaatgcctttattattaaaatagctagagtggtttctgttatctacaacagaactcaacattaaaaagaatttggtagcagggaagattataggcaacagaccaacaaggacaggaatctaaaactatcttccccccttcttggatttggaggttttaaagtttggactccaaatagtggcataacagcaacttaaagaattacttgtgatcatctgaattacagtgctttttgatgttatgatttaa

SEQ ID NO: 567934 - DNA, 561 bp, Homo sapiens
ctgggtgacagaatgagaccttgtcttaaaaaaaaaaaaaaggggtgtgtgtgtgtgtgtgtgtgtgtgtgtgtgtgtgtgtgtgtargaaatcatagtcttccgtttttaatataaaacatcaacatcatatttgaagtatatatctctggcatcagatcctgagcatatggacctaattctcttcaaatactctgatcaatcaatggataaagtgagggcaactgtagaccaagtttaaatacaggtgtcagtatctctttagtcatgaggtaggagtccacagtccaacaggtgtttgtcagagggaaaaactttaataagggcgttaagcttttcaaaggattcttcaggaaacacaaaagtcatgcttcatatattccttaggttcttgaaataagcattaaaaagataatgattgatgtcttgtcccaagtataatatctacacatgtttccacagaatgtaaagaaagagaaattcttgtttacacaaagttcattagatactgaagtgtggtagaacttgaagtggacttcaaagaagagagagagaaaaatg

SEQ ID NO: 567935 - DNA, 650 bp, Homo sapiens
accacaggcagtttattacccatcaagtcaagaaccatccagaatggtaaggaacccacttctaaactcatgatttcttggtgactttcgacaagaaactgcctttcattgccatttcttcttacaccttgttcttgctactactgggttagagctctcttaaaatggtttagctgagagcacttggaaaatgcctgatacatatatgatcatttgtgcaaagttaatcactcataccaactktattggatcagttttcattagagtttgtcttttgttccttgaaggaatgctgagtaggataagtattaggcaacttccttctcttgcagggtgtagttcataaaggaaaactaggctgggtgtggtggctcacgcctgtaatcccagcactttgggaggccgagacaggtggatcacctgaggtcaggagttcaagaccagcccggccaacatagtgaaaccccatctctactaaaaatgcaaaaattaatggtgtggtggcgtgcatctgtaattccagctactcaggaagctgaggcaggggaatcgcttgaacctgggaggtggatgttgcagtgagccaagatcatgccactgtactccagcctgggcaataaagtgagactccatctcaaagaaaaaaaaaa

SEQ ID NO: 567936 - DNA, 584 bp, Homo sapiens
agactccatctcaaagaaaaaaaaaaagttggggggaactgatagaatgttsagcattcattagtactcctaagagtatatgttgtacacctgactcttctctacaagtttttagactctttggaactgcactttgctttgggatgaatgcaaagtgtatttgagataaagaatgggtacactttattgccttttaaaagttgtaccataattatgtccagcagacaattaaaaaggacataaatgataaatttggctgacatctctttttgtgaggtatacccatgaattatctgcttgctcatctttacctttgggtttctctacattcaaaggaaattctctggttactatatcatattctgttgaattacaaaataattataggggaaggcccaggtatgtatgtaactgtaaatagttaaatttatgaaatatttcataatgttcccaaataacaatttttctgaataaaaggtcattgctagaatatctgggacttagtctgaggaatatgaggagataagtaaagggtcatgaaaaagcacaggatatagtagaaagaatgtgaacactaaagctgt

SEQ ID NO: 567937 - DNA, 382 bp, Homo sapiens
ccattgtcttggctatcagcacctggctctttcttagttatgcaaatctctctagcaagtgattgctccacagcctgcttggattcttcccctgaaaacaggcttttcttttctaccacatgtccaggctgcaaattttccatacctctaccctctgcttcccttttaaatataaattccaactttaggttatttatttgctcccacatctgaatgtaggctattagaaacagccagatcatatcttgaatattttgctgcttagaaatttcttctaccagatactctaggtcatcactctcaagttcaaacttccctagatccctagagcatggacacaatacatccaaatctttgytaaggcataacagggtgacctttg

SEQ ID NO: 567938 - DNA, 564 bp, Homo sapiens
acagagtaagactccatttcaaaaaaaaaagaattcaagaagcagacttggagatacagcttgatggaaactgtgggatatttcagtgattcacaaggagtaacaaaagaggatttctcaatttaggagtatcccagcaaaaaatatgaacactacagataaacatatattcaagtaacccaattttaaatatgggcagagtgtctaaatagacaaactgatacttctttaaagaagatatacaaaatgaaaagatgctcagcatccttatccattagagacatgcaaatcaagatcacaatgagataccacttcccacctactcggatggctataattttttaaaaaacaggtaataagtgttggtgcggatgtggagaaattagaaccctcatacagggtgggaatataaaattgtgcagctgctttagaaaacagtctggtagttcttctaatgattaaacatggagttaccatatgatccagcaatttcactcctaggwgtatacttaagagatatgaaaacatgtccacacaaaaatgtgtaaatgaacgttcatagta

SEQ ID NO: 567939 - DNA, 488 bp, Homo sapiens
acatataggaaaacttccataaagtataagaaaatagattttaaaactcaattatatagaagaaaagctttctacttgtgaatggaaaaatgtaacttatattaaaccagtatccttatctatagcaataaaataattgaacaaaatatgaaaatcatctgtctgaatacagtgaacagacaacaacatgaayaagaaggactcattggagaagggccatcagagataaacttatccccctgaaattgcttttacccaggagacatttaataatttcggctataggaagagggccaaaaaatataggagttagaactcaaaaggcctttgctgatagggacagaaatggtagagctttggcagacattagagacctgatttccatggttaattatcttctcagtatatttgctgaagtctagttttgtttgaagagcaggggactgatatgatttggctgtatccccacccaaatctcattttgaatt

SEQ ID NO: 567940 - DNA, 476 bp, Homo sapiens
actgtaacactcaccacgagggtcygtggcttcattcttgaagtcagtgagaccaagagcccaccaattctagacacaaaagtttccccaaaatacatgtagctatgagttatactgtccaggaaatgtaagatcttccctctcttagattgttcagtacttactgtgaccctgtcctatacttagggataatattgttctggaaaagaagtagtgtttgagagcagtgtctgtactagcttttacaacctgtatgactaatacatgtgtttcttaacctacacatgccttagtttcttcaaccacaaaatagataaaacaggattatatctgtcctgctcctttgaaaaacagaaacaaacaactgattttgttttgttctctatttttcatttcagtcctgacttccttgttttcatatttacaaacacctgagactgggtaatttataaagggaagaggtttaatggactcac

SEQ ID NO: 567941 - DNA, 597 bp, Homo sapiens
taaggcagcctgcttacccaggatyggctgggagcctggaaagtttccccagtacagggaaagagtaagtgagggatccccagtagcccatattcccatcatggactcatgcaatcttatccattggagagcccctcaactctcatgagccttgagactagtacagggagctgcctggagtgctcatgacagcattgctccggaggggaagctcaattgggttctacacacctgcctgagactcaagcagctgcagtatgatgccatttgtcattttgagagtccagttcccactagactatatactgacctggggccaaatagccccttcctctccatatccctggagcctcaatgacttacctttacagccacccagaacacttcagccacacattgctgaatgaacccagcagtgtggcagagtgatatggtttagctgtgtctcaaccaaaatttcatcttcaattgtagctatgataattcccatgtctcatgggagggactcagtgagagataattgagtcatgggggcagttctctcccatgctgttcccatgatagtgagtaaatctcacatgatctgatggttttata

SEQ ID NO: 567942 - DNA, 565 bp, Homo sapiens
aataagaacaaataatatgtaaaggatctcaagacaaatgaatatcagctttttcaattacgtagtattggaagttagaatgaaacattgcatttaaaaatctaatggggccaggcatggtgactcatgcctgtaatcccagcactttgagatgctgagccaggcagatcacttgaggccaggagtttgagactagcctggccaacatggtgaaaccccatctctaccraaaatagaaaaattagttgggagtggtggagtatgcctgtagtcccagctactctggaggctaaggcacgagaatcacttgaacccatgaggtcgaagatacagtgagacactgcactccagcctggatgacagagcgagactccatctcaaaaaaaaaaaaaaatctagtggaagataatatttaacctatacattccataagcaaattatccagcaattatgatggataaaatgaagattcagccagctataataaaatagccagcttaactgtagctagcttaaataatggtacctctaatagatactttacccaaaagtttttggtggattt

SEQ ID NO: 567943 - DNA, 455 bp, Homo sapiens
ggaatcctttcatttgatttagcktctggtaggtgaagtagtgaaattaagtggagataacagcattaccaaaatataattagaaacaggacacatgggatcccagctttggggtctgatggtgagtcattgtaatgtgtcgggaacaccaaaaagaggataatctaataaaattgaagttgtgctgagcaacagctgtagtgagctgctattcaattagattttgtcattatttttttctatatttctttccatttgctaatgccttgtaaggattatgtgtggctaggtggtattatacattttctttgttcttataaaatgttttaaaatgcataaaacgttggaaaatgccaattgtcaagtttgagtttaaatactatccctttattttatatttgctaactaagtctatgcattcaatcaattttctgagcaactaaaacaggccaagt

SEQ ID NO: 567944 - DNA, 586 bp, Homo sapiens
tcatttattcatttaatttgggaagactttgaggtttagggaaactaaacattttttccccaggtcacacagtgaatacaaggcaacataaggattgtcagagctgtcagacaaaagattcttacctcttaactaaatgggacagtagagagatcacagagatggtaatcaggaaacctggttgctctgcctaattttctccctacttatctacaacctcagacaagctagttattaactcttgcctccatttattcatctatcctaccttctagccaggattgaatgagtcccaagagtcatagaaaaagttaagactgtattacacatgttgatatcacttttatcaatgttagtctcagtgctgaaatcattccctaatcatacataactgggctctaaagcatcttgaagatactatgacttcacaagacctgcttacttctaactggagagcaaagagcagcacatctgttttaatactaaaatttaaaatggatcaaaaatcaactttctagactcacaggataactagcattcttctccagctagagacagccctgmccctatcatggaccatggaggt

SEQ ID NO: 567945 - DNA, 527 bp, Homo sapiens
aaaatctctaacatgctttccacagtggctgaagtaatttacactcccaccaagagtttacaaatgttctcttttctctacagcctcrccaacatctgttgtttttgatttcttaataatagccattcggacttgcgggaggtaatttcttattgtggttttgatttgcatttctctgaagattagtgatgttgaacatatttttatgtttattggtcacttgtatgtcttcttattaaaagtgtctgttcatgttgttggcccacttcttaatgggattatttcttttttccttgttgaattgtttaagttctttatagattctgaatattagatctttaatggatgcatgctttgtgaatgtttatcccattctgcatgttgtctgtttattttattggtagtttctttttctgcgcagaatctctttagtttaattaggtcccacatgtcaattgtcgtttgtgttgcaattgcttttgagcacttagttataaattttttcccaaggccaatgtccagaggtt

SEQ ID NO: 567946 - DNA, 550 bp, Homo sapiens
gagcttgcagtgagctgagatcgcgccaatgcactccagcctgggtgacagagcgagactgcgtctcaaaaacaaaaacaaaaacaaacaaaccctataatacatcttatactagtagaaagaacgacaaaatccacattatcaactcaaaaaattgtcataatttattgaatgttaataatgtcaggcactgctagacactttcaaaaacccacgaccacagttaagcctgccatatgtcttaagtgtccacggttcccatgaaattgcctttactgaaaacagacacagctttggtttacattctcaaaactgagaagagcaagagtagatctcgatctagggaaaactacagctagattctctaaaaatagtaataataatctgcctctgatcttgacctctatgtgttgactctgtcgtctctattgaggggacattatgcatgtagggatggcagagagcataacccacacacagcccagactccagtcctgacagcttccattctttaaatgaagtcytttatacttaagcattctaatacaaa

SEQ ID NO: 567947 - DNA, 649 bp, Homo sapiens
ctggggaataactgccaaatgccaatcaatcagaaatgaggattaaaaaattatcaaataataaatcacttggaaagtgcaactaaatatatttcattttccataaatacatgtatcctacaactggattgatttgggctggaaagatattcttccttggtagttaggagatgtattttagaagttctgcattagaaagaaccttgtcaaatgtcattaaaagaatcactgaactgaactgaaaactggagacaagatcgttatttttgaaatggggagaccaggtaaataggttatggtaaattccatggataagagatgctgctgaaaccccactcaaaatgttgtaacagttatttttattctatcaggatcgtcacacttgaagatttcttgtaccctatctcctttaattacttctatttcagatatcatacataraatacccaagtactactgaaggggcacactaattagaatcatagaaggatttagcatcacagaacaatagtaagggattagtaaagatgtgatagagtccataacaagcatattttgcataaacaaaaattagctttcttgaagaggattccacagaatgagaaagtaacatgaaagataaaaatgatgtgaagagaaatggaaaaat

SEQ ID NO: 567948 - DNA, 649 bp, Homo sapiens
ctggggaataactgccaaatgccaatcaatcagaaatgaggattaaaaaattatcaaataataaatcacttggaaagtgcaactaaatatatttcattttccataaatacatgtatcctacaactggattgatttgggctggaaagatattcttccttggtagttaggagatgtattttagaagttctgcattagaaagaaccttgtcaaatgtcattaaaagaatcactgaactgaactgaaaactggagacaagatcgttatttttgaaatggggagaccaggtaaataggttatggtaaattccatggataagagatgctgctgaaaccccactcaaaatgttgtaacagttatttttattctatcaggatcgtcacacttraagatttcttgtaccctatctcctttaattacttctatttcagatatcatacatagaatacccaagtactactgaaggggcacactaattagaatcatagaaggatttagcatcacagaacaatagtaagggattagtaaagatgtgatagagtccataacaagcatattttgcataaacaaaaattagctttcttgaagaggattccacagaatgagaaagtaacatgaaagataaaaatgatgtgaagagaaatggaaaaat

SEQ ID NO: 567949 - DNA, 648 bp, Homo sapiens
gggcgagcgtgcaggagagtggccatagcaaagtcttagaaaatcacaatctccacgtttgctccttatccccacccctaggtacacttcttctttgaatcctcttttcctaaggaaagatgttaaattccacaattaagtcattcccattaagctgtagaatcattaagtagagttcaagttaatcttttgtctctatgttgaggcatagaacagggaacgtttcattctttggggacaataataattatacgttaaacatttttaaataggatatattgtattgactcacaatgcatgatcagatttttaaaaattatttctctctgagagaaaagaactttaagcctcycaagagttaatcaattcatacacgtaaactgcagcgtgctaattctccatggcgatccctctgtcttcctgtgtccccctcactctttctcactctgtctccctccctccacacctcacccctagactcttgctacccaaggcagagcatgcagcagcagcagcagcatcacctaggagcaggtgagttggaaatacagattctcaagccccacccaaacttgctgaatccgagcacgcacttggcaaggcccgcagaggattttcgtgggcattactatttaagaagcagtgttg

SEQ ID NO: 567950 - DNA, 648 bp, Homo sapiens
gggcgagcgtgcaggagagtggccatagcaaagtcttagaaaatcacaatctccacgtttgctccttatccccacccctaggtacacttcttctttgaatcctcttttcctaaggaaagatgttaaattccacaattaagtcattcccattaagctgtagaatcattaagtagagttcaagttaatcttttgtctctatgttgaggcatagaacagggaacgtttcattctttggggacaataataattatacgttaaacatttttaaataggatatattgtattgactcacaatgcatgatcagatttttaaaaattatttctctctgagagaaaagaactttaagcctctcaagagttaatcaattcatacacgtaaactgcagcgtgctaattctccatggcgatccctctgtcttcctgtgtccccctcactctttctcactctgtctccctccctccacacctcacccctagactcttgctacccaaggcagagcatgcagcagcagcagcagcatcacctaggagcaggtgagttggaaatacagattctcaagccccacccaaacttgctgaatccgagcacgcayttggcaaggcccgcagaggattttcgtgggcattactatttaagaagcagtgttg

SEQ ID NO: 567951 - DNA, 603 bp, Homo sapiens
gggacgaacccccaaaaattgaacagtagaaacactgaaattgcaacagaaaaaaggaatgattacttcaattgtatcgttgtgaaaaaaacttctgtaacagcaaacgtaaaagtttcctaggccaagataatctgccggaaactaagcagatggtaccgagctgaattaccttgtagttacttcttctgaggcaggttggagctcatcacagttaactgaaagctccccacataaagtcaaaacataaaaatgagatgcacattgtcgrtcagttgtagcggccttgcagcctctgccaacctttgattaagatgctttgaggttaagaacttcctatttcatgaacaatggcatcccgtggctgttacatgatgcagataaaatgtgcagaaagaccatgaggacaatatacaccattaatttgtgtgatgagaacaggaataagaagttcctataatactagaatgtttctgtaaaacacacggtttatgttctgaaaattctgcctttaatctcagtttagtatggtcttctaggaaatagggatcctcataagaattttgcagaatcccatgaatttgaaaaattaaataaaaaata

SEQ ID NO: 567952 - DNA, 603 bp, Homo sapiens
gggacgaacccccaaaaattgaacagtagaaacactgaaattgcaacagaaaaaaggaatgattacttcaattgtatcgttgtgaaaaaaacttctgtaacagcaaacgtaaaagtttcctaggccaagataatctgccggaaactaagcagatggtaccgagctgaattaccttgtagttacttcttctgaggcaggttggagctcatcacagttaactgaaagctccccacataaagtcaaaacataaaaatgagatgcacattgtcgatcagttgtagcggccttgcagcctctgccaacctttsattaagatgctttgaggttaagaacttcctatttcatgaacaatggcatcccgtggctgttacatgatgcagataaaatgtgcagaaagaccatgaggacaatatacaccattaatttgtgtgatgagaacaggaataagaagttcctataatactagaatgtttctgtaaaacacacggtttatgttctgaaaattctgcctttaatctcagtttagtatggtcttctaggaaatagggatcctcataagaattttgcagaatcccatgaatttgaaaaattaaataaaaaata

SEQ ID NO: 567953 - DNA, 603 bp, Homo sapiens
gggacgaacccccaaaaattgaacagtagaaacactgaaattgcaacagaaaaaaggaatgattacttcaattgtatcgttgtgaaaaaaacttctgtaacagcaaacgtaaaagtttcctaggccaagataatctgccggaaactaagcagatggtaccgagctgaattaccttgtagttacttcttctgaggcaggttggagctcatcacagttaactgaaagctccccacataaagtcaaaacataaaaatgagatgcacattgtcgatcagttgtagcggccttgcagcctctgccaacctttgattaagatgctttgaggttaagaacttcctatttcatgaacaatggcatcccgtggctgttacatgaygcagataaaatgtgcagaaagaccatgaggacaatatacaccattaatttgtgtgatgagaacaggaataagaagttcctataatactagaatgtttctgtaaaacacacggtttatgttctgaaaattctgcctttaatctcagtttagtatggtcttctaggaaatagggatcctcataagaattttgcagaatcccatgaatttgaaaaattaaataaaaaata

SEQ ID NO: 567954 - DNA, 603 bp, Homo sapiens
gggacgaacccccaaaaattgaacagtagaaacactgaaattgcaacagaaaaaaggaatgattacttcaattgtatcgttgtgaaaaaaacttctgtaacagcaaacgtaaaagtttcctaggccaagataatctgccggaaactaagcagatggtaccgagctgaattaccttgtagttacttcttctgaggcaggttggagctcatcacagttaactgaaagctccccacataaagtcaaaacataaaaatgagatgcacattgtcgatcagttgtagcggccttgcagcctctgccaacctttgattaagatgctttgaggttaagaacttcctatttcatgaacaatggcatcccgtggctgttacatgatgcagataaaatgtgcagaaagaycatgaggacaatatacaccattaatttgtgtgatgagaacaggaataagaagttcctataatactagaatgtttctgtaaaacacacggtttatgttctgaaaattctgcctttaatctcagtttagtatggtcttctaggaaatagggatcctcataagaattttgcagaatcccatgaatttgaaaaattaaataaaaaata

SEQ ID NO: 567955 - DNA, 612 bp, Homo sapiens
tgtttgtggccaacaaccctgactggtacacctgcttaaaccaagagcattgttacatctgcaagaagagtctgcagctcaccatagtgtatttaagttctcaacatccaagttatgtagaagactccaagttgaggagtgggcattcacacttgttcttgttgctcaggaaaattaacctcattcagactgaggagaacagaaatactttgagaaatctcacaaaataggtgggtaccttattcacatgctaggggttttcatgttactggaggagtttgggtgtaragtgatccttgtgtccagatctttggagccagtcagcaatcgatattgagccattgggttgactttgctacctagaattcagagacagtcctcagtttcttagatatggcttcagtctcaaaagtcagggttggccaggcgtggtggctcatgcctgtaatcccggcactttgggaagctgaggcgggcagatcatgaggtcaggggttcaagacgagcctgaccaatatggtgaatccctgtctctattaaaaaatacaaaaattagatgggtgtggtggggtgtgcctgtaatcccagctactcaggagactgaggcaggag

SEQ ID NO: 567956 - DNA, 660 bp, Homo sapiens
ctgggtaggtcctaaatccaatcacaattgtccctataagtgagaggcagaaaaaaaaaatatatatatatatagagagagagagagtgagagagagagagagagagagagtgtgagagagagagagatagagtctggctctgtcactcaggctggagtccagtagcacaatctttgctcactgcaacctccacttcccgggttcaagtgattcttttgcctcagcctcccgggtagctgggactacaagtgcgcaccagcgtacccagctaatttttgtatttttaatagagatgaggtttcaccatgttggccaggctggtctcgaactcctaacctcaagtgatccacccacctcggcctyccaaagtgctgggattatgggaatgagccaccatgcctagcctgaagaaaaatatttgactcacagaaaaggaggagtcagtgcgatcaaagaggcagggttggaagtaatgtagtcacaagtcaaagaattctgtcagccaccagaagctggaagagacaaagaatatttcctcttctagtacttccgctggagtgcagccttgatgacatcttaattttggctcagtaaaatggattacagacatgtgacctccaaaaatgtgagcaaataaacttgtgtgtgtggtaatttgt

SEQ ID NO: 567957 - DNA, 638 bp, Homo sapiens
tatcaagcatcttctctgaccacaatggaacaaagctacaaatcagtaacaaaaggaatttagagaactatacaaacacatggaaattaaacaatatgctcctaaatgaccagtgggtcaatgaagaaattaaaaaagaaattgaaagagttctggaaacaaatgataatggaaayacaacataccaaaacctacaggatacagcgaaagtagcagtaagagggaaaattacagctctaagtgcctaaatcaaaaaagaagaaaaacttcaaacaaatactgtaatgacgcattttaaagaaatgaaaaataaagaaaaaaccatacccaaaattaggagaaggaaagaaataaagatcagagcagaaataaatgaatttggaataaaacaataaaaaagatagatgaaacaaaaagttggttttttaaaaagaaaaaattgacaaacctttagccagactaagaaaaagacagaacccaaataaataaaataaaagatgaaaatggaaacattacaactgataccacagaaattcaaaggatcattagtggctactatgaacaactaattatatgccaacaaattggaaaatataaaagaaatggataaattcatagacacatacaacctaccaaac

SEQ ID NO: 567958 - DNA, 638 bp, Homo sapiens
tatcaagcatcttctctgaccacaatggaacaaagctacaaatcagtaacaaaaggaatttagagaactatacaaacacatggaaattaaacaatatgctcctaaatgaccagtgggtcaatgaagaaattaaaaaagaaattgaaagagttctggaaacaaatgataatggaaatacaacataccaaaacctacaggatacagcgaaagtagcagtaagagggaaaattacagctctaagtgcctaaatcaaaaaagaagaaaaacttcaaacaaatactgtaatgacgcattttaaagaaatgaaaaataaagaaaaaaccatacccaaaattaggagaaggaaagaaataaagatcagagcagaaataaatgaatttggaataaaacaataaaaaagatagatgaaacaaaaagttggttttttaaaaagaaaaaattgrcaaacctttagccagactaagaaaaagacagaacccaaataaataaaataaaagatgaaaatggaaacattacaactgataccacagaaattcaaaggatcattagtggctactatgaacaactaattatatgccaacaaattggaaaatataaaagaaatggataaattcatagacacatacaacctaccaaac

SEQ ID NO: 567959 - DNA, 657 bp, Homo sapiens
tgtggtttaaatgccaaatacttgtggattgccaagatttttttccattgctggtttctaatttaattacattatgattggaaaatgcactttgtatgatttttaatccttttaaatttactgataattattttataacctatcatatagtctatactgaagaatgttctccatgtgctttaagtcaattgtgttctgcatmcattgggatacaattttctacatttttaagttcatcagtattgttgtttacatcttctcaaccttcactgattttctaactgttctatcagaaaacaattatttcctaaccagtaaagagttggttactcaaatttgcaactaatattggtgaattatctattttgcctatcaattctgcccattttgaatttgtgtattttaaagctctgttaataggtgcatacagaattataatttttctgtcattttaatgattaaccattttatcattatgaaatgtccgttgtcttaaagtctattttatttgatattaatatagtcatttcagctgtcagaattactatttgcatgacatcttttactaaccttttctttaaccatatactatttgtgtccctgaatctaaggtgtttctcttatagacaacacgttgacgaatcttcatttgttgat

SEQ ID NO: 567960 - DNA, 584 bp, Homo sapiens
aaatatatatttatttaaattactgtttttaagcctggcttcctagggattgctcctgtgtctatatagcttaataatcagacaataaccagaaataaactttgctcaaacaactcaagccaataagacttccagcccttccttgccaatgaacctgcatattggtaggagagtgtattaaaagttcaggccaattgcccctggcttttcctttctggtctcctacacacgtgtagagcctctagggcagccaggagtacatgactaggttgggccctctccagtctccaatacacatgtatgcagcttcagccagacatatgcttgtcccaattatgaccacaatcccatgctagtagaatcctgggtcctctccgctcacctgactccaagattgtcacttccataaacaatagcactagaagtgagcaccayccaactgagtgagtccccttctgatacagcagtacagctgtaggtcctccctggacccaccctgccctggcagatcttctgcaataaccaagctggaagttgggggtagggaaacataacagccctaggctaaaatacaagaaactacc

SEQ ID NO: 567961 - DNA, 423 bp, Homo sapiens
caaatatttaatagatgttatttactatctttataacattacaatgtttggcacacactaagtgctcaattaaaacttgctaaatggtgtacagaaaaaaaatgtggttttcacagcaatcagagtatatctaattttcatagtaatcagaataaatttaaacctaactacamaaatattttcaaattatttaccccatttggaccagggatcgtggctcatgcctgcaatcccagcactttgggaggctgggcacgtggatcactcgaggccagaagtttaagaccagcctggccaacatggcaaaaccccatctctactaaaaatacaaaaagaactagccaggcatggtggctgcatgtctgtattcctagctacttgggaggctgagggacgagaatcgcttgaacccaggaggcggag

SEQ ID NO: 567962 - DNA, 423 bp, Homo sapiens
caaatatttaatagatgttatttactatctttataacattacaatgtttggcacacactaagtgctcaattaaaacttgctaaatggtgtacagaaaaaaaatgtggttttcacagcaatcagagtatatctaattttcatagtaatcagaataaatttaaacctaactacaaaaatattttcaaattatttaccccatttggaccagggatcgtggctcatgcctgcaatcccagcactttgggaggctgggcasgtggatcactcgaggccagaagtttaagaccagcctggccaacatggcaaaaccccatctctactaaaaatacaaaaagaactagccaggcatggtggctgcatgtctgtattcctagctacttgggaggctgagggacgagaatcgcttgaacccaggaggcggag

SEQ ID NO: 567963 - DNA, 423 bp, Homo sapiens
caaatatttaatagatgttatttactatctttataacattacaatgtttggcacacactaagtgctcaattaaaacttgctaaatggtgtacagaaaaaaaatgtggttttcacagcaatcagagtatatctaattttcatagtaatcagaataaatttaaacctaactacaaaaatattttcaaattatttaccccatttggaccagggatcgtggctcatgcctgcaatcccagcactttgggaggctgggcacgtggatcactcgaggccagaagtttaagaccagcctggccaacatggcaaaacyccatctctactaaaaatacaaaaagaactagccaggcatggtggctgcatgtctgtattcctagctacttgggaggctgagggacgagaatcgcttgaacccaggaggcggag

SEQ ID NO: 567964 - DNA, 443 bp, Homo sapiens
gctggcacttgttggtactcaataaatggtagctagaacacgatgactactctcacctggaaggagaagatttaaccttctctaacctygtccccagatattttgtggaaagatgcaaggtctatctgtcaaataatttcagagatgtgcagcttgtcattttcatgactcctctaccacatgaatggaagtaaaaaaatgcatctcattgctgtgattaaaattctatttcagggagcagggaaaaatacaaaactaacctgaacacccacacacaaacggataaacacatgtttaacagcttatttacaagggacatcccagttgacaattttgtgggtactcaagagtcatttccacatttctgtaaaaatgacatttttttttggttactttaaatgaacctttgcatttcttgcttctgaggggatggcatgttgtta

SEQ ID NO: 567965 - DNA, 517 bp, Homo sapiens
ggttttctttcattttaagtttacaaacccaaatttgtagctagcccctcattcatcaaaactatactctaatatacactttcttgtatctgtatactatattactttctacttatatgtaccctacttattttgtagccagtttctataacaattctgacctgcagcactataacaaacttgcccttgttatttaaaccgtggcatccgtgttgtatggtttagcagaacctagctggaagtccttgatsatcaaaccacttccctacaaggtccctgccacatcctgaacacaggctttactgcaaaccagagggcataaaagaaagatagaaaatccagaattgaacaggaaaactctgaattgattaaaattacctggagatgcttgttaaattctaggcatctgagtaaaatgtctattgtgatgtacattcaatttagttatagctaatctttttgcaaattggccttggtacttgagaactctataaccactaaactcataattccaatg

SEQ ID NO: 567966 - DNA, 397 bp, Homo sapiens
catgatgcgtattactaagaggatttttgcaattttactgaaatcagaatatacattaatacatgtttcctagaaagtgcttgtacattcttgagtgatggatagactaagactcaatttaagtaaacagacaaaaaaatragggctttatttttaaatttctcctaagccacataaaatttagttggcaactggtctttatccattgaaaaaaaacaacagcagaaaatgagcattggtttaaaataatcagcaataaatatatcaatagagatatactattgtgtgcttattatacatgttttataaaatgaatagcaaccttttgaattttcatgatttctccctacaaaaagcaatagatgctcttccttttctcccccatatgtcttctgtg

SEQ ID NO: 567967 - DNA, 588 bp, Homo sapiens
acagtaaaaaccatcttcctttatcagcactttacttctcctatgactacagaaaataccataggactcaaataaaacctaacttccagatcttaaatgtcagctaacctcctgccaggaaaatacaacatccattaattagcaccttatttattatctgccaaaattaattgtcttagggataatgtactcctaagtaaaatgttaagtacataaacatgtccaagttttaccacaacatcattactattaatctacatttctgccaaccttcaagaccaaactgctcaaaacacatactgctctgaaacctttccaatgtaacccaaatggcactcatataccaaccacctcagcaaacttacagttggaaaaagacagcaataattcaaaagtattttcttaaartaattatttttttgttaaagggaaataaaaaatgcataagctgctggttttagtcaaattggggtatctaaaattatggtttatttacatataataattatattaatagattagttttaacaaataatatggcagggaaggatagttttctattttgcaaatatattcacacaaattatc

SEQ ID NO: 567968 - DNA, 536 bp, Homo sapiens
gcagcaggacctagaccaaacccctggtgtttcagtaacaaatacaaaacaaaaacagcagaagccctggcataccacattcaacctgctggaagacaaaaccaaacaaaacattcaaggcagccagaataaaaagagacattaactatagaaaaacaaaagatgagaattacagcagattactcataaaaattatgcaatccaaaagacaatggaatgaccatggaatgaaaactgtcaacccacaagcctatacctcgtggaaatatcatcacccatagacatcacacagtgataaaggggccaattctccaagragacacaacaatcctaaatgtgtgtgcacttaacagagcttcaaaatgagaggtgacagcgtgctggcagtcctcacagccctcgctcgctctcggcgcctcctctgcctgggctcccactttggtggcacttgaggagcccttcagcctgccacggcactgtgggagcccctttctgggctggccaaggccggagccggctccctcagcttgcaggga

SEQ ID NO: 567969 - DNA, 628 bp, Homo sapiens
aaagcaaaggacctagaatagtcaaaacaatgttgaaaagaacaaagctgaatgactcatgcaatttgttttaagatttactataaaggtactgtttgaagatttatcataaagcaacagccaatgtggtatttgtgcaagagtagacatacacaatcaatgaaatagtatggagagtcctgaaatagtcccacacgtacatggtcaattgcttttcaacagtgccaagataatgcaatggagaaaggatttttttcaacaaatagtactagaaaaattagacattcatgtgcaaaaaaaaaaagaacttgactcttaatttgcaccatatatacgtccacattgtagctgtcaaggagtgagaaaggtcatatatgtatatatactcagatttccctgcaaataaaaaggcactttccacttaacaatgctggaaagcccaagccataaatgttcatcacatcgtcttacctgggtttccttcacaacccagctgcaagstcactgcatccagaaataacctagggagattttccttctcttaccttcctcctctgcactaatatggcacgaacacgcctgttcttaaacccacctgttcttaaacccacattttcttctgaagctt

SEQ ID NO: 567970 - DNA, 570 bp, Homo sapiens
ccacccccaaccccaacttcccacctgcaggaacccataccccatgtgcaccacaacagaaaggcgcccacccaaatacatcacacaggttcctgaaccagggagggcttttccatatasaacaaaacacaacgtgggctctgttaataaagctgcctcctgtttttctgtgactactttacaccacactggcatttcactgccatttatcaccatctcacgataaataacaggaccacgcttctctatgactaccggtgatctcaagccttgagccacttctacctattttactcagtaactagccccaggggctagaatggaaagaaagggctcaaggaaagccccaggaagtctcatccaacctgaaagtgatctgtgatccaacctcttctggatcacagatcactttcagaaaatgcacacatgcccagtattttgcatgaaattttagaggggtcacagcttcccactgctggctcccacaatggtctgtgaacactaagtaaagaacccccaccaagaaccaatccctccattttacaaaagcagagcactggggcccaggga

SEQ ID NO: 567971 - DNA, 559 bp, Homo sapiens
agaaaaacggaggccctggaaaaggtggaaatatgcctaagcagagtgagttaaccatgaagcagaagaacctgaggcctcaccacctccaacagtgtctgctggccccgagggaaatcaccagagaccaagcaggtgaccaggcacaaaatcaagagccacagtgtggctgactcttcaaaatcctactaasgtggcctgagggggaaaatttaactaacagggttcctactcccttctacagaccagggatctagccccacactcaatcccatccccagtgggagtccaccttcagtcacctcgctaccactgctttctacacccctatgcctgcaagctcaatccccgagtcccacaaaagtggggaggaccaggcctgcctgggtatcgctacctgctcctgcttctaggaaaggtggctgcccctacaggccacatccaggtagcggatggaacatgcaagatatccaaggactgacacggcagggcagagacaggcagcaggaacctaatccccttcccataggcatcttaaaggccaccaggactcagtggc

SEQ ID NO: 567972 - DNA, 491 bp, Homo sapiens
gaattctcttgtgcctaggagcaaacatgccaaacgcccatcactggacagtgggaaggtggaggctgtttgagtgtggcaggggtgtgttggaagaatgtggagctgactgtgaggggccctggactttgtgaatgcmctgatgtgtcctaggagtcagagtccatttgtgggatagatgtaaactggtctttgtatactgacgcagaaatgcccatcaaatctgtgatcagagaccattctatgtgctcctgagtcataacacaagtcagaaatccaggaacattttggaagtgcataaaggtacagaagttgttccaggctctgggaaatctcttgtttacagcaagcagataagagctgtggttttcctcctaattgttctgtgaactgtcatccagtaatgtgtaactttgtcaaattaaagaattggaagcaggcctgtggcaggttctttcctgtttgtcccaagaactttagttgtccataag

SEQ ID NO: 567973 - DNA, 326 bp, Homo sapiens
gtttaaaattttagtctttgaaagtggtttacgcacgtttctggaatcaagattaatgcagacttggattggatattgaatatttttkatttgtctacttttctctccataggagtttatagcttcattgcactgtgtgtggcatttgggtcctgtttggcagcaatgactgcctttctgtttagtgtctgtgtgctatgaagagtgcacacaggggtccagatgcatcctgttttgagaatgttaatggatacaccagctgctgctttggatttcacccattggtggtagttgacccgctgtttgtttggaatgcagacaattta

SEQ ID NO: 567974 - DNA, 326 bp, Homo sapiens
gtttaaaattttagtctttgaaagtggtttacgcacgtttctggaatcaagattaatgcagacttggattggatattgaatattttttatttgtctacttttctctccataggagtttatagcttcattgcactgtgtgtggcatttgggtcctgtttggcagcaatgactgcctttctgtttagtgtctgtgtgctatgaagagtgcacacaggggtccagatgcatcctgttttgagaatgtyaatggatacaccagctgctgctttggatttcacccattggtggtagttgacccgctgtttgtttggaatgcagacaattta

SEQ ID NO: 567975 - DNA, 421 bp, Homo sapiens
agtatcttcccacaagataattatagaatagtaacttcaaaatggagatgtcaacttagccaagtgatcaaagttaacattactaataataagataaatgaacttcatgtaacttcttatatgatgcactgaataggacaaaacatcaattctatggtattcttagacaaaatgtataactttagtcctaatcgtgagaaaacatcagactaactgaaattgaggagggacattctacaaaataactgccagtattcwtcaaaagcattttagaaagactgaggaattctccagacacatggagacatgtcaactaagtgcaatggagaacatgcattgtatcatgaaccagagatggacaacagtaggatatatacaataacaccccaacatttgaacattaaacaaaatacttcagaaa

SEQ ID NO: 567976 - DNA, 421 bp, Homo sapiens
agtatcttcccacaagataattatagaatagtaacttcaaaatggagatgtcaacttagccaagtgatcaaagttaacattactaataataagataaatgaacttcatgtaacttcttatatgatgcactgaataggacaaaacatcaattctatggtattcttagacaaaatgtataactttagtcctaatcgtgagaaaacatcagactaactgaaattgaggagggacattctacaaaataactgccagtattcttcaaaagcattttagaaagactgaggaattctccagacacatggagacatgtyaactaagtgcaatggagaacatgcattgtatcatgaaccagagatggacaacagtaggatatatacaataacaccccaacatttgaacattaaacaaaatacttcagaaa

SEQ ID NO: 567977 - DNA, 421 bp, Homo sapiens
agtatcttcccacaagataattatagaatagtaacttcaaaatggagatgtcaacttagccaagtgatcaaagttaacattactaataataagataaatgaacttcatgtaacttcttatatgatgcactgaataggacaaaacatcaattctatggtattcttagacaaaatgtataactttagtcctaatcgtgagaaaacatcagactaactgaaattgaggagggacattctacaaaataactgccagtattcttcaaaagcattttagaaagactgaggaattctccagacacatggagacatgtcawctaagtgcaatggagaacatgcattgtatcatgaaccagagatggacaacagtaggatatatacaataacaccccaacatttgaacattaaacaaaatacttcagaaa

SEQ ID NO: 567978 - DNA, 472 bp, Homo sapiens
tttttgagggatgttgttgctgtgtatgtcccacctattttgcttccttaatgaacaatgcaagtttgagacagaaatatttgagaacatttttatcagttgcracattttgatagtgaacattttatatcttctgtcaacttaaaatgtttgcatcttctgtcagcttaaaatgtttaatttgttatagccaaataatttggctataattgataatttaatttatcaaattaaattgctttttttccctttagactttcttcagtcacatctgaataaatcacttagaagtaagctagatgtaatataatgaaatgtttaaaagggctgtgtatctacatattacacttacagtgattttctgttgtacccattatattctacctgcagctagttgaggtaaagagagggcatttaactgtcaagggaacctgtgaggagactgtagaaatctagaaagtctcttgggtct

SEQ ID NO: 567979 - DNA, 472 bp, Homo sapiens
tttttgagggatgttgttgctgtgtatgtcccacctattttgcttccttaatgaacaatgcaagtttgagacagaaatatttgagaacatttttatcagttgcaacattttgatagtgaacattttatatcttctgtcaacttaaaatgtttgcatcttctgtcagcttaaaatgtttaatttgttatagccaaataatttggctataattgataatttaatttatcaaattaaattgctttttttccctttagactttcttcagtcacatctgaataaatcacttagaagtaagctagatgtaatataatgaaatgyttaaaagggctgtgtatctacatattacacttacagtgattttctgttgtacccattatattctacctgcagctagttgaggtaaagagagggcatttaactgtcaagggaacctgtgaggagactgtagaaatctagaaagtctcttgggtct

SEQ ID NO: 567980 - DNA, 472 bp, Homo sapiens
tttttgagggatgttgttgctgtgtatgtcccacctattttgcttccttaatgaacaatgcaagtttgagacagaaatatttgagaacatttttatcagttgcaacattttgatagtgaacattttatatcttctgtcaacttaaaatgtttgcatcttctgtcagcttaaaatgtttaatttgttatagccaaataatttggctataattgataatttaatttatcaaattaaattgctttttttccctttagactttcttcagtcacatctgaataaatcacttagaagtaagctagatgtaatataatgaaatgtttaaaagggctgtgtatctwcatattacacttacagtgattttctgttgtacccattatattctacctgcagctagttgaggtaaagagagggcatttaactgtcaagggaacctgtgaggagactgtagaaatctagaaagtctcttgggtct

SEQ ID NO: 567981 - DNA, 299 bp, Homo sapiens
tatcttggaagcaaacatagaatgcagagatagatgtggcctggatgctgctaactctagccaaccactaaatcttaaggtgggagagatgcaggctttggctgggtgctaagctgytgtagctggttgaatgtagaggtcactatcttttctgaatacttgtaagtaaattaaatcattctctactcctgtatgcctgccaaccaaatgggaaatcgctatagaaaagatggtttaaattttagtctttgaagtggtttacgcacgtttctggaatcaagatttaatgcagacttgga

SEQ ID NO: 567982 - DNA, 299 bp, Homo sapiens
tatcttggaagcaaacatagaatgcagagatagatgtggcctggatgctgctaactctagccaaccactaaatcttaaggtgggagagatgcaggctttggctgggtgctaagctgttgtagctggttgaatgtagaggtcactatcttttctgaatacttgtaagtaaattaaatcattctctactcctgtatgcctgccaaccaaatgggaaatcgctatagaaaagatggtttaaattttagtctttgaagtggtttaygcacgtttctggaatcaagatttaatgcagacttgga

SEQ ID NO: 567983 - DNA, 510 bp, Homo sapiens
gacattcctgccagctctcgagtccacggtcagaacttctgttctcacattctgtagattggtaggactgggtggtagataaggttgatttgtttttgtagaacgtacaattttgtgatttttagttctaatgagtagatctttttcgtgaataatagtcacggtcaaacacctctaaccaaatgtgcrtgtggagtttctacactgattttcggacaatctggatcccaactgggtatcccacaattccatcctgacactccctggagttagtgcagaccccgcaggatggaggctcagtcccaggagtctaccctcactccacatgccaattgcaagtcttgggttgttacatgtagttttgaccaacaagttagaaaatagggtttcatgaccccattggtgggtggaatcatttgctcggacagcttgcagaactcagaaaaacagattgttttcttattttttctgagatacagggtctcagtctgttgccaggctggaatgcag

SEQ ID NO: 567984 - DNA, 562 bp, Homo sapiens
cttccttggacttaggaaaccccttagcttcttggaaaattcaaagaaggaagacacaggagagagccccaggggaaaatacaagattttctgctaaattggacattacaagactcaataactaattagaaaagttagaccaggcatggtggctagcactttcagaggccgagccagggggattacttgagctcaggagttcaagaccagccatgacaacagagtgagaccttgtctctaaaaaaaaaaaaaaaaaaaaaaaaaaaaaagaaaggaaaggaaaagaaatcaaagatgtggctctttttatccaatgcatggggattatacttagaataaaatgaacaacattgagatccctagggataaaggtctcaaaaatccagaaaaaatcttgcactctacttctaactaatctagacttctgcttgatttctggctaaaagggagactaactcatggctatttcaaactatctgaaccaaactatgaactstcacctaatgtgtaagatggagtagttgcaattattttaaacttcaatttagtatcaactggcctt

SEQ ID NO: 567985 - DNA, 611 bp, Homo sapiens
tgtaccatctcagcctatccacagcatgtgtacttgctttggttttcaataaaaattccaccattttctctttcttgcaaattatggtgaataaaagtgggatattattgtcccatgaaacagcacaaaaaaattaataattcacaaaattacatatttctcaactgaacagaaaatcttctctgggatgatttgaacttcaacatacaatatagaaaggaagtaaatgaaaagcagccgcttccttctcactcctctgtgctttctgatgtgctgcgctttgccttgcaacaatcctcctccgtctccccggattaactgtggtcattgccaaaactcacwttaaaggtttaccagtcccaagaatccttgctttgatcacagtacttagcatggtacattgtaataatttcactgtttcccactgaaaccaagagcttcttgaggcaagggctgtatcttttgtctctatagccccaaaacccgaagacatagtagcaaacattttaagtttttttacataaattaatgatctaaattattctcactaaagcagtgtttcttaaactatattccaaagaatatttgctttaccagaagtattatacccc

SEQ ID NO: 567986 - DNA, 569 bp, Homo sapiens
aaaggtgaagcccaatgtaaggatataaaaaaaaaagatacaagaagtaaagggagaaatattcaatgaactagatagcataaataaaaaacaatcaaaactttaggaaataatggacatacttatagaaatataaaatgctctggaaagtcttagcaatagaattgaacaagtagaagaaggaaattcagagcctgaagacaaggtcttctaattaaccgaatccaataaagasaaagaaaaaagaataagaaaatatgaagaaagccttcaagaaatctggaattatgttaaatgaccaaacctaagaataaccggcattcctgaggaagaagagaaatctaaacgtttgttaaacatatttgggggaataattgaggaaaacttccccagctttgctagagacctagatccaaatacaagaagcacaaagaacatctgggaaattcatcgcaaaaagatcatcatctaggcacattgtcgtcaggttatctaaagttaagatgaaagaaagagctgtgaaacaaaagcaccaggtaacctataaaggaaaacttaccagattaaca

SEQ ID NO: 567987 - DNA, 594 bp, Homo sapiens
gacctgtcaatataaatatgctcagtagtggggggaggggtggggggtgaaaaaggaaatatgtttaatattaagactttggccttttagtgtaaactgatattcaaaaatttcttcatagaacatttgcttctttgcttgatcatttttctaattctgtacatctaaaatgcccagaatttgagttgctgttatagtctactaacatagaactttggagtaataagatgggaatttgtctctcttttgccaagacaagtattcgtaatctaacacagtattgttgccacgagtacgagtatgtgatagactgttgakaataaagaaagcaggcacagttggtcagtcctaagataaaggagatgttttttcttatatgtttgtgcattaaagaaaaaaaaaatcttgaatctgaccaatgatgttttttttccttgtaataaaatttaacaaatgtttggcaagcttctggaatctaaatttgaaattatacatttgtcattttctttaaatatttcttcaccttagctttgattatgagaaatcactgtcctctgctgttcttttttttttttttcttttgaggcggagtct

SEQ ID NO: 567988 - DNA, 594 bp, Homo sapiens
gacctgtcaatataaatatgctcagtagtggggggaggggtggggggtgaaaaaggaaatatgtttaatattaagactttggccttttagtgtaaactgatattcaaaaatttcttcatagaacatttgcttctttgcttgatcatttttctaattctgtacatctaaaatgcccagaatttgagttgctgttatagtctactaacatagaactttggagtaataagatgggaatttgtctctcttttgccaagacaagtattcgtaatctaacacagtattgttgccacgagtacgagtatgtgatagactgttgataataaagaaagcaggcacagttggtcagtcctaagataaaggagatgttttttcttatatgtttgtgcattaaagaaaaaaaaaatcttgaatctgaccaatgatgttttttttccttgtaakaaaatttaacaaatgtttggcaagcttctggaatctaaatttgaaattatacatttgtcattttctttaaatatttcttcaccttagctttgattatgagaaatcactgtcctctgctgttcttttttttttttttcttttgaggcggagtct

SEQ ID NO: 567989 - DNA, 543 bp, Homo sapiens
ctatggggttgactattttaattacctgacacaagtggaatcatgcattatttgtctttctgtgactggtttatttcatgtagcataaagtcatcaaggttcatccatgtttttgcatatggcaaggtttcctttttaagtctgaataatattccattttctacatataccacatttactttatccctttttctgttagtggacatttaacttgttctcacagcttggctattgcaaataatgctgcaatgaatatctcataagtctcrtatatgtccatacaagatcatgaaaatggacatgtctctgggtattttgaattggtgggacaattttgcttaagggtaggcatagtgggtggctctacatttgagagttctaattcccattcctatatatatttcttttctttttatttatttatttttttgagatggggttctctgtcactcaggctggagtgcagtggcacaaacatggcttactgcagcctcaacctcctgggctcaagtgatcctcccatctcagcctcccaagaagctg

SEQ ID NO: 567990 - DNA, 548 bp, Homo sapiens
ctgtggtcccagcttcttgggaggctgagatgggaggatcacttgagcccaggaggctgaggctgcagtaagccatgtttgtgccactgcactccagcctgagtgacagagaaccccatctcaaaaaataaataaataaaaagaaaagaaatatatataggaatgggaattagaactctcaaatgtagagccacccactaagcctacccttaagcaaaattgtcccaccaattcaaaatacccagagacatgtccattttcatgatcttgtatggacatatacragacttatgagatattcattgcagcattatttgcaatagccaagctgtgagaacaagttaaatgtccactaacagaaaaagggataaagtaaatgtggtatatgtagaaaatggaatattattcagatttaaaaaggaaaccttgccatatgcaaaaacatggatgaaccttgatgactttatgctacatgaaataaaccagtcacagaaagacaaataatgcatgattccacttgtgtcaggtaattaaaatagtcaacccca

SEQ ID NO: 567991 - DNA, 548 bp, Homo sapiens
ctgtggtcccagcttcttgggaggctgagatgggaggatcacttgagcccaggaggctgaggctgcagtaagccatgtttgtgccactgcactccagcctgagtgacagagaaccccatctcaaaaaataaataaataaaaagaaaagaaatatatataggaatgggaattagaactctcaaatgtagagccacccactaagcctacccttaagcaaaattgtcccaccaattcaaaatacccagagacatgtccattttcatgatcttgtatggacatatacaagacttatgagatattcattgcagcattatttgcaatagccaagctgtgagaacaagttaaatgtccactaacagaaaaagggataaagtaaatgtggtatatgtagaaaatggaatattattcagayttaaaaaggaaaccttgccatatgcaaaaacatggatgaaccttgatgactttatgctacatgaaataaaccagtcacagaaagacaaataatgcatgattccacttgtgtcaggtaattaaaatagtcaacccca

SEQ ID NO: 567992 - DNA, 543 bp, Homo sapiens
ctatggggttgactattttaattacctgacacaagtggaatcatgcattatttgtctttctgtgactggttkatttcatgtagcataaagtcatcaaggttcatccatgtttttgcatatggcaaggtttcctttttaagtctgaataatattccattttctacatataccacatttactttatccctttttctgttagtggacatttaacttgttctcacagcttggctattgcaaataatgctgcaatgaatatctcataagtctcgtatatgtccatacaagatcatgaaaatggacatgtctctgggtattttgaattggtgggacaattttgcttaagggtaggcatagtgggtggctctacatttgagagttctaattcccattcctatatatatttcttttctttttatttatttatttttttgagatggggttctctgtcactcaggctggagtgcagtggcacaaacatggcttactgcagcctcaacctcctgggctcaagtgatcctcccatctcagcctcccaagaagctg

SEQ ID NO: 567993 - DNA, 558 bp, Homo sapiens
ttattaacaagttttatagttttaccagggatatttagccctgcctggtaatcagaaaaatgaaaattaacataaaataacatatattttgtaaagtcatgctgatattgaaaaagtaattmctaccattgaaaatgtgaggaaaaaggcactctcatacactgtttgtatatgaaattggtaaattatttctgaagggtaacttagtgctgtttatcaaaatttcaaataacctgacatccctttaactcaacaactccacttctgggactagatttcacaggaaaacataacttgtgtaaacatacacacacttattaagggcattaattatatattacacataatgaacaatagcttaataaatatataaaatatatgtaataagaaggtgaattggaagtattaagaaagaattagaaaaagtgtggggtaacagatgttagactctttagcctagttttagatgacaatcatctgcagatatagtttgtatgagatacatcttactctgtaaatcatttgaagagacacctgcaatatttcatagagatgaaa

SEQ ID NO: 567994 - DNA, 558 bp, Homo sapiens
ttattaacaagttttatagttttaccagggatatttagccctgcctggtaatcagaaaaatgaaaattaacataaaataacatatattttgtaaagtcatgctgatattgaaaaagtaattcctaccattgaaaatgtgaggaaaaaggcactctcatacactgtttgtatatgaaattggtaaattatttctgaagggtaacttagtgctgtttatcaaaatttcaaataacctgacatccctttaactcaacaactccacttctgggactagatttcacaggaaaacataacttgtgtaaacatacacacacttattaagggcattaattatatattacacataatgaacaatagcttaataaatayataaaatatatgtaataagaaggtgaattggaagtattaagaaagaattagaaaaagtgtggggtaacagatgttagactctttagcctagttttagatgacaatcatctgcagatatagtttgtatgagatacatcttactctgtaaatcatttgaagagacacctgcaatatttcatagagatgaaa

SEQ ID NO: 567995 - DNA, 173 bp, Homo sapiens
atttaataataaggcaatttataaaatcagtaacaaaaatattttctcaggtagttgtgagacaacttcaacaagaagcrgctgacagcctaaaaaaattaactatgttagagtctccactggaaggtatatcacattatcacattaatttggatgagacacaggccccaaag

SEQ ID NO: 567996 - DNA, 212 bp, Homo sapiens
cctttaggttagtttccactttttagctcttatgaaaaatgctgctgcgaacattcacttacaggttattatgtggacacgggtttttatttctctgtcattggactttatcctcagagttaattgggcagatttcagcacttgtcttgctcatgctatyctttctgccttctcagtttctgttcatctagcctcattcactcagacgtggc

SEQ ID NO: 567997 - DNA, 607 bp, Homo sapiens
ctgttgtttcttcctgttttgcccctcgcaggtttagaagcctcactggggtagaaaactaagttgtggggctggaggcgggacaccaaccagcaccatggttggtggcaggaagcctgcagttagagactgggcatgtgttttgctcattgctgttggtgctgctgaggaagtctttgtttcagtggattacagactgttttaattggattaaagggggaacctccttggcattgctcccctgttctttatcttcctggagataatccttttaggtgtctggagttggcgctcatgtcatcttcacacttagtctgccttctcccaggccctctctgtgtytctcagccatgccccatgatgagttctgtgtcccatacacctgcctggctattcccttctaattcttccccatagtatcactgtccctactgaatgtagagcccagaatggatctcagcgctcagctgccatctggactgtttggaggggatctctccctccttatctagggtatgatatcatgaattcacacagtggtggccacatcagtctgttggcttatattaagcttaaaggtagttgcatccagatcttctcccacaag

SEQ ID NO: 567998 - DNA, 607 bp, Homo sapiens
ctgttgtttcttcctgttttgcccctcgcaggtttagaagcctcactggggtagaaaactaagttgtggggctggaggcgggacaccaaccagcaccatggttggtggcaggaagcctgcagttagagactgggcatgtgttttgctcattgctgttggtgctgctgaggaagtctttgtttcagtggattacagactgttttaattggattaaagggggaacctccttggcattgctcccctgttctttatcttcctggagataatccttttaggtgtctggagttggcgctcatgtcatcttcacacttagtctgccttctcccaggccctctctgtgttyctcagccatgccccatgatgagttctgtgtcccatacacctgcctggctattcccttctaattcttccccatagtatcactgtccctactgaatgtagagcccagaatggatctcagcgctcagctgccatctggactgtttggaggggatctctccctccttatctagggtatgatatcatgaattcacacagtggtggccacatcagtctgttggcttatattaagcttaaaggtagttgcatccagatcttctcccacaag

SEQ ID NO: 567999 - DNA, 545 bp, Homo sapiens
gtgctaaggaaaggtgtttgctgtcatgcacataggtggtgtaggagggtgttgcctggtatcagtaatgaggaaagctgttggctgtaggtctgggtggcaagggaagggggtggcggtgacaggtgacaaatcaaggtgttagtgttggtgggtggtaaggaaagctgttggctttctgtacaggtggtgagggcaggtgctgcctgtcccagatggaggggaagtagctggcagtcacatacctgaggtgagggaaggtatggctttgtcatagatgtgagggtcggtgtcaagtgtcacagatggtgagggagttgttgctgtgtcatggatcgtgagggaaggtggttacaggtggagagggaaggggctggcccttctagctggctaacacggacattggcctatttcccactgaggctgaaggtggctccagctcccaagttccctcgtgtgtctgtcctgatcccctttcctgatgccctcggggcctggccttcttgtcctcccatgctgcagtrtagtccaagaaggcgggtgga

SEQ ID NO: 568000 - DNA, 577 bp, Homo sapiens
ttattcatctgtttattcatgcactttgtggatccattcacacagacccgtaagtaatccttacagtgcagtgtgatgagtattctaatggagggatgtactaggcttgctgcagtggaggaagcacagagcaggaggcacatgaactgcctggggagtcccaggaggcccacaacgaaggtgatgttggaccaggcctggatggatgtgactgagttggacagcccgaggctgaaggaagacactgcaggctgggcgtgatattaacgctcttcttgggccacatcccggtctctgctggagtgaggactggcattgccctgcctcccttagaatccagtactgcttcacaggtccaaggcagagaggagagcaccctagggccgtgggtcagctggacctgggctctgtatctggctctgctacttagtagtggagcaactccaggtaaggtcagagcctcagtttcctcatgtatggaacggggacacccrtaccaacctctgcaagtgatagtgaggatgacatctaaccatagcccaagatgcaggtgccactgctggtcttgctgcagatg

SEQ ID NO: 568001 - DNA, 610 bp, Homo sapiens
ggaacttctgatgtcaaccttcccactccacctggcctaactagtcggcttccaactcccgtcacttcctgctacaaagtggccccatgtgtcttctatgctgtggtctcactgctaccacccccagtaagccctcatcaccatcccagaagtcctgacacagcctcctcattactcccctgcctgtggtctccttttccccascatccctaccctctacacacacacacacacgcacacacacacacatcacatgcacacatttccactctattccacaaactgcactaaaaacacaactttatagatccctgaccatgaacctgcaatagctccctattacctatgccctgttacctactattgacacttgaggccagaaagttctttactgtcaggggctgtcttaagcgggtgctgtgcgatgtttatcagcatccctggcctctacccactgaggccactagtactcctccctatcccctgttatgacagagaaacacaaatgtccccagacgctgccaaatgtccccggggccagaggtgggaggaggctcttgtgcccactaagaacccctgccctgcaaggacaaaggtcaactcctaacat

SEQ ID NO: 568002 - DNA, 610 bp, Homo sapiens
ggaacttctgatgtcaaccttcccactccacctggcctaactagtcggcttccaactcccgtcacttcctgctacaaagtggccccatgtgtcttctatgctgtggtctcactgctaccacccccagtaagccctcatcaccatcccagaagtcctgacacagcctcctcattactcccctgcctgtggtctccttttccccagcatccctaccctctacacacacacacacaygcacacacacacacatcacatgcacacatttccactctattccacaaactgcactaaaaacacaactttatagatccctgaccatgaacctgcaatagctccctattacctatgccctgttacctactattgacacttgaggccagaaagttctttactgtcaggggctgtcttaagcgggtgctgtgcgatgtttatcagcatccctggcctctacccactgaggccactagtactcctccctatcccctgttatgacagagaaacacaaatgtccccagacgctgccaaatgtccccggggccagaggtgggaggaggctcttgtgcccactaagaacccctgccctgcaaggacaaaggtcaactcctaacat

SEQ ID NO: 568003 - DNA, 288 bp, Homo sapiens
tcttgaggatggaggaatagctttcaggcagtgaggtggytggtccaggtcggggagccatgtgggatggtggggtgtgactgggacacattcaggaaggtgagtccctgggtgtggtggggagtgcagattgcagtcacatccatcccccaccctcccctgttcttccctctagagtgcccacccctccccttcccagactccctatcctgctgattaccactgaccactgagaagcatggtcaggagactcaggcacaggaggaggaggaagccaggtatttcacc

SEQ ID NO: 568004 - DNA, 576 bp, Homo sapiens
aaacaggtgtttcacaaaaaagaaaataaaaatagcccataaagatgtgaaaagatacccaacctcatctatcatcaagaaaatgtacattaaaatcaaaataaaattacattttacactagaaacytaaaagtaacaagaagacaagtgttggtgaggttaggggacttggggaaatctcatatattgcacatggtagtgtgaataggtaggaatgctttggaaaacagtttggtctaacctaataaagtgaaatgtgcactgacccaagagtccagcaattctgctcctcagaatagaccctgaaaagctcttgcacacaaacaccaaaagacaaatatgagaatgttcctatcagtatttttggtaataacaaaatcctggaaacaacacaaatgcccacagacaataaagtagataaataaatcagggcacacagtgcagcaataaaaatgattaatacatccacctgcatcaaacggatcaatctcaaaaacctaatgctgagtgaaaattaaaaaacaatctcagaagcatgcagaagtgttattccacatatatgagtcgcaaaccaac

SEQ ID NO: 568005 - DNA, 576 bp, Homo sapiens
aaacaggtgtttcacaaaaaagaaaataaaaatagcccataaagatgtgaaaagatacccaacctcatctatcatcaagaaaatgtacattaaaatcaaaataaaattacattttacactagaaacctaaaagtaacaagaagacaagtgttggtgaggttaggggacttggggaaatctcatatattgcacatggtagtgtgaataggtaggaatgctttggaaaacagtttggtctaacctaataaagtgaaatgtgcactgacccaagagtccagcaattctgctcctcagaatagaccctgaaaagctcttgcacacaaacaccaaaagacaaatatgagaatgttcctatcagtatttttggtaataacaaaatcctggaaacaacacaaatgcccacagacaataaagtagataaataaatcagggcacacagtgcagcaataaaaatgattaatacatccacctgcatcaaacggatcaatctcaaaaacytaatgctgagtgaaaattaaaaaacaatctcagaagcatgcagaagtgttattccacatatatgagtcgcaaaccaac

SEQ ID NO: 568006 - DNA, 502 bp, Homo sapiens
tccacccattccatcctggcaccagccgtggggctgccaaccctcatcagtctcccacaccctctaacatgttatggaggtggctgtggctataaagaggtagcacagggatccttgtgaaggaactgctctgtatcctgactggtggtcataggaatctacacatgtgatttttaaaatgcatagcagtaaatccacacctgcaagaacacgtgcactactgaaatatgaacaaggcctacaggctgtatcaaatcctggttgcaatattgtactacagctatgcaggatgttactgtgggggaacctgggtgaagggcacgctggatctccctaggttgctccttataattgcatgtaaatctaaattatcrcataattttcaaaaaaattgtttaaacactaaacatggaaaccattctatctcaggattaagactagtctgtttttacagagcagtcataagaaaacctgaagccatttctccaaagcccatttttgt

SEQ ID NO: 568007 - DNA, 545 bp, Homo sapiens
tggaccctcaaactcacctcttcaatcctgatgctcactcttgcttcaaaactcagactcagcatccccagactggctcataacccttgtggcattatcccccttcactgcacttccctgtcatgagccacatgttgcctgtgttactggctggctctccaacttgaccccaggctccaggaggacmagggtcatgcctgctgtgttcaccatcctttcccagacacaggctaagcccagttcacaatagcagtaaagactcgtgcaagaacaccatgcaagaatttccatggccccagtcaataattcctctctgggtacctgtccaaaccgtaggaacagcactcaatccaaaaccattcagaggacactatccatactcttggaatattgctaatgatctaaaagatgcaaatagatgagtggttatgaaagtgccccattttctgaaagtatatatagcctttaaactagtcaagaagatactacaataacatgggaaagtgcctgtcataaaaaaggtaggtgaaagtgatacaaaattg

SEQ ID NO: 568008 - DNA, 607 bp, Homo sapiens
tagaggtggcgcccttgtggcttctccccttggtcaggttcccctgagtctgtgctggggcgtgcgtgctttttcttgcacaagcctgcagcctctgtcgtgggcctgacctggagggtgtctgtggaggggcttccctgaccctgtgtgtgggccccagtgcctcctctgctcaggtttccagggctggcagccccagactccaggtgatgatgacagtgaaggagaagaataggccctggcttgagaatcagactggcctgggtttgagtccttctcaaagggccctggctgggtaacttgcccttgatttcctctgtcaggtgggcatgatamcccctcgatcagggccgcatgttgaattgctgccacctgcccccgccccagaccttgctgtgctgtgtccgtgtgtcatgggctcagggcatggtgctagcattgatggaatggtcactttgcatcagccttggagatgagctgatgtggtactcattcccacggagctctccgtttggtgggggaaccaacacagaaacagagacttagcgctgtgtgatcttgcaccagctgagatgaacagagagagtggtgttggggacagcagccc

SEQ ID NO: 568009 - DNA, 607 bp, Homo sapiens
tagaggtggcgcccttgtggcttctccccttggtcaggttcccctgagtctgtgctggggcgtgcgtgctttttcttgcacaagcctgcagcctctgtcgtgggcctgacctggagggtgtctgtggaggggcttccctgaccctgtgtgtgggccccagtgcctcctctgctcaggtttccagggctggcagccccagactccaggtgatgatgacagtgaaggagaagaataggccctggcttgagaatcagactggcctgggtttgagtccttctcaaagggccctggctgggtaacttgcccttgatttcctctgtcaggtgggcatgataccccctcgatcagggccgcatgttgaattgctgccacctgcccccgccccagaccttgctgtgctgtgtccgtgtgtcatgggctcagggcatggtgctagcattgatggaatggtcacttygcatcagccttggagatgagctgatgtggtactcattcccacggagctctccgtttggtgggggaaccaacacagaaacagagacttagcgctgtgtgatcttgcaccagctgagatgaacagagagagtggtgttggggacagcagccc

SEQ ID NO: 568010 - DNA, 607 bp, Homo sapiens
tagaggtggcgcccttgtggcttctccccttggtcaggttcccctgagtctgtgctggggcgtgcgtgctttttcttgcacaagcctgcagcctctgtcgtgggcctgacctggagggtgtctgtggaggggcttccctgaccctgtgtgtgggccccagtgcctcctctgctcaggtttccagggctggcagccccagactccaggtgatgatgacagtgaaggagaagaataggccctggcttgagaatcagactggcctgggtttgagtccttctcaaagggccctggctgggtaacttgcccttgatttcctctgtcaggtgggcatgataccccctcgatcagggccgcatgttgaattgctgccacctgcccccgccccagaccttgctgtgctgtgtccgtgtgtcatgggctcagggcatggtgctagcattgatggaatggtcactttgcatcagccttggagatgagctgatgtggtactcattcccacggagctctcygtttggtgggggaaccaacacagaaacagagacttagcgctgtgtgatcttgcaccagctgagatgaacagagagagtggtgttggggacagcagccc

SEQ ID NO: 568011 - DNA, 607 bp, Homo sapiens
tagaggtggcgcccttgtggcttctccccttggtcaggttcccctgagtctgtgctggggcgtgcgtgctttttcttgcacaagcctgcagcctctgtcgtgggcctgacctggagggtgtctgtggaggggcttccctgaccctgtgtgtgggccccagtgcctcctctgctcaggtttccagggctggcagccccagactccaggtgatgatgacagtgaaggagaagaataggccctggcttgagaatcagactggcctgggtttgagtccttctcaaagggccctggctgggtaacttgcccttgatttcctctgtcaggtgggcatgataccccctcgatcagggccgcatgttgaattgctgccacctgcccccgccccagaccttgctgtgctgtgtccgtgtgtcatgggctcagggcatggtgctagcattgatggaatggtcactttgcatcagccttggagatgagctgatgtggtactcattcccacggagctctccgtttggtgggggaaccaacacagaaacagagacttagcgctgtgtgatcttgyaccagctgagatgaacagagagagtggtgttggggacagcagccc

SEQ ID NO: 568012 - DNA, 612 bp, Homo sapiens
tctatccagtcattgagccaacatgtatttactgacacctgtggtgttccaggcacggtgtcaggcagcatggacccaaaaagagatgaggctcatttctaattggataagcaatgtgcagaggagacatcagtcattcttatggggccatatttagtgatccaaggatgccacagagcttggtgagctgtccaagggctctgaacaaatcagtacastcatcacagtgattgttactgaaattgagtggggaggggcatgtaggagccagcactggctgggggaggccctgtgtagggggttggctttggagaggtggctgctgtgagaacaccaggcctagaataagctttcaggctgtgccattccctgtgggtggcagggttgtcaggaagacaagagggggttcttgtgcaaggtacgtgggggtgggacagggttctgggcggtggagggtggatggagggacctggaaaatggaggcaggggctttgaggaggcccgggttaatggtagggaatgccagcaaggggagatggctcagtggtccctcatgtggatgggcagattctcaggctcctcctcttccctgtgagctggcccaggtgcggc

SEQ ID NO: 568013 - DNA, 555 bp, Homo sapiens
aatttgcagttcctcttagttttattaggctccatgttttaggawaattattcatttatctataattgagtccacttatttttgcaggcatgaggagatgtattaatcaggactgtttgttgaaagtgataacaaataccagttaaacttgtttaagtaaaaaagggaattcgttttagcttatatgacaaagtggtccaaggatgggctagcttcaggcatggctggatctagcggttacgccttctgctcttgctttctctttcttgctccctcgcggtgtcttgtttctcttcttctctcattggcttgactcttaggaatgtccttcccacccaatgacaaagaggaaccaccacaactccagcttgtctggtctttggtgtccacagtctcagcacaagtaagagtccctgtttggaaagctcaggcaaaggctttaaggatatagtattggcccagctggggtggctgcccatccctgaaccaactggggtgagtaggacactctgtttcgttggggtgggctgccactgtgtctggccagctcactag

SEQ ID NO: 568014 - DNA, 555 bp, Homo sapiens
aatttgcagttcctcttagttttattaggctccatgttttaggataattattcatttatctataattgagtccacttatttttgcaggcatgaggagatgtattaatcaggactgtttgttgaaagtgataacaaataccagttaaacttgtttaagtaaaaaagggaattcgttttagcttatatgacaaagtggtccaaggatgggctagcttcaggcatggctggatctagcggttacgcctyctgctcttgctttctctttcttgctccctcgcggtgtcttgtttctcttcttctctcattggcttgactcttaggaatgtccttcccacccaatgacaaagaggaaccaccacaactccagcttgtctggtctttggtgtccacagtctcagcacaagtaagagtccctgtttggaaagctcaggcaaaggctttaaggatatagtattggcccagctggggtggctgcccatccctgaaccaactggggtgagtaggacactctgtttcgttggggtgggctgccactgtgtctggccagctcactag

SEQ ID NO: 568015 - DNA, 612 bp, Homo sapiens
tctatccagtcattgagccaacatgtatttactgacacctgtggtgttccaggcacggtgtcaggcagcatggacccaaaaagagatgaggctcatttctaattggataagcaatgtgcagaggagacatcagtcattcttatggggccatatttagtgatccaaggatgccacagagcttggtgagctgtccaagggctctgaacaaatcagtacagtcatcacagtgattgttactgaaattgagtggggaggggcatgtaggagccagcactggctgggggaggccctgtgtagggggttggctttggagaggtggctgctgtgagaacaccaggcctagaataagctttcaggctgtgccattccctgtgggtggcagggttgtcaggaagacaagagggggttcttgtgcaaggtacgtgggggtgggacagggttctgggcggtggagggtggatggagggacctggaaaatggaggcaggggctttgaggaggcccgggttaatggtagggaatgccagcamggggagatggctcagtggtccctcatgtggatgggcagattctcaggctcctcctcttccctgtgagctggcccaggtgcggc

SEQ ID NO: 568016 - DNA, 561 bp, Homo sapiens
ggttgtgcattgtcgctgagtggcttctgggaggggtgagacttccagctccgagggaagccaaatgtggcacaggagttcctggtggtgttgtccccactggagactcatttcctcatctgtgatagaaactcccccaggcaactgtgtgaccagagaagtggagacctgtggtggcctctctcctccgtagttcttgatatgattgcccagtctggrttggggtagggtgggtggtggttctgggatggggcgggactgtagggtgaggtcaggcagggcctgaagccaggtttaggaggcaggggcaagttgggctcgtggtgggctgcttgaggctggctggtcaccataggcaggagggctaaggccgggaggaggagctgctgctaccaggagcaggatgcaggggctggggatacctggaggctgttactccttcacttaccaatggtcccatgttgagtcaacaagcaccctcagggcctgctctgggccaggctctggggatcccaaggtgaggcagacaggtgtggccatatggtggagtgactgcctgag

SEQ ID NO: 568017 - DNA, 561 bp, Homo sapiens
ggttgtgcattgtcgctgagtggcttctgggaggggtgagacttccagctccgagggaagccaaatgtggcacaggagttcctggtggtgttgtccccactggagactcatttcctcatctgtgatagaaactcccccaggcaactgtgtgaccagagaagtggagacctgtggtggcctctctcctccgtagttcttgatatgattgcccagtctgggttggggtagggtgggtggtggttctgggatggggcgggactgtagggtgaggtcaggcagggcctgaagccaggtttaggaggcaggggcaagttgggctcgtggtgggctgcttgaggctggctggtcaccataggcaggagggctaaggccgggaggargagctgctgctaccaggagcaggatgcaggggctggggatacctggaggctgttactccttcacttaccaatggtcccatgttgagtcaacaagcaccctcagggcctgctctgggccaggctctggggatcccaaggtgaggcagacaggtgtggccatatggtggagtgactgcctgag

SEQ ID NO: 568018 - DNA, 646 bp, Homo sapiens
ggtctggaggtgagtgtgatccagggaaggcatttgtggtaagcatacaggattgggggtgctgtgtgtttcaaatatcatcatatcaagaagcacatccacaaacctttcactgcgattcatggttgagcatccttggccatgygaggttgtaggcagaggctctgtggatgtgagcatagaccttgtggggaggtggggagaggattcattggttgcatcaaattcccaaggaggtgttagaagttttcattcacaaaaagtaccccagagtgcttctcaaacctccgaggctcatcagtgctgcccctggttcccctttcttttcctctgctgggcgaggactactgcctcttgctgcagatgtgtctcccaagaaggcatggtggcccctgtggagtgagtctcaaggaggagctgctgttcatgtccaggatctgcctgccaggctgggccacatcctgcagagacctcacctggctgtgacctagaccatgtgccagggtgaggagggaagctaagggtcaaataaatggagctgtgtgagccaagtgaggcttttagcacagaagtaggtggcgggctgggagccagggaaggccagaagtagagtgagggccagtcaggtggcctgggagccaggcag

SEQ ID NO: 568019 - DNA, 534 bp, Homo sapiens
aagactgaataggatggtttcctcctaagatcagaaaaaaggatgttcactgtcatcacttctaacattttacaagaatttccagcgcattgcaataaagtaagaaaatgaaataaaaatcatccaaattgggaaaaagcaaaactgtctttcttcacaggtgacattatcatttacttagaaaatttgatggaatctaccctttaaaaaaaggcactaaaaccaataagtaagtttagcaacattgctagatattaatatacaggctgggtgcagcagctcatgcctctaatctcagtgctttgggagcgacagacaagagatcacttgaggccaggagtttgagaccagcctgggcaacataacaagatctcatctcttccacaaatttaaaaattagccaggcatagtggtgcacatctttactcgcagctacccaggagrctgagatgggaagattgcttgagcccaggaggtcaaggctacagtgagctatgattgtgctccagcctgggcaacagagctagaccctgt

SEQ ID NO: 568020 - DNA, 549 bp, Homo sapiens
cctaaccttggcttatttggagttcatctgaaaatcagcatggggaactatggccaaaagcaactttgttgttcatgagatcttccaaattcaggagagccatgcccaacagttacagaaaggaagcaggtgctctgggctcctgttgcccacagacccatggcctgaggcctaggacagtagtcctaggccttcattgggcatcaggatcagctggggaggttttttaaaatgtagatgcccatgtcccatctccagaaatgcaatttcaattgatcagagcttgagcacactttaaaagctcycccagatgattctgctgggcagccaggttgagaccctggcctgggaaggactccttcctccagcccacagttgttctaggatgggggtagagcactgctcagggagggggcctcctgccttctgtaaggtctgcttaaatgccactccttcccatactcctcagtggaaagcacaatagcccagtggttaggttcagacagacactggcatccagtcatctgggtttgcatccccatcccacag

SEQ ID NO: 568021 - DNA, 642 bp, Homo sapiens
  misc_feature 453, 569: n = A,T,C or G
ggcatggttaggaggcctctgaaaacgtacaatcgtggtggaaggtgaaagggaaacaggcatgtcttacatagctggagaagggagaagagagcaagagcaggtgctacttgcttttaaacaaccagattttgtgagaactcactcactattgcaagaatagcaagagggaaatttgcccccatgatccaatcacctcccaccaggcccctcctccaacacggggattataatttgagatttgggtggggacacaaatccaaaccatattattctgtccttggcccctcccaagtctcattttttatcacattgcaaaatacaatcaacccttctcaacagtcccccaagtcttaaytaatttcaggattaactcaaaagtccacagtccaaagtctcatctgagacaaggcaagtaccttctgcctatgagcctgcaagctcaaaaccagntagtgacttccaagatacaatgggggtgcaggcattggctaaatacacccattccaagagggagaaatcagcccaaacaaaggggctacaggccccatgcaagcccaaaacccagncactaaatcttaaagcttcaaataatctcctttgactctatgtctcatatccaggcaacactaatacaaaggg

SEQ ID NO: 568022 - DNA, 274 bp, Homo sapiens
attggggaaattatacataaacaaaatgagaaaatcaataaaaagattaacattaatttttaaaagaagcaaacagaaattctggggctaaaaagtacaataacaaaatgaaaaattcattagggggttaaagagcagatttgaacagacagaagacagtgaacttaaagataggrcaactgaaattatcaagtctgagaatcagaaagaaaagagaaagatgaaaagtgaacagaacctaaatgacctatgagataccatcaagcagactaac

SEQ ID NO: 568023 - DNA, 603 bp, Homo sapiens
gagcagcctgtgtctccgtgggtggagatgagaccatctccatggctccttcgtcagcaaaagattccacacttgggcatctttcccttccctgcctttttactaggtttgggggaaccaccatgggctccacgaattccctgcgtcctcccacgagtgaggccacgagaagccaggcaggaatttgcagtacaggatgcgctccacaaatggcttctccgtggcatcrcgaggcagataggaaacacttctcagtggctcagcaaattgtcaagatcctggaatcaggtcagatagaggcaggatttcatcatagtcctgccctgccatgtgaccgtgagggagttacctgccttctgcacctcactttctcatctgtaaaatgggacaacaacggtacctaccccaggggcagagcctgacagctctccgctctgggcgccggcagggttgacagctatctactgtgagtgggaagaagtcagcacccatgcagaaaaccagaggagcagaaatcagggccctcaagacccatcccagcagaaagcccactgtggtatgaccaccactgcctgggcacctgcaagatcctgggccacagac

SEQ ID NO: 568024 - DNA, 623 bp, Homo sapiens
ggctcagcaaattgtcaagatcctggaatcaggtcagatagaggcaggatttcatcatagtcctgccctgccatgtgaccgtgagggagttacctgccttctgcacctcactttctcatctgtaaaatgggacaacaacggtacctaccccaggggcagagcctgacagctctccgctctgggcgccggcagggttgacagctatctactgtgagtgggaagaagtcagcacccatgcagaaaaccagaggagcagaaatcagggccctcaagacccatcccagcagaaagcccactgtggtatgaccaccactgcctgggcacctgcaagatcctgggccacagacatggccacctggtgttgctcctatgagccatgctcttataggctggtcagggaggcagacacgtgactccaggcagtkccgtagggacttgaggagcacagcagagcaggaccctaaaggctgagaaggtgaggtccagaaggatgcacaggacagctctggaggcacggaagtagatggaatgcctgggcacaggaggtcccgtggggaaggagctgcaggtgaggctggggtagaaacaggaccagacagaaagcaaccttgtcatatgagaag

SEQ ID NO: 568025 - DNA, 534 bp, Homo sapiens
cacacctttaatcctagcactttgggagcctgaggcaggcagatcacttgagatcasgagttcaagaccagcctggccaacatagtgaaaccccgtctctactaaaaatacaaaaattagctgggcatggtggcatgtgcctgtaatctcagctgcttgggaggctgaggcagaagaatcgctcgaacccgagagacagatgttgcagcgaatcaagattgcaccattgcactccagcctgggcaacagagggagactccatctcaaaaataaatatataaatacatacatacatacatgcatacatacacacatacatacatacatacatacatacatacatacatacatacatacataaaaatgattattctactgtattctacacaggcaaaaatacttttagaaatgaacaagaagatctcattcacagaagcaacaaagagtataactatttagaaataaacttcactagagatgtgcatgacccgtgtaaagaaaactaccaaactttatttagagctataaagatgg

SEQ ID NO: 568026 - DNA, 485 bp, Homo sapiens
aataaaaagataattcaacaatataaaaagtacaaaagctttgtaggaaagaaacaagataactaaaattaaaaatagtctatgaaacacatttgtagcagtgtgtcaggcagcgttgataactataatataaggagttcacacaaaccgttttaaaaaacaaaactcccagaggccagcagatgaatgggctggacagaaagtccacccatgggaaggtgctgttagcaaacacaggaaaatccacctctccgggaatccaatgggaggtcacttcacatctattaaatagcagaaaatgaaaaacaaaggcttaattgccacatcaaatgcttgttgagttgtggtaaaaccaatcttcttgcacactgacaggaaatgatcttttcgaaagcaatttggcgttaccattgcaagtaccatraaaatgcccacactctttgacccaataatcttcttctgagaaaataattcgttagaaagaa

SEQ ID NO: 568027 - DNA, 576 bp, Homo sapiens
aattcctgtcacacacgagagagaaagggtggagcagtcaggattatattatagcagggacccgaaatgcaatgagcagtttcaacgaatagtccttgaaatgtatgacaaaggaagctaagtgcattgcaatctagaagctgacatcacagtttttatctccatgttataattttcttcctttatcaccagtctgcattaaggtttattagtacatctctggcctgctcagaagccatcaggtggggacagattagtgtgtcggttatggaacagtggtaggcagaagccgatcagatgaactcagacagcacggtaattagcatgcccgagacaccaggctgccgtgctggggcggccttggccagtctcactgtggagcagtttgttcctttccacaaagaaattcattagtggcgatcaatggcatgcagtgtggaggctcccccactgatgcctggagtctccrtggcccggagtcgccccctgcttggggccgggagagaggtatccatgccagctctctggctgctcaccagggccactgggcagcccctcagggttaggctacgggga

SEQ ID NO: 568028 - DNA, 588 bp, Homo sapiens
gctaggttctggggattcatggagaatgagggggtcaacgttcctgccctcatkgagctatagcctggcataggagacagagaataaataactaagaaagccaacaagataagtaccactgagtaattaagaaaacttgttattatgtaatgtcctggatacaacatgactctcttaatcagaggttcttcccctgggctcatagaccccataagctccttgaaatagttatggaaaagtatgtgtgtgtctgtgtttctgtttttttctctagggaaagtccatacttttcaccatatgcctaaagtgtctatacttcaaggaagggtggacagatgactctagttcacccctcaggtgtccatgggcacaggcattctttcctaatcctttcctggacccactgtgactgtctcctccttgtttctctaaatcactcccagagaagtctgttcccatgtactagcggggctgggagctgttgcttccctctctgggttcatgttagtgtccactggaagaggcaacctacctgcattcaatcagcattgctctgcacctctgagaacaagcactccatttcccagg

SEQ ID NO: 568029 - DNA, 496 bp, Homo sapiens
aaaaaagttattccactaattcccttgatggtcggtttaggagtttctgcctccactattgctctcggtactggaataacaggcatttcaacctctgtcacgaccttccgtagcctgtctaatgacttctctgctagcatcacagacatatcacaaactttatcagtcctccaggccctagttgactcttcagctgcagttgtcctccaaggacaactccgaggccttgacttactcactgctgaaaaaggaggactctgtatattcttaaatgaagagtgttgtttttacctaaatcaatctggcctagtgtatgacaacataaaaaaactcaaggatagagcccaaaaacttgccaaccaagcaagtaattatgctgaayccccttgggcactctctaattggatgtcctgggtctcccaattctgtcctttaatacccatttttctacttcttttattgggaccttgtagtttctcaattcatccaaaaccgt

SEQ ID NO: 568030 - DNA, 595 bp, Homo sapiens
tctgagaataatatcaaggatttaagtgaaattgccatctaatgtttgcattatagatttcatgcccctttaaaacatgtgttatatcaattgagagcacactcttataaagtacaatcaatgataatcaatggattttttaaaaaagaactaaataagttgcataagagcacagaaacaaactttaaatttagcatttaatagaccaggaacaacacaccagtaaagaaaggggtcactaattactgtttggatacttggattttagtttgaaaaataagtaaaatttacatagtaaaaagcaataaagtaaatttaacacggaaagtaacaatggagtatgaaatatatgaccaaactaatggaagtttctgtctaaaataaaagatctatttgtagggtaagtaattagattgggagtaaaaggcagaaatagtaaaatcatcacatgcacaaatgctgtctgtatttaatcccagttaaagacatgggaartaagataaccctaaggctataatgctcacctattaaactgacagaagtatgtaatatgaggaaatagcatgtcttgtttggtcagtgtattagtcgattc

SEQ ID NO: 568031 - DNA, 593 bp, Homo sapiens
atagatttgtacactaaagttcttttggactatggatttagtacaactgtttatatgtttggttttatgagtaaaggcatcttgagtttcaaaatcaaccttatattcaatttataaatgaagttttggaaatttagaacgcaacccattcatgagttgaccctccctttctagttaggtggttacatgtttattataggggtgcatggtatactakcctaaagtaactgttcatttgagttatttacagctaaaaccacattatgtttttctggagcataatgtttgtgttttctagttatcgtaccaaagtaaacagtaatatctttagcttaagaacccaactgaaatgtttgtaaaatatagattgttttgtaatttggctctttttttttaatggtcctatgaatgcaactatagtgtttgcagtatttgtacagtgcatggggtgctttttctgggtgctgagaagggaggagaaatgatagggaagaggggatttggagtagccgaaggaaaaaatgtgcaatcagtgttgttgattccaccgaattctaagaattccattacatcttgatatctggtacaagctc

SEQ ID NO: 568032 - DNA, 528 bp, Homo sapiens
ctggcattcaactcttaaaatccttgaaacctctgaagtgatgtctttttgtatgctaatgagttaactggtagatgacagccccctaggtagctttaggatgggggctggtcagcagaaagactaaggcaggattagagtcagaactttcagttcccgcccccaccaacccccaacatttagggaggggagaagggcgaaggttaagttgatcaccagtgacccgtggtttaattagttgtrcctacagaatgaacgttccataaaaatccaaaagaactgggttcagagagcttctggatagctgaacatgtgcaggctctggtgccctgtacatctctttatctgtcctttgtaacatcccctataataaacctgtaaacataaatgtttccttgaattctgtcagccgctctaagcaaactaatagaacctgaaaaaggggttgtgggtacctggatttatggctggttggtcagaagcacaggtaaaataacctgggcttgccattggcattggaagtggggg

SEQ ID NO: 568033 - DNA, 617 bp, Homo sapiens
tatttttcttgcctgcagtaaaccctatttaacatacagtatccattttatatattgctgggtttttaatgctaatacattaaggattttaacatagacatccatagggaacactggtctgtagttttctttacttacaatrtcttcatcaaattttagtatcaggatagtgctggactcataaaatgacataaaaatattcccctattttttgaaagaatttgtgcagcattgatattatttattcctaatacatttgatagagttcaccaatgaagccatctgggctggagctttcttcgtgtgaaggttttcaattatgatttcaattttttaatagatataggctattgtgattttctatttttgttttgttaatttgtctctcaaggaatttgtccatttcaactaggataccaaatttatttgtataacatagtctaatatatattctaatataatgcttttaagatatgtcagatctgtagtaatgtcccctctttaacatttttctcgattcatctagctaaaggtttatcaattttattgacctttgcaaagaaccaagttttcatttcattaattttccctattgtttgtctgttttctactcattg

SEQ ID NO: 568034 - DNA, 596 bp, Homo sapiens
ccccacatcctaattggaggttaaagcaccaacatatgcatttgggggagtgggggactcaaacattcaatatataacacctattccatgttttgtaagcttgtaaagaattgctatctatctatctatctatctatctgtaatttttttggtagactttactaatgtattctgaagccatctaaacctgggtttttcttacaatttttgtggtatcatttcaataccttactcgtcataggtttcttctgattttatatttcctcttaagccattttttaaaatagtttttgtatctttctaggaatttgtcaatttcatctaggtcatmtaactactgggcattcagttgttcatagtattcccttacattcattttcattttgtaagagcagtagtattgtccactctttcattctgtttttagtaatttgagtcttattttcttggccagtctagctaaagcttgtcaattttgttgacctttgataagaaccaaattttggtttcctttatgttctctattgtctttctattctcaatgcaatttccttccatctcatttttatgattttcttcctttgacttgctttggg

SEQ ID NO: 568035 - DNA, 524 bp, Homo sapiens
atttttaagtgtacagttctgttgcagtaastttttttattttttaaatatactcacagatataaatttccctctaagcactgctttagtcacatctcacaagatttggtgggttatgttttttcttttattaacctcaagaaagtttgttacttgattcattgattatttatgagtattgttcaattgccatatatttatgaattttcaaaatttcctttgtttttaagttctaatttaattctattgtggttggagaacacactttgtatcattcccatcctctcaaattcactgagacttgttttatatggtatatcctggagaatgttccatgttctttggaaaagcatatctattctcctgttttggagtggatttcatagatgtagtagatctagtttgtagtgctgttcaagttttctatttccttgccaatcttttgttgttattttattcatttatgcaaagtggagtatcaaagtgtccaactatcattctttacttgtctacttctcccttca

SEQ ID NO: 568036 - DNA, 539 bp, Homo sapiens
attcccatcctctcaaattcactgagacttgttttatatggtatatcctggagaatgttccatgttctttggaaaagcatatctattctcctgttttggagtggatttcatagatgtagtagatctagtttgtagtgctgttcaagttttctatttccttgccaatcttttgttgttattttattcatttatgcaaagtggagtatcaaagtgtccaactatcattctttacttgtctacttctcccttcaattctgtcagtttttgcttcatggattttgtggttctgttattaggtgcatatatgtttaaaattgttatagcttcctgatgagttgacacttttactgttayaaaatttccctctttatagttaataatgttttttgaaaataaattcttgttgtttcatcccctcagtctatggtattttgttatggcagcccaaaatgactgagacaacatgtttttccatttttaaaatttcaacctactaatatctttgagtctaaagtgtagctcctgtagacagaatgatt

SEQ ID NO: 568037 - DNA, 592 bp, Homo sapiens
attttttttttgtctttcaacattctgacaataacatgtctacttttgaatctctttgcatttatcctacttggagtatgttgagcttctgaaaatatgtttttcaccaaacttgggaagtttctagtcattatttctttgactacttaaaaaatttttcattacacatatgttgcccttaatggtgtcccacattatacatgtgtctatgtgtgcttactrtcatttgcataccatataattcacacatataaaatgtacacttcaatggtttcttagtgaattcccagaattacacaacaatcacaattttagaacatttttatcactccttgtcctttagcagtcccctctgtatttcctttaaacacctttagctttaagcaaccactactaatctactttcattctttgtaaatgtgcctattcttgacatttcatatgaatggactcatggttttgttactggcttctttcacttaacctaatgcttccaacattcatccaagttgtagcataaattactatctcatttatttttatgattgaataatattcaattgtatagatatacacatttatttatgcattc

SEQ ID NO: 568038 - DNA, 592 bp, Homo sapiens
attttttttttgtctttcaacattctgacaataacatgtctacttttgaatctctttgcatttatcctacttggagtatgttgagcttctgaaaatatgtttttcaccaaacttgggaagtttctagtcattatttctttgactacttaaaaaatttttcattacacatatgttgcccttaatggtgtcccacattatacatgtgtctatgtgtgcttactatcatttgcataccatataattcacacatataaaatgtacacttcaatggtttcttagtgaattcccagaattacacaacaatcacaattttagaacatttttatcactccttgtcctttagcagtcccctctgtatttcctttaaacacctttagctttaagcaaccactactaatctactttcattctttgtaaatgtgcctattcttgacatttcatatgaatggactcatggttttgttactggcttctttcacttaacctaatgyttccaacattcatccaagttgtagcataaattactatctcatttatttttatgattgaataatattcaattgtatagatatacacatttatttatgcattc

SEQ ID NO: 568039 - DNA, 520 bp, Homo sapiens
ctcattctccactcctcacctcagcaacagcactgtaaataacagccctcattcccagtactagaggaagaacagtcttcaatcacaaaataccttaactatttatactgacctgtctggtggctccctggaagtccagctcagaaggcctgtctttattttgcctaacttggagttggtccagagctaaagttgctaactaggggtaatgtttaaaatattagcagccaaatgctttatttgctgctgcctggggtgacagataacaactggggcaggcaacagactaaccaaaaagcttggaagaaaagcctgggaaatgagatgtccatagggactttgtaaagctttaacatactcctgagaatctagaaggtcacactcatgcccagggctgtaygtgtgcttagaaaagatgtgagaaggcactaaactctcacaatggccaacctggaggctgaaggtgaaggcagagttgtaagccacctggctgaatgttgatgtgtcacaaaaacacaca

SEQ ID NO: 568040 - DNA, 501 bp, Homo sapiens
aagcatgacagaaccctgctgtgggtgtctgggtcttcctggtaggggtctcactgagaccttwtctaatggattctgagacatgccttctcttctcagggtttggagttttcaactggagtttttacttccttgatttttctggttcagttcttcagaaacaaattcaccttcttttcacctttccacaactagctgtctctcagatcctccctgttttggtcgatggtatcctcgtcagccctcacactgactcacctttccctcttcacctcagctgacacccactcacctaccacaccctgcaggttttctttatggctcttctcttccatatatggcttttctttccttttcttccacaacatcccggataggttattagctcccccatgtcccctatgtttgtttggttcaaactacaaaatgagaacatttcccaaagtccctctcagctctgatgctgtgatcctttaagcacagagaccacatttgacatat

SEQ ID NO: 568041 - DNA, 569 bp, Homo sapiens
tagctgtctctcagatcctccctgttttggtcgatggtatcctcgtcagccctcacactgactcacctttccctcttcacctcagctgacacccactcacctaccacaccctgcaggttttctttatggctcttctcttccatatatggcttttctttccttttcttccacaacatcccggataggttattagctcccccatgtcccctatgtttgtttggttcaaactacaaaatgagaacatttcccaaagtccctctcagctctgatgctgtgatcctttaagcacagagaccacatttgacatatgttacattctcaaaggctaccattttatctcaggactctcaggaaatatttcttgatatatttagaaggaccatgccattggggcccaacagggctgattctaatggccagttactagctgaagccattcagtttctctacacctcagttttcccagctgccaaacraagctagagatgccttcctcacaggcttgtgtgaagaccaagtgagacaacatggactgaagttcccagaagagtatttgccacttagtcagt

SEQ ID NO: 568042 - DNA, 517 bp, Homo sapiens
cacacacacacacacacacacacacacacacmccctaagaatattactttcaaagcagaatctattttagtgccctcaaaataactattatctattcatgacttgaaacaaacattttgggcttacttttttttgcagctgttttaagttttcaaaaagtttacctgagagactaaagcctatcacattttaagagtgcaagaaatggttgtatacagtttacatatgtaaccaaagccagctccttccaaatcactgtggtctaatgaacaacttaagcatagaaaaagaaatgtaggctgggcatggtggctcaggcctataatcccagcactttgggaggcagaggcaggagaactgcttgagtccaggagttcaagaccagcctgagtaatatagtgagacctcatctctacaaaagtattttaaaaattaggcaagtgtggtggcatgtgcctgtattctcaggcactcaggaggctgaggtgggaggatcccttaaacctgggtggcagag

SEQ ID NO: 568043 - DNA, 598 bp, Homo sapiens
cgcccttgctgtctccaccaaccacgaaacccgccgagtgagtgcttcgagcgccgcgcgcccagcttcgccccaaacaccgcgcccgatccgccccttcctccggggttcggctgccccgcggggagcgcggaggcacaccgtctcctactcccacccagctcctagaatgtaggagagtgtagagttcaaaaagcccggaagtaaaacaaccccaggttaagaaagtaagggtaagctctagcagtcggcaaaagcgctcggcaaaaaaaccccgacttctccagaaaaactttgcggcaagttaagcggaagcgctgaatggccgggactatttaactcgcgcttcctctcacaagaggcggatccctggacctgtttgggggaccctgacggtccacaaactcgccrtttgcctgctgggtggccctctagaagttctgacatcctaaaaggtctgggcagtcccgctgacggggaatacctgtcgtagtacccattgcctgcgagtccctgatggcggccattacacttccatccgggtattgccgaaaagctgatcgcagcgctaccgggagcgcacgctgcggcggaggga

SEQ ID NO: 568044 - DNA, 573 bp, Homo sapiens
aatcctcactttgtctttaggaagccttctttattattgtgtttactgggctacacaattccacctaraaaaggcgaatgagcggaaattcacattagtcatatttatgcttgtgtaaaacacacaaggagaaatcttctgtaaataccaaaggggatgccattatggaatgaagaacatgtttacaaagtggattttattccgcatcgtacatcacccatctctcttcaggtcctcatttctgtgcaagccagacatgcacacacatcacagcagaaagagagagaacgagatttttcttttaataacaaaaaacgatgttagtttggaaaaatggacagagttttttgttctgtgttttgatgtagtttttgttttttcgattaagatattgcatccccccccacagtattcacattataactttatttttacttctacatatacattcacctacaaaaccttgcaaacctgcatttatgttatagaagaattggagaaagttaaaataaattaaaatattagtcagacttaccttatctcttcccctttctcttccaccattcatatcac

SEQ ID NO: 568045 - DNA, 655 bp, Homo sapiens
tttacataaggaagatttcctttcctccaatattcagcaaaatttacctccctttcattttaagtcctcacctgcagtttcctaaaatgccatcaggtttctagtaacaaacacctaaaggctcttcaaggttttcaccattttatgttccatatattgcctagttccaaagccattacattttaggtttctgttacagcagcactccaactccaggcctcaaaaatctgtatttgttatttgtcactgcatgcaaattagcccggacttagtggcataagacaatcaacagttactatctcctacagtttttttagggtgaaaaacctgggagtggcttaatgattatggctgtgactcagggtctctctttttttttttattttcataattgagattttattggttgagaatcagtacagacatttcaatttgtacacaattcttaacatatgtaatgaaattttaaaaagccatgcatgtattgtaattctttttaaaagttattccagtgactttccagcttaaaatttggaagcaaattttccttaagaggctatcaagtaccaatatcttcacatgttggtcagctgttacayacggcccaccagttcacaactgaatagcacatacaaaaaatatggaacgcttcacg

SEQ ID NO: 568046 - DNA, 564 bp, Homo sapiens
tcctattgaaactattcccaaaaattgaagaggaactcctccctaactcattctatgatgccagcatcatcctgatactaaaacctagcagagacacaacaaaaaaaagaaaacttcaggccaatatccttgatgaacatagacgcaaaaatcctcaacaaaatactagcaaaccaaaaccagcagtgcatcaaaagctaatccaccagctttatcactgtgatccaagattggtacaacacatgcaaatcaataaatatgattcatcaaataaatagaactaaaagcaaaatccacatgattatctcaatagatgcagaataggcttttgataaaattcaacatccctttgtcagaggcattcaaaccagattgactccatcttgaataggrgctgggtaaaataaggctgaaacctactgggttgcattcccaggaggttaggcattctaagtcacaggaagagataggaggtcgacacaacataaaggtcattaagtccttgctgataaaacagttgcagtaaagaagctagctaaaacccaccaaaacaaagatagtgat

SEQ ID NO: 568047 - DNA, 658 bp, Homo sapiens
aaattgcatccaattcttttgcaacattttgcatctgtttatttacatccacagcaaaatcacttatgcaaattggcccctggttccctattactctgcctgtgtcccatttttgacacatttctgataggattcttcactgctgcctcattttgctcctcaacctggttaagcattaacttagcctaaagatactccattcagttacagtcagcttacaacgagctrccctctgccctccatatgaaattattgaatttccttgcaatcaatccacttcaacctctctctctctctctctttctctcttcctctctctctctctctctctccccctctctctctgtctgtctctcaatctctctccccactgccagaccccttattttcattttcttctttcctctatctcgaagattctctatagttcctcaggaaaaggagaaaagggtttggcatagagtatatgtgaacaaattctagaaaactgtagagttctgaggcaactcaagggcccatctgagggaccctctgtgtgtctctcaaccatccttttctctttgctactgagcccataatatgtgcctggctctttcctgagctcttacacttgtatcatcagtgtgcccggcctccctagctagggagtataaaatat

SEQ ID NO: 568048 - DNA, 646 bp, Homo sapiens
tcaccagttctcaataacatgaagcctctgcataaaatgtttctctattccatggcccccagttgccagttttacaatacaccagttctcaataacatgaagcctctgcataaaatgtctctctattccatagccagtcatatttacagcagctgtggagctcaagttttttataacagcctctrtttcatacattctgcccattggatgaccaaagcacttttacatgacaaaccatgtttcttctcagcctggaaattatggccaccatagtcattaccccgggtgacgtcaggggccctttagctcaaagtgacttgcagttacacttttacttgaagccaggccacaggtgctaccctgaacggaggaagcacgcttgaacacgctggttccctaacacaagactgtgacagagttttcactggtctatggccgcatgagaaaataaggagcatgaagtgttgggggttgtgcacagcagccagctacagagcaaagttcaactacgccttttattcctagtgttgagtggccaacagtcctttagtgagtttttcctttattctgagattatttgggggtagtaaaatacccttccttttcttttatgaaatgatagtaataatggataacaggtggtttg

SEQ ID NO: 568049 - DNA, 646 bp, Homo sapiens
tcaccagttctcaataacatgaagcctctgcataaaatgtttctctattccatggcccccagttgccagttttacaatacaccagttctcaataacatgaagcctctgcataaaatgtctctctattccatagccagtcatatttacagcagctgtggagctcaagttttttataacagcctctgtttcatacattctgcccattggatgaccaaagcacttttacatgacaaaccatgtttcttctcagcctggaaattatggccaccatagtcattaccccgggtgacgtcaggggccctttagctcaaagtgacttgcagttacacttttacttgaagccaggccacaggtgctaccctgaacggaggaagcacgcttgaacacgctggttccctaacacaagactgtgacagagttttcactggtctatggccgcatgagaaaataaggascatgaagtgttgggggttgtgcacagcagccagctacagagcaaagttcaactacgccttttattcctagtgttgagtggccaacagtcctttagtgagtttttcctttattctgagattatttgggggtagtaaaatacccttccttttcttttatgaaatgatagtaataatggataacaggtggtttg

SEQ ID NO: 568050 - DNA, 533 bp, Homo sapiens
ggaaattttactattccttgaaccaacctgggcaccagacccagttttgtttttgtttttcttccttgcaacaccttggatgatctctgtctctatacctcatcatgggactaatgatagtatcttcccagcccaccctgctggcttgtgaggagaattgaatgaaataatagatattgagagcctatgagaaaaagaaaaccagaatttctatgtaaatatacatattgttatttttgcaaattacaattttggtttgtaaaytgtttttgtgtgcattttttaatcaaacacaaatttctatgctttttttttcaaaacatgaaagtttgtatataatagcagttatactgcttctatagaaggatatgatattttagtaaataaaggctactggatataagttttatttatgtatattttaaatttcattaagcaaataattcttagttaaaatgggtaataattattaaaaataattgactataaaccttactcatttcaagtagtggaaagggaggtatcagaactta

SEQ ID NO: 568051 - DNA, 451 bp, Homo sapiens
gttgaggtgagggagactaaaagacttgcccaaggtcatggttaagttggtgcctgatgccagagcaggcctgtctgctgaatcacagaaaatctctcttgcagtggcagagtctatgattagtagcttagactatggaaacagactggggtttgagtcccagcttttccattgatgagtggtgtaactttagaccggtttacttagcctctctcagaatcaattttttcacatgtaaaatgaatgtcatcatagtaaaggaaacacagaaagcattcagtaaacatggygttgtagttgtcatccacagatgcaaggcaaagagcccaagagaaaccagggctggtggggtctcaaccccaagaagcagtacaatccgtcttcttgttctcaagtctcatcatctcacagagatggtggatcaccaccatctgacttaggtttaggcatg

SEQ ID NO: 568052 - DNA, 470 bp, Homo sapiens
cacgtgtttcatgagtgtgtcctgtgtgactgtcactgtgctagatctggagtggggaacaacatacaacccctgaccttacagtgctgaatgactagtggggagtcagataagaaacaagaaagcaaacaggtaaatataaattagcaaacatggtacytgctgtgagggaagatggaagagtgcaatggtggggaatcagtgtggggtaggagaagagcttaggtggtgtgggaagatctgtctgagaaggtgacatttaatttgaggattcggggacaaatgtgcaggaatatttgccacttttagatgaaccaacagcatcagagatgctggacacagattccaggagttcagagtcaattgttggaaacctaagtggactgacatatctgatttcagggtggacctccctcctgattgtcccctcacactcacctgtctgcctgctgatccacccacccaggccc

SEQ ID NO: 568053 - DNA, 545 bp, Homo sapiens
ccctggtgtctgtcccaggctccagaaacccaggctttcccatgctttccaggggcctgtcccactactggttcctgcaaacccaagctaggctgatgttgagaatggacatggctccagacagggacagtggcctctcggggtttctcctcatcccctagcctcagggacatggattgattgggaggtgcctggggtgtttwaaaaaacatctatggttgcctggtcagagatcttttacttctggtaattcatggagcaagagattcaacataagtaggggtctctcctgaggtccaaggactcatgaggaagtggacgggccatgtggtctcctgcacctgcttctcttttgcttgtgtgtagaaggatcacccaagccaccccaaattgttcccttatgcccttcgtttacattgccttatgatggagtgcctgaagctgcttaaccagcatttctgaaagagaatctggatccaatttgagacaggtgtatatatagcagtcccatcagctgggacctacagatgacgtggccccaagtc

SEQ ID NO: 568054 - DNA, 560 bp, Homo sapiens
actatgttacaaaattgtttttaaatatttgtgataactctattctaacgtaattgtcttcctttgtaactctgcatattttattttatgcatttaaaaacattcttttaagaaggggtccactggcttccctagacttagaagggggcccaagacccacctaaaaagtttaaggacccttgagagggaaggaaaggaccacgtcaagcccatgttcttccagaaagctcccagatacagtctatgctacatttcaaaggactatttgcaaacttgtgaacaggctgttccctttacttggtaactttgggctctgtgagccaaaatagttacttttcttggagggctcacaatgcaataattgaaaaattgctggaaaaggcttctgttggtgtgtaaaacatgacccatttgtaattttttwaaatcttgcagtgtcaaattagaggccatcctattaagagcttctgaacctcagacttgtagcttttggaaaaccagagaaaagcattttatttgttttgaaaattagatcacagtgtgttcaacttcccattagg

SEQ ID NO: 568055 - DNA, 535 bp, Homo sapiens
ttctgacagcttcctacaaaattatcatggttctgggagttccgtacactgcaattgccaggggtgctgaggtcttgaacttgctgattggagtgaacagtgttctctccagacaggtgagaagtagtttgggggccctcagtcctctaggcctccttgctgtgcactctgggatagcagggttttcttcagctcagaaagtcatgagcaaggagtgaagagactccatagttatgaagctctgcacccaagtaaggaagtaaaacaaaccctgggtagttttgaaaagcaagctcatttggtttcatcaagaacctctccccaaataaatgttcccaagcgattgtttcatgatatcgtccagttaatttgtagcagagctagtgtgtgattttaactagctctgtaaccctggggcagccccattgcctctctggaatcctaggagcctcttctttaagtgagaagtctggcctccaggctctgctgtagctcctgtactctcccgytggttctgtggccccatgtcaacatg

SEQ ID NO: 568056 - DNA, 642 bp, Homo sapiens
gtcagatttcagtcagggttcccaactcatggggagctatgaagacatttaatcaaacctgcagtcgctgggggtaatactgatggacagcccacaagagcaccattcaatttgtacaaactaagacaaatcaaagatggataaatgaggctgaggacaaccactccaaaaaaggtcacacttctttgatgggcttgagccagtttctatacrtgaacactttgagtgagggagaggctgggacctcaggaggaaggcgcctgcaacaccacagcaaggatagatggtggtgatttccaatccttccccaaagggacctatcaccatttactcaggcaaccactgaacctgagggaagggaaacatccagacacttcaagaataaatggacacatggtccaggttgatattgatacgaaggacccaaggcctcattacaactcccctgctagagtggattttgtggaaaccagatgatcaatgaatcctggtgcagcccagctcgctgggcttgcggactcatccacagcgatttccttacacctcaaatatagaattgcaacaaacatccttggtagctgccagaactttgcattggttccttggcttacagggcaagagttagaggagtggggaaggcaa

SEQ ID NO: 568057 - DNA, 551 bp, Homo sapiens
ctcacacattgctggtgggagtgcaaaattatacagtctctttggaaaactggcagttcctcaaaaagttaaacatagagttaccatatgacccaacaatcccatgcctaggcatgtatccaagagaaatgaaaatgtatgttcacacaaaaacttatacagacatttttatagcagaattattcataatagccaaaaggtggaaaaaaaacaaatttgtatcagttaatgaatgaataaacaaaatgtggcatatgcatagaatggaatattattcaaccataaaaaggagtgaacttgagtccaggaggtggagactgtagtgagccatggatgaacctgcaacattgatgaaccttgaatacattttgctaaatgaaataagccagtcacaaaaagtcacatattatacgatcctattcacgtgaaaaattccagaacaggaaaatctatagaaatcgaaagtagatgagtagtttcttagagctgggaggcagggatgcrggtgtggatagtgggtaagagctgaaggttacagggttttattttga

SEQ ID NO: 568058 - DNA, 612 bp, Homo sapiens
aaagcttaaaatatgcctcacaaagggtcagtaaatcatcaagaactactacaggatgagtatccattatctgaaagttttggagaaagaagtgttttagatttcagattctttttggattttggaatatctgtatgtacataatgagatatcytgggagtgggactctagtctaaacacagtatttatgcctcatgtatgccttatacgcatagcctaaaggtaactatatcaatattttaaataattttttgcatgaaacaaagttggtgttaagtacttatgtgtgaaatttttcacttgtggtgttgtgtcggtgctcaaaaagtttcaggttttggagcatttcagatttcagatttttagattagggatccccagactacatgtagccattaaaaggatgagtttaatgagtatacttcaactgggaaggatgtttgtgttgtatgtttaagtgagtaaaacaaaatgcaaattatcatctatgctaataaacggctgacaataggatggacaaatggatggggtgcccatagatgtgtggatggatctctcctatatgtgcacctccctgcgtgtacacagacacaggtgacaatggctagacat

SEQ ID NO: 568059 - DNA, 640 bp, Homo sapiens
cgctgtcgcatgcatcagcactgcatggagtaaggtcagtaaggccagggcacagcacgtcctccagaaccccaacagaacaagggccagaccgaagacctgcaaggtggaaaatgacgtgaggctggcatgacttgtccccagggagcccccgccagctcctcatgcacgtctctcctttgcccacagactcacagccttcttcttagtctaggatctttcccagggccaacatcagatttgagtctcttccacctccgggcttcatttccaacacctctcagacagcacctcagatgggggtatctcattccaggtcatgctataccctggccagggcattctcttggtcagagccctgagcacacacactgcagcccacgctacstggctcctgctttcctccgggaacctgcctgcgccctttgcacctgcagatcctcctctgtccagaccgctgtgggcacagtggagctgtgccttcctccccttcacagacaccagctgccctagacggcgatggatctatgaagcccttgttctccttgctccgaacatgatatgaaaagatgctttgtggtcgtcagctctcctcagtaggttcagttcacacccgggctctcaccccctgacactcttt

SEQ ID NO: 568060 - DNA, 490 bp, Homo sapiens
aaaatgaaaacaggaagacaataaagaagagatagaggagaaaaagtgagagaagagaaagggaacagaaacggggatgggactcggagacgacgtgggagagagaggaagctggcgacattgggaaggaaaggaccccacagtcaaaggcaggactcaacaaccctgtcctggggaaaggctgatgtggaagtgagatggaccccgccgcccgcgcccgctcgcggctctgtccctgcagacaggagggtgcgcctcacctgggctctctggagatgtggagcaagaggtgctggtgcagcacagcctcctcccggccaagagcactgcgcgtggctctgaacttggcgccggagccctgagggcggccagatcccgcccccaagcygctcccgccttcggggcgtggtctcggcgtcgcccacccccagggaagctccagccttcggggcggggcttgcgggtgggcggccccggcaggggagggtgc

SEQ ID NO: 568061 - DNA, 540 bp, Homo sapiens
aggcggactccgcgactcgggccatggtggaaaatgacagttaaagtgcgttaaaattaagaacttatactttgattaaaaaacaacaaacggagtgaaaaagcaagccacacactgaaagaagatacttgcagcaattgatraaggattagtatccaggatatatacttttaatgaattagtgtgaaagagaggaacacccaaagcaacgaatggacacagacatgaataggcacttcaaagaggaaccactaacgaccaaaatcatgtgaaaggacgaagtctctagagtaattagaaaatgcaaattaagaccacaaggagatgtttaatcattaggcataaatgttaaaatataataataccaactgtcatggaaggcatgaagcaagggaaccctaatatgctggggcgaagtacacccaatttcatttattataaaagaccactaatttaagatattctattatactaaatacagctccaaaagagggggaaaaaactgacaaccaaccaactcaaatgcttttcatcacttgt

SEQ ID NO: 568062 - DNA, 579 bp, Homo sapiens
ccctaatatgctggggcgaagtacacccaatttcatttattataaaagaccactaatttaagatattctattatactaaatacagctccaaaagagggggaaaaaactgacaaccaaccaactcaaatgcttttcatcacttgtaatttttaagttatataaagaaagatctattttagactgtattaatccattctcacactgctataaagaattgcctgagactgggtaatttataaaggaaagaggtttaattgactcacagttcagcatggatgcagaggcctcgggaaacttacaatcatggtggaagtggaagcaaaacaggtccttcttcacagggtggcwggaaggagaagaatgagagaagtgcagagtgaagggggtaaaagcccctcacaaacccattagattgcctgagaactcactcactatcatgagaacagcacagggcaaccaccgccatgattcaatcacctcccagtaagtccctccccctacatatgggcattacaataaggactataattcaagatgagatttgggtggggaaacagaggcaggccatattattccacc

SEQ ID NO: 568063 - DNA, 651 bp, Homo sapiens
gcaaacaaattgttaacaaggcacaacctgcacagccctaactccattaaatcttgattcaatacagcacatgtttctgtgagcacagggttggggctaaggttgcagattaacagcatctcaaagcagaacaatttttcttagtacagatcaaaatggagtttcttatgtcttcctttttctacatagacacaataacagtctgatctgtcttcctttcccccacaaaaacatcacaaaactttcctgtgattttgaaggtagctttttctcagttgggcacctggtatattgcagtaaatctttgattactgtttgcctgagtccctgaaaagttggcacacacagattctgtttttttctttcaatgtttctatgggggagcaggggcttggagtgtttaagccaccattttgmtgacatcattccatgctgctagtttttgcttgtaatttcatttttacattaattaatgaaaagcttgaagataaatgtaaatatcaaatactctatgaaggctcacacacacacacaaaaaacccaaggctcctgctcgactctttcccacttctgatctcactccccagaagcagccacttgcaagtgttttagctttttcttctggttttatgtccttgtttttaaaaatat

SEQ ID NO: 568064 - DNA, 570 bp, Homo sapiens
gtttgacttcattgcttgtaacatgcgattgagttcatggcttgtaacatgcgattgtcccccaggtaatctccaagaagaacatgcagtgaagcttgtttaccctggtgggcacataagaagggttgttcttccagtgccgtaagtgctcrtgattcctggatttagtgagccatgtaaaagagaagaagtgacacaagagtgacaccttgaggagtaaacccccttaagcagcacaccagatccaaaacatctttccctttcagtctttggtcacttgaaaagataatccatttttttcaagatggcggactagggacattggatgccagatctccttaggaagaaggtcttaagttactgttaaatggacaagttctgaactgaaaacagagggaaaagagccaggacctgtcatcgtgcccatagaaagaagctgaggcatggaaaaggaaagcagcaagagtctcgcagagatcaacccccaaggaactcagagccctgtggaaagtgtaggtgggagtgcttctctgctcttctctcctctgtgacaatctactgaacgcccaa

SEQ ID NO: 568065 - DNA, 532 bp, Homo sapiens
tttgttgcaatttctatttttttcctttttctttatcattctttttttttttttttagatgcagtttcgctcttgtcacccaggctggagtgcagtggtaccatctcagctcattgcaacctttgcctccatggttcaagtgattctcctgcctcagcttctctagtagctgggattacaggcacctgccatcacgaccagctaattttttgtacttttagtagagatagggttttgccatgttgggcagactgatctctaactcctgacctcaggtcatctgccagcctcggcctcccaaagtgctgggattacaggtgtgagccaccgtgcccggcctttttgcaatttcttctggggacttagttataaattatttgccaagggcaatgtccagaatggtatttcctarattttcttctaggattcttatagtttgggatcttacatttacatctttaacccattttgagctaatttttgtatacagtgaaaggcaggggttcagttttattattctgcacatggctta

SEQ ID NO: 568066 - DNA, 382 bp, Homo sapiens
attttcttccttgtgagcatttgttgttagctagtctagcactctagtgtttattacatatttctacttcaggtaaaattcatcaaacagagtgcttctcaatatgcattcctctgtggggcttgctatttccttctgcccattttggtgcacagtacagcttttggtgtctgtccctgctttcaggggtgccrtctgtgaccagcgaccccaagaaagccacacccatggtgctatattagcacctgcacccccacatcagagccatcagacagaaataccaactcgcagggtactgaaaaaatgctttcttattataaatgtacatacaactcattgaacaatatatggaacatctccaaagcacagatagaaagaattc

SEQ ID NO: 568067 - DNA, 487 bp, Homo sapiens
ctcctcattctccaccttcctcacttttctgtctccccacccgtgcacctctacttttcctcttctagccaacgggtgagtggttcattcattctttcactaatgattcactgatctctccatgccaggccctgaacctccagtggggcaccaagagtggcagcaggtggcacagaggtcctgcccctggggtgctcccacattgctggacatacamagactaccccatacacaaggctgtaagcacagagagtggaagaggggacataggccaggggagtatccctgtcatagggtcaattatgtgggcattttacaaatgagaagggcacagccagtgaacataggcagccctgcagaagctccaggcactgggccctgtcaggaagcaggagcccctagctggcgtcagctatggttcctgtgtccagggaagcagagtggactgagaagggccttggctgcccgggattgaggacttccacgg

SEQ ID NO: 568068 - DNA, 585 bp, Homo sapiens
tgtaccagctaccaggtgtgtgcagtggcacaggttagtttacctctctgagcatcagtttccttgtagtacagtgaagaagtgaggattaaatgggctaagcaggttttgtgctttgcatacagtgggggcccaggcaggttgcttgatcctctcctcccttgattcatctgagtgtttcatgccaagcctcttgcctgccctcagatgtgcctrcttcctgatccagtgacctgtctgaggaggtatgagtttgggcagggacccttctctcatggatgatgccacccatgtgggaggcttcagctctggtccgagaacatgccagtctcagcctgctccccagtggtgggtttctgctgcctcagtggggcagcacctcttcctgaacaacaaatgcctccatccccacagcctgcgatacgtaactatacctcccccgccaccgggcagtgcagctcagctgccaagtgctggctgtgagctggcctcgtggggtccaaatcccaattctgcgatctgggcaagggactgaacttgtccatgactcagtttttttcacttctaaaatggagctaatagtgc

SEQ ID NO: 568069 - DNA, 639 bp, Homo sapiens
ttgtgataccagagtatctaagagaaaaatgtttttaaaaagaggacgtgttcaaatgtttcaagtgctcttcctagatcaattaacatgaggactcagaaatgtaaattggctttaaaaaaagaaggccattattgactttagtgagagctgttttactggagtggaaaggataaagccttatgagggtgggttgagtagagaatgggaggtaaaaaacagagtaagagtgaaaatgcttcctttgagaggttgccctgtaaatataaattaaatggaagtagctggacggaaatacgggcttgaagaagtggttatggtttgtttttgctttggtttctttgtttttaaaactggaaaagacttctgcatgcttgatcattaatgaaatatgtagaacagtaaggcagaagttgaagatatggatcggagagsagataatcaagagatggctctaataaaaaaatactacagaagataacaaatgttggtgaggatgcagagaaattggaacccttctatactgttttcagaaatgcaaaatggcgcagtcattgtggaaaacagtatggagggtcttcaaaaacagaactaccatatgatccagcaattagacttccaaggaaaaaattgaggagc

SEQ ID NO: 568070 - DNA, 437 bp, Homo sapiens
actgtatgtggtaactgtctacaaattgcccctgaggactacaccctgacagtttacttagtcaccagctacagaggtctgaaagccaactttttgagcagacatgggagtaatttcataaatatacccaggagcactaccttacatgaaaggatgcaatgatgagagaatatatacaggcctgaatcacatggggaaaagccacagaacttagttattttatttattatattatatttattatattgacagctttggaagtgtgtgggctagttcttgtaggcaggtttctcaaccttcctgaataatctgtatktatatggagaactaggtgaaaattatgtgaagctagcagcaattgaagtcatctttcttgaataataaagttcatagaccaggaaaaggaaggagggaggagagaagaagataggtttcaa

SEQ ID NO: 568071 - DNA, 595 bp, Homo sapiens
ggtgagccagaaaatgtcagatctcccctctactcacccaattaggtaagcattttgatattcaaccattggctccatggtatctagtggagactggaccaatcagagaagcatcccagggcctcacaaagattataatgaaattctgctgagtgttgttcaagtgaaagagagatttctcctctgtgggggagagtgtctatcagataactagacagggaatgttcagccccacaaggcccttatactcaacacagagaaggaagttattctgtcatttccactgttgagggccagacatgtgttccctctcatgatcggggaggaagcacaacttagctatctagggtatgacaatctcttggcagttgcattgggagggaagtgggtgtatctgaagcccaggtagagtgcctgatctgagggaagaaccttaactcactgaatgacccrtagaataggacattaattaatgttgcaaaaaagagaattttaccaatagttattgtaaagccactgggctgcttttcaagacattgtctctttattttgtccacttatttcctacctttagaactttaaaaaaaatctcttc

SEQ ID NO: 568072 - DNA, 611 bp, Homo sapiens
tgggtgaggtgggaggatggggttatatctaatgcagttgtgargtcagagtcacttaaatccactagttctatccaaaatgattccccaggagtggataggtgctgtccctcagaccactgctacagatgcctgtctggtcaccttgctttcaatcatgttcactaaatccatcctctacacaacagactgtgatcttttaaatgaaatctcagtaacttcccctgacatttagaacaaaattgaaatgtcatctcatgttctacatgctccgcacaatacagctaggactcctttggccaggaaaacttaagaaactttcaaggcagagggtgtcagctttggatctatgtctatggccataattcaacaggtttgaccaggacacatgactagcaggattcccagcagcaactcttctgacaacttctctttctgcccgtttttcactctgactctgtatctagaatatctagtattataagtctctgataaactttatttgcattttctttctagttggaattgcccaaaggccttgcaccaggagcaaatactttgctcctaaagcagacattcagatctggaaaatctgaaagaggtataatttt

SEQ ID NO: 568073 - DNA, 611 bp, Homo sapiens
tgggtgaggtgggaggatggggttatatctaatgcagttgtgaagtcagagtcacttaaatccactagttctatccaaaatgattccccaggagtggataggtgctgtccctcagaccactgctacagatgcctgtctggtcaccttgctttcaatcatgttcactaaatccatcctctacacaacagactgtgatcttttaaatgaaatctcagtaacttcccctgacatttagaacaaaattgaaatktcatctcatgttctacatgctccgcacaatacagctaggactcctttggccaggaaaacttaagaaactttcaaggcagagggtgtcagctttggatctatgtctatggccataattcaacaggtttgaccaggacacatgactagcaggattcccagcagcaactcttctgacaacttctctttctgcccgtttttcactctgactctgtatctagaatatctagtattataagtctctgataaactttatttgcattttctttctagttggaattgcccaaaggccttgcaccaggagcaaatactttgctcctaaagcagacattcagatctggaaaatctgaaagaggtataatttt

SEQ ID NO: 568074 - DNA, 563 bp, Homo sapiens
acaattacataattgaaaaacattatattacaacttaagtaaattcagtaaagtcacagaaaacaaagtcaccaatcgatataaattyatctctgtagactagtatttagaattggaatagtaaattgaaatgtatgttgtcacttagaaaacatgaatatttaggaataattgtaatagaagatatgcaggagctatacactggagaaaaaacattgctgaaaaaacaaagtagatagaaataagttgagagataattcatgtaaatgcaatgaaggagtctatatttttaagatgtcgggcttttttcctcatttcaaaattcaactcaatctcattcaaaatcctaccaggtttttcattcggaaaaaattgacaagtttcctctaaaatctgtatggagatgtaaaggacctagaactaccaaattaaacctgaaaaagactcacaaatttggaggcttcaaactatctgatttcaagattcctgtaatgtgacagcaatcaaaataggttttggtagtaatgtaagaataaaaacagatcaatggaacaccataggga

SEQ ID NO: 568075 - DNA, 583 bp, Homo sapiens
atctttgttagttttatgcactgatgatctgtctaatactgtcagtgggctgttgaagtcccccattattattttgtggttatctaaatttcttcctaggtctaaaagaacttgatttgtgaatctgggtgctcctgttttgggtggatatgtatgtagagtagttagactttcttgttgaattgaaccttttactattatgtattgctcctatcttttttgattttttctttgtttaaaggctgttttgtctgaaattagactagcaatccccacttttttctgttttccatttgcttagtagatttycctccatccctttatttgagcctatgggtgtcactgcatgtgagatgggtctcttgaagactgcctatcattgggtcttgcttctttatccaatttgccactctgtgccttttaactgtgggacttatctcatttacattcatagttaatattgagatgtgtgaatttgatcctgtcatagtgtttttcgctggttattacgcagacttgattgtgtagttgctttataatttcaatggtctatgtacttaagtattttgtgtgtgtgtggctg

SEQ ID NO: 568076 - DNA, 557 bp, Homo sapiens
cttacaggcaagaccaccctgctctgtccagttctgacagttaccataaggctaaaatctcctagaggagcatggtgagccttgggggattggttttcctggacatgttccactgcatatgttcccatatcaaaccctgtgggctctgcacaggctggagtcctgccccctaccacctctctaaacaactctccctgccagatcaagtgactgtgagggtcatggggtctcctgctgccaagttaccacaggtccttggtgagagtgggtcactcctcacctgtttaactcatcccttcccccaggagtcactrggggctaggaatgagtccctgtgcatagcagccccatgcagatttcctagcttcctccttcagctcagcatctctgtcatctggccatccattccaatactttccctttgacgatctttgcagagtgcaccagtcttccagatgatgtattctctcagtgacagatgttccttttggctgcatctagttgaccatcttgaatcttgtctcatactctttaccatgatttctgcatatcatgac

SEQ ID NO: 568077 - DNA, 563 bp, Homo sapiens
tcctgctgccaagttaccacaggtccttggtgagagtgggtcactcctcacctgtttaactcatcccttcccccaggagtcactgggggctaggaatgagtccctgtgcatagcagccccatgcagatttcctagcttcctccttcagctcagcatctctgtcatctggccatccattccaatactttccctttgamgatctttgcagagtgcaccagtcttccagatgatgtattctctcagtgacagatgttccttttggctgcatctagttgaccatcttgaatcttgtctcatactctttaccatgatttctgcatatcatgacagaattttgatttattgctataaattaggtcataattgttttggatcagatattaaatcattggacaaataaaaccccaccaagtgataggggaaaatattaaaactcgctgcaacgtcttcctaaaaaaaccgcttaaatgccaggaatgctcaatgtaacttctgtaaatattttcttatcttatttagtactggttaatgctacttccagaaaataataacttaatttaatt

SEQ ID NO: 568078 - DNA, 542 bp, Homo sapiens
gaaattcaatggtctctatcatctactaactgctggccattggaaaattaaacatgcctctgaactcctrttttctaatctttgaactggttataacaacacatgccttcatttgtctaaattgtaaattaagtgaccaccttagttcaacatatgtggcatataaatcttccattttccctgctatttccctaagtcagaagtgagcaaagccaatctgtaagaaaacaaaaatgaaaagaataggttattttgattttttaatgtctggtgattatattgtttaattgaaattccatggaagcaactaagattatacttaaatacataatagcaagtgaataccaaatgaaaacatttttaaagccagaattttacactaaaaagatcaatttagtgttgtataaacataaacatgagcataaatacatcaagatccatggattgatcatttgattgaagatactgtctttctctgctgagaaaacagtttttttcctccttattctcttggttggttcaatatttaactctgatcatcc

SEQ ID NO: 568079 - DNA, 571 bp, Homo sapiens
ggtagtcttttgtgtcatttggtaagtaagttgaagtgattgcattcagtgtgaaatatactgcctctagaacccaaagagggctatcaggttgtgcttctttctcagcggtgtgagatgcaagaagcaataatttatactttattttggagctgatattctgtcatactcagaacattggactcctgaaatttccagttttgtgtctggttcctaaactcttgtagggtttccctcccaacctggagggcatgtgtctaaccaagtcttccaatctagtttctacttattgattatctggtgtgattaacataatsttattaatatagtggaacaacatgatgttaggcataatctctcagtagtaggcatcacgtgagactttattgtaccagatgacaagagaataaacatagccctggaggataaatatatatgtatactgttatttatcctgcataaatgcaatgtatttctggtactcatcattggtggggatggagaagagtacattttccagatcaataacctcctactatgtatctgaggcttttctcaatctattttagga

SEQ ID NO: 568080 - DNA, 444 bp, Homo sapiens
ttattgggagaaattcagctgagatacaccagcagcaatattccctgccgttggattaggggataccttagtcctaaarggccatctcaggggcacaccaccaatatatagtactaataacctaatactttctctacctgcttttcaggaaatttcatgtttagtagagaatagcaagaaggtgtaatagagaagaagaagcaaaatgtggttaatattaaaatagcttaactaatttccagaatagtgattgcttgttctgcatatcttaatgctaaagggaaagacagaatgtggtacagtacactgagtttttgaattctagaaacctaggtttaattccatgctagctactttgagcaagtaactttatatctatgtctcactttcttcctctgtataaaattgtactgatacctctcttgaagaattgggaaatttgcc

SEQ ID NO: 568081 - DNA, 447 bp, Homo sapiens
ttattgggagaaattcagctgagatacaccagcagcaatattccctgccgttggattaggggataccttagtcctaaaaggccatctcaggggcacaccaccaatatatagtactaataacctaatactttctctacctgcttttcaggaaatttcatgtttagtagagaatagcaagaaggtgtaatagagaagaagaagcaaaatgtggttaatattaaaatagcttaactaatttccagaatagtgattgcttgttctgcatatcttaatgctaaagggaaagayagaatgtggtacagtacactgagtttttgaattctagaaacctaggtttaattccatgctagctactttgagcaagtaactttatatctatgtctcactttcttcctctgtataaaattgtactgatacctctcttgaagaattgggaaatttgcctga

SEQ ID NO: 568082 - DNA, 391 bp, Homo sapiens
ggctaaaacagcaaatgtttcacctaatgtcatacaactcaaaattagcagagcgarttccagactatatcttcagctataaatattctttatgttgtaaggttttatggaaactgagacagatagaaagaagtcaattatgaaggcaagatggagaaagaagaaagatatgaactttgactcctttcagctgggacatttttcctgctcatacccagatcttggaatttgaaatgaaaaagattgtgtgtacataattgtggcaatttcaaaacatggacacacattcctcaatattccttccattaagaggtgagatctataccccgaactatggatgtatttatattagcttttaccaattgggtatggcagaggggcattatgtaac

SEQ ID NO: 568083 - DNA, 622 bp, Homo sapiens
taagtctaaaagtgctcagtacacagataatcaaaaaagaggtcttccctccttcttcacaaaggacaccctgatcctctcctactagcattgaagaaggaaagagttaactatgctgaaagagaagctgcaactgcagattccctgagtctgtgacagaaacctgcaccctcagcagcagctagtgttcaggaatcccctgcaccctctgtcaactccagaagccagatcaatacccgtatccattggatggaaatgtcatcttggcaatgagagggatcccagccaattctctatcagggccaccttcacctataggcaggatgagtgttcccttggactgaccatcacatgtgctctccaaccaggtagatttcagtactaagtggagtatgtagtataaaaaggcaaagagaccagagtttgaggtattttgggaagagcttagtatcatgtctgaaacctagtaaccctacttaaagaagaagayattgcttttacttaaaactctaccaacagagaagcatttctttaagttaaacacccccactcctgcccactgcacctccatgcacagtcattgatgccaatttccctgatagatgtactcattaagttacca

SEQ ID NO: 568084 - DNA, 602 bp, Homo sapiens
aacttcactaaactcccgtttccctacaaattttttaaaataataaaatggataaagatcatgaatgctataaaggcrttatgtcctaagattttgcaaaaccaaaaagccacaaaggaaaagactggcatatttgagtatataaagaataaaatgcttcgtatatcaaaaagcatcataaacaaataaaaaatataagcataaagtggagaaagatttgaaatacaaaacaaaccaatatgagctgaacaggaatagaagcagagaacgtgagccaccaattcttggaaaagaaatcataataagttataaacagatgaaatattatcaaactcagtggaaatcagcagaagttagtaaacaatgagatctagtattgtgtcattatatgtttatttaatgtaatgctgacagtggaacttaacatcaatctttccttctcatgttcatcttccctccagtattactaaaagtaatagctacaaacatgagggaaagaactcttacttggtaacacatgaggagaggtcagtttttaaaaagcaaatttctgacttttcaaagagcagtaagaatatgtatcagatttggcacaatttaga

SEQ ID NO: 568085 - DNA, 572 bp, Homo sapiens
agtgtggcattggtaaaggggtcaacaaatmcatcagcggaacagagtagagatcccagaaatagacccatacagtctagtatctattgactaatagatatttgacaaaggagtaatgacatttcaagagaaaaagaccagacttttcaataagtaatgttggaacaattggacatccacactcaaaaaaatgaatctaagtacagactttctacctttcacaaaagtcaactcaaaataaatcagaaacccaaatataaaataagaagctattcaactcctagaatataacaaagaagaaaatatagatgaccttgaatttggtgatgactttttagatatagtaacaaaagcatgatccatattaaaaatgcagtaagttggacttcattagtaatataacttctgatctgtgaaaggcacttttaagatagtgaaaagataaaccacggattagaagaaaatattttcaaaatgcatatctgataaaggaataatattcaaaataaataaagaactcttaaaacttaatggtaagccaaaaaaaaaaaaaaaaaaaaaacccacacaat

SEQ ID NO: 568086 - DNA, 509 bp, Homo sapiens
agtcaaagaatgtatggactgttttaaaatgaccacaggggccgggtgcagtggctcacccrccggggagaattacttgagcccaggaggtgaaagtagcagtgagccgagatcatgccactgcactccagcttggactatagagtgagactccatctcaaataaatagataaataaataaataaaatgaccacagggccactccggagggacaggtggggaacaaatatgagccaggaggcagggaggggaggaaagctttaccccatggccctgggactgtgcatgaggctggtggggacacagctggggacggcaggagacagagggtgccccgaactcctatggggacactggggctggacacagggaatgagtgagtgggggcagctaaggctgggggcctgccttaaattctgggttaaggcttgagtcagggaggggaacagctaaacccatggtcctctctcaaagaggtattagagggctgggcacagtggctcactgtg

SEQ ID NO: 568087 - DNA, 487 bp, Homo sapiens
tctatcacccaggctggaatgcagaagtgcgatctcagcttactgcaatctccacctccttggctcaagtgatcccacctcagcctccagagtagctggggctacagttggggccaccatgcctggctaatttttgtatttttagtagagacagggtttcaccatgttrcccaggctggtctagaactcctggcctcaaagccatccgaccacctccgccttccaaagtgctaggattacgggcttgagccactgcttgttttgtttttagagaccaggtttcctatgttgcccaggctggtctcgaaatcctggtcttaagcaatcccacaacctcatcctccaaagtgctgagattacaggcgtgagccaccataagagggtctctgttgcccaggtctcagcctcccaagtagctgagattccaggtgcaagccaccatgtcctgctgctacttgtattttttttacaggtgtgatccaccaca

SEQ ID NO: 568088 - DNA, 568 bp, Homo sapiens
ggtgggccaccatctttgctgtctgggtgacttagctgttccagcttcatgcttggagagcccaagccaactgggggcagagggggtacccctagcacagtacagctgttctaaaaaatgtggccaaactgcttctgtaagcaggtcccctgtgttgttcctcctgactgggtgagacctcacaactggggtctccagctacctcctaccgctgcattcaggctggcaacaggtccataactcccygggatgggactcccacaggaaggggtacactgccatctttgttgctttgtagccttcactggtgatacctccagatactgaaaaatccaaggccactagggactggagcagacccctagcaaaccatagcagcactacagaaaagtagccagattttaaaaataggaaaaaaaaaacaaaacagcaacctcaaatactgaaggtagataagcccacaaagatgagaaagaatcaacacaagaacactgaaaactcaaaaagccagagtgccctctttcctccaaatgactgtatcacctctccagcaagtgttcagaactgg

SEQ ID NO: 568089 - DNA, 625 bp, Homo sapiens
caccgtgttatacgtatcagatattgttcattttatttttttgattaaaaatttttctttccacagagtgaaaataattttttgttaaattttgccaaaccatatccataaccaacctatggttgcaataaaactgttatttgaccagyggagatgcgtcccaataaattaatactcctaataagttcattgtcattaaactgatatgtgatttgtcattccactattattaaattctacaaattatattaattaaggtaaaatctcttttagccttaacattaattgtaaatttatgtgattttatttttgtaatggctgtgtttaataacttgctcacaatgtttctgcaaattaaactgtcaggttttgtgagctagtaaaagctaggtccacactgctgcatgtagatcaccttacgaattggatccaagaaaaaagaaaaatcaaaaaaattcatttttatttttctttttttattcctatcttcgatatctctttattctcttatcttttcagttgtaataatattctgaagaataattttctatattttctatagaaaatgaaatttctatcattttcattctctacctatttctataatttgctttatcctcgtttt

SEQ ID NO: 568090 - DNA, 530 bp, Homo sapiens
caccacttaagagatgcaagggctcagatattttgaccatgtcctctcagtttctgataaaattgtttgtggatgtaccccaggaagggcttgatattaaatcaagaaagtcatgaaaagcaaactggcagataaaagaatgaatgtaatatagtaaagaacaatgaacccttactgtaatgtaataaaaaaaataatgcagatgacattggtgtagcaggccatgagaaaaactagttcacataggaataagaagttagaaggcttttggaggatgccttagggagcaagccaaaagtacttgccatgactgagaagccgagtatgctgaagaaacattttttaattagaaaaactcaaagccaattacaaattaggaaaaataaatgtgtaagaaataccaaggtcatttaccaacacamatgtatatgtatatctcacaattacggtatatattttcttaaatatatgtaatttaaaatgtacatgtaaaatacaatgtaaatttattttcttaaatacaatgtaaa

SEQ ID NO: 568091 - DNA, 610 bp, Homo sapiens
ggtatttgatgaatttaaaaatatttataatccgatacagtaattcaaactctaggaagtcaccattaaaaaaactgtaattgacttcaagaataagtttgtaattttattcattattattttatttagagtgaatatgcacttttattttcaaaactttctcaatatgtactataatatccattgctacccaaattataataagatttttaacaatgcaaatcagtttaatgcccaaatggagaaamttagttttaaaaattttaataattttttagagaatacaaagtagccactacaatagattaaaatatgaatataggctaaactattttttaatacatgtgtacatatacaatgaaaagcctagagagtctttttaaaagtgcaaaagtacaaattgtaattaattagtaatggtaaaataatagaaattaggcctttttcttttaccaatatgtattttctatttttttacaatccatgtttagtattttcttaaaagaaaacaactaataatttttagaaaaagagaaatagaagactttgaaaatattaatattataattaataggcttagtaatagtttatgaaaaataaactttgataa

SEQ ID NO: 568092 - DNA, 666 bp, Homo sapiens
tgtcacattttcttctagacttttagatttttatatattgaagagttcattcattttatataatctaaatttttaattaaatttgttttagaagtttggtgcaaaacaaggagacatgaaataaaataagcaatagaattattttaaaggaggaaatacactgttatactatttgaggaattagaaaactttaaagagcacttaggcttaacatccattttactttaatggattctgtaataaaacatagcaaggtatgaattttagtcaagcaatttacgaggcataagactttgggtaagttattttacctctgagcttttgtttcttcatcttcatcctggtgatgattgtagccccagtctcaaaagattcctgtaagagcaaataaaatagtaaatatccaaaatgctaaagatatttattcaataaagataaaaattaagagtttaaatattttgcttaatagctatgaacaggtagaaaatgcagtaagtcttcacttaatgtcactgataggtttttggaaactgtaactttaagagaaaaaacatatcatggaaccaatrttaccactgggtagttgatataaacaatagtttaatatctacagcatagttctggtcagaaaaatgttaccatactttttacaaacaccacaaatac

SEQ ID NO: 568093 - DNA, 614 bp, Homo sapiens
  misc_feature 371: n = A,T,C or G
tatttaggataattttgttctcttgatgaatggcttctttatcataatggaatgttcctccttaactctggacataatctttgtcctgaaacctactttgtgattaatatagctgctctacatttctttctattaggggtagtatagtatatctttctctattattttacttcttgcctatctgtggtttgatatttaaaaccagtttcttgtatacagcatatagctgggtcttgcttttttttttttttctttttcaratccaatctaatcatctatgctggttttggtagagtggtttagagtggttaaaatgtaatttaattaatattgtttctaggtttaaacttgtcatcttgttggtttctatntgtactatctgttctttattttccttttcctctattgataattgagtacttttttgacttcattttatctccataattggtttactaaataaatgctttgtttacttactttttagttattgctgcagggtttagaatatgtatttttaatatgtcacaatctcctttcagatgttataccatttcatttgtattttcattttctcccttgtgtgtgtgtgtgtgtgtgtgtgtgtgtgtgtg

SEQ ID NO: 568094 - DNA, 531 bp, Homo sapiens
acaagcatggacttgggaggccatatggttgggacagtggggaaggtatctagtgctagttggaacacttagcttgtcttttccccaaggcccgggtgctggtgggagagatgaggaagagaatgagtcatagcaaggctgaggtaagaggccccacagttgtccttggagaagccaaatatgttcaggtcagaagatggataacacatttttcttttatttatttatttattatattttaagttctgtgatacatgtgcagaatgtgcaggtttgttacataggtatacacgtgccatggtggtggtttgctgcacccatcaacccatcatctacattagatatttctcctaatgctatccctcccctagccccccaccccccaacaggcccctccctgtgtccatgtgttctcattgttcaaygcacaattatgagtgagaagatgccatgtttggttatctgttcctatgttagtttgctgagaatgatggtttctagcttcatccatgtccctgcaaaggacatgaa

SEQ ID NO: 568095 - DNA, 349 bp, Homo sapiens
  misc_feature 302: n = A,T,C or G
atcactattctgagcctccaattttatgtggtacatgagagaaaggctggatcagaggcacaaagcatcaagaagacaataataccttctgtgtcatatatttaaaagtaaaaacaacataaaattaaaaagaaatatatgtagtaaattctgataaagttttgaattttcatttagtgactatttcaatgtcttttttgaaaatcaaatatcaaaatttttagtttttgttcaatgccctaatttactrgtgtccaaaacatatctttaaaggttaattggatagtccatcactgtatggnggctatattaatatactttacaataccagaaactatatatataaaac

SEQ ID NO: 568096 - DNA, 450 bp, Homo sapiens
taaacttgatatatatgtaaacttaataacattttcttcataacacttcctggaaggttgtgtgaggataaatttttttttaattttaaaaacaatttaaacaaatttaatttaaaatttaaaaaaattgttgtagagatggggtctcagtatgttccccaggctggtctcagactcctggcctcaagcaatcctccctcttttggcctcccaaagtgctgggattacaggtgtgagccattgtgcccatccagtatagtagattctatatgtatgtgcgtgtgtgtgtgtgtatatatatatatatatatatatatatatatrtgtgtgtgtgtgtgtgtgtgtgtgtgtgtgtatatatgtgtgtatatatatatatacacacacattaaaagtatatttatatattatttgctataatatataaatatatgcttacaatatacttac

SEQ ID NO: 568097 - DNA, 603 bp, Homo sapiens
tcttgtctggccaggcatggtggctcaygcctgtaatcccagcactttgggaggctgaggcgggtggatcacctgaggtcaggagttccagaccagcctggctaacatggtgaaaccccgtctctatgaaaaatacaaaaattagccaggtgtagtagcaggtgcctgtaatccagctacttggtaggctgaggcagaagaatccgcttgaactcaggaggcggaagttacagtgagctgagatcacaccactgtattccagcctggggaataagagagaaactccatctcaattaaaacaaacaaaaaaaaggcatcttgttatatttccttccaagtttttgttgcaagcaattctttttccatagttatatatatgttacatagatatagacagacagaaatcttaactccatatcttaagcatgtttccatgtttcttcactgttctagtgcagatagcacatggtaagtgtttaataaatatttacttgaatgagccaacacagtacagtcaaacctgtacctttgaaaattgcttatataaagaatttttttttttgagatggagtctcgctcttgttgcccaggctggagtgcaat

SEQ ID NO: 568098 - DNA, 603 bp, Homo sapiens
tcttgtctggccaggcatggtggctcacgcctgtaatcccagcactttgggaggctgaggcgggtggatcacctgaggtcaggagttccagaccagcctggctaacatggtgaaaccccgtctctatgaaaaatacaaaaattagccaggtgtagtagcaggtgcctgtaatccagctacttggtaggctgaggcagaagaatccgcttgaactcaggaggcggaagttacagtgagctgagatcacaccactgtattccagcctggggaataagagagaaactccatctcaattaaaacaaacaaaaaaaaggcatcttgttatatttccttccaagtttttgttgcaagcaattctttttccatagttatatatatgttacatagatayagacagacagaaatcttaactccatatcttaagcatgtttccatgtttcttcactgttctagtgcagatagcacatggtaagtgtttaataaatatttacttgaatgagccaacacagtacagtcaaacctgtacctttgaaaattgcttatataaagaatttttttttttgagatggagtctcgctcttgttgcccaggctggagtgcaat

SEQ ID NO: 568099 - DNA, 594 bp, Homo sapiens
atctgtaatattacgtgaagcctttaacatctcagaacctccttaggaggaagaaaggtcatgtatgattatcttgttttgatgggtgaaaatctaactttcaggatttctctcctaataagtggcaaaactacaatttcaaccttgatcttctcactcaaaatgtaggccttaatttattccatcacttgacttctcaaagcattagctttcctttctgctttgacaggttcagtaccaaactaagtgaaaaaggaagccttggaatctggaaagtttataagcaaatgacctctgtggacactgttaactgtttgtgtcaaggcaaatttaagatattgaaagtctgaagacaactgcttttgactttattttctttttgaagttttatttttcaatgacttcctccttaatcacttttttcctattaaaatagattcatcttttatctaggataaragctaagggagattttatggcatcagagtcttaatttgagtgcattaaaaaatgagtggaagctcatggtccctcctgtaaaagaaattgcaccttttattagcaggttgagtctcttctctggactgtaaaatg

SEQ ID NO: 568100 - DNA, 508 bp, Homo sapiens
agcatattagagaaactgaagataaatatgtcactcaggtttgaacaacagggtttagaatccatctttgttttagtagacaggttaaaactgattacaggttcagtagaaaaactcaaggaggaaacaaccttgagaagcaagctatagcattggttcaacaaggggccacttgcagtatcagggagacaccctacaactagaaaacaaccacacataaaacatttccccagacaaaccagatccttccttgatactatttgccagaaaaggagataaataaaagaggcagaaatttgttccttcaatctcacgtaatctaattggaagaaaataaacacagccaggacctatgtgacctatgtgggagttaatttgggaaayagagtttttagctctccaacctttggcatgggtgctgagccagaccaccacatcctccacagaaaaggagaccatgaccttcaagcagacaggagccaaatcatactagagttttgcaaactgt

SEQ ID NO: 568101 - DNA, 431 bp, Homo sapiens
tttatctgagctcagaagtaatgccagaaaatgttaagcatgtactttttaagaacatataaggattttaattgtcctattaccatgctatttcaagtgaactagaagtatttcacagtagtcttgaattayaaggttgagatgtatgtatcaggacctcaacttaatgtaaagtaaatgaggaggttacctggcagactttttctttttaacttttattttaggttcaggagcacatgtgtaggtttgttaaataggtaaacttgtgtcatgggggtttgttgtacagattatttcatcacccaggtactaagcctcttacccagtagttattttttcctggcagatttttaaaaataactggtttaatccataatcccataaaaaacatagcttcacttcaatatttactttatctgtccattcaacaa

SEQ ID NO: 568102 - DNA, 562 bp, Homo sapiens
atataccaatttcagtatagtgtttgcaagggagagactgagaaggggaacaaaagggaattcaattttgtaactcttcaactctggaatgttctcgttccatttttttttatgtaaaaaataagaaacaaatgacaaaatgttgatgcttcttaatttctagtgttgggcatatagatatgtgtgttttactttctctttttatgtttaatttagcttgttcaaaattgaagagaaaaatattcatttagaatagaggagtacagcagagtggttatgaagatgagcttcaaagatagaccagggttgaatttcaattctgccaacctaaatgctattaaagtgaagcaggtctccatcctgccggatttatcagtgtctttaatatgctgatctgagttgtgagcctttaggataagaatataacattcagaatttctcaaacttatttgaccaaggaatgagcattctttggggcagtacggtaaaaggtgcctttacagataatatgtatttacagggtaatttgaatgatcwattgtctttaggcttgaaaaggtct

SEQ ID NO: 568103 - DNA, 540 bp, Homo sapiens
ctcggtcacctttgaagctagcacctctcagagcccaaggctcacagtgtactccctgggtattactggtggttattcagggctcacaggctctttagtcaacaggtgatgaaacttaccaggactgcatccttctcttcaaggcaaaagattcctgtttggctcaggatgtgtctagaaatgttgtctgggacctagggcctggaatggggaactcacaactctgcctcgtgcccagttctactgtggctcagctggtatttaagatgcaagacaatgtcctctttactctcctctgctcaagcagaaagaaggagtactttaatttctgcaagacacactgcttggggttgggagagggatagtgcaagcatgcccttaactgtgccagctggtgtcttccctagttcatgtgccaccctaggtcattagctctaagcccagtttagcactaggagttgcctaggaattacagcccttgtgtcctaaactgcrtttcaagtttactgcctttcaagaccacttcagcttgtggtagtg

SEQ ID NO: 568104 - DNA, 597 bp, Homo sapiens
ttatttagcaagttggatattggctagwattataaatgagggtataatacagtattaataacataaatcaaccttcccatttggtcatctaactacacacagtctgttgctttctattcaataacatcaaaaaaggaaaactttgaccagagatatgctgttctgtcacttgctaatctcatcgtcctctccctcatattgtctcccctcttctacacagaaacacatgaacacccatatacttacacacacacacacacacacacacgagtgtggggcttaatgctgtggattctgacatcaaacttacatcggtttttagccaactgtataatttaagtgtgcagcttcaggtaagttaataacccctctaagccttgtttcttcatttgaaaaacaaagataggaatcatatgtattctcaataagtggaaagtccttgtgttgcagttattgcttttgttattatagtgcttttaggcaaaacagtagttttggtatttttaagtgctcataatttatcctcaataatcaaaaattttattcccagtctcaatcagataaaaatgccttgttaaaagaagactgctgtaacag

SEQ ID NO: 568105 - DNA, 586 bp, Homo sapiens
atgagatgtgggggtcagagaaagggaagaggcctttgggatttttgcatcagcaactgggtgccttgtggtttctttgacttagatggygaaggctggggcatgccagtattgagatgccaatgagatttctgaagggagctgttaatagcaagctggatgtataagtgtcgagctcagggaagagggtggtgtgagagatataaatttggaagtcattagcatatagatggtatttaaagcctagggaatgaagataggctctacagtgcaattcacagtgaagatcttcacatcatgactcttttagcaacaaagagcataaacatcactgaagcatgttctgtgtgtggggctcttgtcaagtctcttgatttctctaagtatttgttagcctatcaggaaaataagtggtaagcacacacattcaagccataccctcaatgcctgaaggaccacactgtagttctctaatttcatagaaggtgaagtcatatattttgttttctgcaaaaggatgccactttaagatcttcagagaaatgcaaaaattgactagggcagtttagaattcatcaaattgcac

SEQ ID NO: 568106 - DNA, 350 bp, Homo sapiens
agaccgggaacagaagcccttccctccatggagtgagacttgagccagcgggggtgtgagagggctgggaggtgggtgggktaagagaggaggctaagagagaatgggagaaagaaaacatcctggaggactagctcctttctaaggctcacaaatgcaagtgcttgcagaggcctagctggaagcataaaaaaggtgaaggctaaatatacatcaggagtacccagttccacaaatacatctgccctctcccatttcctgaaatcaccagcacctcttttatattttcagacttgcatttctctggcgacattgactcagcacttttctcttctacaaggataataact

SEQ ID NO: 568107 - DNA, 289 bp, Homo sapiens
ccctcggtttccaagccctcccttccagcaagctgcccagctgcccctccctttcctcccggagtgcgggcctgagtcctgtagggctgccctcgctggctgcctgttggtcmcctggaccagttttgcctcggactaggagttccagaggcctaggccaggagttctctctctgggaccctttccctgagagaggaccgtgtggagtcaggaatggagttggatggcacgcccttcccagagggggagacccaggctctctcagatgctgatgcggatgcagatgctg

SEQ ID NO: 568108 - DNA, 494 bp, Homo sapiens
ctgagatgggcaacagggaaggtctctgtgaggaggagacatttgagctgagacttgaaagatgaggaagagccagatataggggttggggtgaggatttcacatgggatcaaggtccctgaggcctgtgggctgtggcagccctctctgtggaaggcactgagcctgtgcctgctggggaagggaggccagggcaggagagatggctcagccctgggggattctgagtttaagtctgaaatttgagcctgagtgtgtggggatctgagttctgggttgagctcctgccccagctgtcttctctcctcccctccctaggggagagccagcagggctyactcaggctccgaagaagcactgtcttgtcacggccagcagagggcagaggttgctgtggtgcaggctggcagggcaggagctgacctttccggaatggaatgctgcctgagcagtcagctccagaagggaagggggcgttgggccacttccctcac

SEQ ID NO: 568109 - DNA, 575 bp, Homo sapiens
ccagtgccaaagcccccagtgaggccatggtagcaggggcttgccgtgatgcagcagccaccagaccagggcccggagggcaagatgcagctgagggtggggtcataaccatatctctgagtggctgcacaggacctggatttgcagactccgctcrggagcctaggcaagacaatctacaagtcatggcgactctctgctggaggacatgaagccagaggaagaagaggactctgacctttccctcactgctagcaccttttataaacccaggcacctgggtctgtctgcctccccatgtggagaggccatattgtcacttttatgagcttgggaaatttcacagtcatttctcctccctcctggggtaacatcatcaatatggggctttggaaaatcctacactcaggcaattctgaaacattggcagcatttcttccacagctgagggctgatggtgtccaggagtcaaggtcagccaaaacctgtggactccacactttgtgaagtaattgtggagccagggggaagccaggttgggacacttcctttcaggtggttagctgagctcacaa

SEQ ID NO: 568110 - DNA, 575 bp, Homo sapiens
ccagtgccaaagcccccagtgaggccatggtagcaggggcttgccgtgatgcagcagccaccagaccagggcccggagggcaagatgcagctgagggtggggtcataaccatatctctgagtggctgcacaggacctggatttgcagactccgctcaggagcctaggcaagacaatctacaagtcatggcgactctctgctggaggacatgaagccagaggaagaagaggactctgacctttccctcactgctagcaccttttataaacccaggcacctgggtctgtctgcctccccatgtggagaggccatattgtcacttttatgagcttgggaaatttcacagtcatttctcctccctcctggggtaacatcatcaatatggggctttggaaaatcctacactcaggcaattctgaaacrttggcagcatttcttccacagctgagggctgatggtgtccaggagtcaaggtcagccaaaacctgtggactccacactttgtgaagtaattgtggagccagggggaagccaggttgggacacttcctttcaggtggttagctgagctcacaa

SEQ ID NO: 568111 - DNA, 569 bp, Homo sapiens
atggctgatattttatataatgttaggcggtgccggcccatmatattaaataacattgaaacacgtggtaagaaaatacatcttctttaatgtctgtttcaatccttaagattaggtgggaaaaaaatatcactggatgctaatgtttttagcatctctctaatacttgcttccctcctgcttctaataaagagagcaagccccggcttcagaactgtctaggacaactgtttctactagaatttaatgatctgtaatttccctttatgtatgcctagtaatgatggttttgcatctctggtggccatatgaagttactcttttaaccccatacgtgtaaatgttaattgaatccacttatagataaattaggagtaaaatagtatatgggatggcaaaatcctgaagtcagccttgggtgtacacagaagagaaaggaggcagagagagggtgaggggctggcccaagggcccacagagagtgggtgccagaacagggttccaagcccaggccctctccaactctccagcccctgggctagaaggtccacagcttgggatcccagctg

SEQ ID NO: 568112 - DNA, 509 bp, Homo sapiens
cccctggcgaggaagagagcctcccctcccctcacccattgtcttttggggtgagggggcagcacggggaggctactggggagcatggaagggcctggaaggagggacagagatggtgagtcactagctaaaggccacacgtggaggctggaggaagctcgtgtctgagccccatggggacagctctgttgccggctctccacagcctttccgtcttgtcttgggcttcttgcccaggccctgctgtcagtacctgctccctgagccagtgcctggcgcacacagccatgagatcatggggcggggtaaattggcaggccccygatctcccctggagctgtggcaggtgcatgttggagctctgggcttggcgcctccgtaatctccctcctggccccttgcagggaggtggctcctccaaccagccagttctgccttttccacctaagtccccagactccaataaaggtggaacattggcccaatccatggcatgaattcttgagatt

SEQ ID NO: 568113 - DNA, 509 bp, Homo sapiens
cccctggcgaggaagagagcctcccctcccctcacccattgtcttttggggtgagggggcagcacggggaggctactggggagcatggaagggcctggaaggagggacagagatggtgagtcactagctaaaggccacacgtggaggctggaggaagctcgtgtctgagccccatggggacagctctgttgccggctctccacagcctttccgtcttgtcttgggcttcttgcccaggccctgctgtcagtacctgctccctgagccagtgcctggcgcacacagccatgagatcatggggcggggtaaattggcaggcccccgatctcccctggagctgtggcaggtgcatgttggagctctgggcttggcgcctcygtaatctccctcctggccccttgcagggaggtggctcctccaaccagccagttctgccttttccacctaagtccccagactccaataaaggtggaacattggcccaatccatggcatgaattcttgagatt

SEQ ID NO: 568114 - DNA, 475 bp, Homo sapiens
tgcagcatggtaactatgatgcaggtgggcctcagataacaccccaggtgaagatggtgtctgagcctcttccagctgcactttctcaagcttaaactcctacggacaggcctcacttttactcattcctgaatctccaagggcccagctcccaggggcaagttgcaattctgtggtttggcctggaacaccaactgctcagtgtattgaagagaatcttaaagggcatgtagacaagacccctaagatacttctaaggcgttccaagcttgcacatctgcaggaacagagagctcatgctggctcgaggcagctcattgcattcattcagcaaacatttcaggccagccaagcaacacctttgtgatgaaaatgttctggcttgaatagagcactccttattcagtgttgaaatctccctctataayctccatcctttgctcttagttctaacccctagaggcctagaaatgag

SEQ ID NO: 568115 - DNA, 646 bp, Homo sapiens
tttgtttgttcatcttcattcttgtctctctaaacttctcttctcgctttatttcattaacttgatcttcaatcactgataccctttcttccagttgatcaaattggctattgaagcttgtgcatgtgtcatgaagttstcatgccatggttttcagctccatcaggtcatttcaggtcttctctacactgtttatgctagttagccagtcatctaatcttcttccttgcgatgggtttgaacatcctcctttagcttggagaagtttgttattaccgaccttctgaagcctacttctgtcaactcgtcaaagtcattctccatcctgctttgttccattgctggcgaggagctatgatcctttggaggagaagaggcgctctgatttttagaattttcggtttttcttctctggtttctccccatctttgtgatttttatctacctttggtctctgatgttggtgtcctacagagggggttttgtgtagatgaactttttgttgatgttgatgctattcctttctctttgttagttttccttctgacagtcaggtccctcagctgcaggtctgttggagtttgctggagttccactccagactccgtttgcctgggtatcaccagtggaggctacagaacagcaa

SEQ ID NO: 568116 - DNA, 646 bp, Homo sapiens
tttgtttgttcatcttcattcttgtctctctaaacttctcttctcgctttatttcattaacttgatcttcaatcactgataccctttcttccagttgatcaaattggctattgaagcttgtgcatgtgtcatgaagttctcatgccatggttttcagctccatcrggtcatttcaggtcttctctacactgtttatgctagttagccagtcatctaatcttcttccttgcgatgggtttgaacatcctcctttagcttggagaagtttgttattaccgaccttctgaagcctacttctgtcaactcgtcaaagtcattctccatcctgctttgttccattgctggcgaggagctatgatcctttggaggagaagaggcgctctgatttttagaattttcggtttttcttctctggtttctccccatctttgtgatttttatctacctttggtctctgatgttggtgtcctacagagggggttttgtgtagatgaactttttgttgatgttgatgctattcctttctctttgttagttttccttctgacagtcaggtccctcagctgcaggtctgttggagtttgctggagttccactccagactccgtttgcctgggtatcaccagtggaggctacagaacagcaa

SEQ ID NO: 568117 - DNA, 646 bp, Homo sapiens
tttgtttgttcatcttcattcttgtctctctaaacttctcttctcgctttatttcattaacttgatcttcaatcactgataccctttcttccagttgatcaaattggctattgaagcttgtgcatgtgtcatgaagttctcatgccatggttttcagctccatcaggtcatttcaggtcttctctacactgtttatgctagttagccagtcatcwaatcttcttccttgcgatgggtttgaacatcctcctttagcttggagaagtttgttattaccgaccttctgaagcctacttctgtcaactcgtcaaagtcattctccatcctgctttgttccattgctggcgaggagctatgatcctttggaggagaagaggcgctctgatttttagaattttcggtttttcttctctggtttctccccatctttgtgatttttatctacctttggtctctgatgttggtgtcctacagagggggttttgtgtagatgaactttttgttgatgttgatgctattcctttctctttgttagttttccttctgacagtcaggtccctcagctgcaggtctgttggagtttgctggagttccactccagactccgtttgcctgggtatcaccagtggaggctacagaacagcaa

SEQ ID NO: 568118 - DNA, 646 bp, Homo sapiens
tttgtttgttcatcttcattcttgtctctctaaacttctcttctcgctttatttcattaacttgatcttcaatcactgataccctttcttccagttgatcaaattggctattgaagcttgtgcatgtgtcatgaagttctcatgccatggttttcagctccatcaggtcatttcaggtcttctctacactgtttatgctagttagccagtcatctaatcttcttccttgcgatgggtttgaacatcctcctttagcttggagaagtttgttattaccgaccttctgaagcctacttctgtcaactcgtcaaagtcattctccatcctgctttgttccattgctggcgaggagctatgatcctttggaggagaagaggcgctctgatttttagaattttcrgtttttcttctctggtttctccccatctttgtgatttttatctacctttggtctctgatgttggtgtcctacagagggggttttgtgtagatgaactttttgttgatgttgatgctattcctttctctttgttagttttccttctgacagtcaggtccctcagctgcaggtctgttggagtttgctggagttccactccagactccgtttgcctgggtatcaccagtggaggctacagaacagcaa

SEQ ID NO: 568119 - DNA, 571 bp, Homo sapiens
ggtggttattgcataagtttagtctatcatatatgtgttgcacttatttttcctaataaatcatttgtgtcttgattttgtatttgctatcaacaattgtttaaatgtttgatttgtatatagtcaagcatgcctatctttttctttgtggcttctgggtttcttcttttgctttcagaatgttcactattacaatgaaactgcaacaaacattctagactacacctccaattgtttccttggactgaattcctaaaagttatattagcaaattaatgagctagaacatttttaagattcttaatgatgttgccaaatttttctcgagataaactgtggttgtggccttttaaatccatctagcagagtgtattagtccaatctcacactgctgtaaagatactacccgagactgggtaatttataaaggagagaggtttaattgactcacagttccccatggctgtggaggcctcaggaaagttacaattgtggcagaaggcgaaggggaaagcaagrcaccttcttcacacgctggcaggagaaagaagagtacgtggaggaatttgcc

SEQ ID NO: 568120 - DNA, 571 bp, Homo sapiens
ggtggttattgcataagtttagtctatcatatatgtgttgcacttatttttcctaataaatcatttgtgtcttgattttgtatttgctatcaacaattgtttaaatgtttgatttgtatatagtcaagcatgcctatctttttctttgtggcttctgggtttcttcttttgctttcagaatgttcactattacaatgaaactgcaacaaacattctagactacacctccaattgtttccttggactgaattcctaaaagttatattagcaaattaatgagctagaacatttttaagattcttaatgatgttgccaaatttttctcgagataaactgtggttgtggccttttaaatccatctagcagagtgtattagtccaatctcacactgctgtaaagatactacccgagactgggtaatttataaaggagagaggtttaattgactcacagttccccatggctgtggaggcctcaggaaagttacaattgtggcagaaggcgaaggggaaagcaagacaycttcttcacacgctggcaggagaaagaagagtacgtggaggaatttgcc

SEQ ID NO: 568121 - DNA, 512 bp, Homo sapiens
ctgagccttacaagtcctggtaagcaggaaacacctttggaggtagaaaaagctttagtacttttcttctcagtggactccagctgtttgtggtttgagcccacagggcaccagggcacccacagagataatggtcaggctcccaagccccagctgacaccacgactaggaattatcccaatagtttaccaactgatcaagcgcataataaattargaaaatgtttagccaggagtgataagaaaatctaaaatacttctctgttcagatttaattttccaagcaataaagtttctaatattaacaaaggtggtggagcttctaaattatttttttaatcttttttaatttctttgaatatctcattccaatgactaatcaggagatggcaccaaaatagcaggtgagttgaattgttcccatcagcattacaaagccaacattttaaggattcagtccttttggatttaatttcctaattagcttttttaaagagaagtacaaaggttcaa

SEQ ID NO: 568122 - DNA, 509 bp, Homo sapiens
ttcaagaccagcctgaccaacagggagaaaccccgtctctactcaaaatacaaaaaaactagccaggcgtcatggtgcatgcctgtaatcccagctactcgggagtctgagacaggacagtcgcttgaacctgggaggcagaggttgcagtgagccgaggtcgcgccattgcactccagcctgggcaacaagagtgaaaccctgtttcaaaaaaaaaagaaagaaagaaagaaagaaagaaagaaaaaaagaaaaataagaaataagttgctttttaatctgaaaaattttaaataaaaattatttaaatttatttaaattttattttattaaatttaaataaatgtcaatttttagagagaataataacaatagctattgcatattaagaacttgctatgtattatatgttttatwtcatctcattttatccacttgaaaacacagtgcctaagctattttctttacattagggtacacttatacttgtcaatttagtcttatgaaga

SEQ ID NO: 568123 - DNA, 551 bp, Homo sapiens
aaacttcacatgttctgtcacttatttatgggagttaaaaattaaaataattgaactcatggagaatgagagtagaaggatggttaccagagggcggaaagggtagtggaaggagaggggagaatgggaaaggttaatgggtagaaaaaaaatcattagaaagaatgaataagaactagtatgtgctagctcaacagagtgactacagtcaataataatttaattgtacattttgaaataactaaaataatacttgaattgtttgtaaaacaaaggataaattcttgaggtgatggatacctcatttaccctaatgtgattattacacatcatgtgcctgtaccaaaatatctcatataacccattaatatgtgtatctactatgtatcgacaaaaattaaaaataaaaataatgtgcattctgctgctattgaataaaatgtactgtatatatctgttaggtccatttggcataaaggatagtttatgtccaatatttcctyattgattttgtgtctggaggagctatcctttgttgaaagcagaatatt

SEQ ID NO: 568124 - DNA, 485 bp, Homo sapiens
ggaaaaacacccataaataataaatcttgctaagaatttagtatataattttcagtcagatctgcagatgacactcctttccatagtttgggaatcagagtttaaaaatgcatgcagagaaatagtttaaaacgggggaaaagtcattataaaatataaacaaaaatttaaagcatgttaaaactgagcacattctgagctatatttcagtactagyaggtttatttctgttgatttggtgacgtgtaaattgtgtatgtaagatgagtaagagattttatgaaaaatttataagtaaatatataaacatgtgaagcttggaatgaaacttacaaactataacttgagctattttttaattgagctatatttatataacaatattacaagctactactataagaagtgcttatttatttatgtgtttgctcttctacagaattctctaatgtttactaacagattcatggcaaaaaaaaaaagtt

SEQ ID NO: 568125 - DNA, 485 bp, Homo sapiens
ggaaaaacacccataaataataaatcttgctaagaatttagtatataattttcagtcagatctgcagatgacactcctttccatagtttgggaatcagagtttaaaaatgcatgcagagaaatagtttaaaacgggggaaaagtcattataaaatataaacaaaaatttaaagcatgttaaaactgagcacattctgagctatatttcagtactagtaggtttatttctgttgatttggtgaygtgtaaattgtgtatgtaagatgagtaagagattttatgaaaaatttataagtaaatatataaacatgtgaagcttggaatgaaacttacaaactataacttgagctattttttaattgagctatatttatataacaatattacaagctactactataagaagtgcttatttatttatgtgtttgctcttctacagaattctctaatgtttactaacagattcatggcaaaaaaaaaaagtt

SEQ ID NO: 568126 - DNA, 485 bp, Homo sapiens
ggaaaaacacccataaataataaatcttgctaagaatttagtatataattttcagtcagatctgcagatgacactcctttccatagtttgggaatcagagtttaaaaatgcatgcagagaaatagtttaaaacgggggaaaagtcattataaaatataaacaaaaatttaaagcatgttaaaactgagcacattctgagctatatttcagtactagtaggtttatttctgttgatttggtgacgtgtaaattgtgtatgtaagatgagtaagagattttatgaaaaatttataagtaaatatataaacatgtgaagcttggaatgaaacttacaaactataacttgagctattttttaattgagytatatttatataacaatattacaagctactactataagaagtgcttatttatttatgtgtttgctcttctacagaattctctaatgtttactaacagattcatggcaaaaaaaaaaagtt

SEQ ID NO: 568127 - DNA, 560 bp, Homo sapiens
ttcaccagttcttcttccttggcaaagaaattcctccttaaatgcaacagaastctactttattggtgtagctattccttgatcctaattattttatgtttctttaatcctaattttaatctcagcagtatgttggccaacaatttctgggtacgaatcattatcacaccctcagaggcatgtacaataaccattaatttctcacttacgaaggtatgggctagctgggaaggctctggaacatgctgaagggtggtgggaggtagctgtgttccatgtttctcaccttatctgggaccagtgggccaagtgggctaggttattacagtgatagcagaagtataggagaatgagtggaaacatgagatgttccttatggggccagaactggcactctataacatctacctacatctcattggccaaagcaagccacacatctaatcccaaggtaaaggggaaggaaagtgcatgctgcctgttataaggctatgacaaaatggatgcaacggggcaagaattgcagcgaaatattcaaccaaccacagaagttacaaatt

SEQ ID NO: 568128 - DNA, 634 bp, Homo sapiens
agctatttattctgtgttaatgggcacagagctagggattgagtctacagggttaaggtgctcccagtttcatggtaaaaatagcaagagactgtggattatggacatggcagccctgtgactgatgacccatagatgcagaaagcagaatgctccagactctgtccatgagaggaaggccatgcctagaaaagcccatgggcacccacagctttgtcacagtgctaactgcatgattctcagtgtgctttcaggcacccccaagtgcttcatgccactgctccagaaatgggaagtggttggccttgctgttggaactagatgagacctttaagacaagaatctctaaggggattccctgagaccaaaaccagacatttcatgtaatcatgatcagctatttctcactctctatcagaccagtgaaaatgaacaaagtggatgaagggaatcaaataagcctgaacttaatacaatggagttgtattgaggcagaggctgccctaagacccaatacaacagagatctcccactcactttgtgtttcgcctcttcagaaagctctcttagctgaagatatatacaaacacatacacacaggcactactcayatacactcagacacatacatcca

SEQ ID NO: 568129 - DNA, 455 bp, Homo sapiens
gaatgaaataacatttttaaatatcataaaatggttggcctattgcaattgatcaataaatattattgtcatttaagtagacaaaggaggtaagagggtccagaaaactttgttttgccacgagtctgctaagcaatcaatcagaaggaatgttcagatgagatcccttgaaaacattcttctccrtctacctgccacctcctggcagctggtgtccaggtgagtgagcttctgatgccctggacgctgcacacagtgttgggtgacacagtgaagcagatgagatgcacccatggcctctctgggaacaagagattaaaggggtcctttcttaagaccactctctctgagtgagggtctgagaggacagaagtggtggatgagggagtaaagataagaatgggaacggacaaatagtgggagacttatgtgcccacaaacagctaaatcatcat

SEQ ID NO: 568130 - DNA, 588 bp, Homo sapiens
aatgactaaattttatcttaaaacttatgctgctatctaggatcaatgttacttcacacagtggtacattccaaagcactgacacctgtgaaacatacagtgttagtgaagtacggaacatcaatgtacttagaatctagaaaaaaaaattgctcatgtttcccagctgcaaattatctggatggcatagatgcttttatctagtgctacacttaggatatttacttaaatattggcaatgataaaatggtgggtaaaaaaattacacattcatcaaaagtaggcaggctgatagaaatgcataaacatggtactcctctcaaaattaaattaccatatgtacatggtttgacttgtcatttatgtacttgtatatttatatacccatcatccttaatcaccyacaagaatgaatgagtgcatttaagaacaaatgtttgcaacataagctaatagttaattgaaaatttcttcttggaggaaaaggctgagacaagactggaaaagacaaacactttttagaagaacagtaacactcactgatcccatacagtctgattttagctcaatctaaagaaaattcctggt

SEQ ID NO: 568131 - DNA, 529 bp, Homo sapiens
tgaataactgataattgctaatattattttactagaccagtggccaacaatcttttcctgtaaatgaccaggtataaaaaatattttagactttgcagagtagactgtccctgtcacagaaactcaatgctgccattgtagtgtgaacacagtcatagacaattaataagcaaataggtatggctgtgctgcaataaaactttatttacaaaaagaggtggcagatktgaagtggcccttggtttgtagtttgctgacctctgcattctatggtctgagcagtgtgaatctgaaaggtgctaagccatattaacaggctgaaaatgttcttgaacttcctaggcagatctcatctcttcattcctttccagcgttaaggaatgagcaatattttcctggcagagacagtgtgcttgcaggggaatctgttctcggagtttgtgtttgtttgtaatatttctttaacaagtgtgagtggtgagagcccttcctcccacatattttccttctaactccttgtttcctggta

SEQ ID NO: 568132 - DNA, 412 bp, Homo sapiens
tgtgctgaaaaatatattaaaaagatggtcctttaaaaaaatgtggtggggtcttggaaaaagaacaaggtaaaaatattatattttatatgttaaagagaatgaaccaaatgtgctttggggtgtagcggaagagagaacatcagtagtttttttagtgtttactgtttctcawttatctaaaaggggcctgagacaccacagttgatggttcatccagaaccacatgggatgggtaactgtggctccccatgggaacatcaaggggctgttaacacaagaaggaggaaggatgatagagatgtaaaaactgcattgggtttaggtaaatacgaggtggctgcccaatctcacttttttgaacatctgtttgctctcctgtgcaaatgaaaatagataatgtgaaaagcac

SEQ ID NO: 568133 - DNA, 412 bp, Homo sapiens
tgtgctgaaaaatatattaaaaagatggtcctttaaaaaaatgtggtggggtcttggaaaaagaacaaggtaaaaatattatattttatatgttaaagagaatgaaccaaatgtgctttggggtgtagcggaagagagaacatcagtagtttttttagtgtttactgtttctcaattatctaawaggggcctgagacaccacagttgatggttcatccagaaccacatgggatgggtaactgtggctccccatgggaacatcaaggggctgttaacacaagaaggaggaaggatgatagagatgtaaaaactgcattgggtttaggtaaatacgaggtggctgcccaatctcacttttttgaacatctgtttgctctcctgtgcaaatgaaaatagataatgtgaaaagcac

SEQ ID NO: 568134 - DNA, 511 bp, Homo sapiens
ctttggggtgtagcggaagagagaacatcagtagtttttttagtgtttactgtttctcaattatctaaaaggggcctgagacaccacagttgatggttcatccagaaccacatgggatgggtaactgtggctccccatgggaacatcaaggggctgttaacacaagaaggaggaaggatgatagagatgtaaaaactgcattgggtttaggtaaatacgaggtggctgcccaatctcacttttttgaacatctgtttgctctcctgtgcaaatgaaaatagataatgtgaaaagcacttggcccattgcctggcacaaaacwgatctagaataagtggatactataagttttcattttgttcactgatattattaataaaacctgacaggtattaaatcttcacatgcattaggcctctctgagctgatcacatacttgctggattccaatgcatgtcacctttcgatgtcatcgaggacctacatcctgtatatctttctgttcttccat

SEQ ID NO: 568135 - DNA, 623 bp, Homo sapiens
ctgctgcaggtcttacacctgtgaaaggagaggaggaggaaagaaaattgagtggcaaagagtctcagattgtagtatggctctaaattctagaatttggcatgatcagagggagttcttgagcctgtctgaacattttcatgmcttaaaacaggggtccctgacccctgggccatggacctgtactggtccatgtcctgttaggaacagggcagcacagcaggaggtgagtggtggcccagccagcaaagcctcatctgtatttacagctgctccccattgcttgcattacctcctgagctccaccctctgtcatatcagcagtggcattagattctcatgggagtgcgaaccctattgtgaactgcgcacgtgaaggatctaggttgcacactccttatgagaatctaatgccttatgatctgtccctgtctcccctcactcccagatgggatcatctagttgcagaaaaacaagctcagggctcccactgattctacattatggtgagttatataataattttattatatattacaatgtagtaatagtattagtagaaatacaatgcacaataaatgtaatgcaattgaataatctcaaaaccatccccttgatcccac

SEQ ID NO: 568136 - DNA, 623 bp, Homo sapiens
ctgctgcaggtcttacacctgtgaaaggagaggaggaggaaagaaaattgagtggcaaagagtctcagattgtagtatggctctaaattctagaatttggcatgatcagagggagttcttgagcctgtctgaacattttcatgacttaaaacaggggtccctgacccctgggccatggacctgtactggtccatgtcctgttaggaacagggcagcacagcaggaggtgagtggtggcccagccagcaaagcctcatctgtatttacagctgctccccattgcttgcattacctcctgagctccaccctctgtcatatcagcagtggcattagattctcatgggagtgcgaaccctattgtgaactgcgcacgtgaaggatctaggttgcacactccttatgagaatctaatgccttatgatctgtccctgtctcccctcactcccagatgggatcatctagttgcagaaaaacaagctcagggctcccactgattctacattatggtgagttrtataataattttattatatattacaatgtagtaatagtattagtagaaatacaatgcacaataaatgtaatgcaattgaataatctcaaaaccatccccttgatcccac

SEQ ID NO: 568137 - DNA, 623 bp, Homo sapiens
ctgctgcaggtcttacacctgtgaaaggagaggaggaggaaagaaaattgagtggcaaagagtctcagattgtagtatggctctaaattctagaatttggcatgatcagagggagttcttgagcctgtctgaacattttcatgacttaaaacaggggtccctgacccctgggccatggacctgtactggtccatgtcctgttaggaacagggcagcacagcaggaggtgagtggtggcccagccagcaaagcctcatctgtatttacagctgctccccattgcttgcattacctcctgagctccaccctctgtcatatcagcagtggcattagattctcatgggagtgcgaaccctattgtgaactgcgcacgtgaaggatctaggttgcacactccttatgagaatctaatgccttatgatctgtccctgtctcccctcactcccagatgggatcatctagttgcagaaaaacaagctcagggctcccactgattctacattatggtgagttatataataattttattatatattacaatgtagtaatagtattagyagaaatacaatgcacaataaatgtaatgcaattgaataatctcaaaaccatccccttgatcccac

SEQ ID NO: 568138 - DNA, 505 bp, Homo sapiens
aaaacctgcaggacaagaggagggcactgactggggcacagtctctgtccttgtagaggctgcatttccccatggcattaggcattcaaagatatgatgactggggacatggggtggggaacagggtgattaaaggcatggtcacaggctaaggtggcagcttgggagatggtggaaagtctaatgtgaggaaacagaagatgtagctggaaagttgtcttggcatcgcacccctgagagttctaaaagccaagctgaggaaactggacttgattctgtagatagtagtgagtcaatacaggctctcaaagagagacttgaaatggtccagctmgcgatgagaaggattcactgagaaagaatatcctgaaatggcatgcctgagcgacttcaaggcaggaagtcccccaaagtgggttgggtcaaacactgtgtcaataaatgacggttaataatatctttatttccattttcaatacaggcaatctccaataatagaccattg

SEQ ID NO: 568139 - DNA, 505 bp, Homo sapiens
aaaacctgcaggacaagaggagggcactgactggggcacagtctctgtccttgtagaggctgcatttccccatggcattaggcattcaaagatatgatgactggggacatggggtggggaacagggtgattaaaggcatggtcacaggctaaggtggcagcttgggagatggtggaaagtctaatgtgaggaaacagaagatgtagctggaaagttgtcttggcatcgcacccctgagagttctaaaagccaagctgaggaaactggacttgattctgtagatagtagtgagtcaatacaggctctcaaagagagacttgaaatggtccagctcgcgatgagaaggattcactgagaaagaatatcytgaaatggcatgcctgagcgacttcaaggcaggaagtcccccaaagtgggttgggtcaaacactgtgtcaataaatgacggttaataatatctttatttccattttcaatacaggcaatctccaataatagaccattg

SEQ ID NO: 568140 - DNA, 610 bp, Homo sapiens
atgttaattgacaaatacagcgtttacacacttccaagttctgagagagagtggaaattcatgtttttaattccaagtctattcatccattcatcagttttgtactgaggccccactctgtcccacacattatgtttgctccaccatgayataatttctagacttcttcctgatgactaattttgactaagaatttcctctttagttggttaaagaaaagtatatggcaatatttcatactgatttagagactctaattcataaactatcccaaaatggtgcatctatttagtattcctttcatcttctctttgaagatgaaacagtcactgattttacatatactctgcatatttatttcatttaaaaatacagtataatgaaattggaaccatgatgtttgtttataactggttcaactgtacatgtagactgtgcactttctatatgcagttctattttacaattttaaagttttttttttttaaaaaagacttaaacacaagcataacatcagtttgcttcactcaataaattcaattttgatgtgtgatagatagtaaaacatagatgacccaaatatttatataaatgtgtctaggattatata

SEQ ID NO: 568141 - DNA, 573 bp, Homo sapiens
gtttgggccagctcccttatgtttctaactctgtaattttcccacctttgtcatggagccccttggtacatgaatttgttctcttgttctttaacatttatcaggtcactcagtagggagtgaagggctcacagggaagagatgagactaaaactgatcccagcactgtctgagccatttccttacacaatctcattttcatcctcctaaaattcccacaaaataagtgctactggctacagaaagctgaacatccaagtcatatcactgattttcagattttctttcatctataaatgagtgctttacatgtccytctattttacagcctgctttttgcatttaccagtacatcataaccatctttttaagtaaatgaatttcattcctgtagtcattcttgatggctgcttagcatttgttcatatggatgtgctgaaatcaactcagccaagtccctatcacattttgaggataagaaaatgaagttcagagaatttagtgaggtgctcagggccacatagcaggtgagtaagagcaggaattacactcctggactgccaggggtctggc

SEQ ID NO: 568142 - DNA, 608 bp, Homo sapiens
gaatggtagcgcaaccaggacaggtccctgccctcatggaacttataaactagcgggatgaggttagtgctgcacaaaaattgtgactgactcatttgatttcctttggaatgacaaaatagagcacaattggttatctccaaatctgattatctgtacatctgaacaaatagagtcttttatcataaaaaaactaacggtatattcagtaattgctaaygctacacaaaggaaattccttttccagcccaattctacatccactcccctctactactatacagggcacacgttctccaagcagaaagagaaggagcatttcctctctggggctgaggtcagccttgggctgaggccagcatgagtcagcttgcccagcacggatgcttgcctctgcctcaaggcaggccttgctataaccttgacgcacacagatagtgtgtgtattcagggtccagggcagaggcccatgcatatctgatgaatctctctggaacagggagtataagacctactctggctttgagttgatagtgcagtaaggagaaacatctgtcttttttttttttccaaaaaggaatttgttaattataacaggagccaccaaa

SEQ ID NO: 568143 - DNA, 261 bp, Homo sapiens
tttcttaatggggctagtctgttagtaatgggcttctttagcttcttaaaaatttttttwaatctaggaacgtcttaatttttcctttatttttgaaggagagtgttactagatatcaaatgcttagtcaacagtttttttcttctttcagcagttagatgatcccactgccttctgacctccatgttttctgatgagaaacctgctgttagtcttattgagaatctttgtatgtgataactcaattcttactcactactt

SEQ ID NO: 568144 - DNA, 524 bp, Homo sapiens
tatctcaattaaaaaacaaaaaaatctatcagaaactcacattaaatgtaaagatgcaagtcagttaaagcaaaaggaaaaaagatagcccaaaagacttgyataaaattctatcacttttaggagaaaatatttgtgaaccagaattagtcaaagatttctcagatatgatatcaaaagcgtgatccataaaaatgtaataattagactctgccaaaataaaaacttttgctatttaatggatacttcagaatgaaaaaaacaagctacatacttagaggaaaaaaatgtgcaaatcacatatccaacaaagaacttgtagtcaaaatctatatataaagtattctcaaaactcaatagcaagaaaacaaatgagctaacttaaaaaatgggtaagacttgggaggctgaggcaggcggatcatgaggtcaggagttgaagaccagcctgcccaacatggtgaaaccctgtctctactaaaaatacaaaaattagctgatgtggtggcatgcgcctgtaatcc

SEQ ID NO: 568145 - DNA, 641 bp, Homo sapiens
tattactgattcaatttcaaatgtcaatattggtctgttcggggcttcaatttcttcctgattcaaacttggaaggttttgtttccaggaattagtccatttcctctagattttctaagtttgtgtgaacaggggtgttcataatagtctctgagaatcctttgtatttttcygggatcagatgtaatgtcacctttgtcatttctgattgtacttatttggatcttctctcttttttctttcttagtctagctagcagtctatcaaatcaacaaaacaaatattgacaaatgggaactaattaaagagtttctacacagcaaaagtaaccatcaacaaacagacaatctataaaccgggaggaaatatttgtaaactatgcatccaacaaaggtctaatatccagaatctattaggaacttaattcaataagcaaaaaaacaaaaacaaatacatctcattaaaaaaaatagacaaaagacatgaacagacacttttcagaagaagacatacaggtggcaacaaggatatgaaaaaaatgttcaacatcactaatcatcagagagaagcaaatcaaaaccatgtcacaccagtcagaatagttattattaaaaagcaaaaaaaaaaaaaaaaaaccaaca

SEQ ID NO: 568146 - DNA, 626 bp, Homo sapiens
tgacccaaaatctttcttagtacttgatgcaccatgaattagaaggttttctgtatctgttgatatagagattatttcgggccttgtatgaaccctagatactattctgtctaatccttctgatggttttctttccctctgtaacattggatgcatgatatctcacatgcatgtgttgattgatccccttcacatctctagacttctcattggagttctctcctctccaggacttttgcaaactctagctactttgacctctggatttcgctttccatctcctcaacttaaaaagagtctgctggattccactaaggttctgcttttctggggcaatcccagggctcacccttgtgtcctgtttcttagggatcactgctttttttttttttttttgcttgactccaatgtcttgaaggttgttgtttcatatatttaaagtgtctaggtttttttagttgttttaggcaagagggtcaatactccctgttactctatattggcacaagttttaaatttttttggaaaatttttcaaaatttctataagtgacaaagctattcttagcttacataccataaagacataagtgagaggctkagttttgcctgtaatctgtagtttgc

SEQ ID NO: 568147 - DNA, 564 bp, Homo sapiens
tcactatgaatctgcagaacttaatcatcactttgtttgcttaacaaatgtatttgctcattttaatatttgtgtactgatctggttttcatatcaagagaaacttaaagtataagctttatttcttagtgttttacaacacaaattttcctgtaatgacttgatgcttaggaagggagtttaatctttttacttgagagtcttcatcatccagttaacatttactaataatttaatcttcattcttttatagtagactaagtaaaaatcagtatctcgttgacatggtgactgaagctcaactgtcaggtctttactgtccaaagtataattgagaataggttataatgcttggctgaaatagatgttactcatgctcctaggagaggwactggtcagatctttataacctaaatcagtaacttgctttatttattgacatgaaatctgcaggttaggtgatcaagtttcccagcacatcacaaattataaactggcaaaagggacccagtagtctaatggagagaagaactacaaaatttaggagtaactagagaacaacag

SEQ ID NO: 568148 - DNA, 605 bp, Homo sapiens
aaaaatatctatactattcagcaataaaagaaatgaagtacaattgacccttgaacagcatgggtttgactgcatgggtccacttatacacagaatttcttctgcctctgccacccctgagacagcaagggcaacccctcctcctcctcagcctactcaacacaaagaccacaaggatgaagacctttatgatgatccacttccacttagcgaatagtaaacattttttctcttctccatgattttttaaataacgttttcttttctctagcttactttaagaatacagtatataatacatataacatacaaaatatgtgttaatcaactgtttatgttatcagtaaggcttccagtgaacagtggaccatcagtagttaagtttttgstgagtcagaagttataagtggattttccctggcacatgttggtaccccaacccctatgttgttcaaggatcaactgtattcatatgttctacaacatgaatgaatcttaaaaacattatgcttagtgaaaaaaggcaatcacaaagggtcacatattttattattgcatttatatgaaatgaccagaataagctaatctatagaaacagatagaaa

SEQ ID NO: 568149 - DNA, 608 bp, Homo sapiens
tccctcgccccctgtagtattggagaagaccagatctatggcagccgtttagtgactttttggaaaacttgcaaattctgattgcaggattaatttgagttctggagttttaaccaggacaggcaaaacttcagcatttgtggttgggtgtgatcgctcatgcctgtaatctcaacattttgggagactgaggtgggcagatcacctgaggtcaggagttcaagattagcatgggcaacatggcgaaacccagtctctactaaaaatacaaatatcagctgggaggggtggtgcatgcctgtaatcccagctcgtgggrttgaggcacgagaatggcttgaaccccagaagtgcaggtcgaagtgagccgagattgggccactgcactccagcctgggcaacatgttgagattctgtttcagaaaacaaaaacaaaactttagcaattgtttttctatccattgttggagggaaaaacaacaaccacaacaacacctagaacaacttctgagttaagagatgggcaaaacaatctgagtgtaatttactcaattatttttagttccacatgagacactgaccatttggcatttggcaagagaagaaaa

SEQ ID NO: 568150 - DNA, 445 bp, Homo sapiens
attgtgaggcctccttagctatgtggaactgtgagtcaattaaatttcctttctttataaattacccagtcttgggtatgtctttattagcagcataggaacagactaatacactggttaaaccacataattgagatagaagctgtgtagtcagatcacaagaaatgtagaaacaaagcggttcccagagatctcagtagcagagattcatgayatcttcgttagggcacagtcattgcattgcattgactcagttctgaccaactttggtcctttttggcactctactatgtattcaattcttggaaaagatcgattgatctcatttggttcatgtcctcattctctagagcaacactgttgttgacagtcctaacagaacactatgaaatgggagaggtaatttcttctgaaacaaatatgcgtaggtgcactatgtaggcaa

SEQ ID NO: 568151 - DNA, 506 bp, Homo sapiens
ttagatttttttaaatgttccataatatgcrttcaatgccacaaatgtttccctaagtactgttcccattgtatccatacattttcaaatattattttttaaattttcattcagtacaactttttaaaatgtctcttgtgactttgcctgtgacacatttggtattagaatttgtggtttaatctctacatattttggaaattcctatctttttgttattgatttctagactaatttcattgcagtcccagagcatactttgtatgatttttgttcttttaaatttgtaggtaagttttatgccaagaatatgatctgttttgatgaagttttgtttgagtttgagcataatatatattctgtctgttgctgtattttatatacagcaattagatatcattgtttgacgatactatttatttaaactatgtatttgttcatttactacctgttgaatctttcaattactaataggtagtgaaatctccaactataaaaatgagttt

SEQ ID NO: 568152 - DNA, 588 bp, Homo sapiens
acactccccaccaaaaaatggaaaaaatcaaagtgggtgaactaatagtacycaacctactgaaactctacagcaattaagacagtgagacaaagtgaaaagacaaagaaaaagatcaatggaacagactaaacaaacagtccagaaatagacccacacatatatggtcaatggacttgcaacaaaggttccaggcaattcaataaataaattagtattttcagtaggtgttattggaataattggacagctgtatgcaaataaaacctcaacccatatatcacatcatgaatgaaaattaactggaaggatcacagacttaaaactgtaacattttgagggggaaagcataagaaaaaaccttagtggccttgggttaggtgaagatttcttagagcaataaaaagcagaaaccatagaaaagtgataaataggacttcatcaagattaaatattttactctttcaaaggctttgaaaagacaatgaaaagacaagccatagactaagacaaaatattttcagagcctatatctgataaaaaaaaaaaaaaaacttgtttcagaatatataaagaactctcacaacc

SEQ ID NO: 568153 - DNA, 588 bp, Homo sapiens
acactccccaccaaaaaatggaaaaaatcaaagtgggtgaactaatagtactcaacctactgaaactctacagcaattaagacagtgagacaaagtgaaaagacaaagaaaaagatcaatggaacagactaaacaaacagtccagaaatagacccacacatatatggtcaatggacttgcaacaaaggttccaggcaattcaataaataaattagtattttcagtaggtgttattggaataattggacagctgtatgcaaataaaacctcaacccatatatcacatcatgaatgaaaattaactggaaggatcacagacttaaaactgtaacattttgagggggaaagcataagaaaaaaccttagtggccttgggttaggtgaagatttcttagagcaataaaaagcagaaaccatagraaagtgataaataggacttcatcaagattaaatattttactctttcaaaggctttgaaaagacaatgaaaagacaagccatagactaagacaaaatattttcagagcctatatctgataaaaaaaaaaaaaaaacttgtttcagaatatataaagaactctcacaacc

SEQ ID NO: 568154 - DNA, 465 bp, Homo sapiens
ccccatgattcaattacttcccaccaagtccctcccatgacatgtggggattaygggagctccaattcaagatgaaatctggactgggcatggtgtctcatgcctgtaatcctaacactttgggaggccgaggtgggtgggtcatttgaggtcaggagttcaaaaccagcctggccaacatggtgaaaccccatctccgctaaaaatacaaaaagattagccaagcatgttggtgggcatctgtgatcccagctactggggagtctaagacaagagaatcacttgaacctgggaggcaaaggctgcagtgagccgagatcacaccactgcactccagtctgggtgacagagtgagattatttctcaaaaacaaaaaaaaaggtgaaatttgggtagggacacagccaaaccatatcattccaccccccgcccctcgcagatctcatgtcctcgcatttcaaaaca

SEQ ID NO: 568155 - DNA, 632 bp, Homo sapiens
cacatcttacatggtggcaggcaagagagcatgtgcaggggaactgccctttataaaaccaccagatctcatgagacttattcactatcatgagaacagcatgagaaaacctgcccccatgattcaattacttcccaccaagtccctcccatgacatgtggggattacgggagctccaattcaagatgaaatctggactgggcatggtgtctcatgcctgtaatcctaacactttgggaggccgaggtgggtgggtcatttgaggtcaggagttcaaaaccagcctggccaacatggtgaaaccccatctccgctaaaaatacaaaaagattagccaagcatgttggtgggcatctgtgatcccagctactggggagyctaagacaagagaatcacttgaacctgggaggcaaaggctgcagtgagccgagatcacaccactgcactccagtctgggtgacagagtgagattatttctcaaaaacaaaaaaaaaggtgaaatttgggtagggacacagccaaaccatatcattccaccccccgcccctcgcagatctcatgtcctcgcatttcaaaacacaatcatgcattccccacagtcccccaaagtcttaacttattccaatgtaaac

SEQ ID NO: 568156 - DNA, 632 bp, Homo sapiens
cacatcttacatggtggcaggcaagagagcatgtgcaggggaactgccctttataaaaccaccagatctcatgagacttattcactatcatgagaacagcatgagaaaacctgcccccatgattcaattacttcccaccaagtccctcccatgacatgtggggattacgggagctccaattcaagatgaaatctggactgggcatggtgtctcatgcctgtaatcctaacactttgggaggccgaggtgggtgggtcatttgaggtcaggagttcaaaaccagcctggccaacatggtgaaaccccatctccgctaaaaatacaaaaagattagccaagcatgttggtgggcatctgtgatcccagctactggggagtctaagacaagagaatcacttgaacctgggaggcaaaggctgcagtgagccgagatcacaccactgcactccagtctgggtgacagagtgagattatttctcaaaaacaaaaaaaaaggtgaaatttgggtagggacacagccaaaccatatcattccacccccsgcccctcgcagatctcatgtcctcgcatttcaaaacacaatcatgcattccccacagtcccccaaagtcttaacttattccaatgtaaac

SEQ ID NO: 568157 - DNA, 560 bp, Homo sapiens
ggaaggctctctgctcactgggttctagatttgctgtttttctttctcgtggtaatgctctatcctcttccttggggccttgccgttgctttttcctctgacaggagyaccatctttgctagtaagctcctgcagatatcagcttaaaccccaaaacacaacctcaggaaagcctttcctgaaccacatgctgggtgaatgcccttgtaatacactctgtaaaacttagcacttccttgtagtagtttagcatccctgcaactaaataattaacttatgaattcggttgtccaaaatttgttcttccttgagaatgtaagtgccactgtgggggagaccctatttgtcttgttcaccattgtaccctatttgtcttgttcaccattgtatctctagttcctggtttaatgcctgattaagacgggcatcatcagatgttaatttaatacatgaatattgtgcttttccataaacagtttgaagagccttgcttgtctcccttttatgcatctctatgacattttaccaagtagaaggctaggagaatacccttcacagat

SEQ ID NO: 568158 - DNA, 560 bp, Homo sapiens
ggaaggctctctgctcactgggttctagatttgctgtttttctttctcgtggtaatgctctatcctcttccttggggccttgccgttgctttttcctctgacaggagcaccatctttgctagtaagctcctgcagatatcagcttaaaccccaaaacacaacctcaggaaagcctttcctgaaccacatgctgggtgaatgcccttgtaatacactctgyaaaacttagcacttccttgtagtagtttagcatccctgcaactaaataattaacttatgaattcggttgtccaaaatttgttcttccttgagaatgtaagtgccactgtgggggagaccctatttgtcttgttcaccattgtaccctatttgtcttgttcaccattgtatctctagttcctggtttaatgcctgattaagacgggcatcatcagatgttaatttaatacatgaatattgtgcttttccataaacagtttgaagagccttgcttgtctcccttttatgcatctctatgacattttaccaagtagaaggctaggagaatacccttcacagat

SEQ ID NO: 568159 - DNA, 590 bp, Homo sapiens
aggctgctccctgatgtttagaacagatttgtgtgatgtgctgacattgtgtctaacccacaaaacagtgctgaggccctgcagcaatgaatgacttaggagagaagctacttgctcataacagaaaaccaaacccccattagcttaaacaagtaggatattttttctcatctaacaagacacttgtgtaatgttgcarctcaaaataccattaggaacaatctttttctatattctgctctaccattcttagtaagaagacaccatcacttcatggttgcaagatagctgctgaatctatggatttcgcatccttaaatctaggcagaaagaataaagaagagtgaagaatcatcccttccagaattcttaggaactctgagctgatgttgcaggctaccctttgcacaagagagtctggtaaagagtacttttagggccaggcacagtggctcaggcttgtaatcccagcactttgggaggctgaggagggtggatcacaaggtcaagagatcgagaccatcatagccaacatcgtgaaaccttgtctctactaaaaatacaaaaattagctgggtgtggtggcatgt

SEQ ID NO: 568160 - DNA, 556 bp, Homo sapiens
atcattttgaaacgtaaaagaatcaaagmttttacaacctactagaatctaataaccttggctaaaacaaaagttaaatcgccaaataccgtggttaaaaaggataacttttataaagcaatttttaaatacttcccatttgtattttagaaattgtctcgtcaatttttggttaagaaacaaaaaaaattcagatgcaatttagtatcttctaacagagaatgttatctgagacgtttaaattgtaaatccttcacaaattatgaaaggagaataaaatatctgtgatttgaaagactgttcttacctttctaaaaaatatttttgacaaccatcattagtatagtgatctaaaattcactatatatttttatataaacaatcccaattatttgtatttaatcgaactggggatctttatctttccaatgtgacagagatatagaaggacttaccccaagatctcgaagttgcaaagcatggaatgtgtattgaatttcaggtctcctgttccaaatcctttgtctacaccaccatactgtaatctcctaattca

SEQ ID NO: 568161 - DNA, 621 bp, Homo sapiens
aagatttttgttctttaaataaaaggcaatcctgatgagaattaaggaatttcactgtcatgaaatataacttctctaataaatatagggtgtaacatttccaggtgagtgggcatttcctaggagctccatgtagttctctggtagagtaatctactacatttcattctactgaattgaacacgatccttctccagaattggttctctcatttagtaggatctgggccacagattttaaaaaattataaatgcttaaaatacatctgggaactttatcactcacagtatgtttttatttgatggttctccttccgkgggtttacaaatctgactattgtttttacacaattaagaatattttgcttggtttatattttcagtaaagtatttctcactgtatgcaagaaagtagatggaataatttctcacttcaattcatcttgttctggaatattagttaagctaccaatcttccttcacttcatcttgatgaatagaaaaattattccaccgacatcacagaactaatcatgagaatcccatcgtttctgcatttcatatcccatgttcagttttttctcatccattatgtctctagggtagaattgccagaaactca

SEQ ID NO: 568162 - DNA, 621 bp, Homo sapiens
aagatttttgttctttaaataaaaggcaatcctgatgagaattaaggaatttcactgtcatgaaatataacttctctaataaatatagggtgtaacatttccaggtgagtgggcatttcctaggagctccatgtagttctctggtagagtaatctactacatttcattctactgaattgaacacgatccttctccagaattggttctctcatttagtaggatctgggccacagattttaaaaaattataaatgcttaaaatacatctgggaactttatcactcacagtatgtttttatttgatggttctccttccgggrgtttacaaatctgactattgtttttacacaattaagaatattttgcttggtttatattttcagtaaagtatttctcactgtatgcaagaaagtagatggaataatttctcacttcaattcatcttgttctggaatattagttaagctaccaatcttccttcacttcatcttgatgaatagaaaaattattccaccgacatcacagaactaatcatgagaatcccatcgtttctgcatttcatatcccatgttcagttttttctcatccattatgtctctagggtagaattgccagaaactca

SEQ ID NO: 568163 - DNA, 541 bp, Homo sapiens
aaatttgaataaaatttaaccatgcaatacagtataatctttatagagaaaaggtgactattgaattaagctttgaatatgtgtgcaattttctccgatgcaaaatgcaaaagccacttcaggttgacagaacacatatttattaaacaaatataaaaaggatttatctgatattataagatttcaaatatcaagccgtacaaaaataaagctgttatacgttttatcataatttattaatgayagagttaataagcaagcccatgattcctactgaaactattccaggatgtatgttagctaaaaataccaatgttcacacacgtgtacatgcattgcccataattaacccatcacaaaagtagatctcaaattagaagatgaatgcaaaccacccttgagtgctaaaatcagaaaagacaaaatgaagtggttggtacttatgaactatatcaggtacctctagtgctgcctaagaatctctctctggggcccttgaacacttatctcattccagatctggcaagtactgattttgaat

SEQ ID NO: 568164 - DNA, 639 bp, Homo sapiens
tcattattacattaactaaaatgtttctgtactttcaaggtcatctcaagttcttaaataatataaatatttgttaaaaatatatgttctattatatgcagcatagaaagaaaaagagtacttctatctggtatttattatatttgcgttatgtgcaaacacttcagatcaggaacgtggacattcaagaacacagccccttcctttatgtgacagtggagaagaatgggtctcataaacagcctaagacataaaggaaggtaattgaacacctattccatgtgtttccaaaatcaccagtaccggatgtagaatgtacacaacaattcttctgctttctccaaatggaaaatcgcctttttatagccaatcatctcgtatagaactataaataaaaccagatttatttttcaaggtaatgggggaagttttgacagagctcttcatcagggatttaaaatcctgttcacaattttttttcaactgttatctaagagaacaaaaagaattaggatgcttaaaaaattaaaaatttaatccacttcgtatgtcaaaaacattcaagttcatgtatgtgtgatggttattaagtaaatgaacaaaagagcacagwataacaatacaacggaggtaaaaaat

SEQ ID NO: 568165 - DNA, 589 bp, Homo sapiens
ggtacacatcacaaaaatttaaagtagatagaggaaatattcttgatacttactagaaagagttctgggyacttcacaccctttaagggcagatgcagatatgccattgcactttttcatagctcattccccatgtgaataaatgatccattgctcatcatagtgatgatgatgctttacacacagtgaaaacacagtaaatattgtttactaaccagaagacaccatacaataaattattagtatgtggtatctttaatggagcacatatagcagagatacacatctcaaagaggctaatactaaatttggctacattgctgctcccaacatttccaatcaccctagttaaactttcattttcaatggcaaattttaatagtatcataaaattataatatgaagggcagattcctaatgccttttgccagctgccttttccctgtggatttaaatatcttgttgatatattatgaggtaacaattttgcagttaactcacgttcagagtatcttgttaaaagtgaataacttattcagtggtagagatccacactagcattcctttggttctgcaatataatccttaa

SEQ ID NO: 568166 - DNA, 167 bp, Homo sapiens
caaatggtttttttgcctccttccaactcccatcctcaggacaatatctgattcctaacagcttccctactctatatctcagcatatcttaggtaactctgcttctaggatttgaatgttccaataagrtcactccacagaaaggcttctctatcaaggacccagag

SEQ ID NO: 568167 - DNA, 516 bp, Homo sapiens
gaacatcacacactggggcctgttatgcggtggggggagagacgagggatagcattaggagatatacctaatgtaaatgatgagttaatgggtgcagcacaccaacacggcatatgtatacatatgtaacaaacctgcacattgtgcacatgtaccctagaactcaaagtataataaaatatatatatatataaaagttatactgtagactaattatattctgtactgcaattgaaaaggcagacaaatcattctacttatatgctttattttgggagtctgtatttgaaaaattaacagtaatacaagtggtagtatagaagacagaaggaacagaatttagaattatcctctttaggtataaatcaaataaatattaaacaaaaggaatgagattaattgcaggatattgcagacraagtcatttgaactaagcctcagttttcttatctttcaaatgagaacaataggaactactctgcaagaaatgtttttagtgatttcatagtgaatttg

SEQ ID NO: 568168 - DNA, 538 bp, Homo sapiens
gaataaccccttctgttttatcaagacagaaatctttycaaagacacagttaagcccagacctcaggagatttttggaaattgaccaaaataaacttaccttttgatgagcataaattaatatttcttgtattctgctaatgaaataataatacaatcatatatttgatattcccaatgaatgtataagcacatttaaatcattttctgaatattattttatattgaattacttttattctgtgaccctagatattcaaatatatttccttcagaaatcccactattataaacaaactgtgaatttcacatttttgatcttttcaaaaatattttttaatttttaattttcatagattaaggggtacaagtacagttgtgttctatagatgtattgtgtagaggtgaagtttgggcttttagtttacccatcacccgagtagtgtactagtgtacattatacccaataggtagtatttcaatcatcaccacccttcctcttccaccttttgttgtcttcaatgtctattattccacac

SEQ ID NO: 568169 - DNA, 535 bp, Homo sapiens
gcccctcctgggaacgtgcagggtttgagcaatccacacccgctgagttaaccccttcccacataggcagatcaaatctgctccatcaccaggggcaataaataccatcacccacatccctgggcccatgtgagagaaggacagtgatgggactggacatgtacttyacagggcactgtactgcttctgaggtctgatttttctcagttctctttaatatgtgatctccaagagagcctcaactgtatttgataaaaaaataaaaaaaaaaataccagctgggcgcggtggctggcgcctgtaatcccagcactttgggaggccaaggcgggcggatcaccaggtgaggagatcgagaccatcctggctaatatggtgaaaccccatctctactaaaaatacaaaaaattagccaggcatggcggcgtgtgcctgtagtcccagctactcggggggctgaggcaggagaatggcgtgaacccgggaggtggagcttgcagtgagctgagattgcaccactggactccagcctggg

SEQ ID NO: 568170 - DNA, 535 bp, Homo sapiens
gcccctcctgggaacgtgcagggtttgagcaatccacacccgctgagttaaccccttcccacataggcagatcaaatctgctccatcaccaggggcaataaataccatcacccacatccctgggcccatgtgagagaaggacagtgatgggactggacatgtactttacagggcactgtmctgcttctgaggtctgatttttctcagttctctttaatatgtgatctccaagagagcctcaactgtatttgataaaaaaataaaaaaaaaaataccagctgggcgcggtggctggcgcctgtaatcccagcactttgggaggccaaggcgggcggatcaccaggtgaggagatcgagaccatcctggctaatatggtgaaaccccatctctactaaaaatacaaaaaattagccaggcatggcggcgtgtgcctgtagtcccagctactcggggggctgaggcaggagaatggcgtgaacccgggaggtggagcttgcagtgagctgagattgcaccactggactccagcctggg

SEQ ID NO: 568171 - DNA, 556 bp, Homo sapiens
tttgttattttgttgttgagtttcaaagttcttttttttttgtatttgagcccttttatttttcaacatttatttttaggtttggggatacatgtgaaggtttgttacataggtaaacttatctcattgttgtacagattatttcatcaccckccttccaccttccactttcaagtagacttcagtgtctgttgttttcttctttgtgttcataagttctcatcatttagctcccactcgaaagtgagaacatgtggtatctggttttctgttcttgcattagtttcctaaggataatagcctggagtacaatccatgttccagcaaaagacatgatctcatccttttttatggctgcatagtattccgtggtgtatatgtaccaaattttctttatccaatctgtcattgatgagcatttaagttaattccacgtctttgctattgtgaatagttttataccactttataaaggaacaagtctgtcttgactttagctcttgatgtaccccagaacactgtttgaagtatttctgaagtctatttttaaatatgt

SEQ ID NO: 568172 - DNA, 556 bp, Homo sapiens
tttgttattttgttgttgagtttcaaagttcttttttttttgtatttgagcccttttatttttcaacatttatttttaggtttggggatacatgtgaaggtttgttacataggtaaacttatctcattgttgtacagattatttcatcaccctccttccaccttccactttcaagtagacttcagtgtctgttgttttcttctttgtgttcataagttctcatcatttagctcccactcgaaagtgagaacatgtggtatctggttttctgttcttgcattagtttcctraggataatagcctggagtacaatccatgttccagcaaaagacatgatctcatccttttttatggctgcatagtattccgtggtgtatatgtaccaaattttctttatccaatctgtcattgatgagcatttaagttaattccacgtctttgctattgtgaatagttttataccactttataaaggaacaagtctgtcttgactttagctcttgatgtaccccagaacactgtttgaagtatttctgaagtctatttttaaatatgt

SEQ ID NO: 568173 - DNA, 556 bp, Homo sapiens
tttgttattttgttgttgagtttcaaagttcttttttttttgtatttgagcccttttatttttcaacatttatttttaggtttggggatacatgtgaaggtttgttacataggtaaacttatctcattgttgtacagattatttcatcaccctccttccaccttccactttcaagtagacttcagtgtctgttgttttcttctttgtgttcataagttctcatcatttagctcccactcgaaagtgagaacatgtggtatctggttttctgttcttgcattagtttcctaaggataatagcctggagtacaatccatgttccagcaaaagacatgatctcatycttttttatggctgcatagtattccgtggtgtatatgtaccaaattttctttatccaatctgtcattgatgagcatttaagttaattccacgtctttgctattgtgaatagttttataccactttataaaggaacaagtctgtcttgactttagctcttgatgtaccccagaacactgtttgaagtatttctgaagtctatttttaaatatgt

SEQ ID NO: 568174 - DNA, 556 bp, Homo sapiens
tttgttattttgttgttgagtttcaaagttcttttttttttgtatttgagcccttttatttttcaacatttatttttaggtttggggatacatgtgaaggtttgttacataggtaaacttatctcattgttgtacagattatttcatcaccctccttccaccttccactttcaagtagacttcagtgtctgttgttttcttctttgtgttcataagttctcatcatttagctcccactcgaaagtgagaacatgtggtatctggttttctgttcttgcattagtttcctaaggataatagcctggagtacaatccatgttccagcaaaagacatgatctcatccttttttatggctgcatagtattccrtggtgtatatgtaccaaattttctttatccaatctgtcattgatgagcatttaagttaattccacgtctttgctattgtgaatagttttataccactttataaaggaacaagtctgtcttgactttagctcttgatgtaccccagaacactgtttgaagtatttctgaagtctatttttaaatatgt

SEQ ID NO: 568175 - DNA, 509 bp, Homo sapiens
tgtggcaaaagcagtgttagaagtaaagtttatagtgctaaatgtatacattaaaaagtttaaaaactgttcctatcaaactaccatgacatttttcacagaactgaaaagagaaacctcttgtaaaattcatgtgcaaccaaaaagaacccaagtagccaagcatcttaagcaaaagcacaagccagaggcatcacatgacttgatttcaaactatactataagactacagtaaccaaaagagcatggtactggtacacaaacaaacacagagaaccatgcaatcgaacagagaacccagaaataaagctgcacaactttagccatctcgtctttgacaagaataagcaatcagaaaaggactccttattcaataaatggggctgggataactggctagccatatgcagaataaagaaactggacccttgcatttcaccatatayaaaaattaacttaagatgaattaaagatttaaatgtaatacctcaaactataagaatactata

SEQ ID NO: 568176 - DNA, 479 bp, Homo sapiens
acttgtgctatttcttataaaagactgtattaaagaataacagaactgaagctcaaccaaacagaagcagccaacaaacttataattatataactagaaacttttcaacagtatagactaaataagacaactgtgtactgtaaccaatcaaatattctttgctttacttttatgtttgtcctataaaaagtcccccttccattcccttggcagagctcccaaacctcttctggtttggagttgtccaatacatgaactgcygtttgctcaaataaacttttaaaaattttgattgtgactcagtttaccatacctacactcaagataataaacagtgtcccttctacttttctacaaaggaaaatatccctttggcatattttccttcttatgtttaaataaatgtatcatggatttgtaatccattttgatcatatcttaaattcctacatatacatgaatctatctagattcaacct

SEQ ID NO: 568177 - DNA, 568 bp, Homo sapiens
ggaaatctccaaggacttgctcaaggccattcatctagtaaatgggggagctgggacatgaactcgtgactgtctgacatcaagcccagctcttagacatgatgctggatttccagttatgattattaaaaaatcatccttcctgtctcaagatgtacgaggatgtgatcagcagagaattcagatttatacccagtaaactacctaaatgaggattgtagggagcacagttcagtggtcttaaattctgaactatatctgctaaccaggagacagatggaactctggttttattctagcacccagcacaatgtataagaaagatgtccacttaaatgttaaatgtttaaaccagsattctgcaatttggaagatatcatgcttagtgaaatgagccaggcacagaaagacaaatactatatgatttcacttatatgtggaatccaaaagagtcaaactcatagaagtagagagtaaaatgatggttaccagaggctggaagtaggtgagaagcagggaatgggagatgtttgtcaaagggcacaaagtttgttagatggaagaaata

SEQ ID NO: 568178 - DNA, 621 bp, Homo sapiens
taagtgaattgttcgtattaaaactctcaaataggtaaaggttttgtatgttatgaatacaatatatctttaaaaagaacttagtttactgtggagtcatttacctcaaatggtaaaacttaaaaaaatcattgatttcccacactagtcattattttctgagtggagtaattatccgaacagtctttgaaaagctttttaaacaatcagagaaaaggtgtttaatgtccataatacaaaagtaaaatgtgaaatctattagtgtcaggataattgctattttcatcaagaaaactgttartagctcaatcaacaatgcctactctatgatgatgttgggaacatgtaaacatttgaacttgtttaccatctttaaaggagaaattagtgtttgtgatttacattctgcatgaattaagagggactttaaaaatcttcccttgatagagataaggttctaaaattaacaagtaaggtggaactgagtataacaaaaagtgccattgaaagtccatcaaatcattaatgagatagagtgtggtatacagcagaagcatcctctggcatggaaatgtcagagagaagccctctaaaataaaatgatatttattcagcgcattg

SEQ ID NO: 568179 - DNA, 605 bp, Homo sapiens
attgaggctctgccttggttgtcgctgtttgattaaacatcttgtgccaagcatcatccatctgcttctcccaatggctgccaggggtaggtatttttatctgtgggcaaatagcttatcaattgtgcatacaaatgcagccacacaaagccatcattttccattaccctgcctcattctcctatgaagacaaggacaaaggaagaattaaataagatgggcattctcttattcattcaacaaatgtttactgagctgctcactgtgaatcaggcactgttccagacacagagatgcagtgatagacaaacacacaagtgstttgcatccacagggagcttacagtccattctgactcagtagaattctgctctgccgccaactagctctgtggcttgggtaagtttctcatctctctgagacttcttttattcccatagcatgtgctgagcgtgtattatgtgccattttctgtgctggggctgcaggtgagggatggcagatctatttcaccctctagtcagggaggcagacagggaaagaggctacatgaccaagtggtaagtgtaagccaggaggccgagacattttcttgggcacttgga

SEQ ID NO: 568180 - DNA, 424 bp, Homo sapiens
agacaggtggcagagtacaaattctggagccagatgctgggtttcaaattgcccctgcagccttctagctgtgtgaccttgagcaatttacttaacctmtctgggccttcagtttgctcatctatgaaaagtatgctgatatagcacctatcacaggttttcatgaggattaaataaattaatacagggaaagtgcccggtgctaggcatgctatacactttttatcatctttactattagacagggtaaaagtttggaagggcaggaagtgtgcctgctttgctgattattattaatatattgccaagctcttacatagttcctggcatacagtaggttctcaataaatacctgttgaatgaataaatgaatgaataactatgaatatagattaacttaacattgcagagaagcaaaaggctg

SEQ ID NO: 568181 - DNA, 565 bp, Homo sapiens
tcacatactcaagtgttccaagtatacagttattttctactaactgaattgagtatgtgattttagttgtaaattaattgaaatgaaatgaaataaaaaattcagttccacagttgcactagtcaaatatcaaatgctcagtagctacatgcagctagtggttattctattggacrgcacgtgtatataaccaccccagatcacaaatcagcctcccttccctgttgtaaacaggaggtagtcttaaatagaaatacaatgaccatacaagagtcacattaaactccagctaggtgctgctgcctgccaaggtctgggcccaaggcctgctctgtgtctattcaaaagagagatttaaactgagtgcagtggcatgtgtctgtagtcctagctactcaggaggctgagatgggaggatcccttgagcccaggagttcaaggctgcagtgagctatgagtgagcacttcactgcacttcagcctgggtgatagagtgagcccctgtctaaaaaataaaagagggagatttaccacatatttaaaaaggtgttaaacatacactagc

SEQ ID NO: 568182 - DNA, 572 bp, Homo sapiens
caaggtcacacagtgagttattgccagatcaaacctggaatgatgaagtgctctttttctcactgctataacaggagtcctatggtcaaatgtgcctaaggasgagtcatgcagtatacaaaggtcaattaggcacgccattagagactattcagaattggagtgctggctgggcacagtggctcttgcctgtaatcccagcactttgggaggctgaggcaggtggatcagctgaggtcgggagtttgagaccagcctgaccaatgtggagaaaccccgtctctactaaaaatacaaaattagccaggcatggtggcgcatgcctgtaatcccagctacttgggaggctgaggaagaagaatcgcttgaatccaggaggcagaagttgcggtgagccgagattgcaccattgcactccagcctgggcaactagagcaaaactccatctcaaaaaaaaaaaaaaaaaaaagcattggagtgcctatgtgcttttgaaaggggcagtcaaccaagaaactatgattcaaatacacaatagaatgcaatacagctgtataaaagaatgagaaagc

SEQ ID NO: 568183 - DNA, 611 bp, Homo sapiens
ccaaggtcacacagtgagttattgccagatcaaacctggaatgatgaagtgctctttttctcactgctataacaggagtcctatggtcaaatgtgcctaaggacgagtcatgcagtatacaaaggtcaattaggcacgccattagagactattcagaattggagtgctggctgggcacagtggctcttgcctgtaatcccagcactttgggaggctgaggcaggtggatcagctgaggtcgggagtttgagaccagcctgaccaatgtggagaaaccccgtctctactaaaaatacaaaattagccaggcatggtggcgcatgcctgtaatcccagctacttgggaggctgaggaagaagaatcgcttgaatccaggaggcagargttgcggtgagccgagattgcaccattgcactccagcctgggcaactagagcaaaactccatctcaaaaaaaaaaaaaaaaaaaagcattggagtgcctatgtgcttttgaaaggggcagtcaaccaagaaactatgattcaaatacacaatagaatgcaatacagctgtataaaagaatgagaaagccatcgtggatgattaatatattaagtggaaaaagagta

SEQ ID NO: 568184 - DNA, 435 bp, Homo sapiens
caaccaatttcttcattttatttctcaacttgttccaaagccagagtgggggatagatgggtgggatttatcagccccctgagacctcaacagtgagatgtgcacacactgtggactctcaagcaattgtgaagagtctgaatttgtgaaatggccaaatgacgattatctgggagagctgtatggtattttcccagttaaccaagtgttactaagtagccaagtggttctcaatcctggctgcatgtcagaattacctgggaatgtttttaaaaattctgatgacttgggctcattgctggaggttctgacttacttcttctgggaatagtgtttgaatataggttttaataaaaactccaggtgagtmtaaagtgcagataagagctgctgaagcctccttatttaacagatcagtgtttcccaaagtataat

SEQ ID NO: 568185 - DNA, 572 bp, Homo sapiens
aaggaggaagtagattcttttccccaactttgcttcttccaccccttcccccgacagcataccccatagcctgatacaggcttttctgaaaatcactaactcttggatcgtttcacaaaactcttgratggtttctctgattttgaatttggattctcttttgaaattgccttttttcagttgtaaggaatgaaagctttgaatgaaaagaaaggagacctgacatccccaacctttgctgggctctgtcaccctgtaccgtcaccctctaattcctctgtcagaccaagaacccccagggtgagtagctgggcggttatcacactctttggcctgtcaccagcacctagtgaatacttattacaaagtgagggggatagagttgcagagtagacagtgagactggagagaagttggggaccatcatggaaagacttgggtgcaagataatgggcagtcattgaaaaatgtctaagatgggctgggcgcggtgactcacacctgtaatcccagcactttgggatgctgaggcaggcggatcatgatgacaagagattgagaccaggctggcc

SEQ ID NO: 568186 - DNA, 559 bp, Homo sapiens
tgtaaaaaacaaatgtaaagatctcagcaatcaaggtaaataatattttaatgcaataacatctcgatgaaggtgtcagggagggctttaataagcaagaaacctctgagctgagcggttcagaatgacaaggttagggaaaaggcatcacagttagtggaaatagtttgtatacaggtaaagaggcaagaaggggtaggccacagtgaaggggtggaatttcttacagcagttttttttttttttttaccatgatatactcttgaggatggagacatgagctgaggagggtgggatcaaaaaacagaaggcactttgggtcccctatgacaccatgacactgttacacccgtcttggacagacataagagaaaaagaaacatctgtctgctttgttagttgggttttctgttttatatgttgaaaactaagtctaactgaaacaccgccactcaccatttactgagttcttactatgtgacattgatcggctaaatcctttagatgaattgactcatcartgagtctatgagtgggtacagccattgttctcatttca

SEQ ID NO: 568187 - DNA, 638 bp, Homo sapiens
ccattctgatattttgctgagcaaaacataattgctttgtggaatgtagctctactgatggtgtgatcaaatgttaaaaatagaactgtagagttttccagaaaatgcaattaaagaagcagtgaatgcccatgactccactcctgttcataactatacttttcagaccagatctgttagagaaaatcaaatcttgatttgagatgatttatatggaaaatagccatgaattatatttgcaagatacatacatatatatttcagccacatcaacatttctttttttacgtagattattattattattattttaaattttattattattatactttaagttttagggtacctgtgcacaacgtgcaggtttgttacatatgtatacatgtgccatgttggtgtgctgcacccattaactcgtcattcagcattagatatatctcctaatgctatctctctcygctcccctaaccccacagcagtccccggtgtgtgatgttccccttactgtgtccatgtgttctcattgttcaattcccacctgagtgagaacatgcggtgtttggttttttgtccttgcgatagtttgctgagaatgatggtttccagcttcatccatgtccctacaaaggacaaga

SEQ ID NO: 568188 - DNA, 602 bp, Homo sapiens
gaatttagaattgttagcttagaagaatcctaataatctttttgttattgctaaatttctcaaatgtgttaatgacttgactccagttagatgtgatgatttaagaattgtgttttttcttgttgytgttttgttttgttttttgagacagagtctcactctgtcgcccaggctggagtgcagtggcacaatctcgggtcactgcagcctccgcctccgggctcaagtgattctcctgcctcagcctcccaagtagctgggaatacaggcacgcgccaccgtgccgggctaatttttgtatttttagtagtgatggggtttcactatgttggccaggctgatctcgaattcctgacctcaaggtgatccacccaccttggccttccagagtgtcgggattacaggcatgagccaccgcacccaggcagacataatgatttaagaatcgtaactgacacatacattgtttcatatttttaaagttaaaggcttagtctgaaatagctgtctttgttgttgttaagagatagagtcttgctctgtcacccaggctggaaggcagtggtgcgatcgtggctcactgcagcctcaaactcctgggc

SEQ ID NO: 568189 - DNA, 602 bp, Homo sapiens
gaatttagaattgttagcttagaagaatcctaataatctttttgttattgctaaatttctcaaatgtgttaatgacttgactccagttagatgtgatgatttaagaattgtgttttttcttgttgttgttttgttttgttttttgagacagagtctcactctgtcgcccaggctggagtgcagtggcacaatctcgggtcactgcagcctccgcctccgggctcaagtgattctcctgcctcagcctcccaagtagctgggaatacaggcaygcgccaccgtgccgggctaatttttgtatttttagtagtgatggggtttcactatgttggccaggctgatctcgaattcctgacctcaaggtgatccacccaccttggccttccagagtgtcgggattacaggcatgagccaccgcacccaggcagacataatgatttaagaatcgtaactgacacatacattgtttcatatttttaaagttaaaggcttagtctgaaatagctgtctttgttgttgttaagagatagagtcttgctctgtcacccaggctggaaggcagtggtgcgatcgtggctcactgcagcctcaaactcctgggc

SEQ ID NO: 568190 - DNA, 525 bp, Homo sapiens
tggcttagtaataaagtcattggattcatagaaagaaaactgcagaggcagttagttccatagcttggtggagctccaggttccttccatcctgtgtgtgttggtttttgttcttaggctttttgcctcatagttgcaagatggctgcctcakctccagtcattgcatcatctcacagctttcaaaggctggaggcaagggggtcagccaatgtgttaagagtctgctcctctcacgtctatctctttataccaggaggtccatctctcccagccttcccttatgtttcatcgttgttcagaagtacatcaggaggcagccacagaccccccacttgccatggggagtgggattccctgactggtttggcccagtcaggattcatcctccagagctgagctgtgcaacagagctctctgtgttgatgggaatgttccagatctgtgctgtccaaatgacagccaccagccacaggtggccattgagcacccagaatgtgactcatttgatggaggagtggaattc

SEQ ID NO: 568191 - DNA, 525 bp, Homo sapiens
tggcttagtaataaagtcattggattcatagaaagaaaactgcagaggcagttagttccatagcttggtggagctccaggttccttccatcctgtgtgtgttggtttttgttcttaggctttttgcctcatagttgcaagatggctgcctcatctccagtcattgcatcatctcacagcyttcaaaggctggaggcaagggggtcagccaatgtgttaagagtctgctcctctcacgtctatctctttataccaggaggtccatctctcccagccttcccttatgtttcatcgttgttcagaagtacatcaggaggcagccacagaccccccacttgccatggggagtgggattccctgactggtttggcccagtcaggattcatcctccagagctgagctgtgcaacagagctctctgtgttgatgggaatgttccagatctgtgctgtccaaatgacagccaccagccacaggtggccattgagcacccagaatgtgactcatttgatggaggagtggaattc

SEQ ID NO: 568192 - DNA, 525 bp, Homo sapiens
tggcttagtaataaagtcattggattcatagaaagaaaactgcagaggcagttagttccatagcttggtggagctccaggttccttccatcctgtgtgtgttggtttttgttcttaggctttttgcctcatagttgcaagatggctgcctcatctccagtcattgcatcatctcacagctttcaaaggctggaggcaagggggycagccaatgtgttaagagtctgctcctctcacgtctatctctttataccaggaggtccatctctcccagccttcccttatgtttcatcgttgttcagaagtacatcaggaggcagccacagaccccccacttgccatggggagtgggattccctgactggtttggcccagtcaggattcatcctccagagctgagctgtgcaacagagctctctgtgttgatgggaatgttccagatctgtgctgtccaaatgacagccaccagccacaggtggccattgagcacccagaatgtgactcatttgatggaggagtggaattc

SEQ ID NO: 568193 - DNA, 525 bp, Homo sapiens
tggcttagtaataaagtcattggattcatagaaagaaaactgcagaggcagttagttccatagcttggtggagctccaggttccttccatcctgtgtgtgttggtttttgttcttaggctttttgcctcatagttgcaagatggctgcctcatctccagtcattgcatcatctcacagctttcaaaggctggaggcaagggggtcagccaatgtgttaagagtctgctcctctcacgtctatctctttataccaggaggtccatctctcccagccttcccttatgtttcatygttgttcagaagtacatcaggaggcagccacagaccccccacttgccatggggagtgggattccctgactggtttggcccagtcaggattcatcctccagagctgagctgtgcaacagagctctctgtgttgatgggaatgttccagatctgtgctgtccaaatgacagccaccagccacaggtggccattgagcacccagaatgtgactcatttgatggaggagtggaattc

SEQ ID NO: 568194 - DNA, 539 bp, Homo sapiens
aggggaagccaaactagctccgacctcccctctgctccctcccctctgccaccatccagggcacagctggcttcctgggcaaaggagaagcctccctccctgtggctccgtctcggggaagaggctgatgctggctggcccttttacactttctggtgggggccaggctgccagctggatcaacgaacagccagtgcaaaaatgtcaggagcaattagaaggtacccgtggtctgagctttatctgcaacaatacgtctttattaatgaggcttttaatgatgcaaccaagagtgctggcagaaacggtcacagctacccatcctctggggttgcgcttttttttttttgagacggagtctccctctgttgcccaggctggagtgcagtggcrcaatctcggctcactgcaacccccgcctcccatgttcaagtgattctcctgcctcagcctcctgagtagctgggattacaggcatgcgccaccacaccaagctaatatttttgtatttttagtagagacgggttttcaccatgttg

SEQ ID NO: 568195 - DNA, 539 bp, Homo sapiens
aggggaagccaaactagctccgacctcccctctgctccctcccctctgccaccatccagggcacagctggcttcctgggcaaaggagaagcctccctccctgtggctccgtctcggggaagaggctgatgctggctggcccttttacactttctggtgggggccaggctgccagctggatcaacgaacagccagtgcaaaaatgtcaggagcaattagaaggtacccgtggtctgagctttatctgcaacaatacgtctttattaatgaggcttttaatgatgcaaccaagagtgctggcagaaacggtcacagctacccatcctctggggttgcgcttttttttttttgagacggagtctccctctgttgcccaggctggagtgcagtggcgcaatctcggctcactgcaacccccrcctcccatgttcaagtgattctcctgcctcagcctcctgagtagctgggattacaggcatgcgccaccacaccaagctaatatttttgtatttttagtagagacgggttttcaccatgttg

SEQ ID NO: 568196 - DNA, 539 bp, Homo sapiens
aggggaagccaaactagctccgacctcccctctgctccctcccctctgccaccatccagggcacagctggcttcctgggcaaaggagaagcctccctccctgtggctccgtctcggggaagaggctgatgctggctggcccttttacactttctggtgggggccaggctgccagctggatcaacgaacagccagtgcaaaaatgtcaggagcaattagaaggtacccgtggtctgagctttatctgcaacaatacgtctttattaatgaggcttttaatgatgcaaccaagagtgctggcagaaacggtcacagctacccatcctctggggttgcgcttttttttttttgagacggagtctccctctgttgcccaggctggagtgcagtggcgcaatctcggctcactgcaacccccgcctcccatgttcaagtgattctcctgcctcagcctcctgagtagctgggattacaggcatgygccaccacaccaagctaatatttttgtatttttagtagagacgggttttcaccatgttg

SEQ ID NO: 568197 - DNA, 580 bp, Homo sapiens
aaacaatgcaggttccagctgctctggaaaaatctgaggagctggcaactttgggccgtagcctcatgagccaggtgggcaggtcccaggtggtcacagccaatccccttcctaacatctgaccatctcagacttcagcatctgctgtcattaatttgggctgttttcacagaggaggcacatgggaaatgctacacacacacacacacacacacacacacacacacacacacacacagctgtctccaaggccgcggacagagtgtgagaccatgaggctgcttcgcctctgcacccgtgagcctgcagcctcatcttctgcagggccccagcagtttccctcctagacaagtggcctgtgtgccacatgtgccctgctggatccagatttcctgtgggtgacatcgggccggtgggtctctgtcctcgctccaagctcccagccctgtggttggcaggaagtcatcatggaagggacggactagctagcttacaaccaactctgggctccaatcatgatgactggatggaaaaaacaagtyatgtcagccctggccccggcctggaagaacagagaatt

SEQ ID NO: 568198 - DNA, 565 bp, Homo sapiens
gaattcaaagacatgttctgtgttttaattgactgcattaattgcccttattgaagttcaaattgtcccatctttcaagctggctcttgagtactttggacatgaccccattggtctttgagaatgtacttgctctctggtttggcaagatgctgcaggtttattgtgtgcatttactgctctagacctggagtcagccatttctcccaggagccctagttccttttagtgagaagtgsctccacaacctttgtcaaaatagcatgtaaaacaaaatataaaaaaaggaaaatagaattaaaaaaaaaacacaacttgggtaccaggggtgcacagtactgctgtggtcagtacttcctcctcctcctcttcctcttcctcttcttcttttttgagacagtctccctctgttgtccaggttggagtgcagtggcacgatctccacttactgcaacctctgcctctcaggttccaacaattctctggcttcaacctcccgagtagctgggattacaggtgtgcagtaccacacctggctaagttttgttttgttagtagagatgga

SEQ ID NO: 568199 - DNA, 559 bp, Homo sapiens
agccggcgtggtagctcgtgcctgtagtcccagctattcaggagactgaggcagaagaattgcttgaacctaggaggtggaggttgcagtgagctgagatggtgccactgtactccagcctgggtgacagagcaagactctgtctcaaaaaaaaaaaaatgtatacagaggttcatttgttcccttttgctttcaatgtttaggggatttgtaaaacttttrtaattatatgacatacttacatgtttctaaaatcagatctacagaatgaattatattcagagaagcctaacttctattcctttctgccccaccttgtccccactcttccccatatgtaaccattatacgcaatatacagtttatccttcatggcatttgtaaaacatggccacaaatccttggatagtcatcccattaagagatgtggtctatgtccctctgcttgcatctggaggatttgtgactgctttagctaacagtgtggcagaaatgatgctcagagacttctgaggtgggttgtaaaatgccttagagcctccacccagctcacctgggg

SEQ ID NO: 568200 - DNA, 559 bp, Homo sapiens
agccggcgtggtagctcgtgcctgtagtcccagctattcaggagactgaggcagaagaattgcttgaacctaggaggtggaggttgcagtgagctgagatggtgccactgtactccagcctgggtgacagagcaagactctgtctcaaaaaaaaaaaaatgtatacagaggttcatttgttcccttttgctttcaatgtttaggggatttgtaaaacttttataattatatgacatacttacatgtttctaaaatcagatctacagaatgaattatattcagagaagcctaacttctattcctttctgccccaccttgtccccactcttccccatatgtaaccattatacgcaatatacagtttatccttcatggcatttgtaaaacatggccacaaatccttggatagtcatcccattaagagatgtggtctatgtccctctgcttgcatctggaggatttgtgactgctttagctaacartgtggcagaaatgatgctcagagacttctgaggtgggttgtaaaatgccttagagcctccacccagctcacctgggg

SEQ ID NO: 568201 - DNA, 586 bp, Homo sapiens
atgattcactgcagccttgacttgtgggctcaagcaatccttccacctcagcctcccaagtagctgggaatataggcatgagccacaacacccagctaattttttttgtattttttgtagagatgggattttcccatgttgcccaggctggtctgaaacccctgggctcaagcaattctcctgcttccgcctcctaagttgctgggattacaggtatgacccactgcacctggctaacataactcttatatgcagtgagaaaccaaaagattcttytaactcaccttgttgggatattccttgtattgtgatggtctggaatcaaatccgtatctccaagatatgcctgcacatactaaggtctatagttttgaataatcaaagttatttcatttatgtacatttatttaagaaatattttcactcactatgatataatttctttggtagagatcagtagccttagtgatgggcaaggtttaatatatctttatccatgacattgctactaagcatgtttcaattgaatgcaagtctcagacaagagtttgtccacataaaatctttttggcaagcaagctcagtg

SEQ ID NO: 568202 - DNA, 542 bp, Homo sapiens
gtaacatattgcataactatactacaatatcacagccaagaaattgacattggtagatttattcagacttcaccagttttacacatattcatgtatatgtgcatatgtctttggttttatcaaattttctsacatgtgtagattctcataactaccactacagtcagggtggagaacagttctgttgccataaggattcctcgtgttggcctttctatccacactctccctccgtctccactccactccctaatccctcataactactaatctttttctctatgtctataattttatcattgtaagaatgttgtatgaatgaaatcgtacagtatataacttttgggactgggctttttcattcagcataattcccttgagatccatccaagtttcctgcatcaatagttcattcttttctattgctgagtagtattccattgtatggatgtaccatggtttgtttaaccattcacccattggcaggcatttgggtagtttccactttttggttcttacaaatagagctgctataaatattt

SEQ ID NO: 568203 - DNA, 574 bp, Homo sapiens
tatatcactacaaaaaaaatcaaaacataaaaacagcaaaagagaaaaagaacaaaagaaataagaaacagaaaacaattagcaaaatggcaatagtaaatccttacctatcaataattatttgaaatgcaatggattaagttctctaatcaaaatatatagagtagctgaatggatttaaacatatatattgagctatataatgtctacaagacattcaaatttaagagcacaaataggctgaaaataaagaaattggaaatgatattccgtgtaaatggaaaccaaagagagcaagggaggctatatttatatgagacaaaatagactttcccccaaaaactgctgcaagagaaatgaaggtcattacataaagataaaagtgtcaattcaacaggaagctataacaattacaatatatgtggacccaatattagakcacctaaaatataaagcaaacattgggagagctaaaggatatagataatacaataataggagactgcaacacccatttacaataatggacagataatccagacaaaaatatcaagatgagaaataaaaataaaat

SEQ ID NO: 568204 - DNA, 575 bp, Homo sapiens
cctgtttcttcagatacacagacaccaagacatacagcaaagataaagaatattcagggaaacatgacattatcaaagggacaaactaaagtaccagggactaaccctaaagagatggagatgtacaaactgacaaaaaattcaagaaaargcaacctatggaattagagaaaatatttgcaaaccatatatctgacaaagagttaatactgaaaatatataagaagctcaaacaactcaatagcaaaaaaaacagaaaacccaattttttattttactttattttatttttatttttttgagacagagtctcagtccgttacccaggctggaatgcaatgccacaatctcagctcactgcaacctccaactcctgggttcaaacaattctcctgcctcagcctcctgagtagctgggactacaggcatgtgccaccacatctggctaatttttttatttttagtagagatggggtttcaccatgttggccaggctggcctcgaactcctgacctcaagtgatccacctgccttggcctcccaaagtggtggggttacaggcatgagcccccaca

SEQ ID NO: 568205 - DNA, 536 bp, Homo sapiens
cacagtgagccaagatcgcgccactgcactccagcctgggtgacagaaagagactccatctaaaataataataataattatytagtttcactgtaattattagaagctttgtgtatgtatactcagaaagaaattcgagaaataaaagaatcgtggagaaatagtgttttacacccattttttttttcaactccaaataggaggtattttgtgatcccaaataatgatgactagataatctctggggagaggttgtggcttatgtgtcctaatggcagggttgggggtggcctgctgtttctgtctcataggccaaattcactcagttgctgcttgtcatatagggattagcattcagttctgaggacagtgtaacttgtaatgttgtcactttctgtttgggtaaagctcaatcgcacctcaaccttggatctctttgactttttgctgttatttagattcattcaaagcctgagtgggcatagagttttctcttacgcaggtcttgctataacgcactctgtttttctaaatag

SEQ ID NO: 568206 - DNA, 631 bp, Homo sapiens
ctggctctgttgcccaggctggagtgcagtgacgtgatcttggctcactgcaagctccrcctcccgggttcacgccattttcctgcctcagcctcctgagtagctgggactacaggcacccaccaccgcgcctggctaattttttgtatttttaatagagatggggtttcaccatgttagacaggatggtctcgatctcctgaccttgtggtctgcctgcttcggcctcccaaagtgctgggattacaggcataagacaccgcgcccggccaaacccagtatttttaaaagaaaaaaaaatttaacaggaacttgtcaaaggaagatatacagacagacaatatgcacatgaaaagaggctagagtcattaatcatctgggaattgcaaattaaaaacacaatgagatatcacttcacataggctagaatggctggagttgaaaagaccaacagaagactgacaataccaattgttggtgaggctgtgcagcagctggaactctcatacattgctggagggtgtataaaatggtacagctaagttgggaaatagtttagcagtttcatgcaaaattaaaaataaacttaccatgtgattcacctagaaggaattgccagatcttctagata

SEQ ID NO: 568207 - DNA, 544 bp, Homo sapiens
aagaaaaacttcaaaatcaagtgattttactgaagctttataaaaattcaaaaagcttaatcaatagaaaaaatgtgagatgtgtatacaactcattttatgaattatagtgtggtgaatactgtcctccaaaaattcacacctatccatacctccgaatgtgaccttatttggaaacagggtcattgcagatgtaactagttaaaattaggtcgtattgggttatgatggatcctaaattcaagggactgatgtctttgtaagagaaagaagaagactcaatcagatggtcaacactgacacagagcaaagaaggccacatgaagacagaggyagagattacggtgatgaagctacaaacctaacaacactaagaattgctgacaactatcagaaactaggaagggaaatggcaggatttttctgcagatgcttcagaagaagcatagtcctgctgacaccttgatttcatatttctaacctccagaactgtgagggaatacatttctcttaaaaataatagaattttattactattactatt

SEQ ID NO: 568208 - DNA, 529 bp, Homo sapiens
ttgctgagtcacccttgaatttcactcttatgtctaagtactcactcagtattttcacttgaacgctgataggcaattcacactcaatatactaaaaaccaaactcttaatcccagccacttcctaagaaaactgytcttgccatcttattcttaaatgacagctccatttctctagctccttaggtgaaaaatttgaaacaacattgattcctgtctatttctcacagactgcatgcaacccatggactctcactacttgctctgctaacacccgcgtccaagccatagccaattctcccttatcatttacaaggctccccacttctatcttttgctttctactgtattttcctaatacaccagtggagtcatattttaaaaagtaggtcagatcatgcattattttctgctcaaaaccatccaatggcatctatcgaaataaaagggagaaaaagggaagttttttttaaccaaatgctgtcataaccctgagttatacgtataactgacctcatccacttccctga

SEQ ID NO: 568209 - DNA, 557 bp, Homo sapiens
tctgtttatgtcttttatccatttttaattgagttttttgtcaatatttcgggtttttttcaattgtttttgaatacttacttagttataagctcttccccataaccaattgatacccattatggtttttcctagttttttctctggattcttacactttaggtatttcatttaaatctttaatctataatgagttattttttgtatgtgtatatgatgaaaggtagaagtcragtttcatccttctgcatatagctagccagctaacccagcagcatttattgaaaaaaaattagcccggcgtggtggtgggcacctgtagtcccagctactcaggaggctgaggaaggagaatggtgtgaagacaggaggcagagcttgcagtgagctgagatcgcgccactgcactccagcctagatgacagtgagactcagtctcaaaaaaaaaaaaaattgaaaagaaaagaaaatcctttcctcatggcttatttttgtcaactttgtcaaagatgagatagccattggggtatgtctttatttccgtgttctctgttctg

SEQ ID NO: 568210 - DNA, 465 bp, Homo sapiens
cagaaagtttaacaaataaagtaaaattaaagagtgcgtagacacacacacagaagtttcccattaattctccaatcagaaagaatatttcttcacattttaatgcattaaagaaagtttggtttaaactttaggtacaattttgagactttcacttaaaattatgtcataaatgttttctatgtacataaatgttcttggaaactatttttaaatgcctattttctatgtatttagagaaactaggtgtatttattacataaaaatagaaaatataggtgagcaaatagaaaattcaactaactatgctaatttccaataacttctgacctattttaaagtatattctgtaatgttgtatgcatttatcactttagaatatcttgatttaaaaaagtaaggaaacctaatattttctaaacwcttattctcaaaattagtgagtttaagcatgtgtataaatat

SEQ ID NO: 568211 - DNA, 434 bp, Homo sapiens
ttggaacatgcattgcattgtaaaaaatgtgtgctagagtgagtcatatgttacaaaagagatttggagtgaggtggtcctgaacacataacataaatattccaataatcaaccctatttacttgagagaattactaaacattgagattcagtattctcattgataaaatcaagatactaatagctgtttaaagttttgttgagaagattaattacatatagawacatataagatatatatagatatatagatatatctgaaattcacaaatacacaaaaagactaacacacaaaacttcataattattgtttctctttgcctttgtaattacaattatttataaactgatctaaaaagcaaacttcttcagaattttgaaagcttataaaaatttgttttaaatgtcttcaatgaaataagcctaaaaagcac

SEQ ID NO: 568212 - DNA, 351 bp, Homo sapiens
acaccttgcgcgacataggaatattcatactggagagaagccttacagttgtaatgaatgtggcaaggtcttcagtcggaattcacaccttgcacgacataggaaaattcatactggagagaagctttacaaatgtaatgaatgtagcaaggtcttcaktcggaattcacgccttgcacaacataggaatattcatactggagtgaagccttacagttgtaatgaatgtggcaaggtctttagtaaaaattccatcctagtacaacattgcagtattcataccagagagaagccttaaaaatttagtgaagctggcagggcgcagtggctcatgtctgtaatcccagcact

SEQ ID NO: 568213 - DNA, 351 bp, Homo sapiens
acaccttgcgcgacataggaatattcatactggagagaagccttacagttgtaatgaatgtggcaaggtcttcagtcggaattcacaccttgcacgacataggaaaattcatactggagagaagctttacaaatgtaatgaatgtagcaaggtcttcagtcggaattcacgccttgcacaacataggaatattcatactggagtgaagccttacagttgtaatgaatgtggcaaggtctttaktaaaaattccatcctagtacaacattgcagtattcataccagagagaagccttaaaaatttagtgaagctggcagggcgcagtggctcatgtctgtaatcccagcact

SEQ ID NO: 568214 - DNA, 578 bp, Homo sapiens
tcacagtgatgttctatataggtgttggaaactgaatttttgaattctgagccattgctcctggtagaaatttataagtgtatatctatatctataggtatacatctatatctagatatatatatatatcacatataatgttaaatcttaaaaataacatcatagttgattctattttatttattttgcagaaaagaaaatgaggttcagagtgttaagtgacttgccatatcaaagttgtgtcagagttgggagtcagactcggtcccactaaccccagacctggagcttcttgcactacatcgaatgctcctaacatctccactctctggtcatctgtgcatgagatctgagcaagaaggcagagcatagtcttgttccacctcaactgtgaatgtgtgtctacttcaatttctcaccacctgagtatggattttagggttccaaataaatttcagtgaataggcaaatttacaaatatcacatctgggaacaatgagggtcaattacatacctatctgtattcatgatatcagtatagtttcctattacrtgaaaaacaaatgtgatatatttgg

SEQ ID NO: 568215 - DNA, 595 bp, Homo sapiens
attctgtatcctgcaaaattatccttcagaagtgggaaaataatgactttctcagacaaattaaaattgaggtaatttgttgccggttgacctgccttgcaagaattttttttttttttttttgaaacggagtctcgctctgtcacgcaggctggagtgcagtggcgcgatcttggcttcactgcaagctctgcctcccaggttcaygccattctcctgcctcagcctcctgaatagctgggactacaggcgtccgccaccaggcccggctaattttttttgtatttttagtagaggtggggttgcaccatgttagccaggatggtctcgatctcctgacctcgtgatccacccacctcggcctcccagagtgctgggattacaggcgtaagtcatcaagcctggccaagaaattttaaaagaagttcttcagagagaagaaagatgatatatttcagaagcagatgtacatttaaaaaatgagcatcagggaatgagtaagtaaaggtaaaataaatatttctttgtattcttaattggtctaatagataactgttcaaaattacaataaaagcaatgtattgaatgattttac

SEQ ID NO: 568216 - DNA, 595 bp, Homo sapiens
attctgtatcctgcaaaattatccttcagaagtgggaaaataatgactttctcagacaaattaaaattgaggtaatttgttgccggttgacctgccttgcaagaattttttttttttttttttgaaacggagtctcgctctgtcacgcaggctggagtgcagtggcgcgatcttggcttcactgcaagctctgcctcccaggttcacgccattctcctgcctcagcctcctgartagctgggactacaggcgtccgccaccaggcccggctaattttttttgtatttttagtagaggtggggttgcaccatgttagccaggatggtctcgatctcctgacctcgtgatccacccacctcggcctcccagagtgctgggattacaggcgtaagtcatcaagcctggccaagaaattttaaaagaagttcttcagagagaagaaagatgatatatttcagaagcagatgtacatttaaaaaatgagcatcagggaatgagtaagtaaaggtaaaataaatatttctttgtattcttaattggtctaatagataactgttcaaaattacaataaaagcaatgtattgaatgattttac

SEQ ID NO: 568217 - DNA, 595 bp, Homo sapiens
attctgtatcctgcaaaattatccttcagaagtgggaaaataatgactttctcagacaaattaaaattgaggtaatttgttgccggttgacctgccttgcaagaattttttttttttttttttgaaacggagtctcgctctgtcacgcaggctggagtgcagtggcgcgatcttggcttcactgcaagctctgcctcccaggttcacgccattctcctgcctcagcctcctgaatagctgggactacaggcgtccgccaccaggcccggctaattttttttgtatttttagtagaggtggggttgcaccatgttagccaggatggtctcgatctcctgacctcgtgatccacccacctcggcctcccagagtgctgggattacaggcgtaagtcatcaagcctggccaagaaattttaaaagaagttcttcagagagaagwaagatgatatatttcagaagcagatgtacatttaaaaaatgagcatcagggaatgagtaagtaaaggtaaaataaatatttctttgtattcttaattggtctaatagataactgttcaaaattacaataaaagcaatgtattgaatgattttac

SEQ ID NO: 568218 - DNA, 553 bp, Homo sapiens
gatggtcttgatctcctgacctcgtgatctgcccaccttgtcctcccaaagtgctgggattacaggcatgagccaccacgcccagcccctccttgtaattaacagttcacttttatataatgcctggcctatggtagatgagtatttgttaaggtgaagaggaaatatccctaggcacaagctgatgaaatgcagggtgtgtggaggccacagcacatgtggaataagtgctgactgcctgcaacgaacttcattaacacaaaatgttaagcttagtgattcataaatttaaatgcaaatattgaataaaaggttttgaaagatttttttggttattttaccctaaaacttwttttagatattttgatagtatgactctttgtctacccagtcacactagtgctgaagaaatgtaacttttgctttctataattcaatataattttatttcaaggcctcgttcttaagaaagtgtcaaaaaaaaagccaaaatacaacaaatttagtttaaagatctcatttggctttattcgcaattgtagaattgggcaac

SEQ ID NO: 568219 - DNA, 345 bp, Homo sapiens
agggacatctcatttttgctgggtggktgtagaatctaaggctttccacacgatctccctgatatttatttcttgatcctttggctaggaagaggaggctttgttttggggcatatacacacacgttggtgtttctgggttgctggcccctttagctccaggtctgagatacataagacaaaaagagcacccagggatctcaccaccctgttgctcctccagtcctgaagtctctagtcgctttccttcttctttttacttttcagaggtgtattttcatttcatctgtagtatccagtgatatggtttggctgtgtccccactcaaatccccaggtgttgtggg

SEQ ID NO: 568220 - DNA, 625 bp, Homo sapiens
aacaatgtgtttttatgttaatttttaatggatttattgttatttaaatattttaataaaatatctcaattgaagtttctaatataataaacatccataattataaaccacataaataaaatttatttacagtcctcaataatttttcagagtataaagaagtcttaagaatagaaaagttgagaattgcagtaaatcagcatatatccttatgagaatggaaaatgtgtattattcattctgatgtcaccagagtctcgcttacagcccactccaaaccagtagtttgatgtgtttgtttatttaccaagaaaagagtgaagttgaaattgctcaacagaaattgagagcctattttaatcatccatgtgattaaatttgaatcactgtacaataactcatgtagagcataaataagatcctcaattttattattgttttttgaatcacttgtgaacaagtctcagaggtctagaagctggaacagtggagaagctaccataatgcaataaacatgatgattttcttaattaagatgatakttaagatttgatgtagaccaaactctagcagaactgccacaaaatttcagttgaaatagtgaggacaaacatttaaggtaact

SEQ ID NO: 568221 - DNA, 576 bp, Homo sapiens
cactcccacttcacaggtgaagtatcatcaggccagaaacaccaaaatgagatgaccagttgagtttgggttccagttcctattccaaagcgtggaatatgtcaccagatactttaattttttttttttttttagatggagtattgctctgtcgcccaggctagagggcagtggcacaatctcgcctcactgcaacctccacctcccgggttcaagcgattctcctgcctcagcctccagagtagctgggattacaggcatgcactaccatgcccagctaatttttgtttttttactagagacggggtttcrccatcttggccaggctagactcgaactcctgacatcgagatccacccaccttggcctcccaaagtgctggaattacaggcgtgagccaccgcacccagcccagatactttaaaattttaaggcaagaagttgaagctcacataaggaaaaacagtcttttattaaactacagaaatacattatgtttatcattgttagtgtgttgtgtgtatgcaaaatagagaaagaaaatcagagacattttaaagcccctcttttaagccc

SEQ ID NO: 568222 - DNA, 424 bp, Homo sapiens
tatatatatacacacacacacacatttctaaagcaatttttcctaaatattggttayattttggcaaagcatcagttgataatgatatgctatcaatacttaattcatatttgttttgggagtttaaaaacacaaatgtaaatcctacagaaatgtaccaccagtgaccattataaacagtataatttagttgatattttcatatgaccttgctattctcacagcatatctcattgtgtaaaatgtcaagggaaaaagtagtttaaattgtggctggagaaaataaggtagcaaaataaaatgtaaaaaaatttaatcgagttaagaaatgaatagagagaagcaaaaaagttatgggaagtcctccctggagatgtttaagagcaagataactgtccatctgtttagaatagttttagtgtgg

SEQ ID NO: 568223 - DNA, 517 bp, Homo sapiens
cccaggctggagtgcagtggcatgatctcggctcactgcaagctctgcctcccgggttcatgccactctcctacctcagcctcccgagtagctgggactacaggcaccggccaccaagcccggctacttttctatatttttagtagagacggggtttcactaaaaccaggatggtctcgatctcctgacctcgtgatctgcccgtcttggcctcccaaagtcctgggattacaggtgtgagccaccgcgcccagctgaacccctttaaagagttcagaacaaaggtgtcactcgcccctctgcgggtgttctattttctttgttgagtttcaagasgcataggcagctctgttttcctctattgcatgacctgacccctttggctttggaggtaccagagatgaccttgtactgtgacaggatttgacgttggtgtgtataatggcagacaagagctacaaagctaggggtggctgagcacagtttacagaaagtggtcttggctgttgtttacttt

SEQ ID NO: 568224 - DNA, 517 bp, Homo sapiens
cccaggctggagtgcagtggcatgatctcggctcactgcaagctctgcctcccgggttcatgccactctcctacctcagcctcccgagtagctgggactacaggcaccggccaccaagcccggctacttttctatatttttagtagagacggggtttcactaaaaccaggatggtctcgatctcctgacctcgtgatctgcccgtcttggcctcccaaagtcctgggattacaggtgtgagccaccgcgcccagctgaacccctttaaagagttcagaacaaaggtgtcactcgcccctctgcgggtgttctattttctttgttgagtttcaagacscataggcagctctgttttcctctattgcatgacctgacccctttggctttggaggtaccagagatgaccttgtactgtgacaggatttgacgttggtgtgtataatggcagacaagagctacaaagctaggggtggctgagcacagtttacagaaagtggtcttggctgttgtttacttt

SEQ ID NO: 568225 - DNA, 500 bp, Homo sapiens
ctgggctcagacttaccctgagtggggcttgctgcagccgctgtgggggtttgggggtggttctcaggccaacagggttatgtttcagagggaattatggctgtgtctctgttttatatcgttcaccagcaaagtgtgggatagccagtagtgacagccctcacccaactcccatgcagttggtgagatcagtttcactcccacagcactcctgccccctactcagaccttgccccaggctaggagcttccccattgagaaagcaaggaagccttggggcctcacccctttccatcagtccacactgtcagtggcagctcctgcacttgaatctgcagcagttcctttttgaycccctgggttctgctcaagaaaatttgtgccttgtcagttggaagctataaatgaaatatttgttatatgtctattttatacttgtatgggagacttgcatttacctttcttcagaattatactgtagcagtaatgaggggtttaca

SEQ ID NO: 568226 - DNA, 481 bp, Homo sapiens
tgtcaggaaattctgggtttctctggacacctgatatgttttcattttctgtatgtgagctatgatcacattatccacttttggggccattccattgctcagaatttaatgtatcagcttccttaccattttttcaagaccttaagacagctgtgcattaaatactctgattttctcttgttggtcaaacctcatttcattttactcttatttatctcattagacaaatcacattaagagagctactattcattgagcttgtactatgtaccaggcatattttgggggactttgcatgtattacttatttctaacaattacattctragacacatactattttctaaattttagtgatgaggaaaaccagatatgtttgactccaaagctagtgtttgctatccgcttattatcatagatgtcatttggtaacccacttctaccacaggtgcagtttagaaaccaagccttataaatcaat

SEQ ID NO: 568227 - DNA, 587 bp, Homo sapiens
gcctaatattgatagataaactctataattataaaataattatgtgaaagtggagtgttgctgaattttgcatgttgtattatttaataatgttttactatcattttgtcattcaagtaaaagtctcatttttccaggaatattttgctgctacattttcaccattgagaagcaaaacaaaaacaaaacaaaacaaaaaaacagcgaaacaatgctcatagttcttaagaaaagaaactttgtaggttagtatctaggcataattgagarttatgatcataatgaaacaactactagcctttcagaaaaggttaaaagctatacatgtttgagaaaaatacctttgctcattataatacctggtacatcatgttataattaagattgtgtcactctttccattataaatcactattttaaagactcataaagcagctgtaaaaatgagctccaggctcaacttggcatgtaaaatattaacccaagagaatttatgttttttatttttattttacttttgtacaaaactgtctttcaggccttcttaaaataaagcaaaatttcaagtagattttttctttcaggtg

SEQ ID NO: 568228 - DNA, 457 bp, Homo sapiens
acctcaagtgatctgcctgcctcagcctcccaaagtgctgggattacaggtgtgagccactgcgcccagccaggggatggatattctcaaagtccagacatcaccaccacacaattcatacatgtaaccaaaaaacatttgtatacctgatggtattataataaaaagactaataagaaaatgttggtaaagatttatttgacttttagatagagatctttatttaaaacacaaagtctgaaaagatataattaatcaagactgaaaaaagacagaaggatgattgtataaaaaatcctacttcataaaaatatggttgaataatcacaaagaggtacagatacatacttactagacagttaaagatatagagccaccgttttcttatacattgccaaygaagtataattggttcaactttggaacatattttgacattatctactaaggaaaaaga

SEQ ID NO: 568229 - DNA, 408 bp, Homo sapiens
tgaagtcccatggggctgcttctcttgtcacccacctctgtgaaagggaacacagtttgatttttaaaacttcacgcgtggctttsgggaaaaatagggaagtgagccttccctggcactccttgctgagtcaaaagcaggcagggacaagcttggcctagaggaaggttcctgtgcttttctgccagcctctcctattaggagctccgtgatgaaattagaatggaaaaaactttaaagggaaattttataggcagtataatagattattaaatgtttaatgatgggaaatttttcttatgaaaggacaagatataagagttagtctgcatacttacttcccctagatttttctctgaatattattttttgctataagagttagtacaaactacattgtgacaaata

SEQ ID NO: 568230 - DNA, 557 bp, Homo sapiens
catatatttatataacacataaactatacaaatttatatcacattagtttagtttaaaatattactagactgtacctgcctatgcatacatatgtaggtatatataatacatgtaaatatatmtatttatatatttatttttccttctagttgtctttctccttaatttgtacttttcctctttctccttcttctttccttccccttttcctgcttcatcttcttttcatcaacaaaataccaaacggaattaatttgtataaactgccaaaaaggaagagacttaatctttgactatgaaaaattaggctaatgtttttatttttattcataaaagagcatttggtgaaatgccatggtagattttatgtttgcacactacaaatgagatggagtttacttttactctctagaaaagaaaacactgtaacttcttagctattcatgattttatatatataaaagtaaaccatctgtaagccaatttccttaaggaaattaggaacatttttagaggtttcatgataaggtgaaataaatgtttgatggagccaatt

SEQ ID NO: 568231 - DNA, 530 bp, Homo sapiens
ataagtggcctactaaacataatcaatagcctcctgattggtttcctgttactgtccttagccccctacagtctgttaacaataccacaaagagtagttctggctccttctgatagaaatctagaaccgctcagagcaagggtcagatcttatcatcctgtgcatgaaaccctttagtgactcctcacctcacagaagtaagaatgaacatctgactgggtcttcaattcctctgatctttctgattctatctcctactgccctcatcctgctcacagcagggagtctcagtggctgccttaatgtctcctcaatcatgccgggtactcacttccacctcaaggtggattggacatgaggccttcctctgcctggttcccattcctcatatatacgcatggcttgctcccttacctcctttaggaatttgtgttaatatcatcgtattattttcccatggctgctataacaaactaccacaaactcggtgkcataaaacaatagaaattccattctctcacagttctgga

SEQ ID NO: 568232 - DNA, 534 bp, Homo sapiens
tgcaacctccacctcctgagttaaagcaattctcctgcctcagtctcccaagtagctggtattacaggcatctgccacaacacccagctaattttttacttttagtagagacaggktaccaccatgttggccaggctggtttcaatcttctgacctcaagtgatctgtccacctcagccttccaaagtcctgggattagaggtgtgagccaccatgcctggtcagaatatatatacatattttttttcttaatttttctacagctagaaactgaaacccgcaggatttcagtgtgatgcttgagatgaccaacatgactagtttgctgtgaactgtattttgtgtattgattattttaagaaatatttatcctctaaggagcttgcaaactacccaggaaaagaatgtagcacaatgaattgttatgtattattccatttgttttaataatagacatcatgttagtccattttcacagtgctataaagacatacccgagactgagtaatttacaaagaaacaaggtttaattga

SEQ ID NO: 568233 - DNA, 618 bp, Homo sapiens
tttccacaaatccttaagcagtattagaaatttcttgtttatgattagtattattatcctatctcaagatatagtgacaaataatcatgggcctgtattatcagaggttacccagtctatccactgtattctgatacttaaagatactttattctgatacttaaagatacttcatttttgttataacctaacagaattgtaaaactgtgcctatgaaactaaaagctgtcatagtgatgaagtgacagtaaacagaaaccgaagttattctgcttggcaagttattcaaattttattgaagaaagggttactaatttattttcacctttaaaccagatcacaaacttagactgctaaggagatagcctaactaacctctgccctcctttatgaaagayggaacattgattggtttctaattatccatattatagcttaatatataccaattaagcactataatactggttttgtcaggcttcttcaataaacttcagaatcaaatagaagcaatggtacaaaggttaaccagaaatacattgttattctggggtcatttcttgcaagttctgggactgtcatttcagtggaatggtacaaataatgaacatttgcctg

SEQ ID NO: 568234 - DNA, 495 bp, Homo sapiens
tatcatgagaattggtcttttccatgctgttctcatgatagtgaatgggtctcatgagaagtgacggtttaaaaatgggagtttctctgcgcaagctcttttgtttttttgcctgccaccatccacgtaagatgttacttgctccttcttgccttctgccatgattgtgaggtttccccagccacatggcactgtgagtccaattaaacctctttctttcacaaatttcccagtcttgggtatgtctttatcagtagcatgaaaatggactaatacacaggttgtgcaagtagttcttttttcacatggctttctgacttcattttggagctgtgaaccgaagtgatgtcattttgtatatcacatctcatgtacaaaacactatttggcaaaactgtaaagaaggttccatgraaaagagaactccatggctgtggttggcctccctaaaacggccacatctttatctcccagaatctgtgaatatgttcttac

SEQ ID NO: 568235 - DNA, 608 bp, Homo sapiens
aaaacaagaaacaaaaaaaggtttgaaaaggaaatataggcgtttcatttcgcttaaaacatttcaaattaaattttctaattttccactatatattgtggcatttacaactacaacataaaatgacatgctgattagtttatctgggtttcagcaagtgattgattkattaaaataaaatataaaataaaaagtgaaagaggctttctatcaatcctaaaaagaaggtcatttatttggaggcagaattcaacaggaattttgggaattattaggcctataacatggctgagacagagtaatataatcagggtttcaaatcaggaaaattctagatttcattttcttccacttggaaaacagcgctcaaatcattgagaaagagagaggcagcaaatatatgagcagtcgtaaagaaagtttttctgttccaacaatacctagggtggcttggccaccaagtttatataaggtgttatttccagaaaaacagaagacatacctggacaaagagagtagaaagcccaacagaaatccaattcatctgactgtttttgctaaatattctgcacattcattttctctagtgcaggtagaactaatgtata

SEQ ID NO: 568236 - DNA, 415 bp, Homo sapiens
attcactttggtgaagttaattcataggtatttaattttatttgtgactgtcataaatgggatcagtttttatttttttcacatttttcactattgacatacagaaatgctactgatttttatatrttgattttgtatcctacaactttattggatttgtttatcagttattatagtttgtttttgtggcagctttaagtttttccaaataaaagattatatcatctgcaaacaaggataaattgaattattcttttctgatttggacattctttatttctttttcttgtctgattgctctatctagaacttctagtactacattgaataacagtggtgaatctggggattcttgtcgtgtttcagatgttagaggaaagactttcagtgattctccattcaatataatgctagc

SEQ ID NO: 568237 - DNA, 327 bp, Homo sapiens
cccctggttgtcaggcttgaactggtttgcaacacaggcgttcctgggtctccagcttgcagatggcacatcatggaacttctcagcctccacaattgcatgagctaattcctgataataaacctcattctggataaatatgtgtataatcatgtgctaccttatgacatttcagcccatgattgactgcatatatggtagtagtcctctattattctgtttttgcacttctataaagaaatacttgagacggggtaatttataaaagaaaaatttaattgactcatagttctgcatggctrgggaagcctcaggaaacttacaatc

SEQ ID NO: 568238 - DNA, 494 bp, Homo sapiens
atatttatatctaaaatgtaatgtgtgtttatgtgtatatgtatgtgtgtgtacgtatgtatgtatatgcatgtgcttgtcagtgtttgagggagatagatggaggctgtaatttctaaaacagtagagaatgcttcaagcaatagaggaacaatggccttccttgctaatgtgtaaggaaaattccccgtgtttttagagtgtctaatcatccttaaagcagagagtgaatctgtgtgmaactctttgtcatttagaaatataacaaattatttttcccttttcaaagggagatctgggcttttggaaagatagattgatagtcattgttaaaagtggggtatatttccaaatagggaaaaaaatgctgtttgtaaagaataagagattggtctcatgtatgtactaatataatatatgtccatagaaaaaagatctgaacacatatattttgtggagttaatagtttttctgggtctgttgggattatagat

SEQ ID NO: 568239 - DNA, 606 bp, Homo sapiens
caacatctatttttttgtgtgtgtgtgttttaaattatagccattctcgcaggagtaaagtggtatctcattgtggttttaatttgcatttccctgatgattagtgatgttgagcagaaaatggcaatttcagtttgatgcatcacttcttacaatactgtggtagttcaagtttattatacaaggctgcacttttgtttctggtcttcaggatcatccataatccctatgcaccttcttgtcaccactgctcaataaaatgaacaatatgattttcctttcatcaagtgtcttcattttcagtatctaaacacmgccttttctaggcagaattgttcactccatcccaatacatgtatgtttaccctctccccatgctctttcttcagccaaggacattctggtaactgtccctttctcatgaaactcatttcctttcttgaaaggccagattctccatggtgctttcttctttttcatttttccctttctctgagttaccaattcagttttagtttataccttaattgtttcctaaactggttttaacccctcatgaagacttaatctccttgtgaaggaaagcttttttgtagagtggctcaa

SEQ ID NO: 568240 - DNA, 569 bp, Homo sapiens
aactccaaaaaatacataaatttgatcatctcatttctatcgctagtgccccactgtctatagggartcacagcccgaattacagaccccaggagggttaggctgtacctccctctcctatccatagccagggctgcagcagttttaaaacatctgcctggctgcttcaggccctctcacattttcctgcgtctccacagagtagaactattcaagacatctacctttcctaggaaggcttctagccctcacaagcactccctcttctctgcatccttgccagacctctgttattccacagatcatgttgcaagacaaatgtttatttcctgtcacttaatttcagaccgctgaagggaaaaaaaagagtggaaaatgaatcatctgtgtatccttgtgatcaactgcagtgtcctgtataacccaataatactaaaagaatgaagatagcaagtttatgatctacctcacttcacaattaagctgatatgatctaaaccaaacatttattaataattgaaatgtcagtagtcaaagatataaataacactcaaatgtgaagggtaaat

SEQ ID NO: 568241 - DNA, 508 bp, Homo sapiens
agttcttcatctccatctgagaccacctcagcctggacttcattgtccatatcactatcagcattttagtcaaagccattcaacaagtctctaagaagtttcaaactttcccacatctttctgtcttctgagccctctaagtctctaggaatttccaaaatttcccacatttttctttcttctkctgagccctccaaactgttccaatctctgcctgttacccagttccaaagctgcttccacattttcaggtatttttacagtagcacaccccaccgcccccccccatcccccgtggtaccaatttactctattagtctattctcacactgctaataaagcaatacctgagattgggtaatgtataaaggaaagagctttaattgagtcacagttccataggactggggaggcctcaggaaacttacaatcatggcgaaggcaaagcaaattcatccttcttcacatgatggcaggaaggaaagctgctgagcaaaaggggggaaag

SEQ ID NO: 568242 - DNA, 466 bp, Homo sapiens
ggtgaggcatttgttttccatctgtatatargggatcagcacctagacctgtgttttgcaagcagctggtagcaaatttttagtgggtcaagaaataaatatggaagactgagacccacattttttaaagctacgttttgttgaaaagttttgttttggtacacgtgctttttttttttttttttttgatcacccaggctggagtgaagtagcttagcctccactcctgggctaaaggaatccccctgccttggcctcccaagtagctggggctacaggcgtgagccaccacgcgtggctaaatgtttgttttttgtttttgtttttttgtagagacggcatctcaccatgttacccaggctggtctcgaactcctggactgaagcgatctccctgcctcggcctcccaagtagctggggctacaggcgtgagccaccacacctggccacaccacacattaaacaa

SEQ ID NO: 568243 - DNA, 621 bp, Homo sapiens
tccatggtagttaaagctatgtgtcttaaaataacttcaccctgattgagttaaactttgcagtggctaagctgcaacaaacttcaacccattttcacctcagtttctccattagtaaaaccaagatacaaccttctcaactttgttttcctcatatatgattactttttaaagttttaaaaagtactttcaggcctctttacttactatgtactttgatttgttggagaaagataagcaacagtactgtatgtttactatagcaagtcatattagtaaaagttttgagcatggctaagattaaaaattaaaaagattacatgttttaagaaacagaagaatcataaagagtctttatcaggccgggcacagtggcttatgcctataatcacagcactttgggaggccaaggcaggtggatcacctgaggtcaggagttcgagaccagcctggccaacatggcaaaaccctgtctctactaaaaatacaaaaattagcygggcgtggtggcacatacctgtaatcccagctactgcagaggttacagtgagccgagatcacgccactgcactccagcctgggcaacagagtgagactctgtctcaaaaaaataaaaagagt

SEQ ID NO: 568244 - DNA, 609 bp, Homo sapiens
cattgacattcttcacagaattaaaagaaactattttaaaaaacatatagaaccaaaaagagctcacatagccaagacaatcctaagcataaagataaaagctggaggcattatggtacctgacttcaaactataaggctacagtaaccaaaacagcatgataatgatacaaaaccagacacacagagcaacagaacagaatagagaactgagcaatagatcagaatagagaagatagaataagaccacccacctacaaccatctcatctttgacaaacctgacaatagcaatggagaaaggattccctatttaataaatggcgttgggagaactggttagttatatgcagaaaaattgaaactggatcccctctgtacaccatatacaaaaattagctcaagattgattaaagacttaaatgtaaaacccaaaacaataacaaccctaaaagaaaatctaggcagtaacactcaggacgtcagcatgggcaaagatttcatgatgaaaacaccaaaagcaattgcagcaaaagcraaaattgacaaatgggatctcattaaagagcttttacatagcaaatgaaaattagagtgaacagacaacatac

SEQ ID NO: 568245 - DNA, 530 bp, Homo sapiens
gctaaaagatacaattattgttaaaaagaagaaacatcagatattaaactcactgagtaaaggtcacactgaccattaatactggggcttaggtgggagactggcaacctcagccccaggcagttccaaaacttttatacttcttgaatattaagagtcatgayggtggattctggctttctactgccaaaatgcacactagaaggaagtgttctgcttttggtgtgacgccaataatgtgtaagataactatgcattggccgggcgcagtggctcacccctgaaatcccagcactttgggaggccgaggtgggcagaccatgaggtcaggagcttgagaccagcttggctaacatagtgaaagcctgtctctaccaaaaatattaaaaagttagccgggtgtggtggtgcacacctgtaatcccagctactagggaggctgaggcagcagaatcacttgaacccaggaggcaaaagttgcagtgagccaagatggtgccactgaactccagcctggatgacagaacaag

SEQ ID NO: 568246 - DNA, 526 bp, Homo sapiens
cactctctcacccaggctggagtactgtggtgccatcgtagctcactgcatcctcagtcctgggctcaagggaacctcctgcctaggactcccaaaacgctgggattataggcatgggccactgttctcagtccctgtcaagtatatttattcargtccattgcagtccccagtgcccactgtctggtaataaggcctatcttcttgccctggtgtggcgagggtacccctcccagaggagcctttatggcttgctgtatgcaggaagagaaacaccagctaggcttttctgaaactacaattcctccaatgttttcaacatgacataatcaatataccaatccagcataatttgggatggcatgtccttcactccttcatatgtgtagcccccagttatcaacatcccctgccagagtggaacatttgttataattgatgaatctaccttgacacaccataatcacccaaagtcctcagttgacattagggctcactcttggtgttgtgcagtttatgggtttgg

SEQ ID NO: 568247 - DNA, 606 bp, Homo sapiens
gataaataacaccaaaaagcaacaaaacaaaacaaaacaagacataaattcctaatgaattttcaattttcagaatatataaatcattcaagacaattatatcattgtataaccatttttatattatataaaattatataaccatcttttatatyataaaagatatccaagacgatgtaaaatcaattttgggggaattttaccaacattaacagtgacttgatgatgaacaagctttgaagctttcccaggttcttcctgtattaatttctctggacatcttgaatgctaaatctctctctaaaatactcaagagaaagcatactcaaatattgttgccattaaggaagacattattggtaatgtggctgtgaaatacacaaaaaacttaatggatgatttcttaaaactctaagctatgtacagggctctttcacatcatgcacaaaggtgaactcaaatggatcatagacctaaatgtaagagttaaaactgtaacactcctacaataaagcatcagcataaatcttggtgaacttgggttatataaagctgctttagatatggcaccaaaagcacaaataactaaagaaaaatgtgataaat

SEQ ID NO: 568248 - DNA, 490 bp, Homo sapiens
tcagctgcttttaaaaaaattataaatgaagaaactgaggctgtgagagatgaaatgtcctagagttaaatagctagtaagcactgaagctaagacttgaacccagaccccaaacagtctatttctagaaactttactcctaacactacctggcctaaaaaaggtaaaagcagagaggtgctgatcaatttatttattcaacamatgattatttagttactactatgaattatgctggtgtttttattagaagtagagcaatgtgtacaaccttgttcttctgaggcttgcattactgtaaaaaaacagacaatgaaactagcaagaaatggtcaaagaaagaaatgcatagtaattgtgataatcaactctgaattcttatttcagacgtgtattttctataccccagtgattcctaatacaatatatatatagttctatgattcaccaagtttagtccccaaatgttagaatcatttataactcaaat

SEQ ID NO: 568249 - DNA, 490 bp, Homo sapiens
tcagctgcttttaaaaaaattataaatgaagaaactgaggctgtgagagatgaaatgtcctagagttaaatagctagtaagcactgaagctaagacttgaacccagaccccaaacagtctatttctagaaactttactcctaacactacctggcctaaaaaaggtaaaagcagagaggtgctgatcaatttatttattcaacacatgattatttagttactactatgaattatgctggtgtttttattagaagtagagcaatgtgtacaaccttgttcttctgaggcttgcattactgtaaaaaracagacaatgaaactagcaagaaatggtcaaagaaagaaatgcatagtaattgtgataatcaactctgaattcttatttcagacgtgtattttctataccccagtgattcctaatacaatatatatatagttctatgattcaccaagtttagtccccaaatgttagaatcatttataactcaaat

SEQ ID NO: 568250 - DNA, 490 bp, Homo sapiens
tcagctgcttttaaaaaaattataaatgaagaaactgaggctgtgagagatgaaatgtcctagagttaaatagctagtaagcactgaagctaagacttgaacccagaccccaaacagtctatttctagaaactttactcctaacactacctggcctaaaaaaggtaaaagcagagaggtgctgatcaatttatttattcaacacatgattatttagttactactatgaattatgctggtgtttttattagaagtagagcaatgtgtacaaccttgttcttctgaggcttgcattactgtaaaaaaacagacaatgaaactagcaagaaatggtcaaagaaagaaatgcatagtaattgtgataatcaactctgaattcttatttcagacgtgtwttttctataccccagtgattcctaatacaatatatatatagttctatgattcaccaagtttagtccccaaatgttagaatcatttataactcaaat

SEQ ID NO: 568251 - DNA, 598 bp, Homo sapiens
aaatatcctatatctaaggaggkatttttttacttggggtctgtaatacacataggtaaagtggagtgtacatgaacatgtatgcattcttctgggggttagacccatttttctttttttttttcggtggtagggggggattggagggggacggagtctagctctgtcacccaggctggagtgcaatggcatgatcttggctcagtggaacctctgcctcccaggttcaaatgattctcctgcctcagcctcaccagcagctgggattacaggcgcccaccaccccaccccgctatttttttgtatttttagtagagatgggggtttcaccatgttggccacgctgatcttgaactcctgacctcaagtgatctgcccgccttggcctcccaagcgcccggccctagacccatagctttctttaggttgtcaaagagtttcatgactgcaaaaaaggcagaaaaactattaaagctaacaagatgactgtatccaattaactatttatttcagtttttctaaatatcgcttaatagcctgaaacataaatttatcatgattctcttctctgcttcttaaaacccagatgccagtcaac

SEQ ID NO: 568252 - DNA, 556 bp, Homo sapiens
atatctctctggtactctgctttcaattattttgagtacatactgagaagtggaattgctgggtcatatggtaattctgtttttagtttttgaggaaccgcagtactattttccgccctggctgcatcattttacattcctaccaacagtgtacaggggttccaatgactttaacatccttgccaatattcgttattttattttattttttatgatagccatcttaatgggtgtgaggtgatatcttgttgtggctttgatttgcatttcccagacgattagtgatgctgagcatcttttcattatgcttcttggtcatttgtatatattctttggagaaatgtctgtaactcctttgcctgtttttwaattgggttatttatatttttgttgcagaaattctttatatattctggatattatcctttatcaaagatttgatttgtaaatattttctctcattccatagattgcttttttactctgttgattgtgatttttttcccttttttaaaagtttttaaccctttagatattttagtgcatgggatgagtg

SEQ ID NO: 568253 - DNA, 393 bp, Homo sapiens
tatgtttagatagatgttgataactcagccaataacaaagacagaggggatttctagagagagtgatatagtctagacttgatcacatatttggggaataggagagatattgcaaccttgccatcttctaatagagatatctcttccatttctttttcttctggagcaatgkaatatattttcactgatcatcttacaagattagttagaaaaaactctaaaatagatttttcaaacacttctctatgaaaactttcaatttgttctgaaacttagacaacctgtctcaatttgttctaaaattgctagtatcttccttttgaatgcaaaattaagaaaaaacaaatctaacatttagttttttttaaatttctggtcaaaattgtctttaaa

SEQ ID NO: 568254 - DNA, 502 bp, Homo sapiens
tacgtgacacttccgataaagaattcaaagtagctctgttgaggaaactcaaagaaattgaagataacccagagaaggaattcagaattctatcaaataaatgtgtgaaagagattgaaataattaaaaagaattaagtagaaattctgtggttgaaaaatgcaattgacatagtaaagaatgcatcagtcttttaatagcagaatgaatatgcaaaagaaagaattagtgactctgatgacagactattttaaaacacacagaggagacaaaagaaaaaaaaaagcacgcctagaatctagaatctagaaaatattctcaaagggtaaaactttttattattatacttctagggtacatgtgcacaacgtgcaggtttgaaacataggtatacatgtgccatgttggtttgctgcacccatcaacacatcatttacattaggtatttctcctaatgmtatccctcccccagtccccaccccctaacaggccctggtgtgtg

SEQ ID NO: 568255 - DNA, 568 bp, Homo sapiens
tactatgaccatctagaaaatataaccagaaataaagtatttacaatagccacaaaattcatagaccttataggaataaacatattaaaaaatatataaaacatttatgaagaaaattcaaaagctctattaaagtatattttaaaatttgaataaaaagagaataataaattaataaataataaatcataaataaatttgaataaaaagaataatcttcaatgggatggcttaatatgataaagatgtgtatgtgcattctcttattaattataaattcaatgaaattccaatcaaaacctatcttttataaggagcatgataaacttattctaaaattgatatggaagaatagagagcaagaaataggaaagacaattttgaaagagagtagtaartgaggaaaagctgaatattttaaaagaacacatgcaaatttaaaggtaagcatcaaacatgttagaatagatgcctataggaggtgaaggaaatgggaatagagaccaaaggtcataaatacacacaaaaaggaaagccttcgctctggccaatggtagagagtatgaat

SEQ ID NO: 568256 - DNA, 579 bp, Homo sapiens
aaaatatcgcttaaaatgaacttttcaagcagaaatattcctaggctagggatcatttacttggcacagagaaagacttgaagtttggtcatgaaaaatctcacaaacccacagtcccatttacccatacaaaacatttagacttaaggaaaaataatctctgcatagcatttattgctatattctaagtctgtattctaaaatatcttttttatcttggaccaaaaatattttatgtaaatcaaccttcttttatagtgtcttgaaaggaaaatctgattctgtttatataaattttcttagtctgttcttccaagaaagtattcttacacagaatatacattttccctcatgagatgtgatgtggataggcaaggtatgcttacttcttcgtttgtatttatattatcatttaggtttttctaatcagcttctggcagcagggtataggtgaaatgtattaaasatactttttgtttccatgatcctcttaacaaatggagcctctactatttagaaatcacttattaatctgagctcagttgtgtgagttaatgtatttcaaaacaaataaagacc

SEQ ID NO: 568257 - DNA, 589 bp, Homo sapiens
atgatatttcatatatttcatatatttcatatattatataatatcagatacatgggatagatatataatatataaatatatatatattttggcttagagatgcccgtctctcaaattaactgtttcaatgagatgagttgctagtctcttgtgacacagattgaacagaggcaggtcccactgsgggctggagaagagtgatagtggccaggcagtggggaatggctgcagatttagcttcccagtatccattgccgctgcaatccccaacctaatattattgttactctcacatccttccttcatagaagttccagattcaacattgggcagaaaagaacaggactcattagaaaggaaaactaaacatttaagtcatttggcaataagaaaagtttattggtagaaaaaaaagggattcaattaggtaaaaatccctttagtaaagaaaagatgtttcaaacaataggtgtttgaaaaattgtgttgaaggtaggtcgtaatgagaaaaagttttcagaaacaatgggattgtagagaattacagtcatgagtttatagatgctgttattggttacaaattgtaatt

SEQ ID NO: 568258 - DNA, 590 bp, Homo sapiens
gggtttcaccaggttggccaggttggtgttgaactcctgacctcaagtgatccacctacctcggcctcccaaaatgctgggattacaggcatgagctaccgtgcccagtcttgtaatagagttgaaagtgttttttcaaataagattgttcctgaatgctcaggtggggaaaaaaagaatcctccgtatcacattgattaaatatagttgttggttgttctcaactcaaaatctatttgtctagaatttggcacaacttcacaaagttattgaagtattttacataagttttgacaaatattttaccaaactcttgtgccagtgtaacttaatgtgcacgtaactaaattctgctcctgtttatcctatttaggtttattttcagaattcccttagtaataccaaaatcttcasttatttatcatattattcttatgagttttatctttaacaaattgttttatgaagctcctaaaattaaatatcatagactattggtcttcatagatttaagatctgttattttgacacgtagtactgtgaaatttagctaagcctcaaatgtaacatgagagttactcttaaaaatg

SEQ ID NO: 568259 - DNA, 531 bp, Homo sapiens
aatttataaattagacagaggaagagataaacaactaataacatagaagaaatataacaatgtattataataaatgttatgtgaatgtggtctccctcttttcctcaaatgtcttaccgtactgtactcaccatggaccacggtagatcatgttgaactgaaaccaaggaaagtgaaaccacggaaagtgaaaccacggataagggtgggctactgtatcattttttaggacttcatttaagaaatccaattttcatatttgtttataagagttggtgcaaataccctatatgtgaggaaaaaagcttaacacttggtattcacaaataaacgggaaagttaagaagaaatgctttcattgttctttttcacttttagcattctatttcatttagaacagttgtttggggtaaagtaaaggtcaactttaatgtgataactgaaaacatttccttagaaatagtataattatttattaaaataaaytgccagggcttccggtgatttactattaaatatgcatgttaaaaa

SEQ ID NO: 568260 - DNA, 406 bp, Homo sapiens
gaactcacctcacagagccatctctgcctcatggaattatcagatgttaactatgaaatcaatttgaatacacttaggtctagcaaaaatcccactacagagatgggttttaggtttagaatgctggaggggtcacaggtatctaagttttcttttggcagtttagtgattgaggtcactgagatttatagtgtacatcatatgtgtttgtgcgtatgtgacagcaagtatatagctgtggtgacagaaagtcaaaaatacaaaaatcgtgcagagaccaggacccacaacagaaaaacacagttctagcttcttgcaacctccatcaggwtgctgagactaaatacaaaaatatatgttctaaccatcacaattgtatagtatgatactaagcacaatattgccc

SEQ ID NO: 568261 - DNA, 567 bp, Homo sapiens
attctatacatatggcatcctacaatgaatctttcataagcaggtgggcttcctaaatttcaccaataatttgaattaagagtgaatgtaacacagatgtgtttctgcacttgttttgaactactgctaaaacattttttgcccagttagttatcttaagttaatgataaactatgctatttttaaaaagtgctttttaaaaaatattttccagtgatcttttaaackatacaattagttcaacctatgctgattcctttgcgtcatctaacctgattacttcttgatttcaaacttaggacaagtccttctttatacctagaaaactctatccctatacctaccaattttaacttgaaatgtcctttctccttgagtttccaggtgagctataaccatcacagaaaactaaccactcattctaaagtaccttcctacattgcactctggcacaaaccattatatatttagtttcctaatttaaaattattatttttgtttatatgtcactcctgtttactgatagcatttaaataccattaaggatataagattgtcctatttacc

SEQ ID NO: 568262 - DNA, 567 bp, Homo sapiens
attctatacatatggcatcctacaatgaatctttcataagcaggtgggcttcctaaatttcaccaataatttgaattaagagtgaatgtaacacagatgtgtttctgcacttgttttgaactactgctaaaacattttttgcccagttagttatcttaagttaatgataaactatgctatttttaaaaagtgctttttaaaaaatattttccagtgatcttttaaactatacaattagttcaacctatgctgattcctttgcgtcatctaacctgattacttcttgatttcaaacttaggacaagtccttcyttatacctagaaaactctatccctatacctaccaattttaacttgaaatgtcctttctccttgagtttccaggtgagctataaccatcacagaaaactaaccactcattctaaagtaccttcctacattgcactctggcacaaaccattatatatttagtttcctaatttaaaattattatttttgtttatatgtcactcctgtttactgatagcatttaaataccattaaggatataagattgtcctatttacc

SEQ ID NO: 568263 - DNA, 539 bp, Homo sapiens
aaataattaacaatattacagcaacaaaaccccagatacaaataatgaccttgaatgcaaatgaattaaattattcacttaaaggaaataattgctgaaaggataaaaaaatgatccaactatgggctacttataagaaatgaaccttatcagtaaagatacatgcagactaaaattaaagggatagaaaacaatattccattcaaatataaaacaaaagcaagcagaagtagctgtacttatatcagataaaacactctttaaatcaaaacagtatcaaaaagacaaaaaatgtcactatataataataaagagatatagttctaagatataacaattatatatgtccccagaaccttagcattcagattcatacarcaacgattatgagatctatggaaagagatacgctgcaatctagtaattgtgggagaatttaacagcccactctcaccattacatagatcatctagatagaaaatcaatgaagaaatattgactctatactgagctatagactaaatggacctaacagacat

SEQ ID NO: 568264 - DNA, 539 bp, Homo sapiens
aaataattaacaatattacagcaacaaaaccccagatacaaataatgaccttgaatgcaaatgaattaaattattcacttaaaggaaataattgctgaaaggataaaaaaatgatccaactatgggctacttataagaaatgaaccttatcagtaaagatacatgcagactaaaattaaagggatagaaaacaatattccattcaaatataaaacaaaagcaagcagaagtagctgtacttatatcagataaaacactctttaaatcaaaacagtatcaaaaagacaaaaaatgtcactatataataataaagagatatagttctaagatataacaattatatatgtccccagaaccttagcattcagattcatacaacaacgattatgagatctatggaaagagatacgctgcaatctagtaatkgtgggagaatttaacagcccactctcaccattacatagatcatctagatagaaaatcaatgaagaaatattgactctatactgagctatagactaaatggacctaacagacat

SEQ ID NO: 568265 - DNA, 436 bp, Homo sapiens
gttttctgatccagaggttgtgtgtttcctataaacacacacacayacacacacttttaacaaccactcacataggagttctgtacttggtttgttactctgcattgcctttcaatgttgcctgtgtcctgatccgctgtttcatcgcctttgctccagatccacttcttgacctaggtccactgcaacccctagttttaagctccatatgaatatggttcttgaccatattcagcacaattttgtgcttggatttaacagcccttttcatcctgcttctatcaccccgggaactctgattctaagccctgatttcagacgaacacccagtacttgaaagatcttattatgaaaatagggtatattattattggctgtatggccaagaaagacatttgggcttcctgatcttaattgtattaatttgaaaaggggg

SEQ ID NO: 568266 - DNA, 581 bp, Homo sapiens
cactccttgttctcaaatccttgtatcaggctttactggaaaattacaaattcagatatgtgatcaaaattataaggtggaaagatagatgctatatccaggactactccagattttacttggatccaccgttctttcctaatatgtattattccttgacagtttcaccaataatctatcatttacatgaatatcaatacatatatccatcaactacatgaatatttctttaaaattaatatattaagatctattcgctttcttgagattgaaacttatatattatttcgttggacaaccttttataatacttttacaaatcttctacattgacctgaaatgacatacccaaaatgaaatttttractccattttatctctaagatgtgttcctcctcttgaatcccctacttatcttataaggtgttacttttactcatgtatgtactatctttattttgcactcatatttgataagtcttttgcttctgcttattcaggtatctgtccaaacaatagcatatccttctatatttcccaagtgtggagttagataatatgccatgctaaagtaaccacag

SEQ ID NO: 568267 - DNA, 618 bp, Homo sapiens
aacttcttggtagagaagggtggggtccctggtgagggatacaccctagggcctgtgcccacaacccaagtgagaacaggcactcctgttcctgcacccgaatgttgcgttttccaagactactcagtgcccagccmcccgcccccaaaccaaccgtgcccatgtaaacccgagatattagcgggcacactaaatatttgttttatctttttttacacacacacacaaatctttgtgaagttagggaattgtgcctatttcattcacatttacagtcttagaaaagtacccagcccacagaaatacctcaaaaagtatttgttaaatgagtggatgaaagaatgaataaaaaatattaaagagagatattctcaaagagtactttgattgagaatattatttcgttattagcatagtactattataaattgaaaaatatcaacattcataaaagaacatgaagtcccatggtttagcaactttagggcatcagattttctaactaaaaatatttcaaaatatgaaaacatacaatttttgtcatctaagatcaaggttatattctgggaataataatactgtaaaaacattttgtcacactgaaaatacataaagcag

SEQ ID NO: 568268 - DNA, 618 bp, Homo sapiens
aacttcttggtagagaagggtggggtccctggtgagggatacaccctagggcctgtgcccacaacccaagtgagaacaggcactcctgttcctgcacccgaatgttgcgttttccaagactactcagtgcccagccccccgcccccaaaccaaccgtgcccatgtaaacccgagatattagcgggcacactaaatatttgttttatctttttttacacacacacacaaatctttgtgaagttagggaattgtgcctatttcattcacatttacagtcttagaaaagtacccagcccacagaaatacctcaaaaagtatttgttaaatgagtggatgaaagaatgaataaaaaatattaaagagagatattctcaaagagtactttgattgagaatattatttcgttattagcatagtactattataaattgaraaatatcaacattcataaaagaacatgaagtcccatggtttagcaactttagggcatcagattttctaactaaaaatatttcaaaatatgaaaacatacaatttttgtcatctaagatcaaggttatattctgggaataataatactgtaaaaacattttgtcacactgaaaatacataaagcag

SEQ ID NO: 568269 - DNA, 618 bp, Homo sapiens
aacttcttggtagagaagggtggggtccctggtgagggatacaccctagggcctgtgcccacaacccaagtgagaacaggcactcctgttcctgcacccgaatgttgcgttttccaagactactcagtgcccagccccccgcccccaaaccaaccgtgcccatgtaaacccgagatattagcgggcacactaaatatttgttttatctttttttacacacacacacaaatctttgtgaagttagggaattgtgcctatttcattcacatttacagtcttagaaaagtacccagcccacagaaatacctcaaaaagtatttgttaaatgagtggatgaaagaatgaataaaaaatattaaagagagatattctcaaagagtactttgattgagaatattatttcgttattagcatagtactattataaattgaaaaatatcaacattcataaaagaacatgaagtcccatggtttagcaactttagggcatcagattttctaactaaaaatatttcaaaatatgaaaacatayaatttttgtcatctaagatcaaggttatattctgggaataataatactgtaaaaacattttgtcacactgaaaatacataaagcag

SEQ ID NO: 568270 - DNA, 613 bp, Homo sapiens
gctacaaactctcatctaccttcaagttttggaatcaaaattaaaggaaagagtggcaaaacatacatgtaatgttaacaaacattcacattctaaaatattatatcttaatctcraaaggaatagtcctgtttttatgtgaattcccaaaattctgaccccaaaaagatcttttactacctttatctacctagcagggaaaaataaataaatatatgaaattactgaaatatactattatcatcaggaatgcattaaaattgctttgcagatagaaccattggctaaataaaagtattgctgcttaccttgtaaaattatctttgatatcagttctgtaatttaggagagtgtcaatatgattgttttgtacatggcggtcatttttaagactcttagtaatttctttctgataatataaatcaatcttcatagtggtcatttcatttagagcgtatcactatatattcctgaaatgactagtttcaaatcagatcagttgttctccagaataaaaaaaaaaaagaaacagaaattgcacactccagagccttcttctgtcagttcagacatgtcctatattgctgaaaagatcaagactcacaccaacagg

SEQ ID NO: 568271 - DNA, 613 bp, Homo sapiens
gctacaaactctcatctaccttcaagttttggaatcaaaattaaaggaaagagtggcaaaacatacatgtaatgttaacaaacattcacattctaaaatattatatcttaatctcgaaaggaatagtyctgtttttatgtgaattcccaaaattctgaccccaaaaagatcttttactacctttatctacctagcagggaaaaataaataaatatatgaaattactgaaatatactattatcatcaggaatgcattaaaattgctttgcagatagaaccattggctaaataaaagtattgctgcttaccttgtaaaattatctttgatatcagttctgtaatttaggagagtgtcaatatgattgttttgtacatggcggtcatttttaagactcttagtaatttctttctgataatataaatcaatcttcatagtggtcatttcatttagagcgtatcactatatattcctgaaatgactagtttcaaatcagatcagttgttctccagaataaaaaaaaaaaagaaacagaaattgcacactccagagccttcttctgtcagttcagacatgtcctatattgctgaaaagatcaagactcacaccaacagg

SEQ ID NO: 568272 - DNA, 509 bp, Homo sapiens
ggtcaggcagcatgccaagtgctctttccatgcattatctctaatttgtgccataatcctttctcataaggattatcatccctagtttataaaagaataacagaggtttaacaaaattaagtgaattttctcaagatctttagagcgattaaattgtttgtttggaatcagatccccaggatctatcacaccagaatcctgaggcagcccacaaatgaaaggatcatattataaatgtgtggcattaaaarttatcacagaaggagggtttgttacaatatgttctatcacttgacaaaaagccatttattcacctaatagtgaaaaacaagactttgttgggtcaaggtggctcagactgctaaatttctcatacaatgagtgaaaggctctccaggttcatcttgtgcttttgcttattttgtgttctccatctaattattctgctatcccatctcttggtgggatcttttctattctttttcataaccactctgagtggtggtcat

SEQ ID NO: 568273 - DNA, 339 bp, Homo sapiens
attccattccattmcaatctagttgaatccattccattccattccattccagtcctttccattccattccactcgggttgattccattctattagtttccattccattccattccgttccattccactctggttgattccattcctttccattccactcgaatacattccctcctattccactcggaacgattccattccattccattccattccattccattccattccagttcgttccattccattctattccgtaccattccattccattccattcctttccattccattcctttccactcgtgttgattccattcctttccattcctttcggttt

SEQ ID NO: 568274 - DNA, 339 bp, Homo sapiens
attccattccattacaatctagttgaatccattccattccattccattccagtcctttccattccattccactcgggttgattccattctattagtttccattccattccattccsttccattccactctggttgattccattcctttccattccactcgaatacattccctcctattccactcggaacgattccattccattccattccattccattccattccattccagttcgttccattccattctattccgtaccattccattccattccattcctttccattccattcctttccactcgtgttgattccattcctttccattcctttcggttt

SEQ ID NO: 568275 - DNA, 595 bp, Homo sapiens
tcatatatttgtatattatcctcttatcagatatataatttgaaaatactttctccagttccatagactgtctactcattctgttgaatgtttattttactgtgtggaagcttttyattatagactgatgtaatactactttctattttgggttttgttatctgtggctttgggattatatatatataaaaatcattacccaggacaatgtcatacatgtttttcttatgtcttcttgagtagttttatgtatcaggtcaaatatttatgtctttagtccattttgaattgatttttgtatgtggtgtaagataatgatccagtttcattcatctgcatgtaaatatccagttttcccagtactatttattgagaagactatctttcacccattgtgtgttcttaaaacccttgttgaagatcagttatatacaaatatgtggatttatttctgggttctctattctgttccattggtctatatgtctgtttctattctagtaccatgctgttttgattattttcacttagtagtatattcacacaaagggaagagtaatgccttcagctgtgttcttgctcaggatctctttgg

SEQ ID NO: 568276 - DNA, 340 bp, Homo sapiens
attccattccattccattctattccattccattccattccagtcctttccattccattccamtcggcttgattccattctaatagtttccattccattccattcccttccattccactctggttgattccattcctttccattccactcgaatacattccctcctattccactcagaacgattccattccattccattccattccattccattccattccattccattccacttcgttccattccgttctattccgtaccattccattccattccattcctttccattccattcctttccactcgtgttgattccattcctttccattccattcggtttg

SEQ ID NO: 568277 - DNA, 595 bp, Homo sapiens
tcatatatttgtatattatcctcttatcagatatataatttgaaaatactttctccagttccatagactgtctactcattctgttgaatgtttattttactgtgtggaagcttttcattatagactgatgtaatactactttctattttgggttttgttatctgtggctttgggattatatatatataaaaatcattacccaggacaatgtcatacatgtttttcttatgtcttcttgagtagttttatgtatcaggtcaaatatttatgtctttagtccattttgaattgatttttgtatgtggtgtaagataatgatccagtttcattcatctgcatgtaaatayccagttttcccagtactatttattgagaagactatctttcacccattgtgtgttcttaaaacccttgttgaagatcagttatatacaaatatgtggatttatttctgggttctctattctgttccattggtctatatgtctgtttctattctagtaccatgctgttttgattattttcacttagtagtatattcacacaaagggaagagtaatgccttcagctgtgttcttgctcaggatctctttgg

SEQ ID NO: 568278 - DNA, 595 bp, Homo sapiens
tcatatatttgtatattatcctcttatcagatatataatttgaaaatactttctccagttccatagactgtctactcattctgttgaatgtttattttactgtgtggaagcttttcattatagactgatgtaatactactttctattttgggttttgttatctgtggctttgggattatatatatataaaaatcattacccaggacaatgtcatacatgtttttcttatgtcttcttgagtagttttatgtatcaggtcaaatatttatgtctttagtccattttgaattgatttttgtatgtggtgtaagataatgatccagtttcattcatctgcatgtaaatatccagttttcccagtactatttattgagaagactatctttcacccattgtgtgttcttaaaacccttgttgaagatcagttatatacaaatatgtggatttatttctgggttctctattctgttccattggtctatatgtctgtttctattctagtaccatgctgttttgattattttcacttagtagtatattcacacaaagggaagwgtaatgccttcagctgtgttcttgctcaggatctctttgg

SEQ ID NO: 568279 - DNA, 416 bp, Homo sapiens
ttccacatatgagtgagatcatgcagcttttgttcttctatgcctggtttgtttcacttaacataatacccttcacgtttatccatgttgccaaagatcggtgtacaaggattcccttttctccacatcyttgccacagacacgtagaccaatggtaccgaacaaagagactggaagtccactcactcatttatagacagttgatttttgacaaaggtgtcaagaatgtacaaaggcaaaagagtagtcttttcaggaaaggatgttaggacaactggtatatccatatgtagaagaatgaaattagacccctatctcataccacatgctagaatcaactcaaaatgcatcaaatacttaaatgtaagacttaacaaaatgaaatcactggaagaaatcatagggaaaaactacaa

SEQ ID NO: 568280 - DNA, 416 bp, Homo sapiens
ttccacatatgagtgagatcatgcagcttttgttcttctatgcctggtttgtttcacttaacataatacccttcacgtttatccatgttgccaaagatcggtgtacaaggattcccttttctccacatctttgccacagacacgtagaccaatggtaccgaacaaagagactggaagtccactcactcatttatagacagttgatttttgacaaaggtgtcaagaatgtacaaaggcaaaagagtagtcttttcaggaaaggatgttaggacaactggkatatccatatgtagaagaatgaaattagacccctatctcataccacatgctagaatcaactcaaaatgcatcaaatacttaaatgtaagacttaacaaaatgaaatcactggaagaaatcatagggaaaaactacaa

SEQ ID NO: 568281 - DNA, 528 bp, Homo sapiens
gttgatttttgacaaaggtgtcaagaatgtacaaaggcaaaagagtagtcttttcaggaaaggatgttaggacaactggtatatccatatgtagaagaatgaaattagacccctatctcataccacatgctagaatcaactcaaaatgcatcaaatacttaaatgtaagacttaacaaaatgaaatcactggaagaaatcatagggaaaaactacaacattggtccaggcaataatttttatttttatttggatttgatcctaaaagttaaggcaagaaaatcaaatatagaaaagtgggatttcataaaatawacaagcaaccacaacaaaacagaatgtgaggcaatctacagaatggaagaaaacattagtaagctgaatatcttgtaaagggttagtatcccaaatatataagaaactcaaacaatgcaatagcacaaaaacaaaaacaaaaacaaaaaaacctattaaaaatgggcaaaggacctgaatagacatttcgcaaaaggaaacatgcaaatagcaa

SEQ ID NO: 568282 - DNA, 558 bp, Homo sapiens
acttaaatgtaagacttaacaaaatgaaatcactggaagaaatcatagggaaaaactacaacattggtccaggcaataatttttatttttatttggatttgatcctaaaagttaaggcaagaaaatcaaatatagaaaagtgggatttcataaaatatacaagcaaccacaacaaaacagaatgtgaggcaatctacagaatggaagaaaacattagtaagctgaatatcttgtaaagggttagtatcccaaatayataagaaactcaaacaatgcaatagcacaaaaacaaaaacaaaaacaaaaaaacctattaaaaatgggcaaaggacctgaatagacatttcgcaaaaggaaacatgcaaatagcaaacaatgctgctctgtgtatggagtagtcattcttttattcctttgctttcctaataaacatgcttttacttaaaaaaaaggtgaacagatatatgaaacaaatggtcaatatcgctcattgttagtgaaatccaaattaaaaccacaatgagacataacctcacaaaagttattatcgaaattatt

SEQ ID NO: 568283 - DNA, 558 bp, Homo sapiens
acttaaatgtaagacttaacaaaatgaaatcactggaagaaatcatagggaaaaactacaacattggtccaggcaataatttttatttttatttggatttgatcctaaaagttaaggcaagaaaatcaaatatagaaaagtgggatttcataaaatatacaagcaaccacaacaaaacagaatgtgaggcaatctacagaatggaagaaaacattagtaagctgaatatcttgtaaagggttagtatcccaaatatataagaaactcaaacaatgcaatagcacaaaaacaaaaacaaaaacaraaaaacctattaaaaatgggcaaaggacctgaatagacatttcgcaaaaggaaacatgcaaatagcaaacaatgctgctctgtgtatggagtagtcattcttttattcctttgctttcctaataaacatgcttttacttaaaaaaaaggtgaacagatatatgaaacaaatggtcaatatcgctcattgttagtgaaatccaaattaaaaccacaatgagacataacctcacaaaagttattatcgaaattatt

SEQ ID NO: 568284 - DNA, 558 bp, Homo sapiens
acttaaatgtaagacttaacaaaatgaaatcactggaagaaatcatagggaaaaactacaacattggtccaggcaataatttttatttttatttggatttgatcctaaaagttaaggcaagaaaatcaaatatagaaaagtgggatttcataaaatatacaagcaaccacaacaaaacagaatgtgaggcaatctacagaatggaagaaaacattagtaagctgaatatcttgtaaagggttagtatcccaaatatataagaaactcaaacaatgcaatagcacaaaaacaaaaacaaaaacaaaaaaacctattaaaaatgggcaaaggacctgaatagacatttcgcaaaaggaaacatgcaaatagcaaacaatgctgctctgtgtatggagtagtcattcttttattcctttgctttcctaataaacwtgcttttacttaaaaaaaaggtgaacagatatatgaaacaaatggtcaatatcgctcattgttagtgaaatccaaattaaaaccacaatgagacataacctcacaaaagttattatcgaaattatt

SEQ ID NO: 568285 - DNA, 358 bp, Homo sapiens
gatagaaatcatgacctgagaagtgcaaacaaatgacttgaaagaagtggccagtaaattgatttcatacataattggaaacgacataaaaaaaaaaaaaccttgtcaatctatttatcctcgtcattatgtcttttttagaacagtraaaatgctgagggagcccaagtttgaattgggaaactcatggagtttcatggtgaaggtagtagttctgaaaaagctactggggatgagatagttggtaaagtttaacaagtttatgggtatgaacaactcttccaacaatctgtttaaagttcagacttttaatattgtaaataaaaagtcccatttgtgataaaaacaacacatggac

SEQ ID NO: 568286 - DNA, 534 bp, Homo sapiens
tccctgctccaacaccctaccctctgataatcaccattctattctctggttctttgagttacattatattttgagtgttactcatgaacactaaaaaatgtgcaatgatacaatgctgttcatcttatattctgcttagtgacttcaaggaaaaatcacaactcttacttttaagctctagagagagatttaaaacaaacttcatttattaataaatacttgcaataccatattggtttttcctgygtaataaaagaggcatcagctcttgggtgacatcattgacaactgtttttcttctgatatacccacaggatattgactgtgataattatcttctcaacttggatggtattctcatttttgtcaaaagtttctatgagcccagtagtagcaacagataattaatgtctatgcaactctgcatgaatgactgataagaactagtggaagactggattcatttctgaaagaaacacacaaatatttaaaactcactgaatacacacatttaaactgaccattgccaagaac

SEQ ID NO: 568287 - DNA, 534 bp, Homo sapiens
tccctgctccaacaccctaccctctgataatcaccattctattctctggttctttgagttacattatattttgagtgttactcatgaacactaaaaaatgtgcaatgatacaatgctgttcatcttatattctgcttagtgacttcaaggaaaaatcacaactcttacttttaagctctagagagagatttaaaacaaacttcatttattaataaatacttgcaataccatattggtttttcctgtgtaataaaagaggcatcagctcttgggtgacatcattgacaactgtttttcttctgatatacccacaggatattgactgtgataattatcttctcaacttggatggtattctcatttttgtcaaaagtttctatgagcccagtagtagcaacagataattaatgtctatgcaacwctgcatgaatgactgataagaactagtggaagactggattcatttctgaaagaaacacacaaatatttaaaactcactgaatacacacatttaaactgaccattgccaagaac

SEQ ID NO: 568288 - DNA, 534 bp, Homo sapiens
tccctgctccaacaccctaccctctgataatcaccattctattctctggttctttgagttacattatattttgagtgttactcatgaacactaaaaaatgtgcaatgatacaatgctgttcatcttatattctgcttagtgacttcaaggaaaaatcacaactcttacttttaagctctagagagagatttaaaacaaacttcatttattaataaatacttgcaataccatattggtttttcctgtgtaataaaagaggcatcagctcttgggtgacatcattgacaactgtttttcttctgatatacccacaggatattgactgtgataattatcttctcaacttggatggtattctcatttttgtcaaaagtttctatgagcccagtagtagcaacagataattaatgtctatgcaactctgcatgaatgactgataagaactagtggaagactggattcatttctgaaagaaacacacaaakatttaaaactcactgaatacacacatttaaactgaccattgccaagaac

SEQ ID NO: 568289 - DNA, 442 bp, Homo sapiens
  misc_feature 419, 420, 421, 422, 423, 424, 425, 426, 427, 428, 429, 430,431, 432, 433, 434, 435, 436, 437, 438, 439, 440, 441, 442: n = A,T,C or G
aaaaaattagccgggcatggtggcaggcgcctgtagtcccagctactcgggaggctgaggcaggagaatggcgtgaacccgggaggcggagcttgcagtgagccgagatcgcgccactgcactccagcctgggtgacagagcgagactccgtctcaaaataaataaataaacaaacaaacaaayaaataaataaataaataaataaataaataaaaatcataaaaataatctacaagagatgtgtagtgtgaaagaagacagttgataatgacatatctagagatagtatttggagattcagaataagaaggtcataaagagtgaaccataaaaagagaaaagtctacagtacagaaccctacaggtaaaaggctgacaggaaataaactgatccaagttatagaaggaaaaccagggnnnnnnnnnnnnnnnnnnnnnnnn

SEQ ID NO: 568290 - DNA, 563 bp, Homo sapiens
attttcggaagtaataaaataccttacaagataggaatattaatcattttcatgctttatagaggcagaagtctttaggcagcgttattaatatcagagtatgagtcaatttccttagcatggagaaaggtaccgatagagaatgcgtctttgagaaagtggaactttgttggttaatgattgaagtttacataacatgagtatagggaggatttagcttgcttgaaacacaataataagcaagacacagagtccattatgaggaatatgttcagggggctttaagaaaaccactgacgatatcaaagtcattgtgtaatatattattcaggtagaaagttggataagcgatatgagctcattctgtgattgtttagataataaagagcatttataggatcctgatcaatttcatgacaagatgatagtggtcttccaacagcaattggytgttcactagtactagtgaaattgaaataggctgagactagagaaaatgtgagcacaaatgaaattacttcaataactcaataattagttgatggactgcctagaccaagata

SEQ ID NO: 568291 - DNA, 564 bp, Homo sapiens
ccctctcttttttcctccacctcttcctttcttcatttatccygcagaaatttcttgtgatatttctcctgagttttcaacatgctttttcatcatcgatcttatcaagggcttcctatttagctgttgtttgttgcccactccccaatttattcctgataactgtcatttccccctttatctgtacatatacacactttaatgtttgatatatgtctttgaataaacacttttaaaataagaatggtttgtatgcaactgtttttaactttcttcaatgatattctacacaccattttctgttctatgttatttcaaaacttacactattttaaaagatgtatctatgttgttctatgtacatctaatttattgcttctcttattgcataatattgtatacagacatacacaatatttttataggtattacccatctgatgcaaagttatctattttccctccaaaagtgtgaattttctcagggattgaatgctttggcacatgattactgactgggtcatagggtaaaagcctattaaatgtcacaaagtgagacaatttt

SEQ ID NO: 568292 - DNA, 564 bp, Homo sapiens
ccctctcttttttcctccacctcttcctttcttcatttatcccgcagaaatttcttgtgatatttctcctgagttttcaacatgctttttcatcatcgatcttatcaagggcttcctatttagctgttgtttgttgcccactccccaatttattcctgataactgtcatttccccctttatctgtacatatacacactttaatgtttgatatatgtctttgaataaacacttttaaaataagaatggtttgtatgcaactgtttttaactttcttcaatgatattctacacaccattttctgttctatgttatttcaaaacttacactattttaaaagatgtatctatgttgttctatgtacatctaatttattgcttctcttattgcataatattgtatacagacatayacaatatttttataggtattacccatctgatgcaaagttatctattttccctccaaaagtgtgaattttctcagggattgaatgctttggcacatgattactgactgggtcatagggtaaaagcctattaaatgtcacaaagtgagacaatttt

SEQ ID NO: 568293 - DNA, 633 bp, Homo sapiens
atttctttctgtattagtttatgcacattaagtatgcaatgttgttactcagctatataccttctaaattgcatgaaatctcttgagagtcctgatctagaatatttgagtaatatgtataaattgattttgacatgtagctaattgacacaaatcagtatgtcacatttgtaggtacctgattatggaggtaattatctcaacttctctaatgcacagttcttttagtgtgcacatatatttctaaaatgcttaactgtagccatagtctctgttgttttgctttacaggcattcatatacgttaaagatataaaaataattaaagaaaatcacttatatctccctcatctttattcttacattggaatacacagtctgttaactttttgagggatcaggcttatttatttttttcttgattcaagttttcacaattttggarctagtgcttggatagcgggcctcaggactctgcctagtgctctattctcacaaagaatagtagccaaaaaatatattgtatgctctggttctattgcttatatgttgtgtaacaaaaaaaaatatttttgttgttgttgttagcaattattttaactgttctgacggtataataactatttacttcaca

SEQ ID NO: 568294 - DNA, 569 bp, Homo sapiens
tcatagtttgaggtcttagctttaagtctttaatccattttgattttatttttgtatatggcaagcgatagggagctagttttattctcttctcttccttctttcctttcttcctgacttcctttcaggagatgcaattttctctgatggcatattttaatttcttgctttttatcttttgtatgttggttgtatttttttttttttttaaggttactgtgaacaaagaaaaaaacatcttatattattttaaactgacaagaactgaatacttattacataaacaaatagccaaactaacaaataagcacagagtaagctaataaaaaatctacactttaacttcatccccctgccctttttgttgtttctatttatatmttataatgctgtctatgtcttgaaaagttgtaattatttttctcaagttcattgttcaattcaagatctgagtagtttacacacaattacagtgttatataattctgtatttttgtgtacattctaatactcaaagttttgtaccaccagattttttcttattgcccattaacatccttttctttcag

SEQ ID NO: 568295 - DNA, 529 bp, Homo sapiens
  misc_feature 49: n = A,T,C or G
atgagtgaggtcatctgttatttgtctttctctccctgacttattttanttaacataatgttctccactttcttccatgttgtcacaaatggtacagtttcatttatttgttgctaaataacattccattgtgtatacaaaatatgttttctttatatrttcttcgattgatggacacttaggttgagaacatatcttggctattgtgaataatgctgcaataaacatgagagtgtagatatcttctggacatagtggcttcattttctttggatttatacctagcagtggaattgctggatcatatggtagttcaatttttaattttttgagaaatcctcatactgtttttaataatggctctactaatttatatgttactactaatagtgtgcacatttttctccactttcttgacaatattttttatcttttgtctttttggtaatagccattacaacatgtatgaagtgatctgcattttcctaatggctttaacttgatgatgatctttgacttgacctgatga

SEQ ID NO: 568296 - DNA, 557 bp, Homo sapiens
aattcttactgtactatgaatgtctttttttctctgtgtgcacatgcacacatacacacacatatccctacaagcaaaaaacacagatttgtgtcaccaactttatctttgtcrtaataattcatctactgaatatcacctgatatcctgctctccaagctgagctatttaaaaagatagatggctgcctcctggctaattgtgggagttctttcattactacaaaaagactttttatatctcaagtgactctatatgcagtgaaaaatgactcaaatctttggagaagatcccactgatgaaatggttggctaacaactacttactgaccttttacttcctaacgtaatactaaactgatgtaggtgattattaataaacctattcactgagttgtgacatatcagacccaagtatttaaaacgtaacaaggaattcagatggagacaaaattttctataacaggtctaaggatataaaggcataaggcatatatacaataaacacttgaaataaactcaaattatttcattgggaaaaaaatgtcattgtcatta

SEQ ID NO: 568297 - DNA, 593 bp, Homo sapiens
gtttgagaccagcctggccaatatggcaaaaccccatctctactaaaaatgcaaaaattagccaggcgtggtgacaggcactcgtaatcccagctactaggaaggctgaggcaggagaatcacttgaacctgggaggagggggttgcagtgagctgagatcacgccactacattccagcctgagcaacaagagcaagactctgtctcaaaaaaaaaaaaaaaaaaaaagtacaacaggcactataacatttattcactcatttaacaatgaaatttaacccaatggttctaaacaggctctagttrtcacataatgtcttcattgtcacaaaatgtctttgctttttctaagagtgatgactaaattacccagatgaatgaattaaagagaaaaaggtttaagttagtatttggctgtttttatttacaaattctcatatgtaaaccctgttgcaaaacatgtctccaatttagaaaactaaaattttatgccaaaaagaataagaaaaaaatacatcaactacaatttcagaatgcatattaattgtgcttgtaattttctaaatattcagatctcatgtctagactggctc

SEQ ID NO: 568298 - DNA, 572 bp, Homo sapiens
tgctgatattagcctatccaaaatgcctttccaggatttaagtaccaatagtgtctattacaaaattcatccgtggtttctgtcagatttcagttaaatgcacaacagggagaaaaagctgctagaaaactgcagattccatggataaagaaacaaagagatgtattgtgtattgctctcatattcttgcaaccagcacctgagttatctgatgactgcttcataactgaaggctgctgcaatatcccttttgaaaagttgcacaatagcccaagtttaaaagagatcaacattttacatatgaagccggtacagagggccataacgttctctctctcttccccatccccccagcccccttttyactgtgccctttgcagaatgtgtggagcctcctttatcaggccaagagagaagaagcttctgcataaacagaagtgattggattctaccctaaaaacgaaaaacccattgaacaattaaggaagaaatataagggggaatttttttcccttgtgttaatgtcaatattaacataccgctataggttgaaatacttttttttttttttg

SEQ ID NO: 568299 - DNA, 588 bp, Homo sapiens
ccttttctcattcatcagatcaggagatattcaggtctactaattggttttaatgcatgttactagaattttattgccagtacagtaaagatgtaatgcatttcatgtatcataatagactggcattaaaaaataactaggagagctggctctaaaaagaaggaatagaaaagaaaaaatctagaatttgtgctattaaatgagttttttaatgctttggaattatgaccagtgacaaaatgtagaacctaccaaattggaaatcatacatcaattcaggatcagcccattacttatgattaatcattatgtatttacaacaacattttttgttattatacactgtagtactaacctgaagatgagaaactccaagcattttttaataattaatcttgtaaatcaaatttctcactgaccatcagaacctagaagaaaatactgtattttaggggtgttatagtacggcatggaagagatttaattcattattatgtcatattctcaatgaatgyctgagcattgggtataaaaatataataatataaaaggatttctttctttgatctaccttcaggaacatattca

SEQ ID NO: 568300 - DNA, 598 bp, Homo sapiens
ggctttcctcttactactgcttacagataagatacacctgattgcattagaaagtacaatgatgaatcctacattctcaatttactcattcattcaataaccacttagcacctacttgatgccaactatgatttacaacactgatcccctgcagcatttaaaaaatggaaartatttctagtggggagagacagaccatgaacaaaatgtgtaaggaaataatactgtatagtagaatatgataagtaccttaaagaaaaacaaagcaagcttcaggtgataggaaattctggggaggagttgcacaattaaaaaggaagatcagaaaaacaaggcaacacttgagccaaagaatgaaggaggcaatggacatggccttgcaaatgtcacaggggaaaggcattccagacagaaggaacagccaaagcgaagtaaaatggacatgctattagcctatttgaaggccaatgttctagaacagaatgaacaaggaaaacacagcagaaagtaaggttgaagaaaagggaagattcaaataaacatcatcagaaacaacaaaggggatattaccactggccccacagaaatataaacaacc

SEQ ID NO: 568301 - DNA, 598 bp, Homo sapiens
ggctttcctcttactactgcttacagataagatacacctgattgcattagaaagtacaatgatgaatcctacattctcaatttactcattcattcaataaccacttagcacctacttgatgccaactatgatttacaacactgatcccctgcagcatttaaaaaatggaaaatatttctagtggggagagacagaccatgaacaaaatgtgtaaggaaataatactgtatagtagaatatgataagtaccttaaagraaaacaaagcaagcttcaggtgataggaaattctggggaggagttgcacaattaaaaaggaagatcagaaaaacaaggcaacacttgagccaaagaatgaaggaggcaatggacatggccttgcaaatgtcacaggggaaaggcattccagacagaaggaacagccaaagcgaagtaaaatggacatgctattagcctatttgaaggccaatgttctagaacagaatgaacaaggaaaacacagcagaaagtaaggttgaagaaaagggaagattcaaataaacatcatcagaaacaacaaaggggatattaccactggccccacagaaatataaacaacc

SEQ ID NO: 568302 - DNA, 615 bp, Homo sapiens
aaataatactgtatagtagaatatgataagtaccttaaagaaaaacaaagcaagcttcaggtgataggaaattctggggaggagttgcacaattaaaaaggaagatcagaaaaacaaggcaacacttgagccaaagaatgaaggaggcaatggacatggccttgcaaatgtcacaggggaaaggcattccagacagaaggaacagccaaagcgaagtaaaatggacatgctattagcctatttgaaggccaatgttctagaacagaatgaacaaggaaaacacagcagaaagtaaggttgaagaaaagggaagattcaaataaacatcatcagaaacaacaaaggggatattaccactggccccacagaaatataaacaaccatcagggaatattataaatgcctctatgcatataaactagaaaatatagaataaattagtaaattcctgggcacatacacccttccaagactgaacaaggaagaaactgaatcgctgaasagagcaacaatgagctctgaaatttagttagtaataagtagcccaccaaccaaaaaaagcccaggaccagatggattcatagctgaattctaccagatgtacaaagaagagtt

SEQ ID NO: 568303 - DNA, 528 bp, Homo sapiens
taaagttttcctgtaaatatttgtcatttcaataactttttttcaaataccaacaatagagtttaaaatattattccttttgcttctataatatcaacaaaacctgttcaactatgctcagagtcttgaatttcacaatttaggtaagttattaaaatacttttatgtggctggtcgcagtggctcacgtctgtagtcctagcactttgggaggctgaggcaagtggatagctcgaggtcaggggttggagaccagcctggccaacatggtgaaaccccatctctactaaaaatacaaaaattakccgggtgtgatggcgtgtgctgtagtcccagctacatgggaggctgaggcacgagaatcgcttgaacgtgggaggcagaggctgcagtgagctgagatcacaccactgcactccagcctgggtgacagagcaagactctgtctctaaataatatagcatgtcacaaagtaaataaaataaaatacaaatagatgcatgaaacttttttgtgtgaaacagttgg

SEQ ID NO: 568304 - DNA, 428 bp, Homo sapiens
gcctcctggccagaacttgggaggaggacacaaatccagagtgcagacttcacaggtgggggaagaattagagccttttctccaagctgggagagatagcttgggcaaattttyaagcggtcttgtctcgccctcccatgcttatggatgggtagaatcaatattgtgaaaatgaccatactgccaaaagcaatctacaaattcaacacaatttccatcagaataccaccatcattcttcacagaattacaaaaagcaattctataattcatatggaacctaaaaagagcccgcatagcaaaaagaacaaatctggaggcatcacactacccgatttcaaactatactataaggccattgtcaccaaaacagcatggtgctggtatagaaataggtacatagaccaatggaacagaatagagaaccca

SEQ ID NO: 568305 - DNA, 609 bp, Homo sapiens
taacatggtgaaaccctatctctattaaaaatacaaaattagctgggtttggtggtgcatgcctgtaatcccagctactcaggaggctgaggcaagagaattgcttgaacctgggagacrgatgttgcagcaagctgggatcatgccactgcactccagcctgagcaacagagactccatctcaaaaagaaaaaaaaagaatctgcaaagaaacaagcattgcatttctatacagagtaatgctcatctgaaaatgaaattaaaaaattttcatttatgatagcatcaaaaagaataagatttattccttagaataaatgtaacaaaagaaacggaagacttgtaccctgaaaactaaaaaaaaactgttgaaagaaataaaagaagatctgaataaatgtaaaaacatcccaggttttgcaattggcaaacttagacttaatattatcaagatggtaatattactctccaaagtgatcaccaattcaatgcaattactatcaaaatcccagctgccatttttactgaaattgtcaaactgatctgaaaatttatagggaaatacaaaggacccagaatagccaaaatcatcttcaaaaagagcaaatt

SEQ ID NO: 568306 - DNA, 491 bp, Homo sapiens
aaaaaatcttacaagtgctgaatcttctgtctttctgtctgtgtatttatgtgtgttttttgtttatatataaaagagttctgattaattggcttaggaaaataagcgcttaaatcaaatattttgtcagaaaaatggaaactttaatgcctttttgttcacatgcctttaggaatcttttggatataaagacagttttaaagattattgataaaataaaatgttttgaaaatgtagacatttggtctaaattaaggtcagatatcagatttgctaaatgcattaaggtcaaactgtgtctttgacttttgaaaattattcgatttacctactttggagcrttagattatagataaggcctagggacatatggagacccatgcctgctagctatgttaaaaggagtcagaccttatcttcatttctgtctgatgtcctaggctccaccgctagtacatataaattgcttacttatcaggtttttcactaaa

SEQ ID NO: 568307 - DNA, 457 bp, Homo sapiens
ccgctgccacatctggctaatttttttttctttgtatttttagtacagaccaggtttcaccatgttgaccaggctggttttgaactcctgacctcaggagatccatccaccttggcctcccaaagtgctgggtttataggtgtaagctgctgtgcccaacctgggctcagcttttaaaaagtcttatctgagattcctcatgtaacagagttctatcaaagcyaatttaaaaagcctaagtgaaaaataattattcttgctgcactttaagcaaataatcatgccaagtactgtaagactagagtttattttgtaaacaaatcagttctatcatgatttgtttttaattaaaatggggactagggagagaaaaattatgcttcaaaagaaaaactatagtacactgttattagctgttcttgaggtttttttctgtagtttagactaaatcctaaat

SEQ ID NO: 568308 - DNA, 738 bp, Homo sapiens
cacttggtatacatgtttacacaaaattatagtcagactatacatacaattctaaaacttgtttcttttaaaaatgtattttgtgagtgatatcatttaatcccataacgattccatgaaataggraagagtattatctcctattttccaactgagaaaacaggttcagagaaattaactctactgcttaagctcatatggatagtagtaacaggcagagatggatgaaaaattaacctatctgactctaaattgctttatctcaacaatgttaatatgtgggtaatctcagtaaacaagaactgggctgacaagttgggagaatctggagagggttgagggaccaaaggtgctgataagaacatcatgaaagctcagcaagaataaggtatggcagaggtgagataatggtaggtggtcatcgggaaaaggccaggatttgacgtcttattagtaaaagagtttgggaccagagtaggcttaaagaatcattaatcttggtaagagaagtgcagctggaggtaactgggaaagataaggaactttggagtcttaaacctcacttctcagaaaatgtggtagagacagggaaagctgcctgaagtttcctaaagctgacacctaaggtctggccatatgggactgtgtgtgttttgctgtttgtgaagttagaaggaatggcaggaaaggtgttgattgttctctaggtgatcaaccatctgggtttgccctttaccc

SEQ ID NO: 568309 - DNA, 504 bp, Homo sapiens
gcaatggaggaaggctacaggygggtgcatgccagtggggggctatctgcagaagttctcagatggttaagtggggtctgccagtgaagaagctatggcagtggccactgagaagtaccctaattgggtatctgaagctgctctgcaagcaggtgcagccaggcaggaaacctggaagagactggcacacaggaaagtgctcagatcagtctagctccatcccatggtctgtccaggtctgccaatcaacaaagacccaagtgacctacagaagtgcaatgaaccttggatgacaggtgtccctggctgtgctcctctgcacctgttcccttgccaagccctctgtgctccacagaggctggaatcctgtccctaacaactctctgagcagctcttcctgctagctcaaatgtctatggaggtcatagggtctcctgcagctaggattctagaggtccatggtcagagttgtctactccatgcttatttaactcactccttccc

SEQ ID NO: 568310 - DNA, 563 bp, Homo sapiens
taatcaccaagttctctgcatttgggaagcttcattccttttctctggtatttttaaaaaatatatcttattcctacctttcaagccatccacaaagctgtcaattttctgatatgcacttctttctccaaatgtctacattgctgatagtacctgataattcaaataaaatatagctcgcatcctactctaagagaatactttcaacttaaccaatctagtcttataaatttttaaattgtcaattttttttttgttcagggacaaagtgaaagtctgagacaaaataaaaaaagaaatcttaaacatttgtgatttagaaatcagatcatttacactgttcataaaatagtatttattaygaaattatcatcttttgttttttctgtctccacttcttgattagccacttaaaagaattattagctaaaaattcttcacaaaggattctgtgactccctttatcctctgacaggtcatcctgttgaaaggccagctcttttaaggaaagttgcattttctcaggataaaacaaaaatattttattcaatacctcagtgtgt

SEQ ID NO: 568311 - DNA, 625 bp, Homo sapiens
agtgccacgtctatttttactttttgttggctgtgcttttggcattttgtaaaagaaataattgataagaccagtgtcataaagcttttcccctttgtttctttctaggagctttaaagtttcaggtatcatatttaagcctttactccattttgagttgatttttctgtattgggttatgtaagaaagagtccaacttyattctttggtatgtggatattcagttttcccaacaccatttgttgaagagactttttcccattgcgtattcttggcatacttgtcaaatatgagttgactgtatatgtataggtttatttctgggctctctattctgttctatcagtctatatatctatttttactccagtaccacactgttttaattactgtagctttgtaatgtgctttgaaattacatattcaagtgtgagaattctagctttgttcattctcaagatggtttggctatttgaagtcctctgtggtttcatatgaattgtagaattgtttttactatttctgtaaaacattccattaagatttgatagaaattgcattgaatctgtagatcattttcaatagtatgtacattttacaatattaagtcttccaattcatgaac

SEQ ID NO: 568312 - DNA, 375 bp, Homo sapiens
tacgccaagtatcagcctatctagttctactaacagtgggtcagcagacactacgccaagcatcagcctatctagttctactaacagtggtacagcagacactgccccaagcatcagcctatctagacctactaacagtgggycagcagacactgccccaagcatcagcctatctagacctactaacagtgggtcagcagacactgccccaagagtcagcctatctagacctactaacagtgggtcagcagacactaccgcaagagtcagcctatctagacctactaacagtgggtcagcagacactaccgcaagagtcagcctatctagacctactaacagtgggtcagcagacactaccccaagaatcagcct

SEQ ID NO: 568313 - DNA, 318 bp, Homo sapiens
ggattgccataaaaggaaatattctgagaacaaaaaagagactttagaaattaaaaatagtatccaggtgtggcagcccatgcctgtaatcccagcatttttgggggctgaagcaaaaaagaattaattgcttgaggccagatgaagaccagcacaggcaacatagtsagatcctgtcactatttaaacaaaaaccaaaataaaataaaataaaataaaataaaaattaaaaattaaaaatattaagaaagaactacaaatagaaggtaagaaagtaaagctaagaaaatctactcaaaaagtaaagagaaaatttag

SEQ ID NO: 568314 - DNA, 278 bp, Homo sapiens
atcatataaagaataggagttccaggaaaagcaaggaaacgcaggaggggatttgaggcagtgtggggaatagtgaagaaaatcaagaacatggcccactacttaaaggactgaaaagaaaaaaaaamaaaaaacctaagtctccagcacaatggatgttaacagatctatacaaaagaactcatcattatggaatttctggatgctgcaaagataagagcccataagcgttcagaagaaatttttttctttttaaagagtacacagaaaagataaaa

SEQ ID NO: 568315 - DNA, 468 bp, Homo sapiens
atgcttacaggatcctgattcagtatcataaagctatatttggatccgagctacagtaaattgaaaactggtgaggcataaaatttcaaatttctcatttgttattatttttaagttgtaccctaagacactgaatcttggtaaastttggatgagtaggaggcatgactttcttttttgaaagtggggggccatatagaggttcagacaaaggtgagcttagagttggcccactgagtccgcagttccactggtggtcacttgcctaatgtccaaatatatattaaaaattgcaatactagtaggttggattttttatttcagtagttgctggctcagacttggttagaggggattcttgttgtgctgagcctgtggatgcccttcacctatcaccactctattcatactcccaacaaaccagcactggagtcgccagttatttggtgctttacctatgataaatat

SEQ ID NO: 568316 - DNA, 577 bp, Homo sapiens
atgtaatggatagttaagaccaagaaaacaactagaaactagagagctttggaagaaaaactaatcaggaaagctttaacagaaggtgttaacaagcaatacttttacattttaatcagtttactggtaatttcgagatcattaagtgattcttcttgggggctgtaccagtcaatcattcagttccactttattttatgtaatcaaacaacatttcatataattagggagcacatttctgatttcaagaatatctaattatttttgtattcatcctcacctcatcccattcttgttttatgttagtgactctttcatctctgaacatttgaatcatgcttatttaaaaatatttttgtaaagttacggtggttcacatctgtaatctcaaccctttgggatgctgaaatgagagcaytgtttgagcccaggagtttgaaatcagcatggacaacacaacaagagcttatcactacaaaaaataaaataattagttgggcgtggtgacatgcacctgtggtcccagctactgagggggctgaggtgagagaaacacttcagcttagtaagttgaggc

SEQ ID NO: 568317 - DNA, 577 bp, Homo sapiens
atgtaatggatagttaagaccaagaaaacaactagaaactagagagctttggaagaaaaactaatcaggaaagctttaacagaaggtgttaacaagcaatacttttacattttaatcagtttactggtaatttcgagatcattaagtgattcttcttgggggctgtaccagtcaatcattcagttccactttattttatgtaatcaaacaacatttcatataattagggagcacatttctgatttcaagaatatctaattatttttgtattcatcctcacctcatcccattcttgttttatgttagtgactctttcatctctgaacatttgaatcatgcttatttaaaaatatttttgtaaagttacggtggttcacatctgtaatctcaaccctttgggatgctgaaatgagagcactgtttgagcccaggagtttgaaatcagcatggacaacacaacaagagcttatcactacaaaaaataaaataattagttgggcgtggtgacatgcacctgtggtcccagctactsagggggctgaggtgagagaaacacttcagcttagtaagttgaggc

SEQ ID NO: 568318 - DNA, 589 bp, Homo sapiens
ttttataaaaagatgtgctctgaattctctgtcagaaatgttatatatgtttatttcttctactgcattaggtgagttctgttgttttttagcggtgttgtgtttcctttcatctgtacattgctgtttccatatttaaagagatattgacatggtatagctcttataggtgtattcttgtgttgttcaacctttactatttattattggaatctaattccttgccaccagttgctttttgtttgggcaaggacttaatatttgccaccagaatttaatactgcaccaaaactcaattcaatatttgctctaatgttgttttccagtcttgggagacttattgtgagcatctgaacataaatgctgcactggaacttaaayccagacttgcagtgatttctaggtctgcgagagatttaaacaatcattggaacttaatttcaaaccttatacttgtttcccagtcatggaaaatctccatccacatgactccctgggaattgtaaaaaatcttgtcaaagattcagaccttctcttagatcttgcctcctgcagtgctatggttctggtcagactcctcagtgtggca

SEQ ID NO: 568319 - DNA, 583 bp, Homo sapiens
atttttagtagagatgaggtttcactgtgttggtcagactggtctcgaattcctgacctcagatcatccacccrccttggcatcccaaagtgctgggattacaggcgtgagccatcgcttgaacctcggaggcagaggatgcagtgagccaagatcatgccatcacactcctgcctgggcaacaagagcaaacctccgtttcaaaaaaataaaaataaaaataaatttaaaagtttaaagaattaaaaataaaaaaaaagtcaagaagtgaatgataattatgcatgcacttttatctcagcaattctacttttaattatatgcccaacagatatgtataaatatgtaaaccttgtgctatatatgacatggacaggaaacaggaaaatactgggtagaagaggtcagttccccagcagaggtcccaccctcaagcctgaaaactcatggccataaatgagaacagacattctgtttttgagcccccaaaagttgccttttggcccacaatgcccccctattctgtacccatataaaccccaaacacccagcatgaacagaagagcagaaggatggcagaatg

SEQ ID NO: 568320 - DNA, 583 bp, Homo sapiens
atttttagtagagatgaggtttcactgtgttggtcagactggtctcgaattcctgacctcagatcatccacccgccttggcatcccaaagtgctgggattacaggcgtgagccatcgcttgaacctsggaggcagaggatgcagtgagccaagatcatgccatcacactcctgcctgggcaacaagagcaaacctccgtttcaaaaaaataaaaataaaaataaatttaaaagtttaaagaattaaaaataaaaaaaaagtcaagaagtgaatgataattatgcatgcacttttatctcagcaattctacttttaattatatgcccaacagatatgtataaatatgtaaaccttgtgctatatatgacatggacaggaaacaggaaaatactgggtagaagaggtcagttccccagcagaggtcccaccctcaagcctgaaaactcatggccataaatgagaacagacattctgtttttgagcccccaaaagttgccttttggcccacaatgcccccctattctgtacccatataaaccccaaacacccagcatgaacagaagagcagaaggatggcagaatg

SEQ ID NO: 568321 - DNA, 583 bp, Homo sapiens
atttttagtagagatgaggtttcactgtgttggtcagactggtctcgaattcctgacctcagatcatccacccgccttggcatcccaaagtgctgggattacaggcgtgagccatcgcttgaacctcggaggcagaggatgcagtgagccaagatcatgccatcacactcctgcctgggcaacaagagcaaacctccgtttcaaaaaaataaaaataaaaataaatttaaaagtttaaagaattaaaaataaaaaaaaagtcaagaagtgaatgataattatgcatgcacttttatctcagcaattctacttttaattatatgcccaacagatatgtataaatatgtaaaccttgtgctatatatgacatggacaggaaacaggaaaatactgggtagaagaggtcagttccccagcagaggtcccaccctcaagcctgaaaactcatggccataaatgagaacagacattctgtttttgagcccccaaaagttgccttttggyccacaatgcccccctattctgtacccatataaaccccaaacacccagcatgaacagaagagcagaaggatggcagaatg

SEQ ID NO: 568322 - DNA, 577 bp, Homo sapiens
atttttagtagagatgaggtttcactgtgttggtcagactggtctcgaattcctgacctcagatcatccacccgccttggcatcccaaagtgctgggattacaggcgtgagccatcgcttgaacctcggaggcagaggatgcagtgagccaagatcatgccatcacactcctgcctgggcaacaagagcaaacctccgtttcaaaaaaataaaaataaaaataaatttaaaagtttaaagaattaaaaataaaaaaaaagtcaagaagtgaatgataattatgcatgcacttttatctcagcaattctacttttaattatatgcccaacagatatgtataaatatgtaaaccttgtgctatatatgacatggacaggaaacaggaaaatactgggtagaagaggtcagttccccagcagaggtcccaccctcaagcctgaaaactcatggccataaatgagaacagacattctgtttttgagcccccaaaagttgccttttggcccacaatgcccccctattctgtacccatataaaccccaaacacccagcatgaasagaagagcagaaggatggc

SEQ ID NO: 568323 - DNA, 250 bp, Homo sapiens
ttgtatagcatccactgacagaagtaatagttgtgcctcagacttagtgattacatgtggccctggggtagttactacccttggtatgcatgagtgattcctattarcatcagtgggaactcagtactccatatgtatccacaaaagggaacttgagacccacaattacttttaatttctgatgttaacagtcatacctactgctgaatttaactcaatatatttcagttaagtgaaaatggtgcttaat

SEQ ID NO: 568324 - DNA, 250 bp, Homo sapiens
ttgtatagcatccactgacagaagtaatagttgtgcctcagacttagtgattacatgtggccctggggtagttactacccttggtatgcatgagtgattcctattagcatcagtgggaactcagtactccatatgtatccacaaaagggaacttgagacccacarttacttttaatttctgatgttaacagtcatacctactgctgaatttaactcaatatatttcagttaagtgaaaatggtgcttaat

SEQ ID NO: 568325 - DNA, 250 bp, Homo sapiens
ttgtatagcatccactgacagaagtaatagttgtgcctcagacttagtgattacatgtggccctggggtagttactacccttggtatgcatgagtgattcctattagcatcagtgggaactcagtactccatatgtatccacaaaagggaacttgagacccacaattayttttaatttctgatgttaacagtcatacctactgctgaatttaactcaatatatttcagttaagtgaaaatggtgcttaat

SEQ ID NO: 568326 - DNA, 250 bp, Homo sapiens
ttgtatagcatccactgacagaagtaatagttgtgcctcagacttagtgattacatgtggccctggggtagttactacccttggtatgcatgagtgattcctattagcatcagtgggaactcagtactccatatgtatccacaaaagggaacttgagacccacaattacttttaatttctgatrttaacagtcatacctactgctgaatttaactcaatatatttcagttaagtgaaaatggtgcttaat

SEQ ID NO: 568327 - DNA, 499 bp, Homo sapiens
  misc_feature 376: n = A,T,C or G
atcaattgacttaaagaaaagttaagcgcttatcacactaacaaaagctagcttggatacctttgagttcacatgactatagtagtatttggtaacattaatttggaaaatttaatctcaaaattctctctaatagtataaaatctgagtcatgttatgttaaattaagtaaccctcagtatggtcactgagaatttatgttactgagagttaaaatagttgtagaatacaaaggtttttttgggtgaggtttataaaaacagaaggatgggtcaggtgtggtggctcatgcctgaaatcccagcaccttgggaggccaagtcaggtggatcatgacatcagaagattgagaccatcatgtctaacatagtgaacncccatctctaccaaaaaaagatacaaaaaattagctgggcatggtggcaggcacctgtagtcccagctactcatgaggttgaggcaggagagtggygtgaacctgggaggcagagcttgcagt

SEQ ID NO: 568328 - DNA, 600 bp, Homo sapiens
aatgaaagagcatgagtttatgcaggtcccacagctcasgattaaataatcactgaagagtatatgtgacccagcttcacaaaagtttattcctgagaaaacaaccagcctagtggacagaataattgccattgttaagtttgattaccctgagaaagagactgcccaactcaccctgtaaaattccaggtggagttccccagatgaagcaactgatatgcttcgtatacaagccatatgggactggctttatcaataccagaatattattcaactaaatatacctattaccctggtcatagtaaaggctatggttaagtgggccccttctacctgggcacaaaatgctatcaaaggtggggtgaaccaaagggagctcctgctggtccccaaacatcaaagggacctacaccagttttttttgtatttgccttagattggataagttttttttttaaagcataatttgtaatctaatgggaaagctgacattgcctgtggcaatgttgaggcaagtttagatagagattgacaaaagggcttgagaatcttggctcaaccctattctgggagattttatttttaccagaaagttaaatt

SEQ ID NO: 568329 - DNA, 600 bp, Homo sapiens
aatgaaagagcatgagtttatgcaggtcccacagctcagrattaaataatcactgaagagtatatgtgacccagcttcacaaaagtttattcctgagaaaacaaccagcctagtggacagaataattgccattgttaagtttgattaccctgagaaagagactgcccaactcaccctgtaaaattccaggtggagttccccagatgaagcaactgatatgcttcgtatacaagccatatgggactggctttatcaataccagaatattattcaactaaatatacctattaccctggtcatagtaaaggctatggttaagtgggccccttctacctgggcacaaaatgctatcaaaggtggggtgaaccaaagggagctcctgctggtccccaaacatcaaagggacctacaccagttttttttgtatttgccttagattggataagttttttttttaaagcataatttgtaatctaatgggaaagctgacattgcctgtggcaatgttgaggcaagtttagatagagattgacaaaagggcttgagaatcttggctcaaccctattctgggagattttatttttaccagaaagttaaatt

SEQ ID NO: 568330 - DNA, 582 bp, Homo sapiens
ggtggaatgtttgtgaccaaaatgctgacagaaatattgacagtgagggccacactgagaaggtccctggtgaaaatgaggaagatatgaggaaccagaataagggtcacccatgttacaccctaccaaaaatcttggctgcattatgatcatgtcctagggctttctgaatgtttcaacttaagggtgatgacttagagtgttgggtggaagagatttctaagaagcaaagcattcaagaggtgacctgtctgtttctaacagcctatgataagatatagaagcaaggaaagaacctaaagttagaatgtgtatttaaaaggaaaaaaaagagcataaaagtttggaaaattctcagaatggccatgatgttgaaatgaaaatagctttcagtagagttattcaagtgggcttcagagcattaacttgctagagaggtttgcttgagtaaaagggagagtggaagcaagagagagaaggtaagttgaagactttttttaagaactagatttttctatgatgtattagtctgctctcatgtgctataaggacataccmaagactgggtaacttataaagaag

SEQ ID NO: 568331 - DNA, 557 bp, Homo sapiens
tgtgggttgggagaaagactgtgaaacccattatgagttttgtgtctttgaggtatatagctcattgaaataaaaatccttacttcagactatactacaaggctacagtaaccaaaacagcatggtactggtaccaaaacagagatatagaccaatggaacagaacagagccctcagaaataataacacacatctacaatcatctgatctttgacaaacctgacaaaaacaagaaatggggaaaggattccctatttaacaaatggtgctgggaaagctggctagccatatgtagaaagctgaaactggatcccctccttacaccttatacaaaaattaactcaagatgggttaaaaacttaaattttagacctaaaactataaaaaccctagaagaaaacctaggcaataccattcaggacataggcatgggcaaggacttcatgtctaaaacaccaaaagcaatggcaacacaagccaaaattgataamtgggatctagttaaactaaagagcttctgtacagcaaaagaaactaccatcagagtgaacaggcaa

SEQ ID NO: 568332 - DNA, 397 bp, Homo sapiens
tttgccccagccctgcaaagtattgtcacctagttggcgttgtaattgtgacttcaaaaggccattccaccattctatcaatccagctgcttcaggatgatagggaccatagtaagaccagtgaattccatgagtatgagcctactgccatacttctttagctgtaaagtgagtgcctttggcagagtcaatgctgtgcggaataccatgatggtggataaggcattctgtgagttcatggatagtagtcttggcaraagcattgcatgcaggatgggcaaacccatatccagactaagtgtctatttgataaggacacaccattgccctttcgatgatggaaaaggtccaatatattcaacctgccaccaagtaacttgctgatcaaccctgagga

SEQ ID NO: 568333 - DNA, 399 bp, Homo sapiens
tgttctttttgctcaggattgctttgaccctttgtggtcttttgtggttccatataaatattagattcttttttttccatttctgtgaagaatgccattggcattttgagagygattgcattgaatttgtcaattgctctgagtagtatcatcattttaacaatagtaagtgttccaatccataatcatggaatatctttcaattttttgtgtgtatacacttccatttctttcaccagagtttcatatttttttaatgtagatctttcactttcattgaatttacttctaggtattttgtattttcatagctattgtaaatgaaatagctttcttgatttctttttcagattgttcactgttggcatatataaatgctactgatttttgtatgttgat

SEQ ID NO: 568334 - DNA, 579 bp, Homo sapiens
ctttcacctccttggttagatatatccctaagtattttattttattttattttttacagctattgtaaaaggcgttcagttcttgatttgattctcagcttgatcgctgttggtggatagcagagctactgatttttgtacattaattttgtatcctgaaactttgctgaattatttatgagttctaggagctttctggaggagtctttacagttttcaaagtaaacaatcatataatcagcaagcagagacagtttgacttcctctttacagatttggatgccctttatttctttctcttgtctgattgctctctaggacttccagtactatgttgaagagaagtggtgggagtgggcatccttgttttcttccagttctcagagsgaatgctttcctcattcagtactatgttggctgtgggtttgtcatagatggattttattacactgaggtatgtctcttgtatgccgattttgctgagggttttaatcataaaggtatgccatattttctcaaatgctttttctgagtctattgagatgatcatgaccaataattcaaaagcaaatgcaacaa

SEQ ID NO: 568335 - DNA, 614 bp, Homo sapiens
ttcataaaataaaacaatgattaatgaattatagcagaacattttctcctattatgtacaaactgcaagtgaaatagtctttgatttcttgggccacatgctcgcagtacggtaatagtwaaattaatttctaatatgtctcatctcattatggatctgtgcaatagtctctttcaattttaaattgaacttcaggggagattaaatacttaggtattccagtttgtataaaatttctagattcatacaaattaaacttcctctgtctaaatgaccctaatcattctaatttagctagatggagcttatttccttttgacagggcttgtcatgttgaatcttacccagggagatgaacagcatgccaagtgggtaataagtattccagatgttgccttgctgctttccaacaaagttattaataaaagtcagttgcttcttatctttttttatcctctaatattgctgagaatctaaacttcctttctcccaattaagatatggtaatttaaaagtacagtaaatgggctgctgcagaggaaggtgatttttatataagtggctatccatcatgaatggtacatcagggattcttagggcaatctgaggcttga

SEQ ID NO: 568336 - DNA, 614 bp, Homo sapiens
ttcataaaataaaacaatgattaatgaattatagcagaacattttctcctattatgtacaaactgcaagtgaaatagtctttgatttcttgggccacatgctcgcagtacggtaatagttaaattaatttctaatatgtctcatctcattatggatctgtgcaatagtctctttcaattttaaattgaacttcaggggagattaaatacttaggtattccagtttgtataaaatttctagattcatacaaattaaacttcctctgtctaaatgaccctaatcattctaatttagctagatggagcttatttccttttgacagggcttgtcatgttgaatcttacccakggagatgaacagcatgccaagtgggtaataagtattccagatgttgccttgctgctttccaacaaagttattaataaaagtcagttgcttcttatctttttttatcctctaatattgctgagaatctaaacttcctttctcccaattaagatatggtaatttaaaagtacagtaaatgggctgctgcagaggaaggtgatttttatataagtggctatccatcatgaatggtacatcagggattcttagggcaatctgaggcttga

SEQ ID NO: 568337 - DNA, 586 bp, Homo sapiens
ctgcaccactgcactccagcctggatgacagagcgagactcaatctcaaaaagaaaaaaagtgcggaattttattgctcacagttctgaaggccgagaagttcaacatcaaggtgccaccggattcggtgcctggtgagggccctctgcttcatacagggcaccttcttgctgcattctcacatggtggaaggaggaaaggggcaagcaaactccctcaggcctcttttatggcgggattattcccattcacgagggttctgccctcatgacccaacagccccacctcttaaaggcaaaacattggagattcgatttcaacagatgagggagtctctgagcctactctagctcrgaaggttacctgccaaaaaaaaaaaaaaaaaacaaggaaagaaaaagaaaaaaaaaagaagatttcaacatgtgaattttggagggatgcaaacactcacaccatagcgctgtccttgaatatagtatgtgccttatgaatgctagtggcataaagctaacaaaaggctataacttatcccaggcatacctgcttggcttttgaacctcatttctgtcactgtacacttaca

SEQ ID NO: 568338 - DNA, 552 bp, Homo sapiens
atgaatgctagtggcataaagctaacaaaaggctataacttatcccaggcatacctgcttggcttttgaacctcatttctgtcactgtacacttacagcctaccataaaaaatattaatgatcacataaaaggtggtttatattatccaggtcttatttagtatcattaaacatcactgttagtctcatttaatatagctaacttatawttggccaaaaaaagcattgcaggccagatgtggtggctcacacatgttatgctagaactttgggaggtcaaaacaggcggatcgcttgagccccaggatttcaagaccagcctgagccacatagtgagaccttgtctccacaaaaaattaaaattaaataaggattgcaggccgggcgcagtggctcacgcctgtaatcccagccctttgggaggctgaggtgggcaaatcacctgaggtcaggagtttgagaccagtctgaccaacatggagaaaccctgtctctactaaaaatacaaaattagacgggcatggtggcacatgcctgtaatcccagttactc

SEQ ID NO: 568339 - DNA, 469 bp, Homo sapiens
acaaaaataataacaaaaaaagcaaaaaacagggaattttcctttccttctttattgccagaaaggaaaaaaaaaatcagggtcctacatttgcacagattggcaggttctgcccattgctagccagctgaccttgggcttcccttcccccattctcaaatttgtcacctgtgtattctacctaattttagtcccagtgggttgctttgtaatttatctttatttttatttttttgagatggagttttgttcttgttgcccaggcttgagtgcaatggcatkatcttggctcaccacaacctccgtctcagctcaccgcaacctctgcctctggagttaaagcgattctcctgcctcagcctcccgagtagcagggattgcaggcatgtgccgccacacttggctaattttgtattttttagtatagacagggtttctacatgttggtgaggctggtcttgaactcaca

SEQ ID NO: 568340 - DNA, 602 bp, Homo sapiens
atgtaacacttatcttgtctgtgaaaaatattaaatgaatgcatatgtatgaaatctgtagcttgttattaataataaattataatgccactagagctatgagtcattcaattcacaagtgattgactgttcgttcattcattctacagycactggacattcatattcctatgccagtgcctctaatggatatcccagaatgtcacttgggttgtggacacatatgtctgccaagtaaataatgactgattttttcagagtaattcagttatgctgctccccacctgtgcctccagaaatcaacaaaagcagtaatcccagattttatttttcttaattggcctacctgcacatgttctctgacagttttaatgtcttactagcagcattttgttcagatgtcagatttatgggggctacaggtcgtacatattcctcataggaacaagtattccctggagtgctttcctgaccttgctgggatatgataagttgcacattcccagtcaatgaacacttattggtcacgtgctgtgggtcagacttgatcacagacactgctcactagatgctcacgacaatctgtgaagtaggcattgctt

SEQ ID NO: 568341 - DNA, 630 bp, Homo sapiens
atgaaatgactggagtgcagcaggctttagccaaacattatggctatattaaagatcagtacttctccttgcagttggattgattatttaaaaatctgtatccattatcgtgaagattgaagaatgccttggtaggctatgatgtggtttggtctttgtgggtaggtaggtttagctttgaactcacattatcattcccttatcactgagacataaaataggctctatgaatttcagaggtaaaggctcctaaactgtggtcctgataactgattttcaaacagatagccattaattacaagggctatttatagcatagggctgaactcaatcagctaaggrgaagagtaaggaaaaaaagctctgtcctctacagaccttttaattgttaatgctgagctgttcccctgttgctagataaatcacaaccctcatttattagcatttgggcagattagctactgttttctaattagaacattgatttctagggagctcaggccatgaaagaggtaagtttttagtgacagatgtaaagggttaaaataatatctcccctcataagcaacaagatatgtttggaggacatgtttgtcatttttcatgccacagttggctgttttaacaccc

SEQ ID NO: 568342 - DNA, 602 bp, Homo sapiens
taccttaatgtaataaaagccatctatgacaaacccacagccaacataatactgaatgaggaaatgttgaaagccatttcctctgagaactggaataagacaaggagtcccactgtcaccactcctcttcaacatagtactggaagtcctagccagagcaataagataagagaaagaaataaaggacatccaaataggtaaagaggaagtcaaactgtcactgtttgctgacgatatgattgtttaccttgaaaaccccaaggactcctccagaaagctcctaggactgataaaagaattcagcaaagtttctggatacaagattaatgtacacaaatcattagctcttctctacatcaacagtgaccaagtggagcatcaaatcaagcattcagcccccttttacacacattgtcgaacatgaagtacttcagggaatatggtacctatcataaccaaactattaatacttgaaagtgatatcaaaataattaggggctragtcaaacaaagaacccaggaacagagactctgtgataacagattcaggggtgagaaaactctatataagttaagcatctttgggatttacagttacagat

SEQ ID NO: 568343 - DNA, 582 bp, Homo sapiens
tgagagagagaaactgagatttcaaggtctccaagtgtggcctgctgttttcattgccataccactgctgcatggtgtagagctggtatagaacaggcctcaaaaatatctgaattaaaggaatggacgtatgagagagggaaaaatgcagagcaggargaggaaaaagggaaggatgtaacaggaggagacaggggaaagaaagagggtatgaagggaacccaaggtgcatgaagctgtgcatatcctaaagggctgagctggctttgctttgctcctttgctatccatctatcctggggatgctggccccaggagaccagagcagcaccaaccgctcagcttggagggagtgctgtaaagcatccctgtgcttcagaaatagcctgtgtgattacagaatagctgcagcattgaaacctcattccaggaagcaattcagggaaagcagacatttagattgcccatgattatcacattcgagagatgccttgtaataaatgtctgtttttctccaaaaatatggggtgaagaggcataagaaatgtaagcttaataattgagaaaccaagctgtttgacca

SEQ ID NO: 568344 - DNA, 565 bp, Homo sapiens
ttttagaatcatagaaatgactttcattcttagaaataccttgactttaactttaatggttttctaaaaaatctttttagagttggtaatttagtactttactctgttggactacagtaacactcttcattaatataaatcagtggattctcccaaagttgtcaccccgagagctcctactaattgatatgcgttayaattggaaaggttgcaaggaacaccggaggcttctgcctttttctgctgttccaaactgagaaatttcattcctgatatgaatcatagaaagagacaataacacttttaaataaaagctgatagggttggagacccagaagctctggatggagactcaagtccatgatggaacctacatctggcagtggtcaccacctggggaattttgacctctaggcatctgtgggttagtaatgcaggtaggctgttgtcgcttttataaaagaccagatggaagttgtatctttacccccacaaagtgacaccgaatcatattcagtgtggtcatactcattatctggtagagatgattaccaccaccgccacc

SEQ ID NO: 568345 - DNA, 592 bp, Homo sapiens
cattttgaaatcacaggacatgcattcatttatggaaaattggtaaaatatcattcatttgctccattgttaaagataccaaactgaaatagtttgaatgactgaacatcttaaagaaatgccatttgctactttgtgtctagacaatcaacttgcagctgataaaatctttctatgtaaaagctcagtggcccttcctttgatgaaatgataacactcttttctaattagcagtaccctaggctaacacttaaaaaaaaamaaaaagaagctatttctttgaattgggcacaccccttgcagtattctttgcatcacttggaaaatacctttctttataagccaggttgaactaatgagatttcactgttctaagtggccaaagcatttctcaatagaatgccacattattcatggaatctctcatttctgtaacactgtaatacccagagatatgtggtttcagctgataaattacgcagttgtctttatgagtccctactcctatgctctctgccttggagtctcagatcctaaaaagcaggaaattgtgcttgtctaatatcgatatatgggatcctgtagggataca

SEQ ID NO: 568346 - DNA, 592 bp, Homo sapiens
cattttgaaatcacaggacatgcattcatttatggaaaattggtaaaatatcattcatttgctccattgttaaagataccaaactgaaatagtttgaatgactgaacatcttaaagaaatgccatttgctactttgtgtctagacaatcaacttgcagctgataaaatctttctatgtaaaagctcagtggcccttcctttgatgaaatgataacactcttttctaattagcagtaccctaggctaacacttaaaaaaaaaaaaaaagaagctatttctttgaattgggcacaccccttgcagtattctttgcatcacttggaaaatacctttctttataagccaggttgaactaatgagatttcactgttctaagtggccaaagcatttctcaatagaatgccacattattcatggaatctctcatttctgtaacactgtaatacccagagatatgtggtttcagctgataaattacgcagttgtctttatgagtccctactcctatgctctctgccttggagtctcagatcctaaaaagcaggaaattrtgcttgtctaatatcgatatatgggatcctgtagggataca

SEQ ID NO: 568347 - DNA, 368 bp, Homo sapiens
agaattctatgatgctgatgtacgtctctaacactaattaaaatataatttccaaccttttaacattaatagaaaactagatgaattgaaaatgayttttaaaacaaatctgggacacgtgagaaggcccacgtgtcatgtctgttttgtggcccatcactggcaggagggaagcagtaggtcatctccttttaatgaaagatacttgtgaatgtgcaagtatgtgtgtgtgtccaaccagcttccctggccagtgtctttcattgcaaggacttttcttccctgtggctagaatttcaggaggatcatcctccccgtctatcatcagtctggtacttattcccaggcctggtgggagagcagcaaag

SEQ ID NO: 568348 - DNA, 587 bp, Homo sapiens
tgagcatattaaggaatggcatttttagagtctgagctttttattctggaaggatccaaacgcactgccttcctaaaatggtttcatatagccactccagagacgttgcttkcctatctagtaacactggaatggaatcaatctatgaagcacaagcaaatggttcctcaatagtcagttgagtttgcttctttccttttagccccttcagtataaagtagagtagttcgccaggactggtatcctcgaaataacaatgactaacaccgcttctcttggagacccttgagcctagaccagaatttgcaccctcaggctactgccattcatccatcaattcacagatattgatagtatatctcccacagtgctcacgacagcacaatcatccgtgcgtgcatagtacaacatagtttacattccttacaaacatgctgcattacagctcacaccagcttgagaaggttactggatttgtgctaatttgcctgttttgctggttaagggctttttagtgtactgagatatcttcagaagatagactattattcatgaagcaattctacaaagaaaatgtcagagcttct

SEQ ID NO: 568349 - DNA, 657 bp, Homo sapiens
attgtgtagaaggcccctcagtcgggatttgtctaaagttgtcctcatgagtagatgggggttatggttttggagggagaaagaccacagagctgaagtgcccttttcatcatgtgagatcaagagtgtgtactatcaacatgactaattgcaggtgccatacttttctccccaagaagactattgtctaaaagtatttgaggccttccctgccaaagtagacgtataaggcatcagtcatacaccaagtcatatacctgatccacttcttggactatgaccagcttctcagtttactcacatggcttatggaccctaatatttrtcatgcagcacttgctttccctagtaagcatcattttcagcattaacattagatatttaaaatgtacagaggctatgaactatcttgaagagaatatactttccacctcattctagaaaatcaagtgtatcgtgatttacttgtgagaaacctcagcaactgagtatttcaagaaagagctgaacccttatattgactgacttggtgattttacattttaaatgttcctgtcacagttgagtagctataggtacaattttttcatgagataacttgcgggattgagaacaggagtgtttactgagcatctactatatatagacattttacat

SEQ ID NO: 568350 - DNA, 657 bp, Homo sapiens
attgtgtagaaggcccctcagtcgggatttgtctaaagttgtcctcatgagtagatgggggttatggttttggagggagaaagaccacagagctgaagtgcccttttcatcatgtgagatcaagagtgtgtactatcaacatgactaattgcaggtgccatacttttctccccaagaagactattgtctaaaagtatttgaggccttccctgccaaagtagacgtataaggcatcagtcatacaccaagtcatatacctgatccacttcttggactatgaccagcttctcagtttactcacatggcttatggaccctaatatttgtcatgcagcacttgctttccctagtaagcatcattttcagcattaacattagatatttaaaakgtacagaggctatgaactatcttgaagagaatatactttccacctcattctagaaaatcaagtgtatcgtgatttacttgtgagaaacctcagcaactgagtatttcaagaaagagctgaacccttatattgactgacttggtgattttacattttaaatgttcctgtcacagttgagtagctataggtacaattttttcatgagataacttgcgggattgagaacaggagtgtttactgagcatctactatatatagacattttacat

SEQ ID NO: 568351 - DNA, 626 bp, Homo sapiens
ttacaaaatgcatagcaactgaactacattgcttgtttgagttaggaggtgtagagggctgactgatcatttatgcaatcatccattttatagatgaagccactgaagccaaacaaatgtggtgccttgctttaggtaacacaggtaagtggtacagytatcattagaaaccaggcttactgactactccctgactaccttatctaagtcttggtaatggaaaaaaaaaatcctattatcatctacctgatcagcgcagtctgtttgaagaaagcccactaaatctagatgggttagatctagatttagtcggctaaaaccgcaattacttttgcaccaacccaatacattaggtgaacctgtagttctggaatagtcaatggaatgtgtggcaaattaaaagtaatggcaaattaaaagtaattaaaagtaatggcaaaaactgcaattacttttgcaccaacccaatattattggtctaatccaagctcctctgaggtcatgctgatttaggcaaaataaccctctgtcaattttttacctccgtctcctcagccccactcttctgttccctctagtccctatagaagctgtgctatttctaggacacacagtcactgagtatg

SEQ ID NO: 568352 - DNA, 626 bp, Homo sapiens
ttacaaaatgcatagcaactgaactacattgcttgtttgagttaggaggtgtagagggctgactgatcatttatgcaatcatccattttatagatgaagccactgaagccaaacaaatgtggtgccttgctttaggtaacacaggtaagtggtacagctatcattagaaaccaggcttactgactactccctgactaccttatctaagtcttggtaatggaaaaaaaaaatcctattatcatctacctgatcagcrcagtctgtttgaagaaagcccactaaatctagatgggttagatctagatttagtcggctaaaaccgcaattacttttgcaccaacccaatacattaggtgaacctgtagttctggaatagtcaatggaatgtgtggcaaattaaaagtaatggcaaattaaaagtaattaaaagtaatggcaaaaactgcaattacttttgcaccaacccaatattattggtctaatccaagctcctctgaggtcatgctgatttaggcaaaataaccctctgtcaattttttacctccgtctcctcagccccactcttctgttccctctagtccctatagaagctgtgctatttctaggacacacagtcactgagtatg

SEQ ID NO: 568353 - DNA, 476 bp, Homo sapiens
tccctcaaatgcaggaaagagagggagcaggtctggagaaaggacactaagatttccatgagrtaagtgtgattgttttcagtgacacagaaactatcctcagctttccttagctactaatgggccagttcaaaagtcaaaacctggactgtctgatgccaacattcacaggtttttcttttgatttgtggcatcaggagtgtaaacgtaaatcacatgtttcttagttgtctaactttgtatgtgtgacttaaattcatttcttcatcatagaatggagacactaatattcatttcatagcctaacatgttccacttcttacaggaatgtgacaggagacggcatgagatgacacgtatgcaagcatttagcaaagggtctgacacatgaaagtcagctctcttcctgcccttttccccttcccctctatgaatgatgactgaaagtgtggggtcatcctaactccctgtcctca

SEQ ID NO: 568354 - DNA, 544 bp, Homo sapiens
agaatctgaattttcttattttaaaatgaggatactaataccctgagaaggtctatgaaggctcaatgagataacggtgcagtgggtctggcactatgcctggcacatagtgggtcctaggcttactgtggctcactgcccctaaactgtgacagccatttcacagggcgtggtgctccccgggttaccctgactgcagcattacggcaagcagaaagtgcaggatgcagttttatttttacctcttctcagaaccctgttgtatacatgttcccctgaagggcactttctttccattatgctgtgagctaaagatgtttaattctctagacctctctattccaagctgcctttctcctaagtcctctggtcttattaagaccacaatccccgtgataaaccagcccaagaatgagctggaggagcacaaatgttcctgttgaaaaggagcttagcaatcaactcctctggtcctctttcttagcacaggggctttaaarttttttttttaaaaatagctaaacaccaaagtccttagaaatgg

SEQ ID NO: 568355 - DNA, 331 bp, Homo sapiens
tagaagtggtagaataatggtgtggagatttaagaggaatttaggacgttttcaagtatttagagcttgatgacactggatctttattatatctaatttctcttcaaaacataagcttttcctttttttttttttttttgatgtgaatgtaactctagccctgctttttggctatgaataatggstagtgactttttagtttgttgactttttaatgacaaagtttaaagtgattaaagaaaagaggaaagatgttttacttttattgggcaaagaaaagtaaaaaagagtatggatctgtatgtgtgtgtgtatgtatacatacgtacat

SEQ ID NO: 568356 - DNA, 595 bp, Homo sapiens
tgtctacaaggctgcttttattactcattgaaatgatgtttttttagtattctaccttaacaataaagtactagagagaagtaaaaacctataaaaatcatgtttcagttaataattcatgttattaattagtcatgcttttgagaaatgggagttaaaactaacttttcaaatgattgcaaggtgtgtgaagtaaacataatcaattgatttattttacycaatttactttctaatctgttgacacagataatgagccttggctctacattaacgtgaatatgatagaaaagagaaatatacaggcaaaatccaagtttatgcatatatgaatgtttaattggtatttgcttattcatttaaggattgttgtgtacatacatgaaacacaagactattagaaacaaatttaaccacagcaacaaaaatgatctgtggttgggacacaaaattcttgataaaataatgattaaaattttgaaatttatacataaacttttaccttttaatgctaaatcagactaatgtcataattgcccagatgctggtttcatgtttgaagatgttagcattgaaaataattgcctccacaatt

SEQ ID NO: 568357 - DNA, 619 bp, Homo sapiens
agctacttttactgagcatgtattcaagggtcattaatattgcagagtgtatyggtatttcattctttcatattgtagaataatattcgatggtatagatataccatgttttatttattaattcatcagttaatggatattgggactgtttccatgtttttttggctatgataaataatactgctatgaacattcatgtacaagtttttgtgtgaatacatattttcatttgtcttaggaatatacataggtatggaattgctaggtcatatagttatactatattaacattctaagtaactgccagactattttgcaaaggtgctggaccttcttgcatttcctgagcaatgtacgagggttccatttcccaacatttttatcaacacttgtcattatctgtttattttgattctagccatcctactatgttcaatgtgttcttattttggttttgattttgatttctcacatggctaatggtgttgtgtatcttttcatgtgctattcacatcctttgcccactttttgattaggttgtttgtcattttattattaagatatagccgctcatttggtattctggatagaaattcttcatatgatttatgatttccaa

SEQ ID NO: 568358 - DNA, 619 bp, Homo sapiens
agctacttttactgagcatgtattcaagggtcattaatattgcagagtgtattggtatttcattctttcatattgtagaataatattcgatggtatagatataccatgttttatttattaattcatcagttaatggatattgggactgtttccatgtttttttggctatgataaataatactgctatgaacattcatgtacaagtttttgtgtgaatacatattttcatttgtcttaggaatatacataggtatggaattgctaggtcatatagttatactatattaacattctaagtaactgccagactattttgcaaaggtgctggaccttcttgcatttcctgagcaatgtacgagggttccatttcccaacatttttatcaacacttgtcattatctgtttattttgattctagccatcctactatgttcaatgtgttcttattttggttttgattttgatttctcacatggctaatggtgttgtgtatcttttcatgtgctattcacatcctttgcccactttttgattaggttgtttgtcattttattattaagatatagccgctcatttggtattctggatagaaattcttcrtatgatttatgatttccaa

SEQ ID NO: 568359 - DNA, 566 bp, Homo sapiens
tgaatgcttaactccatgaatttagaaagtatggcttcttcatgccatattctcagctagtagcagcattcatggtaggtgatcaatagagttagataaatgaaagcatgaaccatctagctcacagcttttttggaaattmttatttacaaatacaacatataaagcagtgagcttaagggctaacatgtttaaaatgtgaattgccagcaaccatattggtattggtattaagtcaagaattttgatatttatttccctccttcaggtcttcagcaccaaactaggtcagctggaatcttctctcacactgagagggtggctattttgtttaaaagtgatctagctctagttttattgctataaatttgaactttacagtgagttcctcagacttgtgtattctcccctgacccattcaggttattggtgaattataggcattgtcagcatggtttgattcttctctgtcaaaaagggtcaccatgacagtcttctcactgagtctctgatttgtcttttggatctttcagaatggagggtgatatggtttggctgcgtgttcc

SEQ ID NO: 568360 - DNA, 566 bp, Homo sapiens
tgaatgcttaactccatgaatttagaaagtatggcttcttcatgccatattctcagctagtagcagcattcatggtaggtgatcaatagagttagataaatgaaagcatgaaccatctagctcacagcttttttggaaattcttatttacaaatacaacatataaagcagtgagcttaagggctaacatgtttaaaatgtgaattgccagcaaccatattggtattggtattaagtcaagaattttgatatttatttccctccttcaggtcttcagcaccaaactaggtcagctggaatcttctctcacactgagagggtggctattttgtttaaaagtgatctagctctagttttaytgctataaatttgaactttacagtgagttcctcagacttgtgtattctcccctgacccattcaggttattggtgaattataggcattgtcagcatggtttgattcttctctgtcaaaaagggtcaccatgacagtcttctcactgagtctctgatttgtcttttggatctttcagaatggagggtgatatggtttggctgcgtgttcc

SEQ ID NO: 568361 - DNA, 531 bp, Homo sapiens
ggcctcaggcaacttacaatcatggcagaaggagaaggggaagcaaggcacatcttacatggaaacaggagtgaggggattgccacgcacttaaaccatcacaagaatagcatgagggaaaccatacctrtgatccaattacttcccaccaggtccctcccttgacatgtgaggatttaagatgagatttgggaggggacacagagccaaataatatttttctgcccagggtccctcccaaatctcatgtctttctcacatttcaaaacacaatcatgtcttcccaactgttccccaaagttttaactcattccaggattaacccaaaagtccaagtacatagtctcatatgagacaaagaaagtcccttccacctacgatcctgcaaaataaaaagcaagttagctacttccaagatatgatggaggtacaggcattgggtaaattcttccattccaaatggcagatatttgccaaaacaaaggagctatagatcccatgcaagttggacatcaaagcagggcagacact

SEQ ID NO: 568362 - DNA, 531 bp, Homo sapiens
ggcctcaggcaacttacaatcatggcagaaggagaaggggaagcaaggcacatcttacatggaaacaggagtgaggggattgccacgcacttaaaccatcacaagaatagcatgagggaaaccatacctatgatccaattacttcccaccaggtccstcccttgacatgtgaggatttaagatgagatttgggaggggacacagagccaaataatatttttctgcccagggtccctcccaaatctcatgtctttctcacatttcaaaacacaatcatgtcttcccaactgttccccaaagttttaactcattccaggattaacccaaaagtccaagtacatagtctcatatgagacaaagaaagtcccttccacctacgatcctgcaaaataaaaagcaagttagctacttccaagatatgatggaggtacaggcattgggtaaattcttccattccaaatggcagatatttgccaaaacaaaggagctatagatcccatgcaagttggacatcaaagcagggcagacact

SEQ ID NO: 568363 - DNA, 387 bp, Homo sapiens
aggaggttattctggaactatgaaattcaatgaatgccctgttggggtttggacttgcatggggcttgtagcccctttgttttggccaatttttgccatttggaatggaagcatttacctaatgcctgtatccccattgtatcttggaagtataataactaacttgcttttattttacaggctcatatgtgtaagggatttgccttgtctcagttgagactttcaacctagacttttgggttagtgctggaatgagctaagaccttgggggcttgttgggaaggcaggcttgtgtttcaaaatatgaagacaggagatttgggaggggccagggatggaatgatatggtttggttytgtgtccccactcaaatctcatttctaattg

SEQ ID NO: 568364 - DNA, 416 bp, Homo sapiens
cgtttcttatccttttctactagaaggcattctttcttttttcaggggaagacagattgtatttatttttataaattgtttttaaraagtttggctgggcactgtggctcacatctgtatccccaacacttaggcaggctgaggtggttagatcacttgaggcaggccaggagtttgagaccagcatgggcaacgttgtgagaccccatctctgctaaaagtaaaaaaattagctggctgtggtcccatctactccagaggctgaggtagctgaggtaggaaaatcacttaaactcgggaggttgaggctgcaatgagccataattgtgccactgcactccagcctgtgtgacagagcaaaaccttgtcttaaaaaaaattgtacattgttacataacactgccaaaaaaaaaaag

SEQ ID NO: 568365 - DNA, 651 bp, Homo sapiens
aaaagatatgaaattcaaatttctgtgtccacaactagtttgattagaacacagccacacgcattcacttacatattgtctatgctgcttttctgctcygatagagttgaatagttacaacagagactgcaggtcccacaaagttaaaagatttattatctgatgctattagaaaaaaatcagccagctcctgcattgggaaactagcaaagctagggcagtctcccctcaaagttcaagttcagcttcaatgaacatatcaagaattttacaattagaaaatctagacagaagcttgtgttgatttcagcacatacacatgagttttgggttttacagcattatgttggagtgtgtgtgtgtgtgtgtgtgtgtgtgtgtgtgtgtgtatgaaatataatattttcaagattcacagccaggcacagtggctcacgcttgtaatcccagcactttgggaggccgaggcgggcggctcacttgaggccaggagttcaagaccagcttgcccaacagggtaaaaccccatctctactaaaaatacaaaaattagccgggtgtggtatgtggtagcttgcctgtaatgccagctacttgggagggtgaggcacgagaatcacttgaacccggggaaagaggctgcagtgagcc

SEQ ID NO: 568366 - DNA, 407 bp, Homo sapiens
tacacccagcattagctctgaacctgcagaacaccagacctcctagcaaggagtgacacctacccacttctgctctcacagccctgccctctacccctaggagaaaacagaatggggcgggtaatgtgcaacacttccccttcttccatcaggtccttggtgcctctctggaagaatgggcacatggagctaatgatgacttctactctctggatcaaattcaaagttctttgcgtggctgtccaggcctgtacatccggtccttgctcagctgccatcttgcaccatcttccccttggtgggagatgcatcccaaacagaacggacttaaatgtcctctgccccttcctaccccagggcctttgcactggctgtgccytctgcctgggacactggcaccctcactc

SEQ ID NO: 568367 - DNA, 450 bp, Homo sapiens
gttttgcctctctgggcctcagtttccccatctgtaaacaggaagtggagagagatgtggcataaatcaaaagctctcaaatgaggctgtaggaagtgggttacgacattgccaaaatgtaacaggtcttaggtctttctgcaaagtgaatcctggtctgatacatcagcacyacgtaagagttcatctcacctgatgttatctgcaagtgaggacaatgacagccacctcgggaggtgtgctgagcattcaaccagggggtcccaaactggccagtccaaccacaaatgttttgtaatgcatgacccaaagtgtttttgtgtgtttggttttcaggtgaattcatgctgacattttaaaaataagagatcaggccgggcgcggtggttcacgcctgtagtcccagcactttgggaggctgaggcaaggggactgcttgaggctaggagt

SEQ ID NO: 568368 - DNA, 450 bp, Homo sapiens
gttttgcctctctgggcctcagtttccccatctgtaaacaggaagtggagagagatgtggcataaatcaaaagctctcaaatgaggctgtaggaagtgggttacgacattgccaaaatgtaacaggtcttaggtctttctgcaaagtgaatcctggtctgatacatcagcactacgtaagagttcatctcacctgatgttatctgcaagtgaggacaatgacagccacctcgggaggtgtgctgagcattcaaccagggggtcccaaactggccagtccaaccacaaatgttttgtaatgcatgacccaaagtgttyttgtgtgtttggttttcaggtgaattcatgctgacattttaaaaataagagatcaggccgggcgcggtggttcacgcctgtagtcccagcactttgggaggctgaggcaaggggactgcttgaggctaggagt

SEQ ID NO: 568369 - DNA, 491 bp, Homo sapiens
tgttgcattcccagatgttccaaacccagttgagaggggccattaagggcactctgcaccagatcctcagctgggtgccatccagtagtcactcaacaaacacagaggcagcatggtgctatgggaggtgcaaaagcatttgggactcagaccctagctctgccacttactccttgtgggaacttgggtaagctacttagcctttytgagcttcaggaggttttttgtttccttgtgtaaaatgaggacaacattaccttccttgtggggcagttatgaagagtagtaagtattatttaagtgcctggcacataataggcactcagtaaatgacacccttatgtaatggggcaccagccacaccacaccaagatgaatatgatggctatctcactctagcagggacagatttcatttaagaggctaattgtgatacagggtgtcatgtcaaggtatgggcaaaggaacacagaggaagatggggtgaattc

SEQ ID NO: 568370 - DNA, 508 bp, Homo sapiens
tcctgagtactatatactgtacccaataaatagtcttttatcccttacctcactcccaagctccccacttagagtccccaaagtccattgtatcactccgtatgtctttgtatcctcatagcttagctcccacttacgagtgagaacatatggtatttrgttttccgttcctgagttactttacttggaatagtggctgccagctccattcaagttgctgcaaaagagattcttttttatggctgagtaatattccatggtatatagataccacattttctttatccattcattggtcgatggacacttgggttggttccatatcttgcaattgcaaattgtgctgctatttttgtgctgctgctttcttttttgttatttccttttctggttttggtattagggtgatactgacttcatagaatgatttagggaggattccctctttatcttttgaaatagtttcattataattggtaccaattcttctttgaatgtctggtagaat

SEQ ID NO: 568371 - DNA, 429 bp, Homo sapiens
acctgaaacttagagcagttaaatgacttgccccaactcatgggctaataagcctagaacccagatgttcttatttctagactgattatttccaacaacactgtaatatcctaaagcaagagtcagcaaactatggtccaagggccacatttagtcctccacctattttcagaaataaagagttattggaacacagccacatttatttgttcatgtattagacctgactactttcatgccacattggcagaatttgagtttggcccacaaagyctaaaatatttactatatggtgttttatagaaaatgtttgctaacctctgctctaaagtataattacaaattggccaggtgcagtggctcacacctgtaatcccagcactttgagaggccgaaatgggtggatcacttgaggccaggagttcgaga

SEQ ID NO: 568372 - DNA, 536 bp, Homo sapiens
ctaacaacattatgtcattatatctgagcaaggtttctcaactttagcattactaacatttaggtttggaaaattctttgctgtgagcagctatcctctgcattgtagggtatttagcagtatccctggcctgttgaacacactggataccagtagtaacacctcgcccctgagctgtgacaaccaaatatgtttcaaggcactgccaaatatgctggggggttgggggtggggacaaaattgtccctggttgagaaccaactaaagtaagtatataacctaaagttacaagttttaaaatgtttaattaaagtatacttatggaaaatgagaggacaaaaatataaacaaggtttttgttttgtttaagtagcagccattttatctgcttcttattctgtgggtcaaggatttggatagggctcagttgagcagttctgctytatgtggcttcagcttggtttaaaataaaacactaaattattacatgctaaactgttttccgaattatgactcacaaccttatttgaggaaag

SEQ ID NO: 568373 - DNA, 579 bp, Homo sapiens
ccctggctttcttgctgaggctctttaacatggcaccttgatgtggcatggaaattcacaaatccatttcaccccatgtccctgcaaggactctagccctgagactgatgcacatagactcctgcagatacctgttgctgatttcattcactttaggaatgtgtttgctttcttgtggttgtttggggagagggagcatatttatggggacacacataattcaraaatgctgagttttaacaatataggattgagggatttcaatatggaacaaggaaagacgttggaatagaatagattcaggtttgaatactgctacttgcttgtcatatggccttaggcaagtctctgcctcctctgaaccgcttgtctaaggacaataatgcactctcacctcctaggactgttgtatgattcaaagataataaagacaactttattatcttttactgagtactggccactcagtaaaagtaggtggtagtagttgttttaatcattgttccatttctggagcccaagctcaacttcccacaaccgtcagtccaccacaacacagttcacaatctgacaattctt

SEQ ID NO: 568374 - DNA, 575 bp, Homo sapiens
atggattaagggcggtgcaagatgtgctttgttaaacagatgcttgaagacagcatgctcgttaagagtcatcaccactccctaatctcaagtactcagggacacaaacactgtggaaggccggaaggccgcagggtcctctgcctaggaaaaccagagacctttgtttacttgtttatctgctgaccttccctccactattgtcctgtgaccctgccaaatccccctctgcaagaaacacccaagaatgatcaataaaaawaaataaataaataaataaataaaataaaaataaaattccaatttacttttaaaaattaacttaagttgcaagtataatgaaaaatctgtcaaaggcatttaaaagtaatagtgttaagtatttagaactatattttacaaatgtatactaagtattctgatttcaaattctgtgacaatattcaaacacaaatcagttcccagagctaacagaaatgaagtctttatagctacaagaagccttttttcttaccgaaaagatgaaaatgtcaattctccatataatctcattaaaatttgaaatgttaagtgtc

SEQ ID NO: 568375 - DNA, 576 bp, Homo sapiens
catgcagtatttagtttttatttttctgtgttagttcacttgggaaaatggcctccagctccatccatgttactgtgaagracatgatctcattcttttttatggctgtgtagtattccatggtgtatatgtaacacattttctttatccagtctggcattgatgggcttttagattgattctatgtttttgctattgtgaatagtgctgcgaagaacatacacatgcatatgtctttatggcagaatgatttatattcctttggatatatacccagtaatgggattgctgattggatatatacccagtaatgtgattgctggttgaatatatacccagtaatgggattgctgggttgaatggtagttctgttttaagttctttgagaaattgccaaacttcttccacaatggctgaaccaatttacatttccaccagcagtgtataagcgttcccttttctctgtaaccttgccagtgtctattattttttgacttttaaataatagtctttctgactggtgttagatggtgtctcattgtggttttgatttacacttctctagtgatcagtgat

SEQ ID NO: 568376 - DNA, 589 bp, Homo sapiens
agttattacgtttctgacccagattacttggtgcttcttccagtttatctcattaaatcattacagctgtgttgaaatgtaaagtattattcttcctccttctacagaraggaaactgattctcagaggggataaagacttgtgcaaggggattgtgttagtcattagtgtggttcaccaaacatttttgttttaatttcatagcacagggtgtgattgtacttcgtcggggatgaactatgaccaggtactgctttggtcaataacatgtgaacacctcatccccttctactgcccaggcatttctgagggtggagactccatcagccttgattctggaaggagggtatcctggagcagagctttcccaaccagcttgcaatgaacatgtagcataagcaggagttggaccttttttcagtccctaagtcttggggaggtttgctattgtgacataacccagagcttcctgaattaaatggctacaaagtgagtgagttggcagggctggaatttgaacctctttctggctctaaagactttgctgttcctactattcgcatagtacctgggactgtgttttgaaggc

SEQ ID NO: 568377 - DNA, 579 bp, Homo sapiens
ctaaaaatcctcccagcaagttctcacaaaagcaaaccaatgaataatggtgaacaaattctcgaatagtggaagccaaagcaccaaaacaggcaattaaagcagaaaggatcgatcgggttgatgaggatgttgacaatgatgataatatttatcatgatcatttattgtgttgccacattargcactttgtatacactgtcttggatcctcccaataaaactttaaggggagagtaaaacccattttgtagatgaggaaactgaggttcagagagctgatgtgatttttctcattgtcctaccagcaagtggtcaaggcagaacctggagctgggccccctgggttccctctggtactcttctggaacattccaggcaggctcaagtggctggagtaggccccgcctgcctcccctctgccctctgtggctgttttgtatcctgccagattcctgaagtgtcaggcctcattacagccccgtgccccagtgagcgtggagaggcagttgacaggtatacaatctgaccacggctcccttcaaatcatcaagttgtcttcaggcaggaacgtgccggg

SEQ ID NO: 568378 - DNA, 579 bp, Homo sapiens
ctaaaaatcctcccagcaagttctcacaaaagcaaaccaatgaataatggtgaacaaattctcgaatagtggaagccaaagcaccaaaacaggcaattaaagcagaaaggatcgatcgggttgatgaggatgttgacaatgatgataatatttatcatgatcatttattgtgttgccacattaggcactttgtatacactgtcttggatcctcccaataaaactttaaggggagagtaaaacccattttgtagatgaggaaactgargttcagagagctgatgtgatttttctcattgtcctaccagcaagtggtcaaggcagaacctggagctgggccccctgggttccctctggtactcttctggaacattccaggcaggctcaagtggctggagtaggccccgcctgcctcccctctgccctctgtggctgttttgtatcctgccagattcctgaagtgtcaggcctcattacagccccgtgccccagtgagcgtggagaggcagttgacaggtatacaatctgaccacggctcccttcaaatcatcaagttgtcttcaggcaggaacgtgccggg

SEQ ID NO: 568379 - DNA, 579 bp, Homo sapiens
ctaaaaatcctcccagcaagttctcacaaaagcaaaccaatgaataatggtgaacaaattctcgaatagtggaagccaaagcaccaaaacaggcaattaaagcagaaaggatcgatcgggttgatgaggatgttgacaatgatgataatatttatcatgatcatttattgtgttgccacattaggcactttgtatacactgtcttggatcctcccaataaaactttaaggggagagtaaaacccattttgtagatgaggaaactgaggttcagagagctgatgtgatttttctcattgtcctaccagcaagtggtcaargcagaacctggagctgggccccctgggttccctctggtactcttctggaacattccaggcaggctcaagtggctggagtaggccccgcctgcctcccctctgccctctgtggctgttttgtatcctgccagattcctgaagtgtcaggcctcattacagccccgtgccccagtgagcgtggagaggcagttgacaggtatacaatctgaccacggctcccttcaaatcatcaagttgtcttcaggcaggaacgtgccggg

SEQ ID NO: 568380 - DNA, 579 bp, Homo sapiens
ctaaaaatcctcccagcaagttctcacaaaagcaaaccaatgaataatggtgaacaaattctcgaatagtggaagccaaagcaccaaaacaggcaattaaagcagaaaggatcgatcgggttgatgaggatgttgacaatgatgataatatttatcatgatcatttattgtgttgccacattaggcactttgtatacactgtcttggatcctcccaataaaactttaaggggagagtaaaacccattttgtagatgaggaaactgaggttcagagagctgatgtgatttttctcattgtcctaccagcaagtggtcaaggcagaacctggagctgggccccctgggttccctctggtactcttctggaacattccaggcaggctcaagtggctggagtaggccccgcctgcctcccctctgccctctgtggctgttttgtatcctgccagattcctgaagtgtcargcctcattacagccccgtgccccagtgagcgtggagaggcagttgacaggtatacaatctgaccacggctcccttcaaatcatcaagttgtcttcaggcaggaacgtgccggg

SEQ ID NO: 568381 - DNA, 592 bp, Homo sapiens
gctttggtatttctatttctatcctacaactagtaaaggaaggcagcaggtctgtgcccaaaaggcaaataaaggaacaaaacaaacaaacaaagctacttaatatagaggagaatggttcaagctattaaagctgcttgatgtaccaaattaatcaaacaaaaagcatagcctgagccctgggagagtctggtttggcaactcactacggccagccagacattttcgcagagtacagcaatttctcacaagagttacagctgatgaggggtgaggggacaaagactgaaaagactggcctgagccagcagtttaaaaagtacaagatgagcctgaaacatctggtcatgccagaaagcaagaaactatcaaaggctttgggggtcagatcaacaagacctgaagagccatcatgcagaggctcctggtcaaagacgaatgaatttaagcatcagtaacaataactgtaatgaattaaaacacaccacattattttaaaccyaggagttaatgatatattaacaaatcaagttgtcttcagaagatgtgaaagatctacacattattttgaaaactggaaaataaagaaaaa

SEQ ID NO: 568382 - DNA, 640 bp, Homo sapiens
ccatctttctctcaaataaacattgataacttctatcaccaaagagaaaagcatcaaggtgattttgtaaagcgtatatcttataaaatgtgaacagacaaaaagtaaaaatttaaacaaatgattgctttaccactaaaaacaaactggactattgctgacctactgctgaacctggtctgagtgattcactagtcaaatgttaaagggaacagccttgctctagaagccaaaccatactaagtgacaacaatacattctaattcagcaacggtcgtgactttaggatgacacctgagggaatgaattctatttccagggcagccataatactatgttttaacagtgcaaggtttcacgcagtattaaaatctatttcaaccatgaggaggtgtgacttctctaaaaaaaaagggsggggggtggggagtggaacacaatgactccaaaatcagaagtcacttagccaaaaacactggtcctttggtgcagtgaaccgggtacatggacagggagtcaccaccggtagtaactcttacgcatggcagcactataatacaccccagatatacaaatatttacggtggtcagagtcccctgaatactactactgcaatttgtatttcctgattttgacgta

SEQ ID NO: 568383 - DNA, 553 bp, Homo sapiens
tgcttgtctgtaaaggattttatttctccttcacttatgaagcttagtttggtgggatatgaaattctgggttgaaaattcttttctagcctctagctagattggtttgaaagccagagctttaatttcaattttaggagtaatgattgcttttaaagaaggtatgtgagtgatgtcattggactattatwtttaaaatatttttctgacttctctttgtgaggaagactgtagcagggaggaaaactattgtggtggtctagagagcagattatggagaactggaccatgatggtagcaataaatagagagagatggaaacattcagaaaatgttttggagagtggagtgacagcatttggttagagattaaatatgaatagttgagaaagactgagtaatcagagatcaggttggaacaggaatggagggttgaggaagggtggtatcccttcatgaaatggaagattaaggtagagtaggttgaatgcagggggaaaatcactgtttctgtttggtcccattaaatttgtgatgctgactaagcatccaa

SEQ ID NO: 568384 - DNA, 583 bp, Homo sapiens
agattatggagaactggaccatgatggtagcaataaatagagagagatggaaacattcagaaaatgttttggagagtggagtgacagcatttggttagagattaaatatgaatagttgagaaagactgagtaatcagagatcaggttggaacaggaatggagggttgaggaagggtggtatcccttcatgaaatggaagattaaggtagagtaggttgaatgcagggggaaaatcactgtttctgtttggtcccattaaatttgtgatgctgactaagcatccaattagagatgtagaataagcacttgtttttaattttggagttctggggagattagcagatgcagagctggagagaaacattttggagttgttgatatgtagattctatttatagccatgagactaaataaggtcaccttggaagacagtatagcaaagaaaaacagagagagaagaggaaagagaattttattagatacctcaaaggagaagagctacaaaaaatttatagataacatcacaggcaaacaaaaaaagaaraaaggagaaggagaaggagaagaaggagaaggagaaggc

SEQ ID NO: 568385 - DNA, 492 bp, Homo sapiens
taatacttttaagactttattttaggaaagaaaataactctttaaaaagtcaaaaattttaaaaatatttaaaaaatattaatttgactgtattaaaatattttacatatcaaattgttatgaagagagtgaagatttaagccacaaattaaaagatatttgtaacacaaacagccaacaaagaaataaattaaaaatatatatgttataacaatgagtcaataagaaaaatacaaacatttcaataaaaaattgacaaaaggtaygatcaagcattttacagcagaggcaaaagaaaaaaaaaagtccttaagagacatccaacttctttagtaattaggtcattagtaattaaagctatagtgtgatttcatggctgttatgaactgaatgtttttgtcctcctgaaattcatatgttgaagctctaacccctaatatgatgatatttggagataggggcttggggaggtaattagggttagattaggtc

SEQ ID NO: 568386 - DNA, 457 bp, Homo sapiens
tgtttctatttaccaattatgaagaatatttggcttccttgctgttgartttcttcatagacaacatgtaggttttttaaagtgacattgacttccaacaacactatatggctatggtattgttcttcctccaaagaggagatcaggcaagtgacctgaagccaggaagcagattattatatgctcccattgtgttacttgtctatctttctcacttaaaaaagcccagaatattacttctcaaaactctatagataggtggttagttaccttataggttaatccaatcctaacaggaataattataaagtaaattcatcagacatatagctaatagaaagatgctcgtcatgcaggaaactatgataagattagcagcagaagattatgaatggagcaataagtgcaaactaaaacacacacacacacacacacacacacacacacaccctgtttg

SEQ ID NO: 568387 - DNA, 457 bp, Homo sapiens
tgtttctatttaccaattatgaagaatatttggcttccttgctgttgagtttcttcatagacaacatgtaggttttttaaagtgacattgacttccaacaacactatatggctatggtattgttcttcctccaaagaggagatcaggcaagtgacctgaagccaggaagcagattattatatgctcccattgtgttacttrtctatctttctcacttaaaaaagcccagaatattacttctcaaaactctatagataggtggttagttaccttataggttaatccaatcctaacaggaataattataaagtaaattcatcagacatatagctaatagaaagatgctcgtcatgcaggaaactatgataagattagcagcagaagattatgaatggagcaataagtgcaaactaaaacacacacacacacacacacacacacacacacaccctgtttg

SEQ ID NO: 568388 - DNA, 604 bp, Homo sapiens
tgatatggtgccctcatgtgctttgcagatgaaacttaggagatagcagggttgggggaagcagacaggaggatgtgaaggaggagggcaggacagggtgaggcaagagttagaattagagtccaagtattctcatcagggaaagagagagaaggagaaggagaggaagaggaggagaaggagggagagtggacaggggaggggagagggagtgggagaaggaggaagaagaggaagaaaaagaagtagaactagtagcagtagtagctggactagatcaggttgacaagcctggaagtatgagagctagtttcactattttaaaaagtccatcgtaaggatmtgtggggtagttaaaacatcaggcttctttgttttggctgtaattatactaactcagtgggggtatcactggttgctcatgctaagtagaaattcagatgaaaagggctgggcacagtggctcacgcctgtaattcccagcactttgggaggccgaggcgggtggatcacgtggtcaggagatcgagaccatcctggttaacacggtgaaaccctgtctctacgaaaaatacaaaaaattagccgggcgtggtggcgggtg

SEQ ID NO: 568389 - DNA, 547 bp, Homo sapiens
cattttctgtaaagagacagataataaatatttttggctgtattggccacatagtctctgttacaattactccaggctttcattgtagcatgaaagcaatataaaaatacattaaaagtgagtgtggtgaaatttggcactttgtgagtactatggtctgaatatgcccccagattcatgtgctggaaacctaactcccaatgcaacagtgttgggaggtggggctttctgggaagtgtttasgtcatgagggcttccctcttgtgaatggattaatgcctttataaagtggcttgatggagggaattttccccattttttcccttctacctcttgccatttgagcacagagagcacctcttttccagaggacagcattcaaggctctagtttggaagcagagagcagccctaaccaaatgataacatgttggccttgtactatgtagcctccagagctgtgagtaataaatttttgtcctttataaattactcagtctgtgatatattgttttagcagcacaaactggattaagacagtgggccac

SEQ ID NO: 568390 - DNA, 533 bp, Homo sapiens
actaaagtttttcaataaatagatccataagcractcaagcctctttgtcacttttatttctagtaagtggcaaaatgacactttctttgatttggttagttgtttctcctagcaactccctaggaggttaatgcgttctgaaatgcccaagtggtcagagaaagaaaaataagtaggaagaaaaaagaaacctgaaactcataccaaaaaaaaaaaatgaattatttaagtgagctgtattttaaaactatgaaatttttattaatataaataatttttataaactatatagaagagatgagaagtattttttttttcctgtgcaaagggaaaactatatgggatcttacaagcttgctgacagaataaaaattaaaattagcttcctcattggtagactggatttacactacttgacaaacttgaagattaaataaagcaatatataaaacccttagcgttttatacataacttggtttgctaaaatttcactttaatttagtgctaaagattttctaagtaccattattg

SEQ ID NO: 568391 - DNA, 546 bp, Homo sapiens
tattattttataggcaaataatatgtgtatcttaaaatattttaatatacttttaaatactttcataaaataagttgaatggtaattctatttatttaaataaaatttgtggaaggcagatttaatcccaaaaacacctttaccaatatgctcagtaatagaaaggattgatttaatacacatcacttaagttatagtagtctttcagtgagcttaattttatatcacatcgcctaaacagttctgaagtcctctaaagatgccaacctgatgtaggattaaataacactaaggaacatgatttttatgaagatcacagtgattcactaatttataagaaaaaaatatttattttataaataaatttctttttataaataaatttccagaaaaaaatcctacattaaaaattgggaaaatttraatttatcatcatacatgattaggaagaatgtaggaagaaaatttcctagaaatgtgatctaaatattacttttaaaaaactacatgactaaacaaaataaatgcttatgtatcaagcaccca

SEQ ID NO: 568392 - DNA, 633 bp, Homo sapiens
agaccttagttttttaataaaakatccagaaatccttagagaagtggttgatccagagctggatcaaggacaaaacaaaacatgcctcactgaagaagttgtcaattaaaaacaaaacaaacaaacaaacaaaaaataggtgcatgaagaaagaatgtcagtactcactcagaagaactcctaagggccaaaactggaacaacttgaacaacaaaatacatgattatagtgttgaattataaaccaccccccacataaaacaatactcctgagtccatacttatgtaagttaatgactgaataagtaaataggagggcgtaattctttccaacagagagatttcaaattcataagtatgacagaagtgagagaaataggaaacatcattagaagaccacagtaatatttgctaaaggcaagatccacagatagttttaaaattaatggtctaaagtttaagaaaaattggatattacatggtctaaaaagaactcctgcaataatttaaaaaatactaagggaagaataaaagctttctagtgaagaaacttggcagtcgtcactttaatcaactgatcaatgttacaatcaccagtaataacacatattgagattatgaatccccaaaacaa

SEQ ID NO: 568393 - DNA, 571 bp, Homo sapiens
tttttttttttttttttttaagacggagtctccctctgttgccaagctggaatgcaatggcaggatgtcagctcactacaacttccgactccccggttcaagtggttctcctgcctcagcctcctgagtagctgagattgcaggcacgcgccaccacgcccaggtaatttttctatttttggtagagacggggtttcaccattttggtcaggatggtctcgatcttctgacctcctgatccgcctgcctcagcctcccaaagtgctgggattacaggcttgagccaccacacccagccttcttcctccacttttaacagcatttttacttccgaagctgtaatctttccaatactttcyagaactttgatggaaattcacatttacttattctcatgacatgtaataaaagtttaatacatagcttcaaagagactttaagaaaatttattacaagagcagaattgtactcctaatatagttgactactgttcggaatagacaagaggttaaattttaaacatgtggaggtctattagccataacttccctggagaatgtccaacttcctc

SEQ ID NO: 568394 - DNA, 499 bp, Homo sapiens
ccaccacgcccaggtaatttttctatttttggtagagacggggtttcaccattttggtcaggatggtctcgatcttctgacctcctgatccgcctgcctcagcctcccaaagtgctgggattacaggcttgagccaccacacccagccttcttcctccacttttaacagcatttttacttccgaagctgtaatctttccaatactttctagaactttgatggaaattcayatttacttattctcatgacatgtaataaaagtttaatacatagcttcaaagagactttaagaaaatttattacaagagcagaattgtactcctaatatagttgactactgttcggaatagacaagaggttaaattttaaacatgtggaggtctattagccataacttccctggagaatgtccaacttcctctgtattcagttttcttatttcttcattatctcattgtcttattcacagacagactcagaccagcagatacacatttgg

SEQ ID NO: 568395 - DNA, 597 bp, Homo sapiens
ttctttacttccttcaaaagttttgggaatcgagaataaattagatttctgtaacttacacatgatttcttcctattggcagactacagttagagygataagaattctgtgcaattttgttcaaagtatttaaggaaatatctcaaaaaatggaagccaactatggttcacacttctaaaactgttctgataaagcctcacaggtgccagacgcggcagcccaccaagagagaaaataatattctggagacatttctacagacttcactcttgaaggacaatagggcttcattccactcccatctttaagcagcaaatatctgcaccacaaggaaaaaatacaagaaactttttgggccaattttgtataacttacaatatttgaagtggtatgaagaaacaacaagaattacttctacggatggataaaggagaattcttcctttaggcaatagccaatagcatgaaatgtagcaatatctttacaaccactatggaagtgggcattttataaacacattagtaacaaaattcagagatttagttttataggcaagaaaatcttttgactctaactcttaccccccaccattactg

SEQ ID NO: 568396 - DNA, 656 bp, Homo sapiens
gtgcagttattaagaatgcaagcccttttttattggctgtgtgcttttattttatttccccaaggttctgttttccttagcactttactacaatctactccttcagaaggcaaactaccccattccctcccctaggtctcacctgcctctcccacaaaggattattttttggtggacttaggccttttgatctcagtcatatgattaacattttttaattcaattttgtttcaggatatattcaggatttgatgtataatatacatactataaggctcaattgttttggtttagcattcagtgaagtttgacaaaatgtgtactatcatgtgactgcagccaaaagggagatagaaaacagttccagtcgggcacggtggctcacgcctgtaatcccaggactttgggagactgaggagggtggatcacctgaagttaggagttcaagaccagccyggccaacctgatgaaaccctgtctctactaaaaatacaaaaattagctgggagtagtcgtgggtgcctgtaatcccagctactcgggaggctgaggcaggagaatcgcttcaacctgggaggcagaggttgcagtgagctgagatcgtgccattgcactgcagcctagatgacagagcaagactctgtctcaaaacaaaa

SEQ ID NO: 568397 - DNA, 565 bp, Homo sapiens
gtttattctatctgaagagaggccttttttttttctycttagatagatcatggcctataatggactgtgttttggtaaaattgtaatttagcttttgaaactttatgttctttcccactaaagttgagagcaagtaaatggattccttttttatgggtttcctttttctctcaacaaaataggtcatctacatattgtgtcaaagctgaatcaaaagaaaatttagaccttctgtcttgattgaaggtctggaaaaaatatgagggtgctttagttaacttctagagcataacagtgcaggcatattttcattctccccaagtaggaccagaagatatttgttgtctgctctaggggcatgctgaaaaagagcacagatctgccacaaggacttaagtaattttaggaattgacaacaaggtgatatttggattaggtactactgggaagtgagaagtgagaagtgggggctaacaattttattgatggccttgaggttttgaacaaatacatatccttggccatttgttttgcaggtggtggtgtttttcttctttcttttcct

SEQ ID NO: 568398 - DNA, 598 bp, Homo sapiens
tacacaattttctggatctgagaaaactaaagagaaaacttttaaattccaccactttcctgagacttctcaatgaaacctctttatagggtcattgattttaccatatctgaccagagagtgagcagaaaaatctgcaaatataaaagaatataacaaaatattaagagttttagtaattttaataattaaatgaaatcatgtcagttggttactcttgcgttttatcctattcaataattattgggatttatgaatggtttaaccaaatacataatattgaatcatmtagcattaaatctaaatatttctccactttacttaaaatatgacctatttagcattttggctctcaactatgattatgactttaaagtttactaagagtttgccatatgtgatatttaatctaaaacattaaaattcagtatttgtttcaagccaaactttctgttttggatttttatttatccattacctttattgaatttgaaatgtttttaactttcatgtgatagtaatcttagttatatttatcaaatcgcctttttctttctaaaataaaatttgtagttttatagagaagggaagaaacaaa

SEQ ID NO: 568399 - DNA, 598 bp, Homo sapiens
tacacaattttctggatctgagaaaactaaagagaaaacttttaaattccaccactttcctgagacttctcaatgaaacctctttatagggtcattgattttaccatatctgaccagagagtgagcagaaaaatctgcaaatataaaagaatataacaaaatattaagagttttagtaattttaataattaaatgaaatcatgtcagttggttactcttgcgttttatcctattcaataattattgggatttatgaatggtttaaccaaatacataatattgaatcatctagcattaaatctaaatatttctccacttyacttaaaatatgacctatttagcattttggctctcaactatgattatgactttaaagtttactaagagtttgccatatgtgatatttaatctaaaacattaaaattcagtatttgtttcaagccaaactttctgttttggatttttatttatccattacctttattgaatttgaaatgtttttaactttcatgtgatagtaatcttagttatatttatcaaatcgcctttttctttctaaaataaaatttgtagttttatagagaagggaagaaacaaa

SEQ ID NO: 568400 - DNA, 598 bp, Homo sapiens
tacacaattttctggatctgagaaaactaaagagaaaacttttaaattccaccactttcctgagacttctcaatgaaacctctttatagggtcattgattttaccatatctgaccagagagtgagcagaaaaatctgcaaatataaaagaatataacaaaatattaagagttttagtaattttaataattaaatgaaatcatgtcagttggttactcttgcgttttatcctattcaataattattgggatttatgaatggtttaaccaaatacataatattgaatcatctagcattaaatctaaatatttctccactttacttaaaatatgacctatttagcattttggctctcaactatgattatgactttaaagtttactaagagtttgccatatgtgatatttaatctaaaacattaaaattcagtatwtgtttcaagccaaactttctgttttggatttttatttatccattacctttattgaatttgaaatgtttttaactttcatgtgatagtaatcttagttatatttatcaaatcgcctttttctttctaaaataaaatttgtagttttatagagaagggaagaaacaaa

SEQ ID NO: 568401 - DNA, 598 bp, Homo sapiens
tacacaattttctggatctgagaaaactaaagagaaaacttttaaattccaccactttcctgagacttctcaatgaaacctctttatagggtcattgattttaccatatctgaccagagagtgagcagaaaaatctgcaaatataaaagaatataacaaaatattaagagttttagtaattttaataattaaatgaaatcatgtcagttggttactcttgcgttttatcctattcaataattattgggatttatgaatggtttaaccaaatacataatattgaatcatctagcattaaatctaaatatttctccactttacttaaaatatgacctatttagcattttggctctcaactatgattatgactttaaagtttactaagagtttgccatatgtgatatttaatctaaaacattaaaattcagtatttgtttcaagccaaactttctgttttggatttttatttatccattacctttaytgaatttgaaatgtttttaactttcatgtgatagtaatcttagttatatttatcaaatcgcctttttctttctaaaataaaatttgtagttttatagagaagggaagaaacaaa

SEQ ID NO: 568402 - DNA, 560 bp, Homo sapiens
aggttcagttttctgcatatggctaggcagttttcccagcactatttattaaatagggaatccttttcctattgcttgtttttgtcagatttgtcgaagatcagatggttgtagatgtatggtgttatttttgaggcctctgttctgcaccattggtctatatttctgttktagtacatgctgttttggttactgcagccatgtagtataggctacaagggcagccaaagagaaaggtcaggttacctacaaagggaagcccatcagactaacagcggatctctcttcagaaaccctacaagccagaagagagtgggggccaacattcaacattcttaaagaaaataattttcaactcagaatttcatatccataatttaactgtcctcaaagatatataaccaatttaccaccaaaatatttaaaataccaaaggtatttcagaaggtgtgtgatgcacagagataaacactgtagaatttattgaaaattttaattagaagtggttatgtttccaggtgctcaccccatttgtgatcaaccaggaggccactcctcca

SEQ ID NO: 568403 - DNA, 538 bp, Homo sapiens
cgtgttagatgtttgtcttgttattgttcttaatgtccttgttaaaataataaaatatagacacatggaactcagaagcatctttttccttactattcctattctcctatcattgagtctctccctggctctccagtcytttaactctatacttacactcttaatttttgcccttggcccttctctatttagctatagttctgattggtttctgtgtgacttcagaccttctcacttcattctcaaatcaacatcattcctggacatcaccatcattttcaaatgctggtaagtaagacacaacccttccaaatgctactgagacctttcacttagcccacaatcagagcagagatttggaccatttttacccttccatttgtaactgttctcaccttgaaactgttaaacaccctggtccaatacagaattattttaaatatttaaatatacaagttgactaatgtcttatagtcagagattcttttttttttttttttttgagacagagcctcgctatgtcgcccagactgtagtg

SEQ ID NO: 568404 - DNA, 560 bp, Homo sapiens
aggttcagttttctgcatatggctaggcagttttcccagcactatttattaaatagggaatccttttcctattgcttgtttttgtcagatttgtcgaagatcagatggttgtagatgtatggtgttatttttgaggcctctgttctgcaccattggtctatatttctgttgtagtacatgctgttttggttactgcagccatgtagtataggctacaagggcagccaaagagaaaggtcaggttacctacaaagggaagcccatcagactaacagcggatctctcttcagaaaccctacaagccagaagagagtgggggccaayattcaacattcttaaagaaaataattttcaactcagaatttcatatccataatttaactgtcctcaaagatatataaccaatttaccaccaaaatatttaaaataccaaaggtatttcagaaggtgtgtgatgcacagagataaacactgtagaatttattgaaaattttaattagaagtggttatgtttccaggtgctcaccccatttgtgatcaaccaggaggccactcctcca

SEQ ID NO: 568405 - DNA, 602 bp, Homo sapiens
ttcagggaaattgcattatcccttatcttaaactgatttttttcacatcttggattataktttcaactttttaagatatgttttcaactttgatttagtcatagaatcagtatctcctagttttttctttggtcatgtgaaaatgctatgtctgccattaaatactctttcaaaatatttataagctctattaacatgacctttagtttcaagatggtgtactgaacacatctattagccttccctgatttccaaaacctaagtaacatttccaaaataatattatttaggaaaaaaaaatctatataaatatttttaaataaggaaagatattattgttaagaaaacaaacaaaagaggcaaactgatggatatcaggaactagtgttcttacattaatgcaactgcttcccgagtagagtgggaaggtaaacataaaaactcattatttggaaaaataatttaaaattgtaataactcaggtgcaatatatacaaagtgttttttgttttgttttgttttgttttgttttttggagacagttttgctcttgttgcgcaggctggagtgcaatggcacgatctcagcccactgcaacctcc

SEQ ID NO: 568406 - DNA, 255 bp, Homo sapiens
tatatactaaacacacattgatgaaagaaactgaagactaaaaagcggaaaaatatamtatattcatggattaaaataattaatattgttaaaatgttcatactacccaaagcaatctatagatttaaatgcaaattctatcaaaattacaggaattgtttaaaattacatgaagtttatttttaaatcctaaaatttatgtggaaccacagaagtccttgaatagccaaagaaatcttgaacaaaaagaaaaaa

SEQ ID NO: 568407 - DNA, 570 bp, Homo sapiens
aaacatgtgaagttgctttgtaaaatacaactgtgccccaacatttctgtgtgtgtgtgacagagtattgctctgtcatccagactggagtgtagtggcatgatcacagctgactgctgcctcaatgtcccaggctccagtgatcctcccacctcagcccagtgagtgatcccagatctctcatgcttaagagaccttctaccttagccttctgagtagttgggactacaggtgcaggtgcatgccaccactccctgctatcttttttatttttgaaaaatgtggtttcaccatgttgccaaggctgatcttgaattcttggactcaagcgatcctcctactttggcttcccaawgttctgggctttacaggcgtgaaccacccggccccacagcctgtaatgccattttttattgcactttgtattggccaattaagagatttcccaacctggtccttgaatggatggagagaaaaattagcctcctttgcaactacggaagactttgtgagcttacaagatgctatggaaatctacttatggcttctgaaaaagttttttcttttttc

SEQ ID NO: 568408 - DNA, 570 bp, Homo sapiens
aaacatgtgaagttgctttgtaaaatacaactgtgccccaacatttctgtgtgtgtgtgacagagtattgctctgtcatccagactggagtgtagtggcatgatcacagctgactgctgcctcaatgtcccaggctccagtgatcctcccacctcagcccagtgagtgatcccagatctctcatgcttaagagaccttctaccttagccttctgagtagttgggactacaggtgcaggtgcatgccaccactccctgctatcttttttatttttgaaaaatgtggtttcaccatgttgccaaggctgatcttgaattcttggactcaagcgatcctcctactttggcttcccaaagttctgggctttacaggcgtgaaccacccggccccacagcctgtaatgccattttttattgcactttgtattggccaattaagagatttcccaacctggtccttgaatggatggagagaaaaattagcctcctttgcaactacggaagactttgtgagcttacaagatgctatggaaatctacttrtggcttctgaaaaagttttttcttttttc

SEQ ID NO: 568409 - DNA, 629 bp, Homo sapiens
taaatgttttaattgtatttttcaactcttttacatacttagtaaatatttggctgttggttctattaactactgcaaatggagtgatggttattaaaatgttctagtatgtgtgtggattcatgcattcttcataaagttttgctagtttttgcatcacagcttttgagatcatgttatttggtacatattaattacaacggttataatttcctgataaatttactttcatcattctgaaatgacctttatatttggtaatgctagtttccattgagtttgtgacggatgttacagttcacatagtttttattttatttatttatttattttttgagatggagtcttgctctgctacccaggctggagtgcagtggcacgatcttagctcactgcaaacttcgcctcccaggttcaagcgattctcctgcctcagcctccsgagtagctgggattacaggcacccaccaccacacccagctaatttttttttgtatttttagtagagatgggatttcaccatcttggccaggctggtctttaactcctgacctcgtgatccacccacctcagcctcccaaagtgctgtgattacaggcttgagccaccgcacctggccaagcatggtt

SEQ ID NO: 568410 - DNA, 499 bp, Homo sapiens
tatttcgtttacttgtttttaaycttttataagattatttgatccatttatatttgatatgactactcatttttgtttaaatccactatcatattatggctgttaattctcctacttattctatattcttttgtcttttcttttcttttatttttggaatatagtgacatttttattattttgctttttcctctttctagtctcttgttatatatttttatttctattcttctatgttaaaaactgtaccagccatactttacataccaaagcctaaagttaattaacacttttatattcttctcagattatataaagattttagaacattttaattccatttactttcctcaaaacttacataaaattgttattaagtattttgacttttttatttttaagcacaggagatattattttatacagcctaaaatcttttagatttcccacatattttatagctttctttgtgctttattccttcttgaatctcagaatt

SEQ ID NO: 568411 - DNA, 515 bp, Homo sapiens
ggtccccagccaccttcagcctcatcttgtcactgcgcttcagccacactggctttcttagaattctccaaaggtactaaggtttctccatccttagttacctcacaaaggcttatctttcccctcctccatcccctgtccagcttctactcattcttcaaacctcagtttagatgttgcttcctcaggtaagtcttctctgatcatgccctcccagacaggccctgtcaggtgtctctgttacatgccctttgcacattccattatttctctgaagtaggatcacaatcataattaagtatgtatttgcttaacatatgtcactccacagactaaatgattcatgaggacatgaacaatgcacacaacaggggctcaatatatcttatttttgytgagtgggatgagtaaatgacacattgaatattttgaaaccatttagttaaagcatagatctgtatctctcaaggcttaactttcatttggttcaggtcattcagtctatgtttcatcat

SEQ ID NO: 568412 - DNA, 365 bp, Homo sapiens
ttgaaaccatttagttaaagcatagatctgtatctctcaaggcttaactttcatttggttcaggtcattcagtctatgtttcatcatcctaagtgtatcttagaactataaaatccaccgcaaatctgttctccaattagtcatatataaattaacaagtaaaaacatgttttggagtacactaagttagaaaataaagtgcttcaaaacaatgaggagcatcttaattgttatactttagattgtaaaaataagtcattcaaaatcgaagctgttgaaattttaaattattttgttccttaaaggaatgagattatgggacctgastcacatggtaggcagctataactaggcagctgtaacct

SEQ ID NO: 568413 - DNA, 664 bp, Homo sapiens
gctcctagcaacagaattccttgaaatataaaagaaaatgtaggtcatttattcctctgcctcctcataaacatgcttatttccctgagatcttatttcctcagtgatttagacttattttaccatcrtcactatgaagaagaaggagaggaagaaaaaaaaggagaaggaaaagaggaaggggaagaggaggggaaggggaaggaagatggggaggaaaagagaaagaagaaaaaagaagaaaaggaggatgctaatggggaggaggaggaaaaggaagagaaagagggaagaagagaggaagaaaggaaggaaagaaggacaaaagaaagaaaacacatacattaaggctcttggcacaaggatctgtcatatgtgtatgtgtttgtgtcttttttggcctaatttacatagacatgtctcctatttcagaaaatgaggctaaacagaaaaccacttttcctctatttacatcttgtaccaaaatgtttggctcaacatcaatctagattttgggtttctcttttaccacataaattattctccttccacacaattaataggctctgatttgctatttctggtctttgatgaacaacctttaacagtggctatttttttttttttgctattactataacttttataggaaatataccattaa

SEQ ID NO: 568414 - DNA, 496 bp, Homo sapiens
atttttttttttttgctattactataacttttataggaaatataccattaagtaaggcaaaggagaagttggggtagagagtgtggagggtataggaaaagaaacggtgatgaaacttagttttaaataggaaactagaaaggagagagagtgatcctattcaccataactcagccctcaagaaaagaagaggctaagcaggattgactgtttcttaaattgaacacrgccatctagggtaactgtggccattattttgtgtgtgtgggatcgaagcttcaactcccagggttaacaggctggcttttggctcccacatctactgttcataactctatctcttttccagttttttttgtagacaagtaaatcaaagtgttcaaaggttaagtaacttcttaaagccatctacataataagtaggaaaacaagatttgaatccagactgttttcctccaagagtcaggcctttatcacctactcagtaatgcttata

SEQ ID NO: 568415 - DNA, 397 bp, Homo sapiens
gtgattactgatgcaagtggcccaaggactatactttgaaaaaaatgccattttaatgcctttagtgagtgaggtcttacaactcttatagtttgtaagcacttcccccattgcacatctgtsgttcaattccataatggtgctgtaaaatattattctccaaatgcaaaattcacagacaagtcaaaaaggaccaaccttaatgagaaactatctataatacctggaaattgatggacaagtgaaaccaatgatgtcaaattcattgccacttgaagtctgagaccaatacttaataatttttcttccatgtaacttactttactaactggcctcaatgacaaaaaatctttttcaactaatgttacttaaggggaaattcttcaaacagatatat

SEQ ID NO: 568416 - DNA, 397 bp, Homo sapiens
gtgattactgatgcaagtggcccaaggactatactttgaaaaaaatgccattttaatgcctttagtgagtgaggtcttacaactcttatagtttgtaagcacttcccccattgcacatctgtcsttcaattccataatggtgctgtaaaatattattctccaaatgcaaaattcacagacaagtcaaaaaggaccaaccttaatgagaaactatctataatacctggaaattgatggacaagtgaaaccaatgatgtcaaattcattgccacttgaagtctgagaccaatacttaataatttttcttccatgtaacttactttactaactggcctcaatgacaaaaaatctttttcaactaatgttacttaaggggaaattcttcaaacagatatat

SEQ ID NO: 568417 - DNA, 638 bp, Homo sapiens
tgtataatcaaagcaagtgtgaaagaggaactcaagccgaagtaagagttggtctctgaaaaatcttagcatttctcaaacgatgtactagaaaacaactgacagaaattctgattcctgattatgctttaaagtttcttaaagctctgctggaattgagcttatctgtaacattttgttttattttattattttattttattttattttctcacaggatatcacattggagtcactgccaagtcatagccataaatgatgagtcggtcctctttccagtggatcataagacaatggaccctttttgttatgatggttttaaactttcaattgtcactttttatgctatttctgtatataaaggtgcacgaaggtaaaaagtattttttcaagttgtaaataatttatttaatatttaatggaagtgtatttattttacagctcattaaacttttttaaccaaacagattgagagtttgaatattagttytgatattgcaagactccagtgtacttttctcctaacagttggttgatcatttaaaaaggcttttctctctctttttactgtctttatgttgatttttaaaactcattttttattagatgacattcttcatgggagaattataatctag

SEQ ID NO: 568418 - DNA, 567 bp, Homo sapiens
gagtttgaggtgctggaaggcatccagtaagcagttagatacasaagaagttcatggagaaaaaaaaacttgtagattgagagttatcaaaatatatttggtaacaaaagccacgtaagcgctcaagattaccaaaggaggctataataagtcagaagaaatatgtgtgttgacaatttttgccagtggtcaccactgtgaaggttctaggcttgctatcccatatacttttctagcccttaaaacaaaagtttatgaagtcattacagtggagtagaagggaaaacactattaccttaacaataataatacatctcaaatttattgagtagtttggtatccatagactcttctaagtgctttacaagtggtactcatctacttttttagaggctagatacattttataaataagtaaagtgaggctcagagagattaagaaacttgaccacggtcacatagctaataaatgacagtgtcaggtctctggctacagagttggtccacttagactcctctctctactcctcctatagtcaaggtgtttgttttgggtttggagaattc

SEQ ID NO: 568419 - DNA, 576 bp, Homo sapiens
tggccattggtaatcaactcaacttttagcccctttcacctcctagaagttgaggagtgggactgacagtcctaaccttctaatcctgccttggtcttttgtgataaccagccccctcctagatgctatctagggaaccccagctackagtaatcttattagtacataaaggacactcttgtcactgcagagcttccaagggttttaggagctatgtacccagaaccaggagcaaagaacaaatttctatttcttactgcatctcagtatcttaggtatctaatgtttttatagcacgattgttagcaaagcattttcagatatttgattctcatcagaatttgatggggtaaataggacagtgttactattagtctcaatttgcaaatgagaaaattgaggttgggaaaacccccacacattgtcaaaggctactctaggctttcgatggcaaatagagtgttcatttcattatactttattgtcaattcaactgcatcaaacctttgttatattttaaattattgtaagatacttcacaatatggtaacatttcacattctaagaagtcattca

SEQ ID NO: 568420 - DNA, 550 bp, Homo sapiens
ggcacttatttattatgaaattactgcttttctaactaaaaaaatgagcatagctacttgagtgaattagtttttacataacacaaaatgttttaagtygttttttagtccttagcaaaaaccactgagataaaatggtattgggttgcctttttacaattaagaacttgaaaaatttaggaacgtgttcaagatcaaattgttacatttaatataaaaaagaccttaaatatgaattctgttctagcagatgctaatttttaattaacattataaatttaattgtatgttaatcatacaggatatttttagcaagctccatgtaaatgaaaaatttatgccttttatgatatatatattttttcgagacggagtttcattcttgttgcccaggttggagtgcaatggcacgatcttggctcactgcaacctccgcctcctgggttcaagtgattctcctgcctgagcctctagggtagcttggattacaggcatgcaccccgatacccaactaattttgtatttttagtagagacaggatttcaccatg

SEQ ID NO: 568421 - DNA, 550 bp, Homo sapiens
ggcacttatttattatgaaattactgcttttctaactaaaaaaatgagcatagctacttgagtgaattagtttttacataacacaaaatgttttaagtcgttttttagtccttagcaaaaaccactgagataaaatggtattgggttgcctttttacaattaagaacttgaaaaatttaggaacgtgttcaagaycaaattgttacatttaatataaaaaagaccttaaatatgaattctgttctagcagatgctaatttttaattaacattataaatttaattgtatgttaatcatacaggatatttttagcaagctccatgtaaatgaaaaatttatgccttttatgatatatatattttttcgagacggagtttcattcttgttgcccaggttggagtgcaatggcacgatcttggctcactgcaacctccgcctcctgggttcaagtgattctcctgcctgagcctctagggtagcttggattacaggcatgcaccccgatacccaactaattttgtatttttagtagagacaggatttcaccatg

SEQ ID NO: 568422 - DNA, 550 bp, Homo sapiens
ggcacttatttattatgaaattactgcttttctaactaaaaaaatgagcatagctacttgagtgaattagtttttacataacacaaaatgttttaagtcgttttttagtccttagcaaaaaccactgagataaaatggtattgggttgcctttttacaattaagaacttgaaaaatttaggaacgtgttcaagatcaaattgttacatttaatataaaaaagaccttaaatatgaattctgttctagcagatgctaatttttaattaacattataaatttaattgyatgttaatcatacaggatatttttagcaagctccatgtaaatgaaaaatttatgccttttatgatatatatattttttcgagacggagtttcattcttgttgcccaggttggagtgcaatggcacgatcttggctcactgcaacctccgcctcctgggttcaagtgattctcctgcctgagcctctagggtagcttggattacaggcatgcaccccgatacccaactaattttgtatttttagtagagacaggatttcaccatg

SEQ ID NO: 568423 - DNA, 550 bp, Homo sapiens
ggcacttatttattatgaaattactgcttttctaactaaaaaaatgagcatagctacttgagtgaattagtttttacataacacaaaatgttttaagtcgttttttagtccttagcaaaaaccactgagataaaatggtattgggttgcctttttacaattaagaacttgaaaaatttaggaacgtgttcaagatcaaattgttacatttaatataaaaaagaccttaaatatgaattctgttctagcagatgctaatttttaattaacattataaatttaattgtatgttaatcatacaggatatttttagcaagctccatgtaaatgaaaaatttatgccttttatgatatatatattttttcgagacggagtttcattcttgttgcccaggttggagtgcaatggcacgatcttggctcactgcaacctccgcctcctgggttcaagtgattctcctgcctgagcctctagggtagcttggattacaggcatgcacccygatacccaactaattttgtatttttagtagagacaggatttcaccatg

SEQ ID NO: 568424 - DNA, 582 bp, Homo sapiens
aaattgttacatttaatataaaaaagaccttaaatatgaattctgttctagcagatgctaatttttaattaacattataaatttaattgtatgttaatcatacaggatatttttagcaagctccatgtaaatgaaaaatttatgccttttatgatatatatattttttcgagacggagtttcattcttgttgcccaggttggagtgcaatggcacgatcttggctcactgcaacctccgcctcctgggttcaagtgattctcctgcctgagcctctagggtagcttggattacaggcatgcaccccgatacccarctaattttgtatttttagtagagacaggatttcaccatgtaagtcaggctggtctcaaactcctgacctcaggtgatccacctgcctcagcctcccaaagtgctgggatcacaggcgtgagccaccatgcccggcctgtaatagcatttctacagaaatatatgtagatatagagaaagttgcaattctgaaccccaaaaacaatccagttagagacaaaatagagaaaaggaagaaacatatattgatgtagtaatactctatttt

SEQ ID NO: 568425 - DNA, 601 bp, Homo sapiens
cacttgagatcaagttaattggtacttttgcttatttcttgtcctggtcaactctcaaattagtctctacttaaataccacttccttcagaagtcttccctgatcttcctggaccatgttaggttacttgactgataaccttgcattacattttggacttattctatcagaacacttatcacttcttcatatatctatttctttgcttctcccattaaaaggaaagctctagaagaaagagataattcttttttttatttattttatattcttggtacttaacatggtatctgacacacaatacatgctcaataaatatttggtaaataaattaattggtaaatgtctattgacctcactgatcattttgcaccataaaataaatatrtaaataaaaaacaggccaggcatggtggctcacgccatgatcccagcactttgggaggctgaggcaggcggatcacctgaggttgggagtttgaggctagactgaccaacatgaagaaacccccatctctatttaaaaaaataacagaattaggcgggcatggtggcacatgcctataatcccagctactcgagaggctgaggcagaagaatt

SEQ ID NO: 568426 - DNA, 601 bp, Homo sapiens
cacttgagatcaagttaattggtacttttgcttatttcttgtcctggtcaactctcaaattagtctctacttaaataccacttccttcagaagtcttccctgatcttcctggaccatgttaggttacttgactgataaccttgcattacattttggacttattctatcagaacacttatcacttcttcatatatctatttctttgcttctcccattaaaaggaaagctctagaagaaagagataattcttttttttatttattttatattcttggtacttaacatggtatctgacacacaatacatgctcaataaatatttggtaaataaattaattggtaaatgtctattgacctcactgatcattttgcaccataaaataaatatataaataaaaaacaggccaggcatggtggctcacgccatgatcccagcactttgggaggctgaggcaggcggatcacctgaggttrggagtttgaggctagactgaccaacatgaagaaacccccatctctatttaaaaaaataacagaattaggcgggcatggtggcacatgcctataatcccagctactcgagaggctgaggcagaagaatt

SEQ ID NO: 568427 - DNA, 485 bp, Homo sapiens
agcactttgggaggctgaggcaggcggatcacctgaggttgggagtttgaggctagactgaccaacatgaagaaacccccatctctatttaaaaaaataacagaattaggcgggcatggtggcacatgcctataatcccagctactcgagaggctgaggcagaagaattgcttgaacccgggaggtggaggttgtggtgagccaagatygcgccaatgcactccagtctgggcaacaagagtgaaactccatctcaaaaaaataaataaataaacagtaattttggaggcattatttaagtaccatgtaaagaaagtaagctgagaaatatcttttatgagtactttttgttcttaaatcagaacttaagatgttgttaaatatagtagcttttttctatatcctctgactttttatattaactcatttaccacattgttcttcattgccatttcttaaaaagaagactccttcttcctggtccc

SEQ ID NO: 568428 - DNA, 560 bp, Homo sapiens
gtaactacagtcagtcattctggagtaagcaccacttgacagaggtcaaaagtcacaggtggagcctaaccagcagtcatgtaagatcttcttcagaaatttcatttctgcctgtttctgctcactgctgttgtgagtaatcagtgttcttacctggctttaaaattattcaaaataactgagaaggatataggggtgaggacagggcagcccgcatctttatctagcattgtgctgttgagagtcttgggaaagacttgtgagcaatcatcaacaccaatgccggttctctgggatggccttcaggagggtgtctgagatacagaaatctcaccttgtgctggttcaaatgtggcatcagatagttcagtgtttgagtaatgacatgtagactctcccgggatatgttttcattcttttttttaattccaaaagtaaattctaatggaaataaaaataaaacaatatagagagctaccaagtaaaagcactatttccctccttctcacctactattacrcaacttagcatcaaccacttttaataatttggcatatatc

SEQ ID NO: 568429 - DNA, 576 bp, Homo sapiens
gatagtttacatttttttcatactggatcttcaaaatctattctattgttttcccatgctgagaaaaatgrctgcctgcagtctctaagcttattcttgccctaacaattctcttcagctttggatctctgtggggttgctctaggttccacaagtcacacaagcagcatcttcactcagaagccaagcagcatgaaaatttgatccactggatgatcaaattcattctgggcccaatgttacattttattaacacactaaatgttgtcatgatatgcttcctgacaggagtttttaaagtgttagaagaactattaaccaaaacctctgctccaccccagctttacctgaagattaagtatggttagtcaaaacctgacagaaacaaccatcatcatatccaaaccaagtgaaaaattttatttcagtaaaaagtggtgggttttatcttattcataactgtcttagtccattcagggtgctatagcaaaataccataaactgggttatttataaattacagaaatgtatttctgcagttctcaaggctgagaagtccaagattaagatgctagc

SEQ ID NO: 568430 - DNA, 448 bp, Homo sapiens
tggtctgagaaaagattttatcaataagacctcagaagcataggcaataaaagcaaaaataaacaaatgggattatatcaaagttaaaagcttttgcacaacaagggaaacaatcaacaggataaagagacaacttacagaatgagagaaaatatttgcaaacttcatccaacaggggattmatatccacaatataaaagacactcaagcatctcaacagcaaacacacaatctgattaaaaaatggacaaacgatctgaaccgatatttctccaaagaagacatacaaatggctgacaaatatttttaaaagtttaatattgctaatcatcagggaaatgcaaacaaaaactataatgaaatatcatctcactccagttagaatggctattatcaaaaaagacaaaaaatagcaaatgctggtaaagatgtggaaaaaagagaactc

SEQ ID NO: 568431 - DNA, 511 bp, Homo sapiens
gagtcttggctgagctgtgtcaccctgcccttctagctgaacagccacagcaccctacctactggaactgtactatccccggcacttgcgctgctgaggtactctgcctctccagggagtacagtcatcactgcagtgttccttgctctccagggcccaaaccacagaggcattttgccattactggggccttgttgctgctgcacctgaactcccagagcctgggctaccactgtgtcacatcattccaaggaccagagtcaacactgtgtggtacctcacccctggagcctgagctgctgctgcgtcctattagttccatgtactgaattccaactgtgccctgcttcatggagtctgagcctccagagcagctcttcttccccagagctgtaccagtgctgtcccctttcccccagaataagaatcatggctacattccagcctcctgggcccaaattgmtggattgctgaatggaagaatgacattcactcatgctttgaatagtaa

SEQ ID NO: 568432 - DNA, 578 bp, Homo sapiens
tgccccactgtcaggaagacaagaacaggaggattcctaatgcttttaactgaggtacccatagtcatcactaatactgatcacaacaaaagaagctgcacagagaccacaccgctgtttctgcatgtaattagagccaccccaccatgcccaatcatcatcctcaggcccatctgcaggtaaaagtgttcccttacaaaaccactctgtaaaatctggaagaggtgactgtgccaccagawgcacagatgtctatgcaagaacacaagaaacaggaaaaagcaagaaaacatgatgccacagaaaaaatgcaaaaattcttcagtaactgcccccaaagaagtggacatttataaattgcctgaaaagaaattcaaaatatgatattaagcagactcagaaagatacaaaagaattcaaacaggcaattgaataaaatgaagggaacttcgtgatcagaatgagaaattcaacaaagagatagatatcacacaaagaaagaactaaacagaaatcttggaacttaagattttaattaatgaaataatacaattgaaataatcaataatgaaccacat

SEQ ID NO: 568433 - DNA, 577 bp, Homo sapiens
ttgtaaagtgctttgatcttataaagcagtgagataatcccagtccttgtttaccaagtgcctttcttcccaagagctcaaagtgatttacaggcaatgagcccaattctttgcttgccagttcagagggacactcagatttaatgggcattggtagttgctttggagccatactatagaagggcactgaggggtatagtgatggtcaagggtgggggaagatcacagacccttgtcaagttccaggaggtatggctgatcctctacactcactgatcaactgtgtggggtgctatcatagcatttatcatgctgtagtgtagtgtaaacatttatttatatgtctgccttctgaactagattatgagttacttcggcagagaaactgggtcttttaactttgcatgatgtttccttgcccagctccccaaccttaactcatacagctttctccatccttcaccaagagctagccaaactgrtctttctgtttcttaagcataccaagtttgatctctcctttggcccttttgtacaaagacaccttctcatcattcaaatttcaactcagctgtca

SEQ ID NO: 568434 - DNA, 574 bp, Homo sapiens
gtatttcttttggctgttgggaatgatgttattatttatagatttttacatgtcttttagtgaatacatatgcattttcattggacatatacctaagagtagaatactgtatcatacatgattatgcacatatgtacctttagcccacacctctaaactgctttccaaagtggctatgctgatttgcattcccaccaacagcatatgagatttgcaatatcctttctcaatatccttgtcaaaactccatagtgtatgtctttttttttatcttagccatcctggtaggtatatagtggtatttcattgtgattttaattttattttcttaaagactaatagtgttaagcaacttttcatttacttattattcaattattttactttatcatgaagtgtcttttcaagcattttaaacatttactattgggttggttacattttaaattgatttgtaaaagtttatatatatattcagaataggaaccatttgttaactatatattttgaaaatattttctctcactttgtggyttttcttttttctaagaacttcttttgacaaatggatttt

SEQ ID NO: 568435 - DNA, 583 bp, Homo sapiens
aatactggttcctctttttcttctttctttctttctttcccttcctttttctttatttttttttttctcgagacaaattctagctttatcatccatgctagtctcaaatgtctgggctcaagggatctttctgcctcagactcccaagtcactgggattacaagcatgagccatcatgccccctgaagctcctttttctgctcattctggctcatgctgtccagtccctttatgtgtgtggttaaactgcttttttaatattttgtatctcagtatctcagaacataattttcccttccatactttgaggtatagagctcattaaggtatagagcttattggtataaagcatatctaagaagtcctttataacaatactaaagcaaacttaaatgtcccaataacctcccctttctccacttttttatccacagacctggatattgtgtgtaaaaaaataatttgaagtcaaggacaasgttctctttctccagaaatgatgggcttttctttctgtcagaggcctaactcttgaaatctataatctctttaatctgatttcagagattggcatacttcaaaa

SEQ ID NO: 568436 - DNA, 507 bp, Homo sapiens
cttgactctctgggggccatgttttaagatcttggcttcaatactgtcaatgtcgtattacacttagtatttatatcaattaggaaagtattcagcttagcagtggcttaaacaaagatttattttttttcatataataagaaatctgaagatatgttgctgctgaactcaatttgctaagattcccttggcttttttttcctgtggtcacaaaatggctgctgcggctccatgcattatgtctgaattcaagtcagggggacatcagaatgccagcaatatctttccgctttcatcagaaaaggaaaaatctttattagaaatctcagagacttccaattaagcttcccaaactgtgctacctttaactgcaagggagactaggagagtgagtacttagctgggaaagtgagraggaggttgaaactaagtattgtttcaaccaaatgtcatcctgggttacagaaacctgttctcttttcctttcccttttccaggcttgtgtag

SEQ ID NO: 568437 - DNA, 546 bp, Homo sapiens
tatggttcctaactgcttatattagagaagaagaaagtgaaaataaactatctaagcaactaatttgacaagttaaaaaaaggtgcaattgattttgccaacaatggcagagtagggaactctaaggttccatacatccagcaacaaatgctggcaaaaactggtagaatcaactttcacagaactagraaacacagtgaaaaactaacaacaaccaggggaagcttaatgaagaaagaagctgctgcattgtggtaagagggtgttagagaatttaaaattgcctgcttgtcacccctcttccccagagtaatggtggccatgaaaatactgttccagtttgctaatgtcacaggggacagtatagactttattcttgaagagttttggttgtgtgttttgactgtctggcagctccctgaaggatcagtgcaaagtgtgcctttgttttacctaacttagaatattcccagggtccctgaaggatcagtacaaagtgtgcctttgttttacctaacttagaatattcccagggtcatagagctt

SEQ ID NO: 568438 - DNA, 502 bp, Homo sapiens
actgttcaggccagagggaacagcaagtacagaggtcttcaggcaacacagagttaagtgtgttcagaaaagcaggaacatcaatgtgctggagacatgatcccttttttctctattcatttcaaatgcacttaaaaaaatcctaggttcttatatatatttgatttgtttctgaccattaattctgttcccttaccaggaacattgaatggattttcaattattaaagttttaaaatgtcactcagtaaacttgtgcgattttcttcatgtaagtcatcacaattcttttaaaatttattcatgaccaggcacggtggctcatgtctgtaatcccagcactttgggaggccatgacactcagatcacctgaggtcaagagttccagactagcctggccaacatggtgaaaccccattgctactaaaaaataaacattkagccaggtgtggtgggtgggtgcctgtagtcccagttacttgggagtctgaggcagaagaatc

SEQ ID NO: 568439 - DNA, 643 bp, Homo sapiens
cactgcagcctgggcaacaagagcgaaactctgtctcaaaaaacaatcaaacaaaaaagactcattatacatcctctccctggaaattttgtattttagcaaatgaatgtgtcctatcttctagaattttaggctttagaaagtaaatgagtaaaatatccctggcagtgaggactttctggtgtttattaaagcattccaaggcaggcactgcctcgcttcttcacctctaagggaagcactcattagcagagcagtgactgtaggactcctgtaatctgcccctgacactctggtcttggtgcaaagcaggcaatggcaagttagagacttgggatacccagaggctgagaaaggaattaggacccttaagctgtgatgctcccattccaaagtggcaggaattgcacagcaggtgyacaaaggggagaagtggcctgtgttggacatttacagaggaggagagataaaggattgtgaggggatacctggccagcggtttaaaaaaacctggtgatatcataatattcaatgaattcatcattcattgaggactcacgtatcagacatggtcctaagaacttttcttcatgatccactgtaattttcatactaacctcatgaaaaaggaattgcttttatc

SEQ ID NO: 568440 - DNA, 643 bp, Homo sapiens
cactgcagcctgggcaacaagagcgaaactctgtctcaaaaaacaatcaaacaaaaaagactcattatacatcctctccctggaaattttgtattttagcaaatgaatgtgtcctatcttctagaattttaggctttagaaagtaaatgagtaaaatatccctggcagtgaggactttctggtgtttattaaagcattccaaggcaggcactgcctcgcttcttcacctctaagggaagcactcattagcagagcagtgactgtaggactcctgtaatctgcccctgacactctggtcttggtgcaaagcaggcaatggcaagttagagacttgggatacccagaggctgagaaaggaattaggacccttaagctgtgatgctcccattccaaagtggcaggaattgcacagcaggtgcacaaaggggagaagtggcctgtgttggacatttacagaggaggagagataaaggattgtgaggggatacctggccagcggtttaaaaaawcctggtgatatcataatattcaatgaattcatcattcattgaggactcacgtatcagacatggtcctaagaacttttcttcatgatccactgtaattttcatactaacctcatgaaaaaggaattgcttttatc

SEQ ID NO: 568441 - DNA, 616 bp, Homo sapiens
acagttccttggtctttctttgtatcttatgacatcaacatttttaaatagcataggttagatattttgtggagtttctctcactttgggtttgtgtgatgtttccttctgaatagattaaggttatgtgcttttgagagttatacaccaggaatgatgctatgttcctcttagtatatagtatcagcagacacagtatatcaatttgtcccattactagtgatgttattgtcagatttctccactgtaaagatactatttttccttttgcaactgacaagtattttaagagtacatagccatcctgatactccttaaactttcactcacagcacttaccatacagtgtagattcctgtctgaatcaatgctataaaggtttccaaatgatgattttctaatttcattatttcttctatacttattagcagtctctctactttaaggaagaaatttcccktctctcccatttttaaatttacatcataggttcttcttttattctgtgggttataatttgttgccatagttatttctttttatgcctagattgctgactggggtcagcaagagccctacaatttggtgcgtgtttctgttgacatgtttctcagca

SEQ ID NO: 568442 - DNA, 598 bp, Homo sapiens
gaacatattaaatcagagaaattcttaaagaatacaaaattacagctagatagaactagaataagttctagtgttccatattactgtagaattactatagttaacaataatatatggtttcacataactaaaagaatattgcatgatcctcacaaaaaaatgataaatgctagagatgatagatatgccagttatactctgataactatatgtactgagacatcaccatgtagccccatgaatatgtacacttattttgtcattttaaaaattaaattaatataaagaggtaaagacaagaattatagctgacttcttatctgaagcaattaaagccagatgataaaacatatcttcaaagccagctggggggacaactatcacccagaattctacatctagcaaaartacctgtttaaaatgaagatacaataaagactattcaaaatttttgtaatgggagaattccttaccagcagacctgtactttaagaaacattaaagaaagttcttctgacagaggaatgtgaaaccagaccggaaattttatctacagagagatgtgaagaactctgaaaatagtaaaaataaagattaa

SEQ ID NO: 568443 - DNA, 598 bp, Homo sapiens
gaacatattaaatcagagaaattcttaaagaatacaaaattacagctagatagaactagaataagttctagtgttccatattactgtagaattactatagttaacaataatatatggtttcacataactaaaagaatattgcatgatcctcacaaaaaaatgataaatgctagagatgatagatatgccagttatactctgataactatatgtactgagacatcaccatgtagccccatgaatatgtacacttattttgtcattttaaaaattaaattaatataaagaggtaaagacaagaattatagctgacttcttatctgaagcaattaaagccagatgataaaacatatcttcaaagccagctggggggacaactatcacccagaattctacatctagcaaaagtacctgtttaaaatgaagatacaataargactattcaaaatttttgtaatgggagaattccttaccagcagacctgtactttaagaaacattaaagaaagttcttctgacagaggaatgtgaaaccagaccggaaattttatctacagagagatgtgaagaactctgaaaatagtaaaaataaagattaa

SEQ ID NO: 568444 - DNA, 561 bp, Homo sapiens
agagcagattttaactacacagcaaacaaacttgacctaatgtaaacatacaaactaatacttctcaaatcggctgaacacatgtattcaagggtacatagaagagtatcagattattatatattagaccatatgtcatttcatctgattcaaaaaaactaaaacatacaggaaagtaagctagaaaatgataacaaaaatataactagacaagcctggtacttttgaaaattaaaaagcacacttctaagtaacagttgcccaaaaagaaatcataataaaaattatagatttgttgatcataatgagatagtaatgaaaataacacatgatctaatcttcaacaaagctgatacraggttaggagttcaagaccagcctggccaagatggttaaaccccgtctgtactaaaaatacaaaaattagccaggcgtggtagtgggtgcctgtaatcccagctactcgggagactgagacagagaattgcttgaacccaggaggcggaggttgcagtgcgccaagatcatgccactgcacgccagcctgggtgacagagtgag

SEQ ID NO: 568445 - DNA, 614 bp, Homo sapiens
tccctttatttctgatattattttatttttctcaaggaactttttccgatgstaagaatatccatataagttgatacactatgttgagtttcattattagctataagtagtatgtaaatattttagtattttaaaaaataactgggactgtttaattatctcaatagagatagttaataagatcctgtctttaagccatgtagtgaatcattaagaactgaggactttacagaaggttgtaatttaaacattcagcctctgccatgttttttctaaagatcatgagtttctaaacagccaactccatcctggaaactctgccaataacattcagtaataaacagatagcaagacacattttatttcatttttagtttttgaccttatctgtcattctcatcttggctacagattagcagtaacaacgtatcttctatacactctcacaatacgctaagaaaggctaaagaggcatttatgaaaactgtaagttaagtagacattagggtacaaacatgcccctaataaaatcacacacttacacggggttaaataatacacaggataatattatccatctaggcacatctctattattactatgctaatcatac

SEQ ID NO: 568446 - DNA, 557 bp, Homo sapiens
tatttgtgtgctggtattagttttcttaaggcctcttctgacataatggggggaaaatcacacagtacaactctacatcttttacgtcttctttccttttataattgaacaggcaagactaaggcaagaccttaccaaatatgataaatggtacaatttgagcagytgtagcattcctgttacagacaatgagcattaggccattcctcaccaagtggaagaaacactgcctttcactgagagagagacatagaaaggaaaggcatctgctgattactcatgaactatataaggtgatccaaagtagactctgggtttgttgctgtgcagacagcactcccaactctaggatggtcctctatcaacaagaacacagcagacttctctcaattaaacaaaatgttcttctttacattacaaaggtcagacatcgggacagaatggaaagcaagtatcaatccacttaaaatctcatgaaggaagaaaaaaatgttcaaatcacaaattttgtgatttaaatactgaatacctaaaacactgaaaagaaacctgaaaac

SEQ ID NO: 568447 - DNA, 557 bp, Homo sapiens
tatttgtgtgctggtattagttttcttaaggcctcttctgacataatggggggaaaatcacacagtacaactctacatcttttacgtcttctttccttttataattgaacaggcaagactaaggcaagaccttaccaaatatgataaatggtacaatttgagcagctgtagcattcctgttacagacaatgagcattaggccattcctcaccaagtggaagaaacastgcctttcactgagagagagacatagaaaggaaaggcatctgctgattactcatgaactatataaggtgatccaaagtagactctgggtttgttgctgtgcagacagcactcccaactctaggatggtcctctatcaacaagaacacagcagacttctctcaattaaacaaaatgttcttctttacattacaaaggtcagacatcgggacagaatggaaagcaagtatcaatccacttaaaatctcatgaaggaagaaaaaaatgttcaaatcacaaattttgtgatttaaatactgaatacctaaaacactgaaaagaaacctgaaaac

SEQ ID NO: 568448 - DNA, 388 bp, Homo sapiens
agaggaagcatgaagggcttgaggggaaggagcaggactgccagcatgagggcccttttgaggttgagasccatgtccttagaccaggacctcagcttagttgcgtgggtttcaccagctgcattcaggtactaagataggcaaggagtgggtatagtgttgtttttagagggggctgggattttaaggtagcagacactattagcttctttattctggtgctgtaatagcttgtttccacatgttgtccttattagagtgagtgatttccaagtgtgtctttttcatttttgtatctcctgcctgtaagtcttcaacacagaagaggcaattaatgaatattcaaaatactattttccttataaaaacaaattcagtaattcctttg

SEQ ID NO: 568449 - DNA, 573 bp, Homo sapiens
tatatagactgatcttcaattagaaagaaattaaaatttaacaaaaagtaaacaactatatatttggaataaaacacactgctaaataacgtagaggttaaagaagaagtcataattgaaattttaaraaatttcagaactcagtgataatgaaacaagagatagcaaactctgtgggacagatggcttaatacgttagaaaatgaaccaaaaaataaacccaaagagagggataataaaaatgagatgaaattaatgacttggaaataataacacagtaggaaaaaatgatcaaagccataaattagttctttgaaaaagcacaaaagttggccgggtgcagtggctcacgcctgtaatcccagcacttcgggaggccgaggcgggtggatcatgaagtcaggagatcaagaccatcctggctaacatggtgaaaccccatctctactaaaaatacaaaaaattagccgggcgtggtggcgggcgcctgtaggcaggagaagctgaggcaggagaatggcatgaggcaggagaatggcatgaacccgggaggcggagcttgcagagagccga

SEQ ID NO: 568450 - DNA, 573 bp, Homo sapiens
tatatagactgatcttcaattagaaagaaattaaaatttaacaaaaagtaaacaactatatatttggaataaaacacactgctaaataacgtagaggttaaagaagaagtcataattgaaattttaagaaatttcagaactcagtgataatgaaacaagagatagcaaactctgtgggacagatggcttaatacgttagaaaatgaaccaaaaaataaacccaaagagagggataataaaaatgagatgaaattaatgacttggaaataataacacagtaggaaaaaatgatcaaagccataaattagttctttgaaaaagcacaraagttggccgggtgcagtggctcacgcctgtaatcccagcacttcgggaggccgaggcgggtggatcatgaagtcaggagatcaagaccatcctggctaacatggtgaaaccccatctctactaaaaatacaaaaaattagccgggcgtggtggcgggcgcctgtaggcaggagaagctgaggcaggagaatggcatgaggcaggagaatggcatgaacccgggaggcggagcttgcagagagccga

SEQ ID NO: 568451 - DNA, 560 bp, Homo sapiens
tctcactctgttggccaggctagagtgcactggtacaatcatggttcactgtagccacaaactcccaggctcaagtgatcctcccacgtcagcctctggggtatctgggaccacaggcacgtgctaccatgtcaggctagttttttattttttgtggagacagagtctcactatgttgcccatgctggtcttgaactcctgggctcaagtgatcctcccacytcagcctcccaaagtgctaggattacaaacatgagccaccatgcctggcctaaaaatttaatttttaaaatgtaacatatatgctatattttcttttcctttctttagtatgttttatttttcctaataaatgatctcaaagtatagaatgaatccctcccccttgcggtccactggagtgatctctgaacttttaaaattatgcactcataaaacttgcttttcagtggccactcccctcaaatatataactgattaaatatataactatattatgtacatcattaaacagataaaagtagaaagataaagtattaaataaaatgaaaaagaaagtc

SEQ ID NO: 568452 - DNA, 454 bp, Homo sapiens
atgttcagttgtatttggacctagataaagaactttgaccagagtattggaagatggagtctttttctgtcataggctatcaaagcctaatgtctgtttctgttcagctgactctggtcagtagctgcaaaattgatcatgrcatctacagcacattcatcagcctcacttcaagacagacttcctctgtctgaaggccaaggtaacaataaggggaaaagttttgtcagtatgacttccccttcaactttgctttccctgccattctttgggagtgaacctaggtccctacagagtttttccagattctgcaatggtttggccatgttgactagatctagttactccagtgaaggaaattttggatagacctcttagccctgtgacatttggagaaatatgagaatgtatatgttggcccttggcattttagcctacattttgttgaatttgg

SEQ ID NO: 568453 - DNA, 640 bp, Homo sapiens
gcctactttttacaaatcttatttttaaattttattttactataccttttgtctaaggcaggtgtccaatcttttggcttccctgggccacattggaagaggaagaattgttttgggccacacataaaatacactaagactaatgatagctgataagtaaaagaaaattgcaaaaaaatctcataatgttttaagaaagtttacaaacttgtgttgggccgcttcaaagctgtcctatgttgtgggttggataggctgttttcacaattaaaggaggtaagacataatacgttaacctttccctatccttttacaagtaagtccagttaacttatcacaggaaaacttctgttaattactatgcaaagaaaaaaaacaattatggggtagtttctaaagaggagtaaatttaattgaaagagtgtgttagggctatcaatagcatgaactattgctcatraaatccacctcaaaggttgtaaatcataataatataaaccttatttatttctaaaaggataatgataccagtttactaaaacttttcctgcaatagatgatatgaaggaggtagtcaattgactaagtggacactacgtcacaagtcaacaaatggtacctctaaaatttaaatattctt

SEQ ID NO: 568454 - DNA, 615 bp, Homo sapiens
aagttcaatagctcggtccttatttaccatctctagagagtcctatctttttcatctctacctgttcttttcttcagcttctaggttcctaggtgaataattcagactttacttatttatttataccaggtgatcggaggtatcttacacataaatatagatgcagtaagatggaaaaactttggttaaaaaaaaaagaataaaagatgaaaatccaagtaatcaaaatggaagaaggagaagaaaaataaaattcagaaaaccaaggctattaagagtkatgacaattaaatctattatgtgcgtcccagtttcttaacagctaaaaactgaagaaacttggtgggtcataaagttctcatttttgattagcaagatacagatgagtttataaattaaaatcaggctgtatcttgggctgggctctgaagaaaaataaaattcccagtaggtcttcatataagggagtttaaataaaaataaaggatatttgtaatagttttactcatccccctcaaaacaaaatactcctttattccatatatgactattttttatactgaaactcagtaaaatttgtggaaatacatttcaatcttgttcagtaaagataac

SEQ ID NO: 568455 - DNA, 613 bp, Homo sapiens
aatgggtttttgccatgttggcaggctggtctcaaactcctggcctcaagtgatccaccatcccaaggtgctgggattaaaggcgtgcagccgttgtcctggttgtactgatttatatttctgctggtagcatataagtatttcaaatwaatgaatagcctttcctattcttgttaattgatttatccattttaaggaatatagcattatacctaattgtaggtttaattgatattttcctgattactaaagagtttgagaaattttaaagttcttactattaattaatttgtatattcctttatttttagtactgtttatgtctaatttaagaaaaagcaatgctaacctaagatcatgaaattctttccctgtattatcttctgaaaactttatcatttttcatttcaaaattagatcttcaatccactgttatttaattatttgcatgctgtgggtgggggtgatttcatttcttttcagaaaggtatactattgacaccacactttcatgaaggccagccctttccacacttctctgttcagcttcctcttttggaaggttaagtgttcacctatgtgtatttctgtttttggactctgtctcattgtt

SEQ ID NO: 568456 - DNA, 613 bp, Homo sapiens
aatgggtttttgccatgttggcaggctggtctcaaactcctggcctcaagtgatccaccatcccaaggtgctgggattaaaggcgtgcagccgttgtcctggttgtactgatttatatttctgctggtagcatataagtatttcaaataaatgaatagcctttcctattcttgttaattgatttatccattttaaggaatatagcattatacctaattgtaggtttaattgatattttcctgattactaaagagtttgagaaattttaaagttcttactattaattaatttgtatattcctttatttttagtacwgtttatgtctaatttaagaaaaagcaatgctaacctaagatcatgaaattctttccctgtattatcttctgaaaactttatcatttttcatttcaaaattagatcttcaatccactgttatttaattatttgcatgctgtgggtgggggtgatttcatttcttttcagaaaggtatactattgacaccacactttcatgaaggccagccctttccacacttctctgttcagcttcctcttttggaaggttaagtgttcacctatgtgtatttctgtttttggactctgtctcattgtt

SEQ ID NO: 568457 - DNA, 617 bp, Homo sapiens
cactggaacaactagttccaatagtctgaattaataggttggtatatgtaataatagcacatctgaacattcttttattttttattttttattttttttcagacggagctcactctgttgaccaggctggagtgcagtggcgagatctcagttcactgcaagctccacctcccaggttcacaccattctcctgcctcagcctcccgagtagttgggactacaggcacctgccaccacacccggctaagtttttttggtatttttagtagagacggggtttcaccttgttagccaggatggtcattcttattatccctggtagttcaaatgttaagcatctcaggatttagttattaaatatttactgatgtttcacctacagaaaacactactgatgcctagagcttgttttgtatttcaattatagatgatccacagtgatttacattagtcaaaattgatacrtaaatattatcattttcttccccaaacatgtcctatattaaatttatattatagaatcaagttgttaaaatccagtccaatataataaaataattctgaattgcactcataaattcaaagcactttatgaacatcatggccaatacatgtat

SEQ ID NO: 568458 - DNA, 593 bp, Homo sapiens
accaatttgcagcaaaatcacaaacttctctcaacctctattcattattggtaaaatatccacaaccactctccatcaggaatgataaaagataacacaatctcttggaggcaaaattgcttacaccaaaaacagtgtgataccrtggaaaagtcaaaatcatttgtctcatggttatctatgtttgactcttcactctgctatttactattcatgctattgcttaatcattctgagccttagctttctcatgtttaccatctgtatttctctactttttttcaggatttttttttaaattttaaggtgatatataatacatatacatatctggagggtacatgtgatattttgatacattcatatgaattgtaaatatcaaagcagagtgactggaaatatccatcaccttaaatatttatattttctttatgctaggaatatttgaattattctcttccagctattttgaaaggtgcagtagattattgttaactgtagtcaccctactgatctatcagacactcggtcttatttcctctatctatctgtgtattggtgctcattaatcaacctctctttatcccataccc

SEQ ID NO: 568459 - DNA, 497 bp, Homo sapiens
catggggtttcaccattttggccaggctggtctcgaactcttggcctcaagtgatccacctgcctcagcctcacaaagtgctgggattacaggcgtgacccaccacgcccgaccatgaagatttttttcaccattagtttgatcatataactcaagaaagagggcaataaacagcaaaaaatgtaagcctgtataactttatctgccaaaaaattactattaacagygttggcgtatatactttcagatgtgttcctgttcatatgttcctagagaaagaaaaatagatggttaaagatttagagggttaaaataggattatttggcaaacaaagataaaatttaatcatattacgtgtggtctgaagatcaaatacaacactcagtgtgaaagtgactggtgcacagggagcatttgctatctgctataaaattgtctgttatggtatcctccatcttgaatttctattctttcactgtcattttgtgtttattat

SEQ ID NO: 568460 - DNA, 578 bp, Homo sapiens
agtgctcctttggatggctagacctccattcaagtcacttctgatgttggacactgtagttgttttgtgtgtgtgtatgtgtgtgtgtgcataaattaacaatatatgttttaaaaatagtctagctttcaagcaaaattgtgaagaaagtgcagagaattcccatatactcctttcccagcaatacattacctttccctttgaagttccatacagttgtgatatgtttcttacactcaatgaaccagcaataccatatcattatcaaccaaagtttctagtacacattagagttcaatcttggtcttgtatattctatgcattttgacaaatttataatgatatgtaaccacctttacaatatcatacagaatacttgtactgtcttaaaaaaaatagctccacctaattatcccttcttccccccaaacccttggcaacagatgacttgttaatatctccatagttttgccttttytagaatgccatatagttggaatcatacagtatgtacattttttagattggcttctttcacttattgttatgtacttgtttgttttatgtcttttcatagt

SEQ ID NO: 568461 - DNA, 634 bp, Homo sapiens
tcctttaaccaattgtgaattaagaaatctgtgaactcacctatatataacctccatgtatggatttatgactttgtctgtgacttctgcttcccttccctagawtgtataaaacagaattgcagtctgaccacttcaagaccactactctaggctttttgggtttgttttctccctggaccatggtcactcatattggctcagaataaacttctttgaaatactttacagagtttggttttcttttagtttttgtctctccaaatacttaatttatctcaacaatgctttgtgtttttcagtctacaaaccatacaaatattttaaatatattactaagtattccatagacttttatagtaatataaacaatatttttgaattttaaatttcaatttcttatcattcaccaatagcatataaaagtaaatcgattttgtatattgatcctctatcctatgatcgtgcatatctcagtttctagttctagagtttttgttttgtaaattttagttttcagaatttttgcgtatacaattgtgtcatctgaaaataaaggcaatataattctttctccttataatcttatgcatttttcttcttgccttttgcactggccagaatctccaaaaca

SEQ ID NO: 568462 - DNA, 459 bp, Homo sapiens
catctacaattagttcatctttgataaagctaacaaaattatgtaatggggaaaggacttcttattcaataaatggtgctgggataattggctagtcacatgcagaaaattgaaacttggccctctttttacatcatatacaaaaatcaactcaagatggattaaccacttaaatatgacatcccaaactataaaaacacctagaagataacctaggaaatataattctggacatagaaactggcaaagattttatgataaggacaccaaaagtaattgcaacaaaagcaaaaattgacaaatagsatctaattaaagagcttctgcacagcaaaataaacttttatatcaacagagtaaacagacaacacacagaatgggagacaacatttgtgaactatgcatctgacaaaggtctaatatccagcatctataaggaacttacacaaatttacaagc

SEQ ID NO: 568463 - DNA, 658 bp, Homo sapiens
agttcaagaccagcctggccaacaagctaaaccccgtctctactaaaaatacaaaaattatccgggcatggtggcacatgcctgtaatgccagctactagggaggctgaggcaggagaatggcgtgaacctgtgaggcagaggttgcagtgaaccaagattgcgccactgcactccagcctgggcaacagagcgagactgtctcaaaaaaacaaaccaaaaaacccacaaaaaaaccagtgccagggcccactccaaaggttttaatccccttgytcttgagtgggggcctaggcatcatcattttccaaacctttctggttgattttaatgtgcaggcagggttgagactgaggcctaaaactctgtccttttatccagttttattttcctttattgtactgttacctgaaacattatgtataaatttatttaaaaattatatataatatacaaatataatctatattttatatagattaaatatacatatttaatttggatatttatataatttacacgaatatacatttatctaccagaaattaatacacatgcataatgaatgaatttatatttatatacacacataaagtaataaatatttaacacatttgtataatttgtttgtatatataattgcatataattattattaa

SEQ ID NO: 568464 - DNA, 583 bp, Homo sapiens
ctagtaggtatacacaataatctgtaaaaatataacaataaggaatatttattaaacacttgtctatatgcyagttattgtatttagttctttactaaacatctatcccagccctattttgaaaacagggaactgagtcagagaagttaattgcctaaggccataaagaagctggaaagtagggctgccaggctgcagattcaaagttagtgtctagactgagctcccaactacaaagctataattatcaattgcatagtttctatatgccaataaatttcacataaatttaccagggaaaatataattaagtaagaattaaacaaagtccgttagttttgagaaccacaaatggtgaaaacaacttaaaaaaatttttttgacaaccgcattctatttcttaccataccaaaactggcagagggagaatttctcaaatatgtttttaaatttatttctttgtcaaatttaaccccaaattattttgctgtctgtgaaggttgtaaataatgtatcagtctatgaaagtgacttagaaactagaatctggtcaaatatatttaatttgaacaaaatgaataat

SEQ ID NO: 568465 - DNA, 541 bp, Homo sapiens
tgttttctaaaaaatcttattgtgtgtatttccagtttaaaacattatgttatgggattcatacagctaatcaatggttactacagtaaagcagattarcatattcaacatctcacatagttgctttttgagggaacaagagcaactaaaatctatttatttaacaatattccctaatacaagataatttcattaagtttagtcctcatgtacaccacgaggactagcattgccagtgctagagttgtatgagcattttctgggggaaaaatcacttttggcattattacttaaataagaatacaaccacttctatctggaaaacctcattaaaatccagtcaattttataaaatttaataaactcctatttttatggttctgaatgactcatacaataattacgttccacacatggtcatttcagtaatataacttcacaggctgtctgtgcaaattttggtttgtttcctaatgggatatttcacagttcctcaaaaccataattgagaaaaacaaggtaaagtatctgatacaaatca

SEQ ID NO: 568466 - DNA, 541 bp, Homo sapiens
tgttttctaaaaaatcttattgtgtgtatttccagtttaaaacattatgttatgggattcatacagctaatcaatggttactacagtaaagcagattaacatattcaacatctcacatagttgctttttgagggaacaagagcaactaaaatctatttatttaacaatattccctaatacaagataatttcattaagtttagwcctcatgtacaccacgaggactagcattgccagtgctagagttgtatgagcattttctgggggaaaaatcacttttggcattattacttaaataagaatacaaccacttctatctggaaaacctcattaaaatccagtcaattttataaaatttaataaactcctatttttatggttctgaatgactcatacaataattacgttccacacatggtcatttcagtaatataacttcacaggctgtctgtgcaaattttggtttgtttcctaatgggatatttcacagttcctcaaaaccataattgagaaaaacaaggtaaagtatctgatacaaatca

SEQ ID NO: 568467 - DNA, 540 bp, Homo sapiens
ctacttagctctaaaaaccacttggaagggctttccttggtttgtggagggaagaatcagggaggggtcaataggtcagaagtctggttattagaagacaagacagtgtgccaaatttgttcaaccacaaatggttcctggctgttgagccatctgtagtccctgttatttgccaatgtgcagttttggctaaggtgcaagaacatgcataacaaaagaattatcagacaaatttaactaagataaaaaataaaatgcagttttgtatgttaatttgcttgctatattttaccttcttcgtgtgtctcctcttgaaatactaaaatgcatgtgaataagtcagatgtttctaatttgttctcaacctacatttggtcatgtagtagacacgctccatgagtcagcaccaggcttcagggataagagatatttttagttcaccttcaagccagtagaatgtagtcccataaaaagcaagttcatttggcaaaaaaaaaaaaaaaaaaaawatatatatatatatatatacacacacatatt

SEQ ID NO: 568468 - DNA, 468 bp, Homo sapiens
gacagtgagatttccttccctgttgggttctaacttacatcaatgtcttaggctaccttagcagcagcaggacaaaaatttggtacttttggcctccatttaagtgttttaggcagacagcaaaataaggtagctatttttaaaaaatcattcctggaacacgcaaaaaagaaattgtcacttctcaaaagtctgaaaggaagtctgctaacactgagtttttgagagagaaagaaacaaaatcaatgaggagaaataattctcagatttctgttgaatgaaatgttctgattaacactaaaaatgtaattcactatacagtaacattttaggctgaagagtgatttcactagagaggtttctaaagcatggagtgaggaaagcaatcactttttwaaaaaaattctctaaatatgagaagaaattttaatctggaagtttattatatctctctagaatttcacagcg

SEQ ID NO: 568469 - DNA, 539 bp, Homo sapiens
acaatatgttctctttgtgtttccacaatcttttgattaccataatgtttctgagattcatatgttgttgtatttattagtaattctattcttttaatgctgagttgctttccattgcatagatgtgccacaatttgtccactcatcagttgataggtgtatgacttgtttctaatgtttatgctattgtaaacaaagtgcctgtggacgcttacctacaaatctttgtgtgaatgtattttcacttctcttgggtaaatacttaagggtagattggctgtattataaggtaagtgcattttaaactttataagagactgcagaattgttttccaaactagattagtaccattctatttccaccagaaataaatgaaagttgccattggtccccattctcaccaacatttgattttatccaactttttaattgcaaccattcaaagtgatgtagttttaatttgcatttcttaagacagcggatgaggatcttatcacgtatgwgttggctcttcgtatatcttcttttgtaaattgcc

SEQ ID NO: 568470 - DNA, 609 bp, Homo sapiens
agttagggcccaccctaatggtctcattacttaattacataactctttacaggttctatctccaaatatagtcacattctgaggtgctgggatttaggactttaayatgtgaattcagtccacaacacatctatgtatttagaatcttactgtaatatgtaaaaacatattccattgtgtactgatattcttttattaaatatttatctagtgtgttcacaattatgagataactattttcatggcttaagcctttaaaattaatccattgtattttggagtatttccttaggatttatttctaaagtggaattactggattaaagagtaagaatatatttcagtctcttcattcatattgccaaatttctccccagaaatgctgcactaatttctacttttaccagttgtatgtgaaagtatccatttcactgtacttccacaaatattagatttttttgaaaaaataattattaagtcagcaggcaaaaacaatgtattatgattgtaaatttttttttgagacagagtctcgttctgtcacccaggctgcagtacagtggtgcgatctcagctcactgcagccttcacctcctgggttcaaacgat

SEQ ID NO: 568471 - DNA, 609 bp, Homo sapiens
agttagggcccaccctaatggtctcattacttaattacataactctttacaggttctatctccaaatatagtcacattctgaggtgctgggatttaggactttaatatgtgaattcagtccacaacacatctatgtatttagaatcttactgtaatatgtaaaaacatattccattgtgtactgatattcttttattaaatatttatctagtgtgttcacaattatgagataactattttcatggcttaagcctttaaaattaatccattgtattttggagtatttccttaggatttatttctaaagtggaattactggattaaagagtaagaatatatttcagtctcttcattcatattgccaaatttctccccagaaatgctgcactaatttctacttttaccagttgtatgtgaaagtatccayttcactgtacttccacaaatattagatttttttgaaaaaataattattaagtcagcaggcaaaaacaatgtattatgattgtaaatttttttttgagacagagtctcgttctgtcacccaggctgcagtacagtggtgcgatctcagctcactgcagccttcacctcctgggttcaaacgat

SEQ ID NO: 568472 - DNA, 371 bp, Homo sapiens
tacatatgtacatatgaatatgtgcatrtaataaatattttaaaaataaatgattctgaggtagttgcctagggctgggagaaggacagaatggggagttattgtttaatgggtacggagttttaattttacaagaagaaaagttatggagattgagggtggtgatggtgggacaacattgtggatgtatttaatgacttatctgtacacttaaaaatggttaagatgggaaattttatattatgtgtattttgctgtaaaatgaaaaaaatggctttaaaaaaatggctttgagtgaattgaatatccttatggaaaaaattgatgttgatcccttcctaccttatgatcttgacaataaataaaagtta

SEQ ID NO: 568473 - DNA, 622 bp, Homo sapiens
gccccaagggtgacagcagtaatgacrtgaatctcacttttgattttgatgaacgttcttctttgccctaagcctggttcttttttttaatactcaatgattatatgaccaaccaactgtttaaaataatttctttaaaaataaaatttatagttgtaagcctccagagacctacatgtttataccagcctatagatattatatgatttccatttctgttttgtcgattacgctttaatgctgttgatattatcatgttgtctttctccagtagactttatgctagaccactttcaagatagaaaataatatagaaatgttcaataataaataacctttatattccaggaaaagaagaaagatgtaatagctaaaataaatagcaaagagccaaaagttattgaagaataatgtagtaaaacaaaactcatgctcaaatatgcctttaagccttatctctgtctcctagtttctgtgtgaatcaagtaattaactgaatgtatctgagctgcaatttccttaggtgctaaaatggactaaataaaaacatatgtgtgttagagagagggagtgggaagtaagtagaataatacttgtgatatccaaatgtaagttattgctc

SEQ ID NO: 568474 - DNA, 701 bp, Homo sapiens
agagtgcacaatagattaatccaaagagaatagcagttaacatccttagctgaaagggactttaccgagagggactttactgagaggggctttaacccactaaatcttctaagggactgtaaccttcctaagttttyttgggcctcaaactcaaggtcagttaagtgtccttgccttttattaagagggccctctaacccactctgtcttaggagagactctaactctcctaaattgggcttcttacccaatcctatcctttacctgggtaccccaccacttacccaaagctggctgatcagtctatttcctttgggtcaggaggtttcttcagtatcatcccttcagagttagccagaaagatgttactggaccccacaacttacccaaagttagcctttgggctggggatttccacattatagtctcttctgcagtctcccgaaagatgttacaggaaaggggtcccaatccagaccacaacagagggttcttggatcacacacaaggaataattcagggcaagttcgtaaactgaaaccaagtttatttgaaaagtaaaggaataagagaatggctacttcatagacagagcaaccctgagggctgctgtttgccctttttaatggttatttcttgattatgtgttaaacaagtggtggattattcatgcctcccctttttagaccatatagggtaac

SEQ ID NO: 568475 - DNA, 573 bp, Homo sapiens
gttgttttttattatttatttataatatagtaaatattttaaatttaggaaagttttttaaaaattctttcaatgtaagctttatgtaaatttatatagcacaatctacttctttttcactattgcattaaatacagagttttatatctagtattatttaaattcactgaatggtatttgtcatagataaatatttcaaacactgaaaagaaaacaktattttattaatgatttttaaattttataaagcaaatatattctgcaataactttgatgaatacatttgacaaccattgacacaagtcttttgagaatcctttagaggaaaatatatattagcaaattattttaggataaaatggttataaaatattttgctttctgaaatcataaatctgtagtcttaatatatattccttctcaagttttggattttctttttgctgcattgctaattggagatttgcagaacaatatttttcatgaagagcatacattctctactctgacaattgttgcattcttcaaatctaggtgaaaaaacctaaaatgaagatgtttctgtcttttgta

SEQ ID NO: 568476 - DNA, 509 bp, Homo sapiens
tctataatctcatatccagcaaaattattctttctggtaagagaaggaaattaagacatgctcagataaaggaaaactaagagaatctgttgccagcagtcttactctagaagaatggcttactggagttctctaaatagagaaagccaaaagaaaaggaacttgagaacattgaggagaaaggaagaacaygctaatcaaaaccatgagtaaatataacacacttttcttctctagagttttctaaattagtctgatgctgaagcaaaaattataacacttaacactgtctgatgtatttctaaatatatacagaagaaacatttaagataattataagtagtgaagggtaaagagatgtaaaaggaggtgaggtttctatattttactcaaactggtaaaaaaatatcagtagactgggataagttctgtatgcataactaaattaaaaagctatacaaaaacacatactcaaaaatactatggataagtaaaaatgaaattgtaaa

SEQ ID NO: 568477 - DNA, 520 bp, Homo sapiens
tctgtgttgtcaaacataaaatgttctcatacttttcttcacccatatccttatcttcagcttggtattataattaaatatatttaaggtttacatcagccttttgctataacctccccagttttcttttgattgattaacttcatcctccagtagattcttycagaagcacaggtgtatgcattatttcctgagttaattcatattccaaactatattctgaagccttatatatctaaaactcatttaaatacaaattccttagtttatactttttttctcaagcctcttgaaattgctacttctcttttgccttgacttctatgttatcttgaggaaagtaatatcacttgttatctcaagcaagaaattcacttaaattacaaattctatgacataaatggaaacaatccaggaatcacttatttagagtaattgcccctacataaagatcagtgttggtcaggcgtggtggctcacgcctgtaatcccagccctttgggaggccgaggaaggcaga

SEQ ID NO: 568478 - DNA, 614 bp, Homo sapiens
gttgtctgcaatttactttaaaatatttargcataggcaatgttattttagtactaaactgggtaatttaaaataagccataattccacttagttgttttctctaggaattcaaatttgaggtggaattagccgcttagaaaggctaagttccaaaggtgactacgacaagcatatcatttctctttatctctgattaacatcagatggtttggcttaaattagaattatttgttttgcaataacatgtttgtgtaatacaaatagtttatactattatcaaatagggaatgatgtcactttaatgtagaaattatattaattcagatatgaagtttcccaacttgttcattatgcaccaccaaaccacagcaggtggacatcaaatacactaagacagctacatagagcaaactggaaaaatacaatgctgtatgtgatgcttggtcaacctaaattgttcctcttggctctgctgggcctcatggtctctcttggaaatttttattataaattgtataaataaattgtttttattataaattatatctgctctttttgcatcttgctctcatctaacataactcagcagcctcaacccttctttatgcattt

SEQ ID NO: 568479 - DNA, 610 bp, Homo sapiens
aagaggatcattttcaaaatatttagaattacaggtatttttaatgtagtgcatctcagaatagggtgaacatttccagcttcagtgtatctggcttagttagcatgctcctcttgtaggataccattcagtgtttatttaatcactccttgatggacacgtaggtggctgccaactctccctattagtcatcctgcacataaacatctttgtgcttgttttgtgcatgtgtaggtttttatgtgatgcatctgtcaacttcccaaagaaactactggagaaaaaccctacattaaagttcagactcattgcagtaaaggagaacccctgatagtttgaggtatctcacaatggggaatagggcagggtatttgtgaggtctaaggcttgggctaatttttagggtgggccttgactaggattgggcaagccttctgacatggctctggcccagtaaggaggggagttgrgggaaatcttgatgaacaagttgttagtcttgattagtcatctagcttcatcttttaggggcaggtaaatacctaagccaaggaaaaaacatttgagctgcttgtttcaagatatatcagggacagacagtgatgttaat

SEQ ID NO: 568480 - DNA, 448 bp, Homo sapiens
agctgtggccatcccaaaaaactcagaacttccagatactacagccattctgaggggctgagaacagggaggctccccaggaagagctggtctggcatcctgtttagttcctattgcccctcctctgcaaatcccaaggagatgctaagtctcttttgaagcttccctcaaggaaggcagcaggttttgtaacacacataaccagtgtgtccatcagtgcccaagtctgagtgccttagcagcacagtggaggacaccatccctgctctcaaaaagttcatggtttctttttttttttttttttttttctaattttatttttgaraaaggccagggcagggggagtctctatgtggcccaagctggtcttgaactcctggcctcaagctatccttccgcctcagcctcccgaagtgctgcggattatatggtgtgagccactgcaccc

SEQ ID NO: 568481 - DNA, 572 bp, Homo sapiens
aatatttgaaaaatgtatatacttaaggatttgtactagactatgtatatataagtgtgtacaaattcatataacattatctgtatatacacattcagtcataagataaatagcctcataaaaattatctgttgaacagatacttcaacaaaaatttatgttgacataagagcatattaaaaccacattctggaccataaaacacatcttaacaaatttaaaaatggaaattatacaatgtttgctctcagaacacaatgaaattaaactagaaataagtaacagtaagatagctggaaattttctaaatatttgtaaattaaacaacacatttctaaataacatgtttttaagtgaaaatgaaaacacaactcgtcaaaatttgtgggatgcagcagaagcagtgcttagaggaaaatttgtggcatwgaattcatatattaggaaagaataaacatctaaattcaattatctaagtatttggaaaactagaaaaagaaaacaaatcaaagtaaacaggagtaaagaaatgatctaaattatagcatgaattaataaaattaaaaacagaa

SEQ ID NO: 568482 - DNA, 572 bp, Homo sapiens
aatatttgaaaaatgtatatacttaaggatttgtactagactatgtatatataagtgtgtacaaattcatataacattatctgtatatacacattcagtcataagataaatagcctcataaaaattatctgttgaacagatacttcaacaaaaatttatgttgacataagagcatattaaaaccacattctggaccataaaacacatcttaacaaatttaaaaatggaaattatacaatgtttgctctcagaacacaatgaaattaaactagaaataagtaacagtaagatagctggaaattttctaaatatttgtaaattaaacaacacatttctaaataacatgtttttaagtgaaaatgaaaacacaactcgtcaaaatttgtgggatgcagcagaagcagtgcttagaggaaaatttgtggcattgaattcatatattasgaaagaataaacatctaaattcaattatctaagtatttggaaaactagaaaaagaaaacaaatcaaagtaaacaggagtaaagaaatgatctaaattatagcatgaattaataaaattaaaaacagaa

SEQ ID NO: 568483 - DNA, 512 bp, Homo sapiens
tacaattaaattctctatttttaaaatgaaccttcacattcagcttctaagataactttaagaataattaatttcaatatgttaataccaagctgaattatataatattctgcatctttataaaatagcatgggagcagcctttctttgtggtaagtttagacttctgyatggctgttaaaagtagaaaagacgaaaataaaagaaaaatgacagggtgtttattttcttatctcaagctcataaaaattttagttttgactgattattccactcatgtgtgtcattaaatgatttgccttttgtaaaaaacaaatgggtaaagcaaattttactatgaatgaatcacacaaaacttgaaaagctcctggaggaaaatttgttttttgtttttttttttggctcctttagaagggaataattattcgagaaattattcatagttttgtgcctgttgaaataacttgtaaagaatttctgtttttatccatttttatgggaataagtatgcaa

SEQ ID NO: 568484 - DNA, 512 bp, Homo sapiens
tacaattaaattctctatttttaaaatgaaccttcacattcagcttctaagataactttaagaataattaatttcaatatgttaataccaagctgaattatataatattctgcatctttataaaatagcatgggagcagcctttctttgtggtaagtttagacttctgtatggctgttaaaagtagaaaagacgaaaataaaagaaaaatgacagggtgtttattttcttatctcaagctcataaaaattttagttttgactgattattccactcatgtrtgtcattaaatgatttgccttttgtaaaaaacaaatgggtaaagcaaattttactatgaatgaatcacacaaaacttgaaaagctcctggaggaaaatttgttttttgtttttttttttggctcctttagaagggaataattattcgagaaattattcatagttttgtgcctgttgaaataacttgtaaagaatttctgtttttatccatttttatgggaataagtatgcaa

SEQ ID NO: 568485 - DNA, 422 bp, Homo sapiens
cacttgttaaaggcccccgtttttcaatgctgccacatttcaacaagaattttggagggaataaacatgcaaactacaacagcataatactaagtaaaagaagtccatctaaaaaggctacgtaagcatatgaatatatgctagatatcataggtcatcagagaaaggaagattagaactgcaatgagatatcactacatacctattcaaatgttcaaaatctagaacattgacaacaccaaatgatggcaaggatgtcaaacaacaaagactcattcattgatgatggaatgcaaatttctacagccactttgaaagacaatttagcagtttcgtataagaataaacaygcttttagcatataatgcagtgtttatgctccttgctatatcaacaggaggaaaacatgtccacagaaaacc

SEQ ID NO: 568486 - DNA, 310 bp, Homo sapiens
gggagctgaattctacgacccagtaacagaattcttagctgacttactcctgtagatttcttctgttatataataagaacagaaaaaartgtttatggaattgagcaatcaagatgtgagaactagctggagttttttgaatagctttctccatgtcactcatccccagtgtaggacagtaagcatgcagctcccagactgagctgagctgagatggtcccgctgggccatctaggcacccactcttcccagctcatgacaactcatatagttgcctgggccacagcaagagaaatatgacagaggcagc

SEQ ID NO: 568487 - DNA, 633 bp, Homo sapiens
agttgcttaaaatttgttccgtaggacacaarttaatttacattttttaaatagttattgtacataggaagcatagtttgatttactgttttaagaacaagaacatattttgaccaaatgtacatggggatgatataactggttataaaattaccaggagagagagtgttggttaaacaagaatagagcctgctttattgatgttaggtttgtcgaataagctagagaacaaagtagatatattaactgctcaaacaaagaaaaagagcttggggtcaagacacaaagaaaaagagcttggggtcaagaggcaaagaaagacaatatgggcatcttactttgaatataacgaagaataaaaggtatcactgaacaggtaatttccaatgagaaaatagatctagaaatcactgtgtaggaaaaacaacttctcacctgtatcaaatattctaaagccctttcattattaactcctaagtagttacacttgatttggatgaagtagcatgaaggcttctgctaggcttttttattcatttctcgatacagtgtgtggtgaggctttagctttacagcctccacatttggctatattttgggataatggaaaataaaatttaatacaaaagaact

SEQ ID NO: 568488 - DNA, 502 bp, Homo sapiens
ccagccatgtggaattgtgagtcaattaaacctctttcctttataaattacactgtctcagttatgtctttattaggaccatgaaaacagacttatacaatcatgtacaaaaactaactcaagctgcattaaagatttaaaagtaagacttcaaactgcaaaaatcctagaaagaaacctagtcattggctttgacaaagaatttttggcaaagccttcaaaagaatttgcaacaaaaacaaaaatagacaagtggmacctaactaagctaaagagcttctgcacagaaaaagaaactatcaataaagtgaacagtttacagaatgagagaaaatatttgcaaactatgcatctgagaaaggtctaatatccagaaactatgagaaacttaaacaaacgaataagcaaaaaacaaataaccccattaaaaatgacaggaacagacaattttcaaaagaaaacatgcaagtgacaaacaaacatataaaaaatactcatgatc

SEQ ID NO: 568489 - DNA, 502 bp, Homo sapiens
ccagccatgtggaattgtgagtcaattaaacctctttcctttataaattacactgtctcagttatgtctttattaggaccatgaaaacagacttatacaatcatgtacaaaaactaactcaagctgcattaaagatttaaaagtaagacttcaaactgcaaaaatcctagaaagaaacctagtcattggctttgacaaagaatttttggcaaagccttcaaaagaatttgcaacaaaaacaaaaatagacaagtggaacctaactaagctaaagagcttctgcacagaaaaagaaactatcaataaagtgaacagtttacagaatgagagaaaatatttgcaaactatgcatctgagaaaggtctaatatccagaaactatgagaaacttaaacaaaygaataagcaaaaaacaaataaccccattaaaaatgacaggaacagacaattttcaaaagaaaacatgcaagtgacaaacaaacatataaaaaatactcatgatc

SEQ ID NO: 568490 - DNA, 502 bp, Homo sapiens
ccagccatgtggaattgtgagtcaattaaacctctttcctttataaattacactgtctcagttatgtctttattaggaccatgaaaacagacttatacaatcatgtacaaaaactaactcaagctgcattaaagatttaaaagtaagacttcaaactgcaaaaatcctagaaagaaacctagtcattggctttgacaaagaatttttggcaaagccttcaaaagaatttgcaacaaaaacaaaaatagacaagtggaacctaactaagctaaagagcttctgcacagaaaaagaaactatcaataaagtgaacagtttacagaatgagagaaaatatttgcaaactatgcatctgagaaaggtctaatatccagaaactatgagaaacttaaacaaacgaataagcaaaaaacaaataaccccattaaaaatgacaggaacagacaattttcaaaagaaaacatrcaagtgacaaacaaacatataaaaaatactcatgatc

SEQ ID NO: 568491 - DNA, 563 bp, Homo sapiens
caaataagctacttggaaacacatgattctttctgtgccagcatttaagctttgttacacaggaccagagcagcctttgatctgaagctatgtctttcccaatactagagcaatatccttctgactaatcttggcagcaccctgtgtattgtcaagttttcttccatggctgttgggaacatgaagtcttttcaattctgtcagtcctggagattgttctctctgctcatggtaggagactctttccctaacttcgtgtagtttcctcacgtgcatctgttgatctcagctgacaacctgaagasgactctctgaggactgtggagagcttgctgtgaaactcctctctttcactctgccctatgaactgtaacacccttggcctccttgaactcccagctctgtcttctaaactcagttatccagagggtataggtcatatgcctttgcagcatacacatggcattaagtctgcaagcacacagaatgcttgagttgttggggaatagtttcctccacctagatttcaaaggatgccatgaacaacctgagggcagaggctt

SEQ ID NO: 568492 - DNA, 644 bp, Homo sapiens
gaactggaaactctcctcagtaagtcagctggagtaatctcaggtctcacctcatttatttaccttcattcaaagatcatactcttgatcatctttatgatcattgccaccattttggtatgttttgcaatgtccagtaacagggcttttttgcatattttctctaggtatttagatgtttcagatgggaaggtatattcatgccttattactccaccttgactggaagagaaactctgtgtctaagtcttgatctcaccatttcttcatcgtgtaaccctgggctagttctttaatcttgcgagcctcatcttcctcatcagtgaaatgtaggtaaaattgttcttcttgttttctatttttttaccttttttgagatggagttttgctsttgttgcccgggctggagtgcaatggcatgatctcagctcactgaaacctccacctcccaggttcaagtgattctgctgcctcaggctcctgagtagctgggattatgggcagctgccaccaagcccggctaattcctgtatttttaatagagaccgggtttcaccttgttgaccaggctggtctcaaactcctgacttcaggtgatccaccagcctcagcctcccaaagtgttgggattacaggcatgagcc

SEQ ID NO: 568493 - DNA, 644 bp, Homo sapiens
gaactggaaactctcctcagtaagtcagctggagtaatctcaggtctcacctcatttatttaccttcattcaaagatcatactcttgatcatctttatgatcattgccaccattttggtatgttttgcaatgtccagtaacagggcttttttgcatattttctctaggtatttagatgtttcagatgggaaggtatattcatgccttattactccaccttgactggaagagaaactctgtgtctaagtcttgatctcaccatttcttcatcgtgtaaccctgggctagttctttaatcttgcgagcctcatcttcctcatcagtgaaatgtaggtaaaattgttcttcttgttttctatttttttaccttttttgagatggagttttgctgttgttgcccgggctggagtgcaatggcatgatctcagctcactgaaacctccacctcccaggttcaagtgattctgctgcctcaggctcctgagtagctgggattatgggcagctgccaccaagcccrgctaattcctgtatttttaatagagaccgggtttcaccttgttgaccaggctggtctcaaactcctgacttcaggtgatccaccagcctcagcctcccaaagtgttgggattacaggcatgagcc

SEQ ID NO: 568494 - DNA, 644 bp, Homo sapiens
gaactggaaactctcctcagtaagtcagctggagtaatctcaggtctcacctcatttatttaccttcattcaaagatcatactcttgatcatctttatgatcattgccaccattttggtatgttttgcaatgtccagtaacagggcttttttgcatattttctctaggtatttagatgtttcagatgggaaggtatattcatgccttattactccaccttgactggaagagaaactctgtgtctaagtcttgatctcaccatttcttcatcgtgtaaccctgggctagttctttaatcttgcgagcctcatcttcctcatcagtgaaatgtaggtaaaattgttcttcttgttttctatttttttaccttttttgagatggagttttgctgttgttgcccgggctggagtgcaatggcatgatctcagctcactgaaacctccacctcccaggttcaagtgattctgctgcctcaggctcctgagtagctgggattatgggcagctgccaccaagcccggctaattcctgtatttttaatagagaccgggtttcaccttgttgaccaggctggtctcaaactcctsacttcaggtgatccaccagcctcagcctcccaaagtgttgggattacaggcatgagcc

SEQ ID NO: 568495 - DNA, 610 bp, Homo sapiens
aattctacagaaaaggaagagataaaaatatggtataaaacagaaggggaaaaagatgtaaaagaaagtaaatttaaaggttaattttaggcaaagaactttgtacatttaagtgaacacaatgatcttattattacttaatgttcttttttaacttttaagtttaggggtccatgtgcaggtttgttatgtaggtgaaattgtgtcatgggggtttgttgtacagattatttcatcactcaggtattaaacctagtaccaattattttttctgatgctctcccttctcctaccttccaccctctgataagccccagtgtgtgtaaaatggtcttggactttttttctgttaattgacttttttttttttggcttctgtaaatttttttttgragtccatatgtgccaaattttttttgattgttctgaattagttttcttatgaaaagattaatataatggtgaaagagaataatcttagagatctcaaaatatcctcctcccaaacacttccccacaaaagtagagagtaataaaatgaatgtaaactacagactggaaatgttgtttctaacttttttaaagaaaacaaaaatatggagatatgtgg

SEQ ID NO: 568496 - DNA, 549 bp, Homo sapiens
taagagtttgcgggaaaagaaaatgaataaatcaagcaattgtgttaaaaattgcagaggcaagccacagattctaaacttggaccatctgaatgcaattccttgatctgccacttccagcttgagtgtgttacgtgttttctgagccccagtttcatcatgggaaaaatggggacaatagcagtacctccttgttaagagttgttgtgagagtcaaacacaataatctaagtctagggtttgttgtagggcccgttgtatgctaagtgctccataaatgttgactatgatcattatyataaataatcaatcaatccacatgtttaggaagaagacatatgcagagatggtgggagaaatggaaaagatgatttgctttaaattaaatctggccagagatggcaggataccagggtgctatgtgttcaaaaagccaaattaaacacggctcacagctccctgaccctcgccctccgttggccaggtttcttgctgtgtcagaaggtggggaggaggcagagcaaaggaggctgcagctgggctgttgaa

SEQ ID NO: 568497 - DNA, 545 bp, Homo sapiens
gaattctactaaacgactgtttccaaactgctcaatccaaacaaatgttcaactctgttagatgaatgtacacatcaaaaagaagtttctcagaatgctctgtctagtttttttgggaagatakttccttttcgatcgtagtcctcaaaatgctcaaaacatccacttgcatattctacaaaaagagagttttgaaatagctcaaataaaagaaagtttcaactgggtgagatgacagtacacatccaaaagaggtttctgagaatgtttctgtttagtttttatgtgaaggtatttcgtatgtccccataggcctcaagggcccccatatatccctttgcagattctacaaaactactgtttccaaactggtcaatcaaaagaaatgttcaaatctgtgagatgaaatcatacatcaccaagtagtttctcagaatgcttctttctagtttttatgtgaagatatttccttttccaccataggcctcaaagctctccaaaaattcacttgcagattctacaaaaagagtgtttccaaattgctc

SEQ ID NO: 568498 - DNA, 637 bp, Homo sapiens
ttcaccatgttggccaggctggtcttgaactcttgacctcaggtgatatgccygcctcggcctcccaaagtgctgggattacaggtgagagccaccacacccagacttcaactgatttttgacaaaggtgcaaaggcaattcaatggaaaaggattatgctttcaataaatattgctgtaatgattgaatgatcagacttattttttttacttgtttacttgtttttatttgtttacttgcttttattgtttgttttttgctttttgtttaggggaagatttttgttttgttttgttttgggggggggttgggagaggagatttgggtattttgttctgttttgtttctagaaacctaacaccgaaaatgtgatgacctggctgaagttcaaaagatgaaaatgtgatgaccgggctggagttcaaaagacaggtgaaggaagatttgcaattatttcagcaagaagataaaaggtctgtattaatttcaacatgtgtttttgtgatagaatacatagcatttcatgacctattggttgaggagaaggaagtgaagggagaagactaacttgtgacttaggaacctattttttgatagtataataaataaaatagggcattcagaggcaagaaggga

SEQ ID NO: 568499 - DNA, 653 bp, Homo sapiens
ccttcttttttgtcacctcctgggttggcccctctggtaccagttttatccaattgtgtgggtctggaatcacatctaagcgcttatgttgctgtaacaatataaacagattcgtgtgatcctgaagtaggcctgtaatggcccacattctctgccatgtgtgcgggtatgtgtggtgtgtgtgtgtgtgtgtgtgtgtgtgtgtgtgtgagagagagagagagagagagaaattcattgatgactgtatttttaatcctccttccttggtacactatttattcattttacatgaacctcaaagsagaggcacagagctggtattgaatgccagatccttgatcacactatctatcttactgaaaatgtaagagctaaggggttcattgatgctagtttgttttgtagctagagtatccttacctgacttgtgaccttgggcatgtaccttcatctttttgtgccttcacctttctcaccatacaaggaagatgatggggcatctgactggagagttatgaggattaaatgtcttcatcctcatttaaaatgaaagccctatattaataaatgttcctttgactatgaaaaaaaaataaaaaataaaatgaaagctctttgggcaacctctagaacacagtaaatgctcataa

SEQ ID NO: 568500 - DNA, 589 bp, Homo sapiens
taggttgcttccatgtcctggctattgtgaataatgctgcaatgaacatggaggtgcagatatgtctttgaaataatgatgttgtttcttttggatatatacccagtagtaggattactggatcatatggcagtcctatgtttaattttttaaggagctgccaaactgttttccataatggccgtaccaatttacatttccaataacagtgcacatggattcccttttctccacatcctgacaaacacttgttatctcttgtttcttgataatggccatcctaataggggtgacaagatatctcaacgtggttttctttgcatttctgtgatgtgtgatgttgagcactttttcatatacctgtaggccatttgtatgtctattcatcatttgcctattttttaaatgggatttgtgagctttttgctattgcattatataagttccttatatttttggatattaaaatcttattagatacgtatgtagtttgcaaatattttctcctattctgtagaatgtgttttcactttgttcagtgtttcttttgctatgcakaagctttttagtttaatgtagtacaacatgt

SEQ ID NO: 568501 - DNA, 598 bp, Homo sapiens
tttggagcaaatagctagtctttaaaatattgcayatgtgaagacaatgaaatggaattcgagctataaaaatttgtattgttttatttttacttaaaatagtaaatagtttgcttttcattgagactggctgctgattcaccttggtaatgaatcatgattatattctaactgagatatattgagattaatgcatgattaactactctctcagtacatcaaaatcattgcagagtattagaaattgaaccattgagctaaaaatgctcaacttctgctttatattcttaaaatggcaaaaaagaaaagaaaaaaaaggtaaggaaaaggaatacatgaataatagtaaaactcttttctcaaatgaaaatggaaactacctccctgatccaatatttggcttgagatgtgtttcttccaagaaatagcatccgtttccattcagctgggcatagctgctgcaaggatgtcagcttggatttgcaggctagccagcagacagatttttgatgggatcacctactgttgttgcagtgaaagatagaatggcccgtccaccgttaataaatttggtcatcctcgctatctcccttgctgg

SEQ ID NO: 568502 - DNA, 554 bp, Homo sapiens
actctgttatggcagcactaggactgaatgccgcaagtgtgcacagcttctgagaaacaaaggactggctacattctagaaaagctggttgtttcatcacaatacagaaattaaaaatcactaagctattacatggcaaacacattctgttccattttatttattaggatggtcttatatgaactattcaaaaggcttatttttaaaaaaggagttctccccaaccccatcactaaatagttcagtaatcactaagtagccatttattcaatttkgtaatggtctgattaaacagctctctagtacactaaaaaccatagaggtgaaataaaacattagaggtaaatgattttacccactgatgcattttctctctgtttctaggtcctcccttttaaaactaagtcaaaatctggtatatttcagtggaactgagttgtttagctttgtgagtatcagttgctactctaatattacagtatataatataacattatatatatggtatacataacaatataacatataatataatactaaatgtaaagaccaat

SEQ ID NO: 568503 - DNA, 536 bp, Homo sapiens
cattttttatataaatagaaaacataatactaaaatttatatggaaccacaaaacatcttaaataaccaagacaatcttgagaaagtagaacaaacctggaggcatcacacttcctggttttaaaatatgttacaaaggtgcagtagttaaaacattagggaactgacataaacacagacatataaaccaatgaaacaaaatagagtccagaaatcaattcacaaatataagaytcaactgatctttaacaggataccaacaatacataagggggaaaaatagtctcttcaacaaatagtgttgggaaaactagatatctatagtgaaaaggatgaaattagatccttatcttatgctatacaaaaaatcaactgaaaatggattaaatacttaaatataagacctgaaactctaaaaagaaaacttagggataaagcttcatgagactgatcttagtaaagatttttttggatatgactcaaaaagaacaggtaatgaaaacaaaaataaacaagtggcacttcatcaaactaaa

SEQ ID NO: 568504 - DNA, 245 bp, Homo sapiens
acattagggggtcataagagccttkaaaggcccattacacatggtactctatggaaagaattgtcaacactgtggaagaaaaccctgacagagagaacatgaaaggcttcagtaggatgccacatcaagccccaaacaataaactcctgctggagaaagctgtgtccagatgttgtgcatgactgcacaggatttataacagagctaaacaaggagatcatgaaagagattgtggaaatggcgag

SEQ ID NO: 568505 - DNA, 245 bp, Homo sapiens
acattagggggtcataagagcctttaaaggcycattacacatggtactctatggaaagaattgtcaacactgtggaagaaaaccctgacagagagaacatgaaaggcttcagtaggatgccacatcaagccccaaacaataaactcctgctggagaaagctgtgtccagatgttgtgcatgactgcacaggatttataacagagctaaacaaggagatcatgaaagagattgtggaaatggcgag

SEQ ID NO: 568506 - DNA, 245 bp, Homo sapiens
acattagggggtcataagagcctttaaaggcccattacacatggtactctatggaaagaattgtcaacactgtggaagaaaacsctgacagagagaacatgaaaggcttcagtaggatgccacatcaagccccaaacaataaactcctgctggagaaagctgtgtccagatgttgtgcatgactgcacaggatttataacagagctaaacaaggagatcatgaaagagattgtggaaatggcgag

SEQ ID NO: 568507 - DNA, 245 bp, Homo sapiens
acattagggggtcataagagcctttaaaggcccattacacatggtactctatggaaagaattgtcaacactgtggaagaaaaccctgacagagagaacatgaaaggcttcagtaggatgccacatcaagccccaaacaataaactcctgctggagaaagctgtgtccagatgtygtgcatgactgcacaggatttataacagagctaaacaaggagatcatgaaagagattgtggaaatggcgag

SEQ ID NO: 568508 - DNA, 690 bp, Homo sapiens
gtacaatttaaaataactaaaagagtgtaatttgattgcttgtaatacaaaaaataaatgcttgaggggatgaatatcccatcttccatcatgtgattatttcacattgcatgcctggatcaaaacatttcatgtgctccataaatatatatacctactatgtactcacagaaattaaaaatttaaaaatttttaaaaattcagaattgatatygggtagattattttctaaggacaatgcaagtaatttggattatcaataagaaaaagaataagaaaggaccttgatattttcagacattaaaatgcacttcaaaatcactcatgggacaaataagaaattataacaaaaaattaaaatactggccaggcatggtggctcatacctgtaatcccagcactttgaaaagccaaagcgggtggatcacctgaggtcaggagttcaagaccagcctggccaacatggtgaaacccttctctactaaaaatacaaaaattagctgagcgtggtggcaggtgcctgtaatcccagctactcgagaggctgaggcaggagaatcacttgaacctgggaggcagaggttgcagtgatccgagatcacgccattgcactccagcctgcgcgacaagggcaaaactccgcctcaaaaaaaaaaaaaattaaaatacttaggcataaacaacaataat

SEQ ID NO: 568509 - DNA, 690 bp, Homo sapiens
gtacaatttaaaataactaaaagagtgtaatttgattgcttgtaatacaaaaaataaatgcttgaggggatgaatatcccatcttccatcatgtgattatttcacattgcatgcctggatcaaaacatttcatgtgctccataaatatatatacctactatgtactcacagaaattaaaaatttaaaaatttttaaaaattcagaattgatattrggtagattattttctaaggacaatgcaagtaatttggattatcaataagaaaaagaataagaaaggaccttgatattttcagacattaaaatgcacttcaaaatcactcatgggacaaataagaaattataacaaaaaattaaaatactggccaggcatggtggctcatacctgtaatcccagcactttgaaaagccaaagcgggtggatcacctgaggtcaggagttcaagaccagcctggccaacatggtgaaacccttctctactaaaaatacaaaaattagctgagcgtggtggcaggtgcctgtaatcccagctactcgagaggctgaggcaggagaatcacttgaacctgggaggcagaggttgcagtgatccgagatcacgccattgcactccagcctgcgcgacaagggcaaaactccgcctcaaaaaaaaaaaaaattaaaatacttaggcataaacaacaataat

SEQ ID NO: 568510 - DNA, 690 bp, Homo sapiens
gtacaatttaaaataactaaaagagtgtaatttgattgcttgtaatacaaaaaataaatgcttgaggggatgaatatcccatcttccatcatgtgattatttcacattgcatgcctggatcaaaacatttcatgtgctccataaatatatatacctactatgtactcacagaaattaaaaatttaaaaatttttaaaaattcagaattgatattgggtagattattttctaaggacaatgcaagtaatttggattatcaataagaaaaagaataagaaaggaccttgatattttcagacattaaaatgcacttcaaaatcactcatgggacaaataagaaattataacaaaaaattaaaatactggccaggcatggtggctcatacctgtaatcccagcactttgaaaagccaaagcgggtggatcacctgaggtcaggagttcaagaccagcctggccaacatggtgaaacccttctctactaaaaatacaaaaattagctgagcgtggtggcaggtgcctgtaatcccagctactcgagaggctgaggcaggagaatcacttgaacctgggaggcagaggttgcagtgatccgagatcacgccattgcactccagcctgcgcgacaagrgcaaaactccgcctcaaaaaaaaaaaaaattaaaatacttaggcataaacaacaataat

SEQ ID NO: 568511 - DNA, 579 bp, Homo sapiens
  misc_feature 554: n = A,T,C or G
gctaattactgccacccccgaaaagatcatttttttagttcaaattttctgaagttcacctgcagtttcactttgtttgtgaagacttagcatccacttgtttgctaattatttctcatattaattttggatcccaaactggttggtaaggtttttgaggggacagggatcttgctttatttatatactttgcattttccawagcacaatgttaagcatcacccattcccatctctgtgcctactatttgggttcaaaaaaggcttttgaatgacttatgaaattatttaataccttgcaatgaattattccagtattgtttaggacattgtatcatggaacaatattgctacatagtctgctggctttaatatcttgcttcattcctcttcaaaacaagatttatgatgtagaaaactatttgtgatttaaattcaaggttttaatttgaaaataacatctgtatttttttgctaagtatactattagcaacttgagctttttgtgggggtatgaggtgtaaaattgtgcttaacatgaagtgacaaaaaaanactcgcatcagaatagcaaaatgaa

SEQ ID NO: 568512 - DNA, 579 bp, Homo sapiens
  misc_feature 554: n = A,T,C or G
gctaattactgccacccccgaaaagatcatttttttagttcaaattttctgaagttcacctgcagtttcactttgtttgtgaagacttagcatccacttgtttgctaattatttctcatattaattttggatcccaaactggttggtaaggtttttgaggggacagggatcttgctttatttatatactttgcattttccatagcacaatgttargcatcacccattcccatctctgtgcctactatttgggttcaaaaaaggcttttgaatgacttatgaaattatttaataccttgcaatgaattattccagtattgtttaggacattgtatcatggaacaatattgctacatagtctgctggctttaatatcttgcttcattcctcttcaaaacaagatttatgatgtagaaaactatttgtgatttaaattcaaggttttaatttgaaaataacatctgtatttttttgctaagtatactattagcaacttgagctttttgtgggggtatgaggtgtaaaattgtgcttaacatgaagtgacaaaaaaanactcgcatcagaatagcaaaatgaa

SEQ ID NO: 568513 - DNA, 579 bp, Homo sapiens
  misc_feature 554: n = A,T,C or G
gctaattactgccacccccgaaaagatcatttttttagttcaaattttctgaagttcacctgcagtttcactttgtttgtgaagacttagcatccacttgtttgctaattatttctcatattaattttggatcccaaactggttggtaaggtttttgaggggacagggatcttgctttatttatatactttgcattttccatagcacaatgttaagcatcacccattcccatctctgtgcctactatttgggttcaaaaaaggcttttgaatgacttatgaaattatktaataccttgcaatgaattattccagtattgtttaggacattgtatcatggaacaatattgctacatagtctgctggctttaatatcttgcttcattcctcttcaaaacaagatttatgatgtagaaaactatttgtgatttaaattcaaggttttaatttgaaaataacatctgtatttttttgctaagtatactattagcaacttgagctttttgtgggggtatgaggtgtaaaattgtgcttaacatgaagtgacaaaaaaanactcgcatcagaatagcaaaatgaa

SEQ ID NO: 568514 - DNA, 579 bp, Homo sapiens
  misc_feature 554: n = A,T,C or G
gctaattactgccacccccgaaaagatcatttttttagttcaaattttctgaagttcacctgcagtttcactttgtttgtgaagacttagcatccacttgtttgctaattatttctcatattaattttggatcccaaactggttggtaaggtttttgaggggacagggatcttgctttatttatatactttgcattttccatagcacaatgttaagcatcacccattcccatctctgtgcctactatttgggttcaaaaaaggcttttgaatgacttatgaaattatttaataccttgcaatgaaytattccagtattgtttaggacattgtatcatggaacaatattgctacatagtctgctggctttaatatcttgcttcattcctcttcaaaacaagatttatgatgtagaaaactatttgtgatttaaattcaaggttttaatttgaaaataacatctgtatttttttgctaagtatactattagcaacttgagctttttgtgggggtatgaggtgtaaaattgtgcttaacatgaagtgacaaaaaaanactcgcatcagaatagcaaaatgaa

SEQ ID NO: 568515 - DNA, 609 bp, Homo sapiens
aagtacggagttatgatagggtataatgttccagaagggcctgtggagagtggggatgaggtgaggagtcaggagggtaggagagtatatcagtgatactgattccacggtgatgttctataacaatctcaaaacctcattagcatacaacaagtgtttattgctcacatacctaagacagttttctaggggatgtattgatcttggttgggttctctcacatgtctgggatttggctggcttttcagtcatctaaggtgacttggactggcatgactagggcaacttgtggcatgtgtgttctacacatctctcatcattctgcaggttatcccaggtatgttcttatggcaatggaagagaaaaaaaagagagaagacatgcccaatcatccaaccattttcaagactcttttcatttcttttgcaarcatcccaaaggacgtcatgtggtgaaaccaagagtcagagtataataccctgaaaaataatatggcaaaagggcatagataaaaggagagataagactatttttgtaacctaccataaggttcctggggagaagagacaactctatcctcaactttgtagcccaaaggtaaaacaaaaa

SEQ ID NO: 568516 - DNA, 567 bp, Homo sapiens
aataaagatttccataaaaatgaaattcagtttctgtgtgagttacaacggctatttctattatgtcagtcttttttttttcatggaggactttctatgtgttagtcactttaccatatgcctatatactggaagtagaatgatgaatataaatatggtcaatgttcttaagaaatgcaatcttattggaagacataaatratgcatcaattaaaatatagtgagttaagttaaaataggttattaggggctctgtttatgaagagatagggagaattcttttagctgtgggtttcaccccactttacaatgtgttttgaacaaagcctgctgcctttccacactgggagagctccaagttcggtgaaacagagatgaacacctttcatcagtttttcaagtatctcctgatgggttagaaaagacccagacaattctttgtgaattaggtatgctctgctccctttgggatcaaggatcatggtctcacacttggaatgcaggctattgtcttcaggagtcccgcacagttgagagagtttggagaaagagaaagttaagatgtca

SEQ ID NO: 568517 - DNA, 510 bp, Homo sapiens
ttcctctctaaactggttattctggttaacagctcctgtaatattttatcatggttcttagcttctttgcattgsattagaaaatgctcccttagctgagtaaagttcattattacccaccttctgaagcctacttctgtcaattcatccatctcagcctcttcccagttctatgcccttgctggagaggtactgcaatcatttggaggaaaagaggcacactgaatttttgagttttcagtgtttcttcagtaatgcgtcctcattttcatgagtttatcttgcttcaatctttgaggctgatgacctttagatggggtttttgtttggactttttttgctgatgctgttgttgctttctgtttgtttgttttttcttttaactgtcaggcccctctttcatagggctgctgtggcttgctggggatctactccagattctgttcgcctgggtccttcctgcacctggaggtgtcaccagtggaggcttcagaacagcaaagatggctg

SEQ ID NO: 568518 - DNA, 510 bp, Homo sapiens
ttcctctctaaactggttattctggttaacagctcctgtaatattttatcatggttcttagcttctttgcattggattagaaaatgctcccttagctgagtaaagttcattattacccaccttctgaagcctacttctgtcaattcatccatctcagcctcttcccagttctatgcccttgctggagaggtactgcaatcatttggaggaaaagaggcacactgaatttttgagttttcagtgtttcttcagtaatgcgtcctcattttcatgagtttatcttgcttcaatctttgaggctgatgacctttagatggggtttttgtttggactttttttgctgatgctgttgttgctttctgtttgtttgttttttcttttaactgtcaggcccctctttcayagggctgctgtggcttgctggggatctactccagattctgttcgcctgggtccttcctgcacctggaggtgtcaccagtggaggcttcagaacagcaaagatggctg

SEQ ID NO: 568519 - DNA, 499 bp, Homo sapiens
tattttacatttttaaattgggcaataagaaaaaaaatattttctaggagatatagatagtaaygtgttactctcacttttttctgtatggataaataatataacatgttattctcacttttttgtgtatggatcaaataatataacattattacatcaccatgttaattatattatatcggttttgcctgtgagacaaatgtatctgtttatatgtattatagtttaattttttgtatgaaagtcttaattttgagtttggctttcatgaaaatgaatgtgtttttaatatttcttataaattctcataagggggatatttcttgatagttactgtacccagtgttaatgatactattttatttgagaccgttttattgtaagaagaagattcactcttttctttttttgttgttacattaattatttttggcaactaaaagaggcagtcatctcacaaagtctaggaaagggagtatgtcttctagattgtgacccc

SEQ ID NO: 568520 - DNA, 499 bp, Homo sapiens
tattttacatttttaaattgggcaataagaaaaaaaatattttctaggagatatagatagtaacgtgttactctcacttttttctgtatggataaataatataacatgttattctcayttttttgtgtatggatcaaataatataacattattacatcaccatgttaattatattatatcggttttgcctgtgagacaaatgtatctgtttatatgtattatagtttaattttttgtatgaaagtcttaattttgagtttggctttcatgaaaatgaatgtgtttttaatatttcttataaattctcataagggggatatttcttgatagttactgtacccagtgttaatgatactattttatttgagaccgttttattgtaagaagaagattcactcttttctttttttgttgttacattaattatttttggcaactaaaagaggcagtcatctcacaaagtctaggaaagggagtatgtcttctagattgtgacccc

SEQ ID NO: 568521 - DNA, 558 bp, Homo sapiens
ggacctctgcaggtaaattagatcaatgtcatgtgtaygacatgcctccttttaaaataagtattatagattactagagagcacagtagtggcccagcagtctctgttcacctgttactcttagacagcaagtcaatacttagtgttttagacgttgttccgacctaatttatttttatatcatataatattaagtattgtccaagatgaatgttgagatttagtggtatctgaggaccaaaggatcaatggagtgctcaattttactcttgagagaaaggcagtcagttttgtcattattcttatgccatatcctgtgaaaataatttcaattgagggaaatatctctgtagaagctgatcttggctctgtgcattaattgtatctaggaaattctttctatgcagagtgtcttctttctcaggaaatgaaattcaaaacattctttaaaagtaaaggtatttctaaagttataattgccaggcacagtgttattagggttttgctctgccgctcagactgaaatgcggtgacatgatcatagctcactgcagcctt

SEQ ID NO: 568522 - DNA, 602 bp, Homo sapiens
tccctaatgaccagtaataatgagacttttttcatatgtttgttggccacataaatgtcttcttttgaaagtgtctgttcatatctttcgcccactttttgatggggttgttcgtgtttttcttgtaaatttgtttaatttccttgtagattctggatattagacctttgacagatgggttgcaaaattttctcccattctgtggattgcctgttcactctgatgrtagtttattttgctgagcagaagttcttcaatttaattagatcccatttgtcaactttggaatatgtgatgccattactccattaaccagaacacatggatcaagaaaatcaggaatggaagaaagggttcatctctccattatttctaagaaaccatataaatatgtgtgtatgcatattgtttccggttactaagatctgtaactcttagaaactttctttcttctaaagagaagaactttctttcttcaaaaaagaagaaaatcttttcagagcacagattcatgcttttattgaacttgaaatgagccacttccatttggctatgttgggctctccttccataactacaacagactagccatacaggctaat

SEQ ID NO: 568523 - DNA, 597 bp, Homo sapiens
tggtgataataaatgctcagaaaagacaaggaatatttgatgattttgtaaacatttgtttaaattagaacctaaaagaaatgtgtacacaattttagacagagaaaagggaggtccaggagaagcaataagaaaaatgtgcttgatgtatcagggtaaacgagcaaaataacctcgtttgaaaggagagttcatggtagataattgcattagtttgtccggactatcaaaacaaaataccacaaactgggtggcttaaacaacagatgtatattgttgaactgttgctagaactgtgtcgaaaatcaatgtgtcagcagggttgattcattmtgggagctgtaagggagaatcttttatgctcctcacttagcttctggaggtttgctggccttccttggcactccttgggttgttcattcattacgctaatccttgtctttatgtgcacatggtattctcctgtgtgggtatctatctgtgtgtctgaatgttccctttttgtaagaacgtcagtcatactggattaaggctcaccctagtgacctcattttaacttaatttcctctgcaaagacgctatttccaaaaaagatca

SEQ ID NO: 568524 - DNA, 613 bp, Homo sapiens
aagtttttttttcggagactaagagcacttagagggatctagcactggctctgctgctcaccatgtcaccttgggcaagttactgtaagcatcagttgcctcatctattagaaaaaaataatacaactagaccaaatgtgtaggaggaatattttcatatctaaaaattcagtgatttttaatacactaataaaatatccaggccaggaagaaaaactgaacttctgttacaagaccgatgtggcaggcatggcaatagtgggaagcttcatgaaaaggtagtaagaatgacggcagcttacctcaagccctgagaaaaagcaaatgtgcacagagctaaggtacagattatatattcatgtcctggcaaaagagaaagaaaggtacagaaaagaaatgggagccaggaaccaccacaagacatcccatgtgcttgggttcatcccagcccccttacctccacaccatcccacccctcctgggctggcatttttccactctacatgtcctaccatgcacataatgtttcagggaatcaaactcctctaaaatacacaaagcctaaaagatagtcatgtttgcattggkggcaacctggatataaatggacaca

SEQ ID NO: 568525 - DNA, 510 bp, Homo sapiens
ggagaaggggagcttggggctggkgggaagtgctttctaaggaaacggccctcggcagccaggaggtgaggaggaacgccgtacttgccgggagctactcctgagttgatccagtcggttctagaatgggcacatgggactggctgtgagggacagttcttgaaaggattggagtttgctgaagagtttggccttatcctgtggacagtggagggtgtgtgataaccggatcagatttgctttagggtggatcagtggaggagagtggggaggcctgaggaaaaaggaggtggctgtctcaaaagtctgggagattctgaagcaaggtgggggccttggagacaaaggaagggaatgattctgtgagccctgaaggaggtagatctcatcagattttgataattgagagttaagattgtagggggctagagggaagggaggaggctagaatgattcttaggtaatgattcaagtacctgggtggatgtaacatttcaacaattggaggca

SEQ ID NO: 568526 - DNA, 397 bp, Homo sapiens
aaaaaaaaaaaaaaaaaatggactttcccaggccagctgtggtggctcacgactgtaatcccagcactgtggcaggccaaggcgggcagatcacctgagatcaggagttcaagaccagcctgaccaacacggagaaaccccgtctctactaaaaataaaaaaaattagctgggcgtggtggtgcatgcctgtaatcccagctacttgggaggctgwggcaggagaattgcttgaacccaggaggcagaggttgttgtgagctgagattgcaccattgcactccagcctgggcaacaagagggaaactccatcaaaaaaaaaaaaaaaaaaaggactttctcaaagaaaatgtatttaaatgtctgcaccaataattccagcatgtgtatgaataaat

SEQ ID NO: 568527 - DNA, 511 bp, Homo sapiens
aggcgggtgcactgtggaggcacacatcagtgtgtaatgcaggcgggtgcactgtggaggcacacatcagtgtgtaatgcaggcrggtgcaccgtggaggcacacatcagtgtgtaatgcaggcggtgcaccatggaggcacacatcagtgtgtgatgcaggctggtgcaccatggaggcacacatcagtgtgtgatgcaggcgggtgcaccgtggaggcacatatcagtgtgtgatgcaggctggtgcaccgtggaggcatgcatcagtttgtaatgcagctgactgcaacctctgcctcctgggcttaagtgattcttgtgcctcagactcccaggtagctggaactacaggtgcaagccaccatgcctggctaattttttatattttaggtagagatggaatttcactatgttggccaggctggtctcaaactcctggcctcaggtgatcttcccaccttgctcccaaactgctaggattaccagtgtgagccactgcacccagctgt

SEQ ID NO: 568528 - DNA, 596 bp, Homo sapiens
tctttgcttaacgacagagatacattctgagaagtgcactgttaggtaattttgtcactgtactaacatcacagcatgtactatgatacaaacttagatgtcataacctaggctacatggtatagcctattgctcccaggctacaaacctgtaaagcatgtcattgtactgaatactctaggcaattgtaacacaatggtaagtatttgtgtatctaaacgtagaaaaggtacagtaaaaatatggtatgaatgataaaaaaagatacacttctatagggcatttactaatgagtggtgcttacaggactagacacaattcyaggtgagtcagtgagtggtgggtgaaatgtgagagcctgggacattacactactgttgacttcataaacactataaacttgagctaggctaaattttttttaaaatttatttcttcaataataaatttaccttagcttactgtaactttttttacttttttaaaaactttttgattcatttgtaatgaacacttagcttaaaagggaagcatattgtatagctgtacacaattttttctttatatccttatttttataagctttttttctattt

SEQ ID NO: 568529 - DNA, 505 bp, Homo sapiens
ctctacaacagttctttatttaatcatctgtttctaagtacatttgatgtttatatttgtttatatttgaagatgctgccccagccctgtggcttccagagtaactttttctgattgtgagtaggcacttgkttatttcattaatagctttgtcagtcgggcagaaaactcaagcattgcatactttgcctgttaggtccctgaactacaaaaacattttgtgtcttactatcatacctgcttgagatgctaatactggcagttctgcttcattcaatcacctttaaaggtttttttgcttattctggaccatcaatgtcagtagcagcatcattagaagtctctatttcactagtttaaatcattatctcctttcagcagatatggcaaaagtttcccaaatggtctttcttccttactctcctctctgggctaatctatttcttggcctttcacctggaaaataatcaaccaatcaaaaaaatcagagcgtggatcacattgc

SEQ ID NO: 568530 - DNA, 505 bp, Homo sapiens
ctctacaacagttctttatttaatcatctgtttctaagtacatttgatgtttatatttgtttatatttgaagatgctgccccagccctgtggcttccagagtaactttttctgattgtgagtaggcacttgtytatttcattaatagctttgtcagtcgggcagaaaactcaagcattgcatactttgcctgttaggtccctgaactacaaaaacattttgtgtcttactatcatacctgcttgagatgctaatactggcagttctgcttcattcaatcacctttaaaggtttttttgcttattctggaccatcaatgtcagtagcagcatcattagaagtctctatttcactagtttaaatcattatctcctttcagcagatatggcaaaagtttcccaaatggtctttcttccttactctcctctctgggctaatctatttcttggcctttcacctggaaaataatcaaccaatcaaaaaaatcagagcgtggatcacattgc

SEQ ID NO: 568531 - DNA, 516 bp, Homo sapiens
ggattataaatcatgctgctataaagacacatgcatatgtatgtctattgcagcactattcacaatagcaaagacttggaaccaagccaagtgtccatcaatgatagactggattaagaaaatgaacttttaggattcactagagggagaagcgtgtgtagtgatgactctagcagggcccagagaactctgatcccatgcgggtctggtgccctggatgctcggttttcagggtcctgaatagggctggatgatgctcagctgtggaagccacagatcgttagctctggctgtgattcctcagctttgcctttcttacaagggggaccagacccttagggccaccaggctcttcttctggcgtggtgggcctgccccagyggcacctccacttcacaatgctgtctcaggctccatgtgctgagacttgtcatttgaacacctaggtgtctggaagccaggtgacaacatgtgatgtgatttagtggtgcctacatactcatgtgaggcagatca

SEQ ID NO: 568532 - DNA, 516 bp, Homo sapiens
ggattataaatcatgctgctataaagacacatgcatatgtatgtctattgcagcactattcacaatagcaaagacttggaaccaagccaagtgtccatcaatgatagactggattaagaaaatgaacttttaggattcactagagggagaagcgtgtgtagtgatgactctagcagggcccagagaactctgatcccatgcgggtctggtgccctggatgctcggttttcagggtcctgaatagggctggatgatgctcagctgtggaagccacagatcgttagctctggctgtgattcctcagctttgcctttcttacaagggggaccagacccttagggccaccaggctcttcttctggcgtggtgggcctgccccagcggcacctccacttcacaatgctgtytcaggctccatgtgctgagacttgtcatttgaacacctaggtgtctggaagccaggtgacaacatgtgatgtgatttagtggtgcctacatactcatgtgaggcagatca

SEQ ID NO: 568533 - DNA, 527 bp, Homo sapiens
gagtccaacaatgtgttttttgtttttgttctgctcttttaaatagactttatattttagagctgttttaggttcacagcaaaattgagtgaaaagtacagagttggcatacactccttgttccacacatgcatggcttccccaccgtcaatatcctgcaccaaaatggtacatttgttacagttgataaacctacactgacacatcattattatccaaattccaaaatttacaygagggttcactcttggtgttgtatatgctataggttttgataagtgtataacatgaatccattattgtaatatcatacaaaagagttttactgtcctaagcaatgtgtgttttattttattttattttattttattttattttattttattttattttatgagaaagagtcttgctctgtcgcccaggctgcagtgcagtggcgctatctcagctcactgcaacctctgtctcctggattcaagcgattcttctgcctcagcctcctaagtagctgggattgcaggtgccca

SEQ ID NO: 568534 - DNA, 546 bp, Homo sapiens
gacacctctgcgtctcctacctctcccatccctggaggttgccacgcaaaagagtgttgtggttgcgccttctgatttgggtgccctgtcgctcatcaggatcaaggcaggttcttagcaaaatttagaatttgtcaaagatctttggcctggtgcytcacccaaagtgctgtttaagaagctctttattgagttgaattgtcaccgtctcatctctcctttcaaactaatttttttttttcctgtttgggttccaggaatttttttctcagcttttcccaggacctcctggatatttatttctgctgtgcactataaccttgcaaaacatttagggatctctagcttgtcatctcaaaggcgtatagacattggagttgtagaagaaattaataaaaataaagcttgaaactttccagacgaacttgatttgaattaataatcaattatttatattgagagagcgacaatattacaaggcgaggagacagaatatatacgtatgatatgattaaagaatatatgattaacgaaatatagcaaatt

SEQ ID NO: 568535 - DNA, 546 bp, Homo sapiens
gacacctctgcgtctcctacctctcccatccctggaggttgccacgcaaaagagtgttgtggttgcgccttctgatttgggtgccctgtcgctcatcaggatcaaggcaggttcttagcaaaatttagaatttgtcaaagatctttggcctggtgcttcacccaaagtgctgtttaagaagctctttattgagttgaattgtcaccgtctcatctctcctttcaaactaatttttttttttcctgtttgggttccaggaatttttttctcagcttttcccaggacctcctggatatttatttctgctgtgcactataaccttgcaaaacatttagggatctctagcttgtcatctcaaaggsgtatagacattggagttgtagaagaaattaataaaaataaagcttgaaactttccagacgaacttgatttgaattaataatcaattatttatattgagagagcgacaatattacaaggcgaggagacagaatatatacgtatgatatgattaaagaatatatgattaacgaaatatagcaaatt

SEQ ID NO: 568536 - DNA, 574 bp, Homo sapiens
gttagaaaaaaatcctgaagccaaygagaatttgctaccatttatcaaacaatctcattctccagaaatctcattctcacctatatttaggacaaacagtaagtgggcctgttactgtgccatcagctcaaaccaccccaaaactcagaggcttaaaacaacgatcatttattctcagggaccagcaggtgagctggggcagctttccttcaggctacagtggtggcatagctcttcttcatgcatccctcctgctcctcctgggactggtgggccaagctgggcatgttccttccatggtggagtcacaggggcaggtgagacagccctaatgtgcaagcacacctcaagcccctgctttctcgtgtctgctgcatcccttgggccaaagcaagttacatggctgagcccagcttcaaaggccagggacggttccctgccttcttgtgggaggagctgccagttttacacagcaaagagtgtggacacagggagggctggaggactgaagacattaagacaagcaatccccagggccagctgctatttggaattcttggtgacaggtttttgt

SEQ ID NO: 568537 - DNA, 587 bp, Homo sapiens
caaacacacatgttttacaatttgtacagttaacacaattagcacagtggtcctgaggtgatgtacatcctcagcttacaaagataacaggattaagagattaaagacaggcataagaaattataaaagtattatttgggaactgataaatgtccatgaaatcttcacaacttacgtttgtctaccgcggccccagccggtccctccattcggggtccctgacttcccacgacacctctccctttatttttatataaatgtgccatggcgatgaagacttcttcgttctctcggttttgatgcaagattctttgactggtctggcacactaaaaacaagccgattaaacagagaaacatgattccaaaatgtactacagtggagcccccaacagacttaatccaagtcgtggggtttagtccagaaagactttctgccacctgatctaacgcmtcagctccaggcacaatgggtaaatgagcttgagaggcttcaaaaatttgtttctttaatttagttatgtccaaggataaattatcttccctacccagaaggtgtcctttgaccatttcccatgaatgatcagt

SEQ ID NO: 568538 - DNA, 569 bp, Homo sapiens
aattttttgaatttttgcatgagtgaaaaagcagaccttggcaatgaccttgagcagtaggatataaataactcccccatgcttagcgttccagtaatggaacactaggcgtaaatgggttaacctgtrttccagaatgaattccaaacagatctgagatttaaatattaaaaaatgaaaccaacaaatatttggagaaaacatgggtgagttcctctataatcttgcagtaggaaaaaccttcctatgactcaaacccagaagcaattttaaaaattgataaattttattacatacatttttttaacttttgcatggcaaaaaaaaagaaaaaagacaaatggcaaaataggaaaaactgttcacaatttattcataaacaaaaggttactgttcttaatatatgaagaccttctaaaaataaagaggccaaaacatttttaatttaatatacaatatataataaaatgtaatgtataataaagatatgaactgatagttcataggaaaaaatgcaaatagctcctaatatgaaaagatgttcatcctcagtcataataagagaaaag

SEQ ID NO: 568539 - DNA, 506 bp, Homo sapiens
agtgagactccatcttaaaaaaaaaaaaagttctatgtgattttaaaaggctttataaaattatttmttgtattgcttatgtagctttaaaatgtttatttgtgtttgtgtatgtgtgtgaccctgtgaaaaactgaaagaataaacaaaaagttagaaagttagaaagttggagtttgatgcattaatccaggagctgtctgggcaggccaacttacacttggggggtataagcattcctgctaccagggaagtgaaatttcctaccatggagtaaggatgtttcatgtggctttgtaatggataaaatctttctcctgatgcttttcctactgctctgatttcgtgttcaccatgcaaccatcttttactaattaagcatcccaggcatttggattttgaatggtgggaatgtattagctattcgaaaataaatattcccttctgccttcccaggacctacactatcaactatactttctccctcctgtatgtataacctgtcc

SEQ ID NO: 568540 - DNA, 572 bp, Homo sapiens
gtggtgcatgcctgtagtcccagctactcgggaggccgaggcaggagaatcgcttaaacttgggaggcagaggttgcagtgagccaagatcatgccactgcactccagcctgggcaacacagtgagattctgtctcaaaaaaaaaaaaaaaaaaaaagccacaaaaaataatggctgtgattagtaaatggagtctacagasatggtgtgaaataccaacctgaacatgaaaaaagtaatatcaaggggaacctacactagcaattctacatttcttaagggaaaaaagaaaggcttttcatttgggcacatagacacatatacattcacttctccttcacttcccagtattccaaggaatgtctaaaggcttccgtgtgttagatcctagctagtgcgaggaacagagtggaacagtagatgcatttcgtgctgcctgaagacaagtagagagcaatgaacaactagcgaatgactgcaaatgtgcaatgcagctatgaggaaaaggagccaagtggtgagacatgcagcaaggtgggaaggggagtctaccctaggtaaggagccaagga

SEQ ID NO: 568541 - DNA, 562 bp, Homo sapiens
ataaatttatgaataaatgtacaaactatcaaataagctaaagaaatagtccacattgttggggaaaggggttaccatgaaacagaccctagcagtcacttacaaatacagttcatcttcattatttgtggatcccatatttgcaaatttgcttacttgctaaaatgtctttgtaatccccaaatacttgtggagctttcaaggtgacttatggatatacacatagtagtgaaaaatatgtcactccttgcccaagtcccaaggtgaccctcagccttgtctcagccctcatacaaagatgaccagaggacagagacagcagagggcagtgcagcgtagtgcaagaagctctggctctggggccatctggacgagtctgaatcttaactctggcacctgttagtagagaggcctcaggcaaatcgcttaacacttctgtacttcctttattttttgtaagtaaggaaaattcaatctaccaggatgagttgtttttaggaattaattttgtaatctgtgtgagatatgtatayatgtatatattttccctgggaacaagggt

SEQ ID NO: 568542 - DNA, 582 bp, Homo sapiens
tttacattcgcaacagcagtgtaaaagtattcccatttcaccacatccatggaaacatctatgatttttattttttaattatggcyattcttgcaggagtaaagtggtattgcattgtagttttaatttgcatttccctgataattagtgatgttgagtattttttcatatttttgggccatttgtatatcttcttttgagaattgtctattcatgtcctttgcccatgttttgatgagattatcattactattattattattattactttgctcatttgtttgagtttctttgctcatttgtttgagtttcttatagattctagatattagttcttcataggatgcacagtttgcaaatactttcttccactctgttggttatctgtttattcttctgattatttcttttgctgtgcagaagttttttggtttaattaagtctcatctacttatctttgttttgttgcatttgcttttgggttcttggtcatcaagtctttggctaaatcaatgtctggaaaagtttgttatattctacagtgtttattgtttcaggtcttagatttaagtctttgataca

SEQ ID NO: 568543 - DNA, 582 bp, Homo sapiens
tttacattcgcaacagcagtgtaaaagtattcccatttcaccacatccatggaaacatctatgatttttattttttaattatggccattcttgcaggagtaaagtggtattgcattgtagttttaatttgcatttccctgataattagtgatgttgagtattttttcatatttttgggccatttgtatatcttcttttgagaattgtctattcatgtcctttgcccatgttttgatgagattatcattactattattattattattactttgctcatttgtttgagtttctttgctcatttgtttgagtttcttatagattctrgatattagttcttcataggatgcacagtttgcaaatactttcttccactctgttggttatctgtttattcttctgattatttcttttgctgtgcagaagttttttggtttaattaagtctcatctacttatctttgttttgttgcatttgcttttgggttcttggtcatcaagtctttggctaaatcaatgtctggaaaagtttgttatattctacagtgtttattgtttcaggtcttagatttaagtctttgataca

SEQ ID NO: 568544 - DNA, 553 bp, Homo sapiens
gaagcaatcacagtgggcgttttgttttgctttgtgtttttgttcacagcactggtcttattctcttcattaattagcaacatttaaaattctacaaacatctgtggcaatgctagtcactctccttgaaatcattagatttaggatatacaagaatatcttagaagtggagcatactagctctttagataatacatagaaaaaaagaaaaggaattatctgtttaaataagtattagtgaatatagcctactttataaagcttaggagtgtttatgcaacattactagcattattcaagcagggatttggatggcatctttaaggttggcatttgaaacttaatctgaaaatttaataaagasaggttttttaggaaatttgtgattgctacagcaccgttttcagagctaactgaagatcttctattttttataattaatttgcatggtcctcatttgaaataaaaaatagaatgatgttattgatttatattctccacataatgatgtaatctcctttctcaagctgtgaattcatcagttgaaatcatt

SEQ ID NO: 568545 - DNA, 553 bp, Homo sapiens
gaagcaatcacagtgggcgttttgttttgctttgtgtttttgttcacagcactggtcttattctcttcattaattagcaacatttaaaattctacaaacatctgtggcaatgctagtcactctccttgaaatcattagatttaggatatacaagaatatcttagaagtggagcatactagctctttagataatacatagaaaaaaagaaaaggaattatctgtttaaataagtattagtgaatatagcctactttataaagcttaggagtgtttatgcaacattactagcattattcaagcagggatttggatggcatctttaaggttggcatttgaaacttaatctgaaaatttaataaagacaggttttttaggaaatttgtgattgctacagcaccgttttcagagctaactgaagwtcttctattttttataattaatttgcatggtcctcatttgaaataaaaaatagaatgatgttattgatttatattctccacataatgatgtaatctcctttctcaagctgtgaattcatcagttgaaatcatt

SEQ ID NO: 568546 - DNA, 553 bp, Homo sapiens
gaagcaatcacagtgggcgttttgttttgctttgtgtttttgttcacagcactggtcttattctcttcattaattagcaacatttaaaattctacaaacatctgtggcaatgctagtcactctccttgaaatcattagatttaggatatacaagaatatcttagaagtggagcatactagctctttagataatacatagaaaaaaagaaaaggaattatctgtttaaataagtattagtgaatatagcctactttataaagcttaggagtgtttatgcaacattactagcattattcaagcagggatttggatggcatctttaaggttggcatttgaaacttaatctgaaaatttaataaagacaggttttttaggaaatttgtgattgctacagcaccgttttcagagctaactgaagatcttctattttttataattaatttrcatggtcctcatttgaaataaaaaatagaatgatgttattgatttatattctccacataatgatgtaatctcctttctcaagctgtgaattcatcagttgaaatcatt

SEQ ID NO: 568547 - DNA, 629 bp, Homo sapiens
agatggggagaatggaaccaacttgaaaaacgtatttcaggatattatctatgagaactttgcaaacctagctataaagaccaacattcaaattcagaaaattcagagaaccctagtaagataatttacaagaagatcatcccaaaggcacataatcatcagattctctgaggtccaaatgaaagaaaaatgttaaatgcagctagagagaaaggtcagatcacctacaaaggaatggccatgagactaacaacagacctctcagcagaaaccttacaactcagaagagattgggggctgatatttaacattcttaaataaaagaaattccaaaccagaatttcatattyggccaaactaagcttcataagtgaaagagaaataacatcattttcagacaagcaaatgctgaaatgattcaccagtgctgccttacaagagcccctgaagaagcactaaatatgtaaaggaaagacaattaccggccactacaagaacatactgtagtacacaggtcaatgacactataaagcaaccacataaacaagtctgcaaaataacatcaaatccacacacatcaataataacctagaatgtaaattggctaaatgccccaattaaaaggcaga

SEQ ID NO: 568548 - DNA, 345 bp, Homo sapiens
caacacaggagcactcagattcataaggcaagttcttagagaccttccaatagacttagactcccacacactaatagtgggaggctttaacaccccactgacaatattaatcagataattggaaaaaaagttaacaaagatattcgggacctgaactcagcactggatcatataaaattgacagatatctatagaactgaccatccaaaaacagcagaatatacattcttctcatcatcacatgacgcatattctgagattgatcacatattcagaagtagagcacttctcagcaaattcagagraattgatataataacaaacaatctttcagaccacagcgaa

SEQ ID NO: 568549 - DNA, 565 bp, Homo sapiens
tatttgtaaacaagaagttgtatttgctcttgaagcaatatcaattactaaatataaaatcattgtgaatattaaagcctgccacatatgagacagtaagggttaaacatcrtttttctaaaaactcttggcatcggaagtgtttcagatttcagatttttttgggattttggaatattttcataaacatcgttagatatcttgctgatgtggcccaagtctaaatataaaattcatttatgtttctttcttttttttttttttttgagatggagtttcgctcttattgcccaggctggagtgcaatggcgtgatcttggctcactgcaacctccgcctcccgggttcaagcaattctcctgcctcagcctcccaagtagctgggattacaggcatgcaccaccacgcctggctaattttgtatttttagtagagatggggtttctccatgttgaggctggtctcgaactcctgacctcaggtgatccgcccgcctcggcctcccaaagtgctgggattacaggtgtgagccactgcgcctggccatttatgtttcatatatgcc

SEQ ID NO: 568550 - DNA, 482 bp, Homo sapiens
gtgtctctgtgtgtaagagccattgatgactaggatttcaaggtcatattgcaaaagagcaatttgtgagagaaaattattctgatctttttcaaagcttcacttattccttaccataaaatgcattttcacagtttaccattaatctttattggttgcagaaaactgatagaaggtctggtgtcacatgctrtgctctgtacctggggatttaaaatataggaatcttgctttgatttatgcggatgattagacttttatgtaattatgaacataatgtattttctttttatatatttttatgaaaaattctgcaaaattaaaaattattttaagtaagttttagtgtgtttctccttcatatgagaaatatatatatatatatatatatatacacacacacacatatgtgcttatgcattatactcatgcatctttctttgagtaatacatgtttatcatgaagacgtgcaagtgtgggt

SEQ ID NO: 568551 - DNA, 482 bp, Homo sapiens
gtgtctctgtgtgtaagagccattgatgactaggatttcaaggtcatattgcaaaagagcaatttgtgagagaaaattattctgatctttttcaaagcttcacttattccttaccataaaatgcattttcacagtttaccattaatctttattggttgcagaaaactgatagaaggtctggtgtcacatgctgtgctctgtacctggggatttaaaatataggaatcttgctttgatttatgyggatgattagacttttatgtaattatgaacataatgtattttctttttatatatttttatgaaaaattctgcaaaattaaaaattattttaagtaagttttagtgtgtttctccttcatatgagaaatatatatatatatatatatatatacacacacacacatatgtgcttatgcattatactcatgcatctttctttgagtaatacatgtttatcatgaagacgtgcaagtgtgggt

SEQ ID NO: 568552 - DNA, 482 bp, Homo sapiens
gtgtctctgtgtgtaagagccattgatgactaggatttcaaggtcatattgcaaaagagcaatttgtgagagaaaattattctgatctttttcaaagcttcacttattccttaccataaaatgcattttcacagtttaccattaatctttattggttgcagaaaactgatagaaggtctggtgtcacatgctgtgctctgtacctggggatttaaaatataggaatcttgctttgatttatgcggatgattagacttttatgtaattatgaacataatgwattttctttttatatatttttatgaaaaattctgcaaaattaaaaattattttaagtaagttttagtgtgtttctccttcatatgagaaatatatatatatatatatatatatacacacacacacatatgtgcttatgcattatactcatgcatctttctttgagtaatacatgtttatcatgaagacgtgcaagtgtgggt

SEQ ID NO: 568553 - DNA, 486 bp, Homo sapiens
aaatatcccagtgtcattcaataagctaatggaggtcttacttctcatgtaatctccagcaacagaattagactagatccgcagggccaaaatccactcattcaggcatgaacttgtgtggcattgaaagtatgggaaaattagtaccttgtgataaatcaagagcatcattacacttggcagtcctcataactttcccttatccacaatcccatcataatttgggtaggtgatgacattcagaaagatatcaggaagagaaaggacgagaaagttgacttcttaggtttgtggaaacattgtaggttaattcwaagtgttctgaatttgaagcaaggctgcattacagatcattatctgctatatataaatggttcattctattaaactatctgtctaaccttaggcattgcgagatgtctgatattgaagcaggtggtcaggtatttcaactttctgccttttttttttttttttaaaaaaaag

SEQ ID NO: 568554 - DNA, 578 bp, Homo sapiens
cccaaatttggagagataaatgggcagrtacatagaatcacaattctctgtatccgtggagcagaaacccacctgcagaaacctctgctggaaccagtgccagggaggtaaaccggaaccgtaattgatgaattgctgaaggctccgtgtggccaagtctgagagataaaaactccacggagactcagtcgaggggccttcacacttttgtgagttttaagagctctaccagttcttcctggtgtatataggagaaatatttcttcgtgcttcggcagggagagaggaaaaggagccatttcgaaatacatcggagcattttgtttttcttaacaagttccgccctcaggagaaacttttaccagatcctaacttgctggaattttgtcagagcctaatctacctggggggagggaaatactcatctctagccccttccagccattctctcccacccaagggagggagggctgagaagcaatggtgacaacagttccagtccaaaggcacagacttactgaaagactgagaccctgtcatgggactacggaatgcttcctctcccttgacacctgacc

SEQ ID NO: 568555 - DNA, 578 bp, Homo sapiens
cccaaatttggagagataaatgggcaggtacatagaatcacaattctctgtatccgtggagcagaaacccacctgcagaaacctctgctggaaccagtgccagggaggtaaaccggaaccgtaattgatgaattgctgaaggctccgtgtggccaagtctgagagataaaaactccacggagactcagtcgrggggccttcacacttttgtgagttttaagagctctaccagttcttcctggtgtatataggagaaatatttcttcgtgcttcggcagggagagaggaaaaggagccatttcgaaatacatcggagcattttgtttttcttaacaagttccgccctcaggagaaacttttaccagatcctaacttgctggaattttgtcagagcctaatctacctggggggagggaaatactcatctctagccccttccagccattctctcccacccaagggagggagggctgagaagcaatggtgacaacagttccagtccaaaggcacagacttactgaaagactgagaccctgtcatgggactacggaatgcttcctctcccttgacacctgacc

SEQ ID NO: 568556 - DNA, 578 bp, Homo sapiens
cccaaatttggagagataaatgggcaggtacatagaatcacaattctctgtatccgtggagcagaaacccacctgcagaaacctctgctggaaccagtgccagggaggtaaaccggaaccgtaattgatgaattgctgaaggctccgtgtggccaagtctgagagataaaaactccacggagactcagtcgaggggccttcacacttttgtgagttttaagagctctaccagttcttcctggtgtatataggagaaatatttcttygtgcttcggcagggagagaggaaaaggagccatttcgaaatacatcggagcattttgtttttcttaacaagttccgccctcaggagaaacttttaccagatcctaacttgctggaattttgtcagagcctaatctacctggggggagggaaatactcatctctagccccttccagccattctctcccacccaagggagggagggctgagaagcaatggtgacaacagttccagtccaaaggcacagacttactgaaagactgagaccctgtcatgggactacggaatgcttcctctcccttgacacctgacc

SEQ ID NO: 568557 - DNA, 602 bp, Homo sapiens
tttatacaaaaatcaacccaagatggatcaaaaaattaartctaagaactgaaaccacagaaattctagaagataacatcagaaaaacccttctagacattgacttaggcaaagacttcatgattaagagcctaaaagcaaatgcaacaaaaacaaagataaatagatgagacttaattaaactaagcagcttctgcaaagcaaaagaaatactcagcaggataaataaacaagccacagagtgggagaaaatcttcacaatttgtatatccaacaaaggcctaatatccagaatatacaaggaagtcagacaaatcagcaagaaaaaaacaatggattgaaaattgggctaaggtcatgaatagacaattctcaaaagaagatatacaaatggctgagaaacatatgaaacaatgctcaacatcactaatgatcaggaaaatgcaaatcaaaaccacaatgcataccaccttacttctgcaagaatagccataatcaaaaaattaaaaaaataaatagacgttggcagggatgtggtgaaaagggaacacttttacactgctagtggcaatgtaaattaacacaaccactgtggaaaacag

SEQ ID NO: 568558 - DNA, 433 bp, Homo sapiens
agcagggcgtggtgacaggcccctgtagtcccactactcgggaggctaaggcaggagaatggtatgaacgcgggaggcagagcttgcagtgagccgagatggcgccactgcactccagcctgagcgactgagcaagactccgtctcaaaaaaaaaaataaaaatacaaaattagctgggagtggtggcacatgcctgtaatcccagctactagggaggctgaggcaggaaaaccgcttgaacctgggaggcggaggttgcggtgatctgagattacaccattgcactttagcctgggcaacaagagccaaactcygtctcaaaaacaaacaaacaaaaaagtcttcctcctctcctggctagatgtagatactctaccctggggacaaaattgttctcaacattgcaccttctaaggagaaaacaactgtggt

SEQ ID NO: 568559 - DNA, 332 bp, Homo sapiens
cagctacatgtttggtaatagattatatataattagactttaagacacactatattatccttcttgaaaatcattggctytttgttccagtgctttcccagcaagtcaacagataatgcagctgccctagggagcttattctttgaggaaggttgcaaagccctgggcacctggctaattaagagccatttatcattttagggttctacagtattaaaacatgccaagcattaaaagtggaatacatcctaaggaactaaacacacacatacacacacacacacacacacaaatatacacacatacacatatatacacatatacatacacac

SEQ ID NO: 568560 - DNA, 617 bp, Homo sapiens
tttatttcacctgctgtactttataacataagaatttctgactggttcttttctataattttgtctctttatgcatattccctatttcctgagacactgttcttatatttgatttgtttagacttgttttccctcagttttgagcatatttaaaagagccaatatgaagtcctgtctaataagtacagtgtctggactcccttagggatggttgcttttctttctctacttctggactgtaaattcttgtttctaggtatgtctcgtaattttttkttgttgttgttgttaaaaactggacattttaacctggcatggaggctcatgcctgtaatcccagcacttgggaggccaaggtaggtgaatcacttcagctcaggagttcaagaccagcctgagcaacatggtgaaaccctgtctctaccaaactaataaaaaaaaaaatacaaaaattagccaggcatggtggtacatgcctgtagtcccagctacttgggaggctgagatgagaagatagcttgagcctaggaggtggaggttgcagtgagctaacattgtgccactgcacttcaacccggacaacagaatgagaacctgtctcaaaaataaaacaaaac

SEQ ID NO: 568561 - DNA, 511 bp, Homo sapiens
tctctctctctctctctctcttcattttccaaacatggtagtttattctctcagactagctttttccatggggccaaaatctagcatccagcagttcagggggccattaccttcccaactttacctccagagaggagaggaatcacttaattcsagaaggaaaactctggagaattataactggtttgggaaatatgtcacctctgtgtccagggataatgggaactacaactggagccctctctagacccccatgatcgggaggctacggtgtgaaagtggctgttccccaaataaatatattgttctcaaaagacagaagaggttctaggcagaaccaaacaacagatatccactctgtaggtgtctttgtgttttacagaagaggaggcagagaatgagagagtggcaacttgtctgtgcatattcaactacatactgcaaaaaaaaaaaactaagaacatctgggaatagttacacagttttcaatctaaaagcaaagacaaaattc

SEQ ID NO: 568562 - DNA, 462 bp, Homo sapiens
acctaatcatccagagtttttattttttaataatcattatactgtgttgcctctttcacattaggtatttctttagaacagtgcttcttaaccaaaatcaccaagagagctgttttcatttttcttttcttttctttcctttycttttcttttcttttcttttcttttcttttcttttcttttcttttgaggcagagtctcattctgttgcctaggctggagtgcagtggtgcgatcttggctcactgcaaggttcatgccattctcctgcctcagcctcccaagtagctgggactacaggcgcccgccaccacgcccggctaatttttttttttttgtatttttagtagagacggggtttcaacgtgttagctaggatggtctcgatctcctgacctcatgatccgcccacttcggcctcccaaagtgctgggattataggcatgaaccaccgtgcctggc

SEQ ID NO: 568563 - DNA, 462 bp, Homo sapiens
acctaatcatccagagtttttattttttaataatcattatactgtgttgcctctttcacattaggtatttctttagaacagtgcttcttaaccaaaatcaccaagagagctgttttcatttttcttttcttttctttccttttcttttcttttcttttcttttcttttcttttcttttcttttcttttgaggcagagtctcattctgttgcctaggctggagtgcagtggtgcgatcttggctcactgcaaggttcaygccattctcctgcctcagcctcccaagtagctgggactacaggcgcccgccaccacgcccggctaatttttttttttttgtatttttagtagagacggggtttcaacgtgttagctaggatggtctcgatctcctgacctcatgatccgcccacttcggcctcccaaagtgctgggattataggcatgaaccaccgtgcctggc

SEQ ID NO: 568564 - DNA, 491 bp, Homo sapiens
aacatccaggttcttgcactgggactgactaggcaaacaccttgacccatggagagtgaagaaaagcagggtgaggcagtggtccacctgggagccaaacagagtgaacagagccaaaggaatgracagagccagaggaacagagccaaaggaatgaacagagccaaagaacagagccgaaggaacccactctcccagccaaagaaagtggtgagtgattgtgcgaccctgcccgggaagccatgcttcctcctatcgatctttgccacccgtggatcagtagatccccttgtgagcccatgccatcagggcctagggtctgatacagagagctgtgtggagtctcagcagagcacccactcaggcgcatacagagacccaggagttttacatactctggccttggggtccctggaaaggtgggagatccatctgtacataaccgtaagaaggggattaaatccaaggagtcattagcatcgttctgtgag

SEQ ID NO: 568565 - DNA, 533 bp, Homo sapiens
agtttgctgagaatgatggtttccagcttcatccatgtccctacaaaggacatgaactcatccttttttatggctgcatagtattccatggtgcatatgtgccacattttcttaatccagtctatcattgaagtataataaacaaaaaaagaaaaatgaaaaaatattttcatacctcaaaggattagtgactctaaaaaaaaaagaaaagaatttccaacctggaatttaatatccggccaaactaaacttcataagcaaagaagaaataaaatctttttgaatgcatttaggctgacatggcgatatggcaatagactacatagtgtcttaatgagagtaataaatttgtagagaagtgacaacacaaagaaaaagtgttttaggcttccaagggtggcagactgtaggaaggtatgtaaatatgggaaactaatgggagataartgttattttagtaaggtttattatgtaaatttaccttgttctgtctctgggctgagtctaagattgctgttaggcaaatggtgtaa

SEQ ID NO: 568566 - DNA, 588 bp, Homo sapiens
ctgatcaccccaccctaatcttattatgcaaatgagctttccatttrattggcaccatcttatctgcttcttactatacatgtggctgacaaagagaagggaagatggagccaccatcttgaacatgtccagtccttatttcctgctggcattcacctgtacaagctcccagcttgcttgtctatgtctgcagttcaacttcatgtgtggctctttgttagaaaatgatttggagctgttttcaattaaaaagaaaagccttactgaggactcccagacccttactatttgcctaagtgatttcttcttaactcctgtatcagctgcatggtattctatggtgtatatgtaccacattttctttatccaatctgttagcgatggacatttaggttgattccatgtctttgctattgtgaatagtgctgcaatgaacatacacgtgcatgtatctttataatagaataattaatattcctctgggcatatacccagtaataggattgcagagtcaaatgttcgttctgttttagttctttgagaaatcaccacgctgccttccacaatggttgaactaacttacactcc

SEQ ID NO: 568567 - DNA, 588 bp, Homo sapiens
ctgatcaccccaccctaatcttattatgcaaatgagctttccatttgattggcaccatcttatctgcttcttactatacatgtggctgacaaagagaagggaagatggagccaccatcttgaacatgtccagtccttatttcctgctggcattcacctgtacaagctcccagcttgcttgtctatgtctgcagttcaacttcaygtgtggctctttgttagaaaatgatttggagctgttttcaattaaaaagaaaagccttactgaggactcccagacccttactatttgcctaagtgatttcttcttaactcctgtatcagctgcatggtattctatggtgtatatgtaccacattttctttatccaatctgttagcgatggacatttaggttgattccatgtctttgctattgtgaatagtgctgcaatgaacatacacgtgcatgtatctttataatagaataattaatattcctctgggcatatacccagtaataggattgcagagtcaaatgttcgttctgttttagttctttgagaaatcaccacgctgccttccacaatggttgaactaacttacactcc

SEQ ID NO: 568568 - DNA, 588 bp, Homo sapiens
ctgatcaccccaccctaatcttattatgcaaatgagctttccatttgattggcaccatcttatctgcttcttactatacatgtggctgacaaagagaagggaagatggagccaccatcttgaacatgtccagtccttatttcctgctggcattcacctgtacaagctcccagcttgcttgtctatgtctgcagttcaacttcatrtgtggctctttgttagaaaatgatttggagctgttttcaattaaaaagaaaagccttactgaggactcccagacccttactatttgcctaagtgatttcttcttaactcctgtatcagctgcatggtattctatggtgtatatgtaccacattttctttatccaatctgttagcgatggacatttaggttgattccatgtctttgctattgtgaatagtgctgcaatgaacatacacgtgcatgtatctttataatagaataattaatattcctctgggcatatacccagtaataggattgcagagtcaaatgttcgttctgttttagttctttgagaaatcaccacgctgccttccacaatggttgaactaacttacactcc

SEQ ID NO: 568569 - DNA, 588 bp, Homo sapiens
ctgatcaccccaccctaatcttattatgcaaatgagctttccatttgattggcaccatcttatctgcttcttactatacatgtggctgacaaagagaagggaagatggagccaccatcttgaacatgtccagtccttatttcctgctggcattcacctgtacaagctcccagcttgcttgtctatgtctgcagttcaacttcatgtgtggctctttgttagaaaatgatttggagctgttttcaattaaaaagaaaagccttactgaggactcccagacccttactatttgcctaagtgatttcttcttaactcctgtatcagctgcatggtattctatggtgtatatgtaccacattttctttatccaatctgttagygatggacatttaggttgattccatgtctttgctattgtgaatagtgctgcaatgaacatacacgtgcatgtatctttataatagaataattaatattcctctgggcatatacccagtaataggattgcagagtcaaatgttcgttctgttttagttctttgagaaatcaccacgctgccttccacaatggttgaactaacttacactcc

SEQ ID NO: 568570 - DNA, 536 bp, Homo sapiens
ggatccgttgctggtgagctagtgttatttttggggggtgttaaagaattttgtttgtcatattatgagagatgattttctagttccttctcatttggataggctctgtcatagggaaggtctagggctccaggctgttgttcgttttcttttgttccacgtgtgttgccttgatgtagtactctcccccttttcctagggatgtggcttcctgagagtcaarctatagtgattatctctcttctggatctagccacccaacaagtctaccagtctttgggctggtactgggggttgtctgcacagagtcctgtgatgtgaactgtctgtgggtctctcaggcatggataccagcacttgctcccatggaggtggcaaaagggtgaaatggattctgtgaggatccttacccttggttgactagtgcattatttttgtgctgattggcctcctgccaggaggtggtgctttcaagagagcatcatcaactgtgctagtatggggggtaacagatggtgggtagggccctagaattc

SEQ ID NO: 568571 - DNA, 415 bp, Homo sapiens
agaaccattcctgcaaaaagaaaatgatgggtgctattctgaaataattgcaaatcatagaagaaatataataacttttccgtattgcacagattttctgaccagcagggcaaggaggtcacttttacttggatccaaattatatagccaataaaaacagggagcataggcatattcagtaagagatacygatatctccttattaaaaactctaaaatctacacagaattaaagaaagagcattcattatttttaaggtgacaatcacatggagaatacaatattctcttcacgggtgctaaaaatcgatttaaaatataaacaatatagttattttagtggtctttataactaataacaaaaattatagaaaaaatggaagaaataaaaagactggtcatggtacaagttataa

SEQ ID NO: 568572 - DNA, 555 bp, Homo sapiens
tttttttattatattttgagacattttttatgtgaacatatatcacattttgtcatgtatgttgatgtgtaaatggtttaaagtataagcactttctttgtatttaagtcaaataatatttcttcaataaagacaaactaaatcatcatctttgtctaycaaggcaccaattttcctcaaattgttgacataaaaaatgacaatggtgttaatcaagaaaaccctaggtctatgcaaaaagcccaaataaatgggtaatgtgctaaacaaaagttgattaaactaaactcttaagagagttagatatagatgattagacagaacatgccaaaatgactaaggtactatgatacattctttttaattttttttatttccataggttattggggaacacgtggtgtttcattacacgagtaagttctttggcggtgatttgtgaaattttggtgtacccatcacccaaggagtacacactgcacccaaattgtgatcttttatccctcaccctcttcccatcctttccctctgagtctacaaagcccattgtgtttt

SEQ ID NO: 568573 - DNA, 555 bp, Homo sapiens
tttttttattatattttgagacattttttatgtgaacatatatcacattttgtcatgtatgttgatgtgtaaatggtttaaagtataagcactttctttgtatttaagtcaaataatatttcttcaataaagacaaactaaatcatcatctttgtctatmaaggcaccaattttcctcaaattgttgacataaaaaatgacaatggtgttaatcaagaaaaccctaggtctatgcaaaaagcccaaataaatgggtaatgtgctaaacaaaagttgattaaactaaactcttaagagagttagatatagatgattagacagaacatgccaaaatgactaaggtactatgatacattctttttaattttttttatttccataggttattggggaacacgtggtgtttcattacacgagtaagttctttggcggtgatttgtgaaattttggtgtacccatcacccaaggagtacacactgcacccaaattgtgatcttttatccctcaccctcttcccatcctttccctctgagtctacaaagcccattgtgtttt

SEQ ID NO: 568574 - DNA, 430 bp, Homo sapiens
atagaaataaatccagagagcattagaaaatggaattcttagacatgggcttttattcaaaaagataatatcaaaaattttagcaggcaacaggaaattataaaattgcatcaaatggaaactctaaaactcaactataaagtaactgaaatgaacagtttaactgcattttagacacaactgaaaagtgaagtggaagatctcagtgagataactacaatgatgcctggagagatagaaaaatggaatgcaaattccaccagagaacagaaagagagaatgcttactagtgcattctatgaggctaaaatagtcttratatcaatacccaacaagagcattattggaaagaaaattataagccagtctctctcatgaacatagatgcagaaatcttaagtaaacaaaatctactgatttatgagaagga

SEQ ID NO: 568575 - DNA, 550 bp, Homo sapiens
agacggccaggatggttggcctagagttggcaagaagaacaacaatagaaaattaggggttgggcatggtggctcgtgcctttaatcccagcactttgggaggccaaggtgggaggatcacttgaggccaggagtttgagaccagcctggtcaacatgacgaaactccatctctacttaaattacaaaaaattagctgggtgtcttggcgcatgcttgtaattccaactattcaggaggctgaggcagagaatcgcttgaacctgggagtcagaggctgcagtgagccaagatcgtgccactgcactccagcctgggagacagagtaagactacatttcaaaacaaaaaaaaaaagaaaaagagaagaaagraaagaaagaaagaaaattagggtgagaggaattcagaaaccagatcagaggggatctattgtctataaataaaccattgattagccagacatggtgggacatgcctgtaatcccagatactcgggaggctgaggcataagaatcacttgaacccaggaggtggtggctgcagtgaacc

SEQ ID NO: 568576 - DNA, 628 bp, Homo sapiens
actttattagaacactttttttttagtttaaatgattaatttctcatcatatagtaagtgaaaaatcatgggatttagattttaaagacataactttgagttccagttttgctacttattagttgtctgatcttgggtaagttgctctatcctgtttgcctgagtttcttcttctgcaacatgtaaatcacatttaccacatataatggtgagtttcaaatgaggcaattcctgtaaaaccttccagcaaatgttctataaacatcttatttgtattgtgtaattataacttcagtagaagttttatatccatcacaaattagtattaattttatcaatttaaaattaagttaaacaacctagagaatttacatagtatactgtggcagccattaatttacataactatcaaataatgctttttaataaacttgaatttttcttagtcctctagaatctattacaaacaaaagattacaaaaagcctatcaaaatattagataataatctcacgaaaactcacaaatacctatttttacagtgtccatggtaaattttatttttcaattattkatgctaatgtttatagttacagataccacatattttttatttttacttattcatt

SEQ ID NO: 568577 - DNA, 644 bp, Homo sapiens
ggttggagaataattagaactgagaagagtatggggcttttttgggagatgataaaaatgttctaaaattgattgcagagataatcacacaactctttgaatatactaaaaatgatcaaattgtacattttcaatgttacgtgaatatctcaatggagctgtaattttaaaaagcaaaaagatacatacagcattaatttataatattttaagtcaatgtattcaaaacgttrtttcgacatagtatcaagaatttaaaattatttttgagatagttacattcttttcttaaaatctagtgtgcattttacatttgcaacacatctccatacagatgctaaattttcattggaaatacttactatatagttagatttcataaaatttaccattgaaagagtaaattcatacgcacaagttgttccaaaaatattttaaagtcttccaacagctgaattgagtagtgttagtgaggtagtttctagatatagctgtagatataaatgggtaaatatagttattcagcacagatacatactcagagtatggtatgttaaaatttaactcctactgtgaaaatggaggtcattacgttaagtaaataagccaggcacagaaagacaaatatcacatgttcttactca

SEQ ID NO: 568578 - DNA, 610 bp, Homo sapiens
gggaggctgaagtgggaggatcgcttgagcctgggaggtcaaggttgcaatgagctatgattatgccacttgcactccagcctgggcaacagagcgggacactgtctcaaatgaagaaaaaaaaagaaaaaaatgatgataataatattaaggaaagacaaaaacaaagaatcctaccaagtctcttggattccagaaccaatgttaaaaaaatcatgaaaccaaagtaaactactgctatcctgaaacaatgataaataatccacagatcataaaaycagggactctggagcatgtacattaatataattgtatgtcccttagactgaagttctatcaaagcttaatgaccaaacaaattagctattggcattattttgcctccactaaaacctaagcagtagcagaagtacagatccacaattctaaaaacttcatcatgcgggctccttttataatagcaggtggttgtgattttcttgtttctcgtttccttttctctatcctttgggggagccatctgtaagtgtttggtttcaagtttcaaaaacaatctccatgaccttgaacaatgggttaaaagggttgtccacatgtgaactgaaaaagg

SEQ ID NO: 568579 - DNA, 613 bp, Homo sapiens
tgtggcttagatagaaggaagtccttcctgccagcatgaaaggaattggtcagtcaggcaaaggagtctgacccaaagggaaaagctgccacaaagagtgactttcatccttgggctaagaagcaggggcccaatggggcaacttgtcacattcaataaggattcttggtcagcccaaccatgctctccaagcatccaggcatgaatccccacagggcaaggcagcagagaggagcaacagtgagcatgatgggttayctattctcccagctccccacagcccactgactgcactcagctgagtgcaggcaccaacttcttgcatctgagtttttgcagctgctgttggaatctctctaacacagagcttctcaactgggaaccattttgctccccaaggagcatctgacaatgtctgtggacatttttggtgatcacaaattgggaatgggggctggacagggtggttcatgcctgtaatcccagcactttgggaggccaaggcaggtggatcacttgaggtcaggagtttgagaccagcctggccaacatggcgaaattgcatctctacaaaaaatacaaaaattagtttggcagccaagatggccaaata

SEQ ID NO: 568580 - DNA, 613 bp, Homo sapiens
tgtggcttagatagaaggaagtccttcctgccagcatgaaaggaattggtcagtcaggcaaaggagtctgacccaaagggaaaagctgccacaaagagtgactttcatccttgggctaagaagcaggggcccaatggggcaacttgtcacattcaataaggattcttggtcagcccaaccatgctctccaagcatccaggcatgaatccccacagggcaaggcagcagagaggagcaacagtgagcatgatgggttacctattctcccagctccccacagcccactgactgcactcagctgagtgcaggcaccaacttcttgcatctgagtttttgcagctgctgttggaatctctctaacacagagcttctcaactgggaaccattttgctccccaaggagcatctgacaatgtctgtggacatttttggtgatcacaaattgggaatgggggctggamagggtggttcatgcctgtaatcccagcactttgggaggccaaggcaggtggatcacttgaggtcaggagtttgagaccagcctggccaacatggcgaaattgcatctctacaaaaaatacaaaaattagtttggcagccaagatggccaaata

SEQ ID NO: 568581 - DNA, 613 bp, Homo sapiens
tgtggcttagatagaaggaagtccttcctgccagcatgaaaggaattggtcagtcaggcaaaggagtctgacccaaagggaaaagctgccacaaagagtgactttcatccttgggctaagaagcaggggcccaatggggcaacttgtcacattcaataaggattcttggtcagcccaaccatgctctccaagcatccaggcatgaatccccacagggcaaggcagcagagaggagcaacagtgagcatgatgggttacctattctcccagctccccacagcccactgactgcactcagctgagtgcaggcaccaacttcttgcatctgagtttttgcagctgctgttggaatctctctaacacagagcttctcaactgggaaccattttgctccccaaggagcatctgacaatgtctgtggacatttttggtgatcacaaattgggaatgggggctggacagggtggytcatgcctgtaatcccagcactttgggaggccaaggcaggtggatcacttgaggtcaggagtttgagaccagcctggccaacatggcgaaattgcatctctacaaaaaatacaaaaattagtttggcagccaagatggccaaata

SEQ ID NO: 568582 - DNA, 487 bp, Homo sapiens
agaagccgtggaggagagttcacgaagtagggagcaggcaattgtgtctaatgaagtgcagaggttacatgagtcaaaggaaaactgattggtgacacaggagtccttggcaagaactgtctgcatagtgagataaggaagccacctccaacaattaaagaaacactttatctgggtcagaaagaagtgaccagtgtagataacttaagtttcacaatgaagagatgggmagatgtaccacaggggctcagtttatcatttctactttaaaagtgttatatttgatggactcacgggtattctgtttttctttttggaaaaaaatttctgaactaatgtgagagctctccaattgaactttaagattaatgtcaaagtggccaggcactgtggcttatgcccataatcccagcactttgagaggccaaggagtttgagaccagcctgggcagcatgggaaaaccctgtctctacaaaaaatacaaaa

SEQ ID NO: 568583 - DNA, 639 bp, Homo sapiens
ttattcagtgataaaaagaagtgcacaatcaacccgtgaaaagacatggagaaacattaaatgcatattgctaagtgaaataagccaatctgaaaagactatatactatatgattccaaatatacgacattctgaaaagcgcaaaactatggagacagtaaaaagatagcagttgcctgggatataggggggaggagagagaaaagaataaaccagagccaggagattttcaggacagtgaaagtattctgtatgatactataatggtagatacatatagttagacatttgtccaaacccactgaatgtacagtaccaagagtgaccycaatgtaaacaataaaccttagtttctcataatgtatctgtactgactcagtaattacttcaaatgtatcacactaatatcagacgttaataacaggggaaactaggagaacaggtaggtaggaactctctactttctgctagattttcttgtaaacctaaaactactaaaaaataataaagtctattcattaaaaaatgtaacatagtcagactccatctctacaaaaaatgaaaagaaaaacagccaagctgaggcaggaggattgcttgagcccaggaggttgaggctactgtgagctacgattgcac

SEQ ID NO: 568584 - DNA, 532 bp, Homo sapiens
agtctcaggcaggtcttcatagyggtatgaaaatggactaatacaaatacaaacaggtgaagttaattttaataataatgttatttaaccagatatattcaaaatatcacttcaacatggaatcaatataaaatattaatgaaatatcttgtattcttttatcacattaagccctcaaaatcaggtttatgtttcaattcagctacatttcaggtgctcattagctacatgtggctggtgtctgctgaactgagatcatagctctgagagctgcctctgtaagaagcagccaggatgaggtggtatgaagctttgcattgggctctatagtgtccctgggtagtgagtctaatctctgacctctcctacttttccctcatgagggcattttccttgtccacagaaatgggtcagatatcatccaatgccttcctgaccaggcttcacaggagacctgctggttggaggagaagtttggaagataccagatgtgtactccacctgtcatctgccaaacctgcaggtagcctga

SEQ ID NO: 568585 - DNA, 483 bp, Homo sapiens
gtaggagtttctctagtgttaaytaaagctattcaagctaccaagattcaaatcctggctctagccttcagtgtctaccattcaatttttcacaagttacaaaactcagtgagcctcaatttccccatcttgtactatgaaaacagtaatatgcacctcaaaaggctattgtgacggcttaatgcaataaagtttgcaaatgtttgtgtcacacaggggaggtgtaataatttatttttaattccactagaaaccagccaaaagtcactctttcctatactgagtaagaatagaaacccagtaagatttttgtcaaataggttgcagagatgaaaaactgaaataagaactgacttcaaatttgtctttaaattgcagcaaatagattagacatgatttatccagataaaaattgcctaaactgatttgaagattgtgacaaatgtcttcttctacattgaccctaaattcaagttgtaggca

SEQ ID NO: 568586 - DNA, 570 bp, Homo sapiens
gaaaaagttcacaaatacatggaaattaaacaacatgctcttaacaaccaatgggtcaaagaagaaatgaagaggaaaattaaatcttgggataaaatggaaacacaacataccaacactcacagatgcatcaaaagcagttaagagagaagtttatagcaataaatgcatatgtataaagaagaaagatctcaaataacctaatttgataccacaaggagctagaraaagaacaaactaagtccaaagttagaagaaggagagagataataaaaattagtgttaccaaaatgccaagggtttagtctaggttctgctgcttattgcacagaaaaccaatcacagagacgatgagtactgccagggaagaaggctgttttgggtgctgtgtctgaggagaacagatcaatctcaaatccatctctttcatgcactaaaattaggagtttatatagcagaaaagaaatgtaactatgtgtgggaaagcaagaattagggaggaataagaagaaggacttggtcaacaggtaatcaatcaggcagtcatgacaggcgaagggttagtgtctc

SEQ ID NO: 568587 - DNA, 424 bp, Homo sapiens
ggttttctatatataagatcatgctacctgacaacagagacaatattacttctttctgtccatgtgcaygccttttatttcttttgcttgtctaattgctctggctaggacttctagtactttgttgaatagaagtggtgagtgtgtctggtttgtgatcttagagaaaaagctttcaacttttcactgttgtatataatgttagctgtgggcttatcatatgtgatctttttttgtgttgagatacattccttctatgcctaacttgctgagtttttaatatgaaagaatgaactttgtaaaatgctttttctgacatctactcagatgctgctatggtttttgttaatacagtttatcacatgtattgatttgtgtatattgaactatccttatttctcaggaataaatcccacttgatcat

SEQ ID NO: 568588 - DNA, 220 bp, Homo sapiens
caactggctaaccagcatatgcaaaaatgatcaacatcactaatgatcagagaaatgcaaatcaaaaccacaatgcaataccacctcactcctgcaacaatggccataataaaaaaaaatagatgttggwgtggatggggcaaaaagggaacacttttatactgttggtgggaatgtaaactagtacaaccactatggaaaacattgtggagattcctta

SEQ ID NO: 568589 - DNA, 567 bp, Homo sapiens
aagtgggctaaggagatgaacggacaattctgaaaagaagatatacaactggctaaccagcatatgcaaaaatgatcaacatcactaatgatcagagaaatgcaaatcaaaaccacaatgcaataccacctcactcctgcaacaatggccataataaaaaaaaatagatgttggagtggatggggcaaaaagggaacacttttatactgttggtgggaatgtaaactagtacaaccactatggaaaacattgtggagattccttaactaaaagtagatctactgattgatacagcaatcccactagtaggtatctactcagaggaaaagaagtcattatacaaataagatatttgcacacatgtttatggcagcacaattcgcaattacaaaaatatggaaccagatgcccattaatcaacgagtggataaagaaaatgtgacatatatatatatatatatacataccatggaacactatactccgccataaaaaggaacaaaataatggcatttgcagcaacctggatggaattggagacyattattctaagtgaagtaactcaga

SEQ ID NO: 568590 - DNA, 366 bp, Homo sapiens
tgttttgtttttgtagcccagaggtcctttatttttttttttttttaacacctatgccatgaattcatagggaataggttccagcagctcaggctccttcccattggttctcacaaagtgtgctkctctgggtggagcaggctggcgctttagttgaacccaggtacctttctctttggcttctttctttttctgatcattttccttcacacgtttcaggaagctatctcggctcttagagtgcttaatgtgctcaatacgcacattaattctcttggcaagaatcttgcccttaacttgtttgtttacaacaatgccaacagcatgctgggtaacattgtagactcttccagttttgccatggta

SEQ ID NO: 568591 - DNA, 612 bp, Homo sapiens
ggggtgggaagattgcttgagtccaggaggtagaggttgcatctatttatgtgatatctcttttttctactaaactatgaatcctataatggcttgggctttgtatcttcagcagttggaattgtatctggcatatggtaagcactcaatattcattgaatgaatgaataaatgagtaggttggagattaactgcagaatgcattaaaggtttggcatgagtttggaattcaaatgaacagtcgcttgaatgtacaaaggtggtggctatttgtgggaggaattgtattttataagattgaaatcggttatacattttggtgcctgatcataggattgaaagtttaaggttgtaaatcacagcactttgggaggccaaggtgggtggatcgcttgagcccaggagtttgagaccagcctaggccagctagcaaaactctgcctctaccaaaaaagcaaaaacaaaaacaaaaaacccaaaaattagccaggtgagtggcatgcacctataatctcagctactccaaaggctgrggtgggaagattgcttgagtccaggaggtagagtttgcagtaatccatgatcaagccaccgcactccagcccgggcaag

SEQ ID NO: 568592 - DNA, 423 bp, Homo sapiens
gtaaagacaaaaccaacctgagatccrtaaattcagttaagaaagtgacaaggttatagtgaagatatgtaaaagggcaagtcaaattctgcttgtgtgctcacagacctgtaatgctgtgtgacgggattcagtgccaagccagttttagcagtctttctttttttccttaccatgttcacagcctcgatcgctaccaacagaggtaatacaaggcaatagaggcaagaggcacaaccaataaaagggtagtaggcccttggttgggttttcaagttacatatctgctctggtttatgggctttctatgagtatatgctatttctttttctttgccaagtcacctgtttctcaagtcttggcttaggacatgtggtaggcagggaagcatgccactggctcacagggaactgtgtttgttac

SEQ ID NO: 568593 - DNA, 601 bp, Homo sapiens
attgaaaaaaaagataatgtccagtgcagtrtaggaacaaaaaaggcaaactaaaatatattgcacaatgaagactggggacaaaatcatgagtatgtttgcaggtcttcataaccctctcggatgcacatagttcttcaccatggacatgtccccattataacctcttttaatttggcagggagctgctcctttgcctttccttcatattttgggggtcaatccagatgaatgagagaaaataaaagagggggaagagaagagaaggaggatggtatgcccctctgtacttggagaatcactagcggtggtctcagtcacagggagacagactggttccgctcatctctgatcctgccccagtaaattacttgcagatatctttttggtagttttcacaggatgctaataaactgatcagcctagtatgctagagatatttaagttctctttccaaatatcactgcatacatacctaaataacagaccaatcattgatttccagaaacctgtctggaaggcattctacattctttcctttgcttctttttatgggccacagaaagaacacgatagttcttgaatacatttcccagattgt

SEQ ID NO: 568594 - DNA, 586 bp, Homo sapiens
agtagattcatatcaaagtctctggcaacagagtactgctcagtatttcaaagataaaatatgcattcttatgcatgtatgttttctagtttttcaaatggaaattgagccatatagataaagcatgcaaacattgagactctggaattacytattgaaaagaatgattgataaagtggttattgtggttgcttcactcttcccacctccactttggaagatagacagcctgtacctcaaagagttttagaacttcctgaccttctgtaagtaaaaatgtcagttcccaaggccagagaaataaagccacagggtctttttccataaaataagctgcattccctgggtctcaatatctttagtcttctataggaaactgaaagaatttccactttgctttgactttccctgctgtggtcccttcctcatttagcatactttgttctttatgcataattggaaattaattttctaattaggttcttcacatttatgaagttgtttgatggggtgtcggttcttataacatggcctaaaggctaaaggagaggtaataattctttttttctggctttgcccctaattc

SEQ ID NO: 568595 - DNA, 622 bp, Homo sapiens
ggggtgtcggttcttataacatggcctaaaggctaaaggagaggtaataattctttttttctggctttgcccctaattcagctaaggttcttaggaaatatatttaacttttatgagatcccygtaatacatctttaatgctgatctacctttgaaaggttgttagaagagtgctaactagggctttaagactcattatgatacagttgattttatttgtaatagttgctgaaacaaaatgaagtcatttctttggcaacatgaagggtatttagataactacaagtaacaacaactgcagaaaatacaatcagatgatactgggagacaaaataacattgaactgatacttgagaagcagaagtgaccctgaagattaaaaggcgagtatttttactgtgaatatacaagtagaactaaatcaggtatgagctgtatgagtccgtcacctggatgttctgtgacttgttatatagaacttgagtctatggttcaacactctctgatctgtgaaggcaagccagtataaaccaatgcatgtaaacagtctgtttcttgatttcagtataaaagttgaaagataaagctaaccattagacttggaagtaaaaactaaattctg

SEQ ID NO: 568596 - DNA, 558 bp, Homo sapiens
cactgcactccaacctgggcgacagagctagattctgcctcaaaaaaaaaaaaaaagaagaaaagaaaaaaatgcagaggcatcaagagataactcttcttccattaggacttctgcattcggtttggaagaaaggttttctccagcaatcagttcaccttcgggggacacaaaacgtggatagaactggaggtcccaagagcacctgtaggggacagttcagagcctggcttttctaaatmcggctgcttatgcgaaaagttcatgagctcagtccttcagttttcagtcctcacacacatggagttatgatgatttctcctggcccaaatactgacactaggacaagagttgctggggcaaatttgccataaacacccatacatatttcttttcttttcttttcttttcttttttttttttttttttgagacaaagtttttctcagttgcccaggctagagtgcagtggcacaatctgagctcactgcaatctccacctcctagtttcaagtgattctcctgcctcagcctcctgagtagctgggactacaaggca

SEQ ID NO: 568597 - DNA, 595 bp, Homo sapiens
atatatgatatatacatatatcatatatgatatatacatatatagtatgttgtatgtacatatataatatacgtatatataatataaatatatagtatgttatatatacatatgtaatayacatatatgtacttgatataatatatagtatatataagtatataatatatgcatatattatatatagcatattatatatacatatattatatacagcatgttatatatacatatattatatataacatattatatatacaaatattatatatatacacacacacatacagacaaagtggtgaagttttccatagaactccattgtgtggatataccataattaattcaaattattccttgttgatgtatatttggttatttccagtttttgccattaccaatagttgttggagttaagacagaaacttggagaagggaggaagatgagcctgggagctaagaatggaacaaaacttataaggcttagaaggtcagtaaaaagttttgacatttttttttccacgtcttttttttaatttattatactttaagttttaggttacatgtgcacaatgtgcaggtttgttacatatgt

SEQ ID NO: 568598 - DNA, 595 bp, Homo sapiens
atatatgatatatacatatatcatatatgatatatacatatatagtatgttgtatgtacatatataatatacgtatatataatataaatatatagtatgttatatatacatatgtaatacacatatatgtacttgatataatatatagtatatataagtatataatatatgcatatattatatatagcatattatatatacatatattatatacagcatgttatatatacatatattatatatarcatattatatatacaaatattatatatatacacacacacatacagacaaagtggtgaagttttccatagaactccattgtgtggatataccataattaattcaaattattccttgttgatgtatatttggttatttccagtttttgccattaccaatagttgttggagttaagacagaaacttggagaagggaggaagatgagcctgggagctaagaatggaacaaaacttataaggcttagaaggtcagtaaaaagttttgacatttttttttccacgtcttttttttaatttattatactttaagttttaggttacatgtgcacaatgtgcaggtttgttacatatgt

SEQ ID NO: 568599 - DNA, 545 bp, Homo sapiens
tatgtactgttaatggtggaagctgtttttaatatcaggatttatttgagaatcactcttgatgtggtgactttttcttactgctctttgactcttgaaaatctttaagtcaatccaatggagttgaatctttttcacttcattaacatacaaataccagacctatcagagctggcaaattcctgtgacatacctatgcgtcttaacactccatgtcatatgtaatatgaggtcaatggatgtgycgctttactaaatctgtaacaaattttaatgctaggcctgtccgtgaaatcactttctgtgtttttgtttgtctcttccaccgttttcacatattctgaacccaatattgaggattttcagagcacaggatgagtctttacatttccattagcaccttgcacagtactagtcatttaatagtttcttaaaaacaaatgataattaataattaattgttgacagaatcagtttcatggacaacaaaaattgaattcatgttacacatttaattttcaaatccttcaaattcatgggtgtga

SEQ ID NO: 568600 - DNA, 333 bp, Homo sapiens
gtacttgctgtaaatttttatttaaataaataattctgagatgctgtgggaaggatttctgccctcacttgagtgtaactaagatttcttttaactcaaaagactggcattttttttacataagagattgacttatacttgttcagctctaacatttgaaaaagyaatgagtggtcgtttacttgaatgtttatcttccatacctccttaaagatctggcctctgcggcggccgggcgtggtggctcacacctgtaatcccagcactttgggaggccggggcgggcagatcacgatgtcaggagatcgagaccatcctggctaacaccatgaa

SEQ ID NO: 568601 - DNA, 427 bp, Homo sapiens
ttattggccatttggacttttgaatttttgtgaaaattatgagagtaatattgtcttgttgtaacaaattcaaattaggagcctaaactatgcatcttaacggatagggattcaaaatagatttctcacttgaagtcaggagttcgagaccagcctagccaacaagacgaaatgtcgtctctgttaaaaatacaaaaattagccagctgttgtggcaggcacctgtaatcccatctactcaggaggctgaggccaggagaatcrcttgaacctggtggcgggggtggggggcagatagattgcaatgagctgagatcgcaccactgcactccagcctgggctacagagagactccgtctaaaaaataaataaataaataaatagatttccgtctcaaaccatgatagactaataaaaactagactta

SEQ ID NO: 568602 - DNA, 413 bp, Homo sapiens
aagtcaaattgtccctgtttgcagacgacatgattgtatatctagaaaaccccattgtctcagcccaaaatctccttaagctgataagcaacttcagcaaagtgtcaggatacaaaatcaatgcacaaaaatcacaagcattcttatagaccaataacagacaaacagggatwtttttaaagatagtttgtgttcagtatcattctcctcatcctgaaaaaataagtggggatgctaatctaagccctttatatttataaactcatttaatccttacaaaactttttgagattggtgacactaatttgtcactttatagaaaatgaaactgaggcacaaggattttgtctggcatataataggtgctgagactgaagaacaactgtaatttgtaaaaccgggatttttacatg

SEQ ID NO: 568603 - DNA, 644 bp, Homo sapiens
ggttttcaccatgttgtccaggctggtctcaaactcctgggctcaagcgatatgcgattacaagcatgaactcccacgcccaggccagaggcatttttaagtacacacaacaggctaagataacagtgtcctgcctaatcagggtattgactacacctccagcccactacaccagcacattttgtatttcatcccctttttcccaaagctctacacacaattaaaacaaacaaacaaacaaacagcaacaacaacaacaaaaaacaaccaaccatggtattttgaataatctgagcttttcccagttcagggattttgttgtttttctcactactatagtgatctttcccagagcctttggttggctggctccctgtcactgtttttttatcttcagatagactgctacctcttcagaagagtctttcctggtgatgttctttggtcattccyttcagttattttctaattccacatactagttatatccttattattgatggtcacaaattatactttaaaaattttgttttggcttttaccttatgttttctctaaaagcttgtaattcttctcaaggcacaaaatatgtttactcactggtgctgtaaacccaataattagaatactcccagtcacctagt

SEQ ID NO: 568604 - DNA, 614 bp, Homo sapiens
cacccgcatgtttatagcagcacaattcacaattgcaaaatcacagaaccaacccaaatgcccatcaatcaatgaatggataaagaaactcacatatatatatatatatatatatatatatatatatatatatatatatatatgaaatatgatggaatgctatgcaaccataaaaaggaatgacttaacagcatttgaggtggcctggattccagattagactggagattattattctaagtgaagtaactcargattggaaaaccaaacatcgtatgttctcactgatatgtgggagctaagctatgacgattcaaaggcataagaatgatacaatggactttgtgtatttggggagaagagtgaaggagggcaagggataaaacacaaccaatatggttgtgttgactgtgtacaaaaatctcacaaatttaccactaaagaaattactcatgtaaccaaataccaccagtaccacctgtaccccaataacttatggacaaataaaaaataaaactatccaggaatttctgcatatttgaaaattaagtaagtcactttttaagaacctattggtaaaataaattacaatggaaattataaaatattttgag

SEQ ID NO: 568605 - DNA, 564 bp, Homo sapiens
gcgactgagggagaaatcagacctaggacactgcatatggctgaccttaggascaccttcgcagctgcagcaggctgtgatggggaaggcacgttcctgcctaagcagcatccgaaactcctgtaataggacccattctggtggacccgagagtgaaaatgagagtgaaagtgtgccgcaagggaggaaatgggagggaaagcatcgaaaccaactcctttggagtgcgtgataaagaattttaaaaaggatttagaggtgattatgggatgaaactggatgctcaaaagttaaggacatactgtgagatagactggcctgctttcaatgtgggttggccctctgaaggtacaatagacatggaaataattggccgtgtgtttaatgtggtcactggagctggaggataaccaggatacccagaccagttctcctatgtagactctaggctcaatgtggcacaaactcgccccaagtggctacaggcctgcctagagggattttacaaggcattagtggctcaggcagcccaatcaaaggaagaaagaaaaaacagaaatagga

SEQ ID NO: 568606 - DNA, 564 bp, Homo sapiens
gcgactgagggagaaatcagacctaggacactgcatatggctgaccttaggagcaccttcgcagctgcagcaggctgtgatggggaaggcacgttcctgcctaagcagcatccgaaactcytgtaataggacccattctggtggacccgagagtgaaaatgagagtgaaagtgtgccgcaagggaggaaatgggagggaaagcatcgaaaccaactcctttggagtgcgtgataaagaattttaaaaaggatttagaggtgattatgggatgaaactggatgctcaaaagttaaggacatactgtgagatagactggcctgctttcaatgtgggttggccctctgaaggtacaatagacatggaaataattggccgtgtgtttaatgtggtcactggagctggaggataaccaggatacccagaccagttctcctatgtagactctaggctcaatgtggcacaaactcgccccaagtggctacaggcctgcctagagggattttacaaggcattagtggctcaggcagcccaatcaaaggaagaaagaaaaaacagaaatagga

SEQ ID NO: 568607 - DNA, 564 bp, Homo sapiens
gcgactgagggagaaatcagacctaggacactgcatatggctgaccttaggagcaccttcgcagctgcagcaggctgtgatggggaaggcacgttcctgcctaagcagcatccgaaactcctgtaataggacccattctggtggacccgagagtgaaaatgagagtgaaagtgtgccgcaagggaggaaatgrgagggaaagcatcgaaaccaactcctttggagtgcgtgataaagaattttaaaaaggatttagaggtgattatgggatgaaactggatgctcaaaagttaaggacatactgtgagatagactggcctgctttcaatgtgggttggccctctgaaggtacaatagacatggaaataattggccgtgtgtttaatgtggtcactggagctggaggataaccaggatacccagaccagttctcctatgtagactctaggctcaatgtggcacaaactcgccccaagtggctacaggcctgcctagagggattttacaaggcattagtggctcaggcagcccaatcaaaggaagaaagaaaaaacagaaatagga

SEQ ID NO: 568608 - DNA, 575 bp, Homo sapiens
ttagctcttgggccctatctgggaaagggtcatcttttaatcaccattaaatcactgaagtcatcagtttattcaaagtactctgcacaaaattagcattctttagtggttgtgaaataaatagactttaaacttatcattaatattcccaatggtactatgggggaggcaaaattttctrtcttcttagtggtttttttttttttggctagggctaaggattaaactgtcatatgacagattaacaagaggaaagcatacaaatttatttaatacatgttttatgtggcacaggagccctcataaagtaataaaaaatccccaaacacagttagagctgaacatttatatactaatctggacaaaacatttatatactgcgtggacaaagagcagtaaattgtgaaaatggaacaaggcaagggggcttagactacagtagttaatcatcaagaagtgacaaaaaaaaataagggttagttaataagatttgtttaagcagatttctcccagctttagctctctgtctctggtgatcagaatgcactccttccttcagactcagtgagcacata

SEQ ID NO: 568609 - DNA, 575 bp, Homo sapiens
ttagctcttgggccctatctgggaaagggtcatcttttaatcaccattaaatcactgaagtcatcagtttattcaaagtactctgcacaaaattagcattctttagtggttgtgaaataaatagactttaaacttatcattaatattcccaatggtactatgggggaggcaaaattttctatcttcttagtggtttttttttttttggctagggctaaggattaaactgtcatatgacagattaacaagaggaaagcatacaaatttatttaatacatgttttatgtggcacaggagccctcataaagtaataaaaaatccccaaacacagttagagctgaacatttatatactaatctggacaaaacatttatatactgygtggacaaagagcagtaaattgtgaaaatggaacaaggcaagggggcttagactacagtagttaatcatcaagaagtgacaaaaaaaaataagggttagttaataagatttgtttaagcagatttctcccagctttagctctctgtctctggtgatcagaatgcactccttccttcagactcagtgagcacata

SEQ ID NO: 568610 - DNA, 498 bp, Homo sapiens
tataataggggctactgtgtggtggaatctgagatactctacaaccattttttaggatccattcagtctgttcaacggtcaggctttttctctaccattttccagggcaactcgaatattcaaggttttctgaatgttgcctatcactttttctgtgtttctaagagtcattccatcagtgagttaggcccatcccctgatatccttgctgggctgttaaattccatgtcctaagaaaataccccaatcatgaacccttatccaatctgatattccaaacagcttgatcaagcactctaaaawtttactcctagaaatacttccttgggtcctgcggctacaagccacttaattcttacaattattgttggtatataggctatttcccttcttatcagtcccagaatacctccagccactttctgctgtttttttgttttgttttgttttgttttgttttgttttgtttaggtggagtcttgctctgttgctcaggct

SEQ ID NO: 568611 - DNA, 390 bp, Homo sapiens
atagaataaaatgtcaatcagaattctagaaggatttatttaaaaaattgacaagcaggccrggcacggtggctcatgcctataatcccagcagtttgggaggccaaggcgggtggatctcctgaggtcaggagttcgagaccagcctgaccaacatggagaaatctgtctctactaaaaaaaaataaaaataaaaataaataaataaatagccaggcgtggtggtgcatgcctgtaatctcagctactcgagatactgaggcaggagaatcacttgaacccaggaggtggaggttgcagtgagccgagatcgtgccattgcactccagcctgggcaacaagagtgaaactcagtcttaaaacaaaattgaccatctgattctaaaattt

SEQ ID NO: 568612 - DNA, 573 bp, Homo sapiens
ttttttcttcagtgggagaccagcccttccctgtgggctttgcactctacagtgtctcccagctggcccyttctttgcaccccctctatagttcacaggactttaccctctctttcttataggatccaatacactcaccagcctcaactgttttcctcaccaccagctgtgcacagtcaactttcgtccacaccattccctaatcacaatcctgatccgcagctcctgtgcctcctaaattaattacagacggccacttcatttaggagtgtaattgctttcagtacttaacctttctgcagttcaagtggggtgcaaagagaaatgctcaacctcaacgtggtcctgggaaccccagagagctctgtccaacaggtagaagcctctgtaagagctccatgttagagaggggtgtggagaggcatcaatagtcattcagcctttaatgggttcactcagcaaatattggttaggctcccattatatgccaggcaaagtgtcaaccactctttctattctctcagattttaaattccagcagaaaaaaaaaagctatacattaggcaaagagtc

SEQ ID NO: 568613 - DNA, 573 bp, Homo sapiens
ttttttcttcagtgggagaccagcccttccctgtgggctttgcactctacagtgtctcccagctggccctttctttgcaccccctctatagttcacaggmctttaccctctctttcttataggatccaatacactcaccagcctcaactgttttcctcaccaccagctgtgcacagtcaactttcgtccacaccattccctaatcacaatcctgatccgcagctcctgtgcctcctaaattaattacagacggccacttcatttaggagtgtaattgctttcagtacttaacctttctgcagttcaagtggggtgcaaagagaaatgctcaacctcaacgtggtcctgggaaccccagagagctctgtccaacaggtagaagcctctgtaagagctccatgttagagaggggtgtggagaggcatcaatagtcattcagcctttaatgggttcactcagcaaatattggttaggctcccattatatgccaggcaaagtgtcaaccactctttctattctctcagattttaaattccagcagaaaaaaaaaagctatacattaggcaaagagtc

SEQ ID NO: 568614 - DNA, 537 bp, Homo sapiens
ataaacaaacaaacaaacaaacaaacaaacaaactccaaaatgtcatcctgatgctatcatatatttgatcttggtattctcttccaaaaaggatggggaaggcagggtgggatatatttcagcagccaccttggatttttagctttccttgctctgcctccaatgattagctgtgaggagccctcaaaatatattttaaaggacttcgtgtggctcacaggggcttctaacccagatcacctcctgtctctcctaccatgaatgttatgatccaggaataagtaactacttacagttttatgggcacattttaaaatcccatgcccctgtgacatttcagttcaaaaaccacctcttcttagaagtctctcccaaacctcacatcaaccaatgtggagagcataaatcatttcctgatctgtggatgcctctatcttccctgtgttacactcamtcagcacaagtacatcgtcggcgtgtacagtattcacccacaaactgtaaggtcctccaagccagggacttgaaccaaaccc

SEQ ID NO: 568615 - DNA, 530 bp, Homo sapiens
cccaaacctcacatcaaccaatgtggagagcataaatcatttcctgatctgtggatgcctctatcttccctgtgttacactcaatcagcacaagtacatcgtcggcgtgtacagtattcacccacaaactgtaaggtcctccaagccagggacttgaaccaaacccgtccctgtatccccagtgtcaagaatagaactggggtcaataaaatgttttccgattgaattgagaagtacttgacgatcaaatgaatagagatttaatgaacagtattttgggatgcacgcataagtagttaaaatgtacttattgataaactataaattcatctttcttccatttctcaaaggataaagtatgtgatgatgaaatgtttataaaatttaatgacaatacagcacataataaagaaatgcytaataaagagggaatatttcacatttaaaaatatcatttattactttccataaacatacatctgctcagattgattttcttacttttactgaataccctggcagcagtaata

SEQ ID NO: 568616 - DNA, 634 bp, Homo sapiens
tgtgtgtgtgtgtgagtgtgtgtgtgtacatgcaaacatatatgtgtatatattaaatattcatatctgacttgtgaaatatgaaatatatatttwaaaaatctaacaaggaatacacatttcataagttatattttttagagagaaggtattatttcttttgcttgtattatacttccagaatgtagcacaatgtaaacaaacagtatttcctgattgtagtaaatatagtgtagtaactaaagaacaatataatatagcatagtgtatgtctgtgtataaatatcaccttaaaatatgacattaaaatgttacaaaacatttcttttctggctgacaaatgctgaacataataataatgaatgtagatagaatgacttgagtacctgcgataagcaccacagtgaaagctttcaatacgtgttctcatacaatcctcacaacccgccacactgttgctgacacaacccctttcatttgtctcctgacactcagctaaaaaatttcccagattcctctgcagaaaggttggtccctgagattaatttctggccactggaacatggctgaaagtgacacacgccactcccagtcttgtcctctaaaacgagtcttctgtttgtccatgccctcc

SEQ ID NO: 568617 - DNA, 634 bp, Homo sapiens
tgtgtgtgtgtgtgagtgtgtgtgtgtacatgcaaacatatatgtgtatatattaaatattcatatctgacttgtgaaatatgaaatatatattttaaaaatctaacaaggaatacacatttcataagttatattttttagagagaaggtattatttcttttgcttgtattatacttccagaatgtagcacaatgtaaacaaacagtatttcctgattgtagtaaatatagtrtagtaactaaagaacaatataatatagcatagtgtatgtctgtgtataaatatcaccttaaaatatgacattaaaatgttacaaaacatttcttttctggctgacaaatgctgaacataataataatgaatgtagatagaatgacttgagtacctgcgataagcaccacagtgaaagctttcaatacgtgttctcatacaatcctcacaacccgccacactgttgctgacacaacccctttcatttgtctcctgacactcagctaaaaaatttcccagattcctctgcagaaaggttggtccctgagattaatttctggccactggaacatggctgaaagtgacacacgccactcccagtcttgtcctctaaaacgagtcttctgtttgtccatgccctcc

SEQ ID NO: 568618 - DNA, 634 bp, Homo sapiens
tgtgtgtgtgtgtgagtgtgtgtgtgtacatgcaaacatatatgtgtatatattaaatattcatatctgacttgtgaaatatgaaatatatattttaaaaatctaacaaggaatacacatttcataagttatattttttagagagaaggtattatttcttttgcttgtattatacttccagaatgtagcacaatgtaaacaaacagtatttcctgattgtagtaaatatagtgtagtaactaaagwacaatataatatagcatagtgtatgtctgtgtataaatatcaccttaaaatatgacattaaaatgttacaaaacatttcttttctggctgacaaatgctgaacataataataatgaatgtagatagaatgacttgagtacctgcgataagcaccacagtgaaagctttcaatacgtgttctcatacaatcctcacaacccgccacactgttgctgacacaacccctttcatttgtctcctgacactcagctaaaaaatttcccagattcctctgcagaaaggttggtccctgagattaatttctggccactggaacatggctgaaagtgacacacgccactcccagtcttgtcctctaaaacgagtcttctgtttgtccatgccctcc

SEQ ID NO: 568619 - DNA, 634 bp, Homo sapiens
tgtgtgtgtgtgtgagtgtgtgtgtgtacatgcaaacatatatgtgtatatattaaatattcatatctgacttgtgaaatatgaaatatatattttaaaaatctaacaaggaatacacatttcataagttatattttttagagagaaggtattatttcttttgcttgtattatacttccagaatgtagcacaatgtaaacaaacagtatttcctgattgtagtaaatatagtgtagtaactaaagaacaatataatatagcatagtgtatgtctgtgtataaatatcaccttaaaatatgacattaaaatgttacaaaacatttcttttctggctgacaaatgctgaacataataataatgaatgtagatagaatgacttgagtacytgcgataagcaccacagtgaaagctttcaatacgtgttctcatacaatcctcacaacccgccacactgttgctgacacaacccctttcatttgtctcctgacactcagctaaaaaatttcccagattcctctgcagaaaggttggtccctgagattaatttctggccactggaacatggctgaaagtgacacacgccactcccagtcttgtcctctaaaacgagtcttctgtttgtccatgccctcc

SEQ ID NO: 568620 - DNA, 657 bp, Homo sapiens
tcatactgcaggcttgttgactccaagtacatcagatgtgtttcagaatcatgcttgactttcaaacaaagtaatcagccattttgttttccagtccacattgctgttgacctgggaagatgattttcatactcacacatagaaagttatcaagagctccatgccactcacctctccaacaaggaggggagatacttcctggaagaaaaatggcagctgtaacagaaagtctgtagacttcagaatcagatagccctgcattcaaatcccaagtgctgcccyttgtaatgtgaacatgcctgattgactccaactcctgccagccttggcatgctcatttgtgaaccagagagaaaactttcctagccaggcacagtggctcacacctataattccagcactttgggaggcggaggtgggtggatcacgaggtcaagagtttgaggccagcctgactaacatggcaaaatcctgtctctactaaaaaatataaaaattagccaggcatggtggcatgcgcctgtaatcccagctactcaggaggatgaggcaggagaatcacttgaatccaggaggccaaggttgcggtgagcctccaacctgggcgacagagcaggactccatctcaaaaaaataaataaataaataaaaataaaa

SEQ ID NO: 568621 - DNA, 575 bp, Homo sapiens
gcttttcctttgccgctcacttgggctgtcaatcttgccatgtcctgatggcaggggtgggaacatgactcaggccaggtgaattgaagtccttctctgaggtttcatcatggtggctggaactacctctctggtggtgaagcggaaaatgaaagcccgagagctttcagcggccatgcctgaggggcaggaggggagtccgtgagagggaatgaaatggacactgagaggcatggtggggagacattcagagcaaaggtcctagcagcacttgaggccctcaggccaccaagagactcatccattttcctgacttttgcaccgtttccacgagcttccycccgaattcttcctttcttctaagttaaaatgaggtgggtttctgtcttcttgcaagtcaaatatccacatttaaaaactcttttcgtaaacagtgagggtttgggtttctaggagccaagggtgcactttagaacaagcactcagtcaaatgctactcaaatgaacagcattgcaataaatgcctcaaagaatcaaagagaaattcagttttaaatttttttgttagtttttta

SEQ ID NO: 568622 - DNA, 409 bp, Homo sapiens
ccattctattattattatcattaccattatcaatgttctgtttaatgcagccatttccagtagcatatttctgaggcttcatggaaatgcaagaaagctaagggcagagtttattttaaaaacttatttaagaaatgttgccagttgagtttccctggaagcagatgtggcagcatgtctctttaggaagtatcytaggaatgaagacctatggaaggagaatggtggaggaggcaggattgagcaggcagagaattgagattcatgcacacctgaaggactgctggccccagagggagcactgtgttgggcataaatgctcatgcctttaatcaatctttggatgtggattgatctggagagggcatgtcttgagcaagagtgttgagccagtccctgaagggcagtt

SEQ ID NO: 568623 - DNA, 552 bp, Homo sapiens
atctttgggggtcagaataataaaaaagacatcatatttaaagataaacatacataaagaattttattaaaaaatttacttactattaaaacttaggttcagtaaactaaaggagactaccaatttggcctcttagaaaataaactggctcacaatttccattcatttcaatggccacagtgagcattctggacatgtggcttgcaatgtgaatttgatcagcaatgaaacggcacagtttcccccaggactcagtcaatccaagtcaataaacatatagatgaaccacataattttcaattatataaccagaaatctttagttggcccatgactcaaaacacttgcagctaaaaatataattattttcaactagaattcaattgtggagtaaaatgatatttcaggttaaaacactctttttaaacactttgaagtatgaaagcattgcttacattagaattttgaaaagagtggctaaataactacagatacattcatttgtataattcatgtctaraaattaccattttttataatttgtttacttttt

SEQ ID NO: 568624 - DNA, 545 bp, Homo sapiens
agccaccgctcccagccatattgtttgctttaataatcaaagaaactcatgaatactttgcatcttatctgttcccattttaaatcaaaacataaaaaaatctgatccttgcatattctatttttattgccatgttcactgatctcttggactaatattaataattttcttgtatttctgctttgaccttaatggaaaatggtgccagttctatatcagtctcctagcaaactactgccatctgcttaytccataaaaaggccattttcagtgttagatttactagaaaactcagaacttaacagatgtttcacatatatttggcaactgtatgtggaacaggtctggttactggagccgtttatgtaataatgcaagctggaattaatatgtcagttactcatacagcatgtcccaaataatcactgtggggagctctttttatttatttcttcctcagatgtcagtgggaccaattactgattttgtttttcaataaatatgtgtggaatttctgactatgtggctgtcactgtgttaattgc

SEQ ID NO: 568625 - DNA, 544 bp, Homo sapiens
gaaaagcccagaaataaatgttggcatatatggtcaaattattttgacaagggtgccagaccattccatgaggaaggaacaatattttcaacaatttgtaaatggccacatgcaaaattacaagttacccaacatcatatgcaaaaaggaactcaaaggaatcgaagacctattgttagacctgaggcaatacaactcttagaagaaaactttatgacactggatttggcaatgatttcttgaatatgacacctaagacacaggcaataaaagaaaaaataaaccagactctgaamaatttttaaatgtaggtactaaaagacactacgagcagtaaacaggaaacccacagattgggagaaagtattgcaaatcataaatctgataaaagattaatgtccagaatttgtaggaaatgcctaaaactcaataacaacaacaacaacaacaacaacaaaaaacaaactaaaaacataatttaaaaatggacaaaggacataaataggtttttcttcacagaatatataaatatagtcagcaagca

SEQ ID NO: 568626 - DNA, 537 bp, Homo sapiens
  misc_feature 1, 2, 3, 4, 5, 6, 7, 8, 9, 10, 11, 12, 13, 14, 15, 16, 17,18, 19, 20, 21, 22, 23, 24, 25, 26, 27, 28, 29, 30, 31,32, 33, 34, 35, 36, 37, 38, 39: n = A,T,C or G
nnnnnnnnnnnnnnnnnnnnnnnnnnnnnnnnnnnnnnntttacaaatgtacacacccaaaaaccaaaaatcttaaccaagatatagaatcttttcactaatatggaactttcctcatgccctatccaggcatttccatctcctataggcaactattatttcacattttttwaagcttttcatagtcttaagcttcatgtaaacaaaatcaaagagtgtgaatttgtgtctgtttttttgccatagcataataataattattatttttaagatgtccccttattgttgtatatgttattgattttaagttgttcttcttggtaatatagacatttaaagttatcaattttcctctatggcctgtgtcctccaaatttcagtgtgtttttttttaactcaaaattcacttgaaatatatatatttttttctttatggaccatatgttacctagaaaaatgcttttgattttgaaatatttcagtcttcctatatcttatttttactgttttataatttaatttcattatagtgaaaaa

SEQ ID NO: 568627 - DNA, 548 bp, Homo sapiens
tctgttttattttttatcatttcttgttgctttctggaagagttcttctgattttttacttcagtatcttgctccttagcaatctatctctgtatctatcccatactatattaaattctcaagatttctgttttaatatttctaactcagatgataactattgttcagtttacaggattttttttttttttttgagacagtcgaattatttagctgttagttattttggcctttgagcttatgttcccctgaaggtatcagctattctctccagtaatatgcaccagagaacacccaaagtctatgtcagtccaggtgtgtttaaggataatagagaagatgagtcaaggatgcagagcctyggacacaaaagaaccactgctaatctcttgctgctactcccagtctttccctttgacccttagggaagagtagcatttggaatagactaggttgaaatcctaggcctaagggtttcaaagagtaagactgaaagactgacactggtctgttttcatgaacacccttccccagcaagactttaatgc

SEQ ID NO: 568628 - DNA, 548 bp, Homo sapiens
tctgttttattttttatcatttcttgttgctttctggaagagttcttctgattttttacttcagtatcttgctccttagcaatctatctctgtatctatcccatactatattaaattctcaagatttctgttttaatatttctaactcagatgataactattgttcagtttacaggattttttttttttttttgagacagtcgaattatttagctgttagttattttggcctttgagcttatgttcccctgaaggtatcagctattctctccagtaatatgcaccagagaacacccaaagtctatgtcagtccaggtgtgtttaaggataatagagaagatgagtcaaggatgcagagccttrgacacaaaagaaccactgctaatctcttgctgctactcccagtctttccctttgacccttagggaagagtagcatttggaatagactaggttgaaatcctaggcctaagggtttcaaagagtaagactgaaagactgacactggtctgttttcatgaacacccttccccagcaagactttaatgc

SEQ ID NO: 568629 - DNA, 599 bp, Homo sapiens
  misc_feature 9: n = A,T,C or G
ctacaaaancttctaagaaaaaaatatagaaagatatttataatgaattagacaaagatttyttagatacacacaaaaaacacaaatcaaaaaagaaacattgatacaatggattaagctgggtgtggtggctcatgcctgtaataccaacactttgggaggccgaggcagatggatcacttgaggtcaggagttcaagaccagcccggccaacatggtgaagccccatctttactaaaaatacaaaaaattagccaggcatggtggcacatacctgtaatcccagctactcaggaggctgaggcaagagaactacttgagcccaggaggtggaggttgcagtaagctgagatcatgccactgcactccagcctgggcaacagagtgagaccctgaaaaaaaaaaaaagagaaagatacaatggattaaacacttctttttaaaggtattaactttaaaaaagtaaaagttagccacagactgggagaaaatgtttgtaaaatacatacctgatgaaacattgatatccagaatatataaaaagtgcttgaatctcaataaaaagaaaacaaacaaactgataaaaattataggcaaaa

SEQ ID NO: 568630 - DNA, 377 bp, Homo sapiens
tatctggaactgtctaactttagtcaaactttagatttgtgcactttctcacatgtatgctattccttaatttttacaaatctggaaaagaagaaatttcaataggaagaataaaaaaggttttcaacagctctccactgcyctcaggacaaagtccaaactcctcctcacagcaagtaagtttttgcggtgtggcccccttgtgactcttcagtttcacattctgcctcacttggtgcactctctcctccagctccactgatggctggcagctccctgtacatgccatgcacccccctctcttttttaattgacaaataaaaattgtatatgtttatggtgtacaatctcatgctttcaaatatgcaaataatgta

SEQ ID NO: 568631 - DNA, 536 bp, Homo sapiens
tggttgcttaaaagggtgtagcacctcttccttctctctcttcctcctgctctggccatgtgtagatgtgcctgyttccccttcaccttctgccatgattgttaagtttcctgaggcctcctcagccatgcttcctgtatagcctgtggaactgtgagccaattaaacctctcttctctataaatgacaccatctcaggcatttctttgtggcaatgtgataaaggagtaatacagaatatatacaaatcaataagaaaaacactaaccatctactagaaaaaatgggcaaagcatataagctgacagtgcacagaaaaggaaatgcagatggcccttaaacatatgccaagatgttcagtcttatatataataagggaaatggaactaaaatcacacagagacataatttttaaattatgttaaatgggctaaaatttaaaagtttgaaaatacttacattttgaggaatcagcagcccacccatctattactggcagaagtatatactggtacaacacctataggaggcaagtt

SEQ ID NO: 568632 - DNA, 509 bp, Homo sapiens
ttgatctaatcacctcccaatggccccacctcctaataccatcaccttgggggttgagattccaacacataaattttggrgggacacaaacattcagaccatagcagattaatttccagactctcagagaaatccttatcaaataaattaattcagaagaaaatccccaaactaattagtgtggatcctttttaccgttcctgtgagtcagagctgatgtgctcacggcctgtgtcccctcctgcccttgccccccgcagggagataactgagccatgccttttgccacccactctccctgtcctctttgcatctttggctggcaaccccagagcactttccagatcctctgcatctctcttcaccagatctctggccattcctaattctacattctggacagttcctggcctgttgctcttgctctttgcaggaactgtggatgaagccttgccaggacacaggtcctcagtgcctgtcactgaggtggcccttcatttaactgaagt

SEQ ID NO: 568633 - DNA, 509 bp, Homo sapiens
ttgatctaatcacctcccaatggccccacctcctaataccatcaccttgggggttgagattccaacacataaattttggaggracacaaacattcagaccatagcagattaatttccagactctcagagaaatccttatcaaataaattaattcagaagaaaatccccaaactaattagtgtggatcctttttaccgttcctgtgagtcagagctgatgtgctcacggcctgtgtcccctcctgcccttgccccccgcagggagataactgagccatgccttttgccacccactctccctgtcctctttgcatctttggctggcaaccccagagcactttccagatcctctgcatctctcttcaccagatctctggccattcctaattctacattctggacagttcctggcctgttgctcttgctctttgcaggaactgtggatgaagccttgccaggacacaggtcctcagtgcctgtcactgaggtggcccttcatttaactgaagt

SEQ ID NO: 568634 - DNA, 509 bp, Homo sapiens
ttgatctaatcacctcccaatggccccacctcctaataccatcaccttgggggttgagattccaacacataaattttggagggacacaaacattcagaccatagcagattaatttccagactctcagagaaatccttatcaaataaattaattcagaagaaaatccccaaactaattagtgtggatcctttttaccgttcctgtgagtcagagctgatgtgctcackgcctgtgtcccctcctgcccttgccccccgcagggagataactgagccatgccttttgccacccactctccctgtcctctttgcatctttggctggcaaccccagagcactttccagatcctctgcatctctcttcaccagatctctggccattcctaattctacattctggacagttcctggcctgttgctcttgctctttgcaggaactgtggatgaagccttgccaggacacaggtcctcagtgcctgtcactgaggtggcccttcatttaactgaagt

SEQ ID NO: 568635 - DNA, 646 bp, Homo sapiens
tgtgtttggagattggcctttggacacacagcatctttactattcttgccaatgctagaaaggactgatattacgactttccctgtcaagcctatgagtacrctttacaggccaaggctcccctctgggaattaagcatctagaatagagccattatagtcatgctcctgtgtggggagcatgaaggtttccaaccaggactgtaaggtgataaaagcacatgtcagattcagtttcagataagtgtgttttaaagagaagagatgttagaggataagaagacatggagatcacaggatgatcactggattgggcccagggaagcctttagcttttcctgaacaaactggaaaggttttatggaaaaatttgaagtctgtttttaagtgggtccaagtctagtggtctctagctaactcatgtacttcagttcccctgaaatggaattagctgaacattttcctttagagtttcaagaatctttcattgttttttgagacagggtctcactatgttgcccaggctgctctcaaactcctgggctcaaatgaccctcccacctcagccttccaagtagctgggattacaggtacatgccaccacacctgcctaatttcaagaatcttaaattaacttagaaccaagg

SEQ ID NO: 568636 - DNA, 588 bp, Homo sapiens
tgatgattaatattaagtgtcaacttgattggattgaaggatgcaaagtattgtttctggatgtgtctgtgaaggtgttgccagaggagattaacatttgaatcagtggattaggagaggcagacctatcctcaatgtgggtgggcacaaatccaatcatctgtcaatgcagctagaaaaagcaggcagaagaaggtagaataagacagtttgctgagtcttctggctttcttctttttcccatgctggatgcttcctgcccttgaatatcagacttcaggttcttcagcctttggactcttggacgtacaccagtggttttgccaggggctctcaggcctttggccccrgattgaaggctgcacggtcagctttacttttgaggctttgggactcggactgagccactactggcttccttgctcttcagcttgcagagagcctatcttggaacttcatcttgtgactctgtgagtcaattctccttaataaactccttttcatatatacatatatcccattagttctgtccctctggagaaccctgactaatacaccctatcttctgcccaggaggctgaactacat

SEQ ID NO: 568637 - DNA, 377 bp, Homo sapiens
atgcaagtgcttgggagttctttgatttgaaggggtgtgagcatagttgagtagaattcccttaaatgctttctaaaggccacattcagacttgtggtaaaaggattactagcagtttttcattgtgtcttgttcacatgtgtgttgcrtgagtttttacactttttttttcaatctgctttaggatttttaaaattaaaatattcttctctggagttggaagttcttgagttcttggtatttttacatttggcttccttcttatagcctctgtaattaatgttgattccctgaaatagacaagtcgcttgtaatacagtgcagaaccacattgggaagagacatcgtggcaggtgttggaggaggaaatcatgaga

SEQ ID NO: 568638 - DNA, 377 bp, Homo sapiens
atgcaagtgcttgggagttctttgatttgaaggggtgtgagcatagttgagtagaattcccttaaatgctttctaaaggccacattcagacttgtggtaaaaggattactagcagtttttcattgtgtcttgttcacatgtgtgytgcgtgagtttttacactttttttttcaatctgctttaggatttttaaaattaaaatattcttctctggagttggaagttcttgagttcttggtatttttacatttggcttccttcttatagcctctgtaattaatgttgattccctgaaatagacaagtcgcttgtaatacagtgcagaaccacattgggaagagacatcgtggcaggtgttggaggaggaaatcatgaga

SEQ ID NO: 568639 - DNA, 377 bp, Homo sapiens
atgcaagtgcttgggagttctttgatttgaaggggtgtgagcatagttgagtagaattyccttaaatgctttctaaaggccacattcagacttgtggtaaaaggattactagcagtttttcattgtgtcttgttcacatgtgtgttgcgtgagtttttacactttttttttcaatctgctttaggatttttaaaattaaaatattcttctctggagttggaagttcttgagttcttggtatttttacatttggcttccttcttatagcctctgtaattaatgttgattccctgaaatagacaagtcgcttgtaatacagtgcagaaccacattgggaagagacatcgtggcaggtgttggaggaggaaatcatgaga

SEQ ID NO: 568640 - DNA, 377 bp, Homo sapiens
atgcaagtgcttgggagttctttgatttgaaggggtgtgagcatagtygagtagaattcccttaaatgctttctaaaggccacattcagacttgtggtaaaaggattactagcagtttttcattgtgtcttgttcacatgtgtgttgcgtgagtttttacactttttttttcaatctgctttaggatttttaaaattaaaatattcttctctggagttggaagttcttgagttcttggtatttttacatttggcttccttcttatagcctctgtaattaatgttgattccctgaaatagacaagtcgcttgtaatacagtgcagaaccacattgggaagagacatcgtggcaggtgttggaggaggaaatcatgaga

SEQ ID NO: 568641 - DNA, 622 bp, Homo sapiens
aataacaagtgttgccaaggataaggagaaattggaacccttgtgcatttctagtgggaatgtaaactggtgtagccactttgcaaaatgatatggcagttcctctaaaattcaaacgtacatttttataaaacatttaatgaaaaatgggacattgccaattacaataaacatctgttgaataagcgattggataaacaaaagaaagaattaatgaaaaaatgagttttaggataaagcatarctcatttaaaacctgtgtagggtggcagaacagcatgaaatctggccagataacctgtgtttgagttcctcttattttatgtgccattggtcaagttgcttttctaagactcagtcctcttattggtaaagtgagattaatactaatgcctctctcacagggttttagctaagaccaaattaaagccacttctttttccccattgcccaagacagaaacatcttggtgtacaggacatgagggagtttgctcagagccctaggtagggaagggaagggaaggggactaccactgcaggggcaggacatatgctagaacacagggttgctttccatttattaccaaacatgtgtttggtaactttatgcaaataatttc

SEQ ID NO: 568642 - DNA, 535 bp, Homo sapiens
attttgttttgttttgttttgttttgttttgagatagggcctcactctgttgcccaggctgtggtgctgaacatggctcactgcagccttgacctccagggctcaagtgatcctcgtacctcaatcccctgagtagctgggactacaggcaagcaccaccatgcaagtaattgttgtatttttttgtagatagatagatattttttgtaaacttttgtagtttcaccatgttgccaaggctggtctcaaactcctgagctcaagcaatctgtccacctcagcctcccaaagtgctggaattacaagcataaccactgcacctggtaggcatcaaattttgaatagagaagttaaccatgatgaatcaacacttgcttgaatcgtttggttctccctcctccttgttcattgtctttattctgctcatctggatgttgcaaagatgtaaagattttttcctttgttgctawagagtagtgctaactccatcattctggcagaagcaccaacacccagatcccaaaattaagcatca

SEQ ID NO: 568643 - DNA, 600 bp, Homo sapiens
gtaaattttatgtgtcaacttgactggatcacaaggtgcctggatatttggttaaacatgactctgagtgtgtctataagggtgtatatggatgaaattaacatttgaatcagtagactgtgtaaagcctcatccgatacatagaaggcatamatagaactaaaaggctgagtaagggagaattctctctctcgactgcctgtcttcagctgggaagtcagtctttaatgtcttctgactggggctctgagttgaattacaccatcagctctcctgggtttccagcttgccagttgcagctcttggaacttcttggtctccataatcacaagataacatacctatagctatatctttatcaatatcttctattgattgtttctctggagaaccctgactaacatacagacttaaggaaagtcactctgagaatatggcattcatgctgagctctggagaatgagaaaaacaaagcaaataagccctaatatgaaccagaaaaaaaattctagtaaaatgaaatatgagagcaaaagcctgaggctgaaaagagccagagagaaggcagttagcatgagattagattggagagggaagcag

SEQ ID NO: 568644 - DNA, 600 bp, Homo sapiens
gtaaattttatgtgtcaacttgactggatcacaaggtgcctggatatttggttaaacatgactctgagtgtgtctataagggtgtatatggatgaaattaacatttgaatcagtagactgtgtaaagcctcatccgatacatagaaggcataaatagaactaaaaggctgagtaagggagaattctctctctcgactgcctgtcttcagctgggaagtcagtctttaatgtcttctgactggggctctgagttgaattacaccatcagctctcctgggtttccagcttgccagttgcagctcttggaacttsttggtctccataatcacaagataacatacctatagctatatctttatcaatatcttctattgattgtttctctggagaaccctgactaacatacagacttaaggaaagtcactctgagaatatggcattcatgctgagctctggagaatgagaaaaacaaagcaaataagccctaatatgaaccagaaaaaaaattctagtaaaatgaaatatgagagcaaaagcctgaggctgaaaagagccagagagaaggcagttagcatgagattagattggagagggaagcag

SEQ ID NO: 568645 - DNA, 623 bp, Homo sapiens
tgttggcatgtaattgttcagcctcttataaatctttttatctctgtggtatttgttgtaatgtctcctctttcatttctgattttgtttgaatcttctctcttatattcttatttagtctatgtaaaagtttgtcaaattagtttttttttcaaaaaaytttagtttcattgatttttctattctcaattttgtttatctctgctctaatctttattctttcctcccctctgctaactttgggcttagtttgttctttgttttctagtttcttgaggtctagggtaaagctgtttatttgatatattttctctttttttttttgagatggagtctcgctctgttgctcagcctggagtgcagtggcgcaatctcagctcactccaagctctgcctcctgggttcacgccattctcctgcctcagcctcccgagtagctgggactacaggtgcccgccaccatgcccagctaattttttttgtatttttagtgggttttcaccgtgttagccaggatggtctcgatctccctgacctcgagatccacctgccttggcctcccaaagtgctgggactataggcatgagccaccatgcccggcctgttttctcttttttaatgta

SEQ ID NO: 568646 - DNA, 485 bp, Homo sapiens
ttctagaatacatggagcttttcctgtatcttttgtacttgtgctcatttgtaacttaaaagggctaactagcaagaatatttcaaatatatttctrtataatttttaaggcaaacttggattttattggttagagtacattatagagagctaggttttatatcccaaaaaggaaatgtggaattattgattaattcttcctctttcatacagattttattaaaattttttgtaaacctacagaaaagttgacagaatagtacaaaaaatacccattatgtcttttctttttttttttttttttttttgagacagagtctcactctgtcgcccaggccggagtgcagtgatgtgatctcggctcactgcaacctccacctcctgggttcaagcaattctcctgcttcagcctcccgactagctgggactacaggcatgtgccactacacccggctaatttttttatttttagtagagacggggtt

SEQ ID NO: 568647 - DNA, 587 bp, Homo sapiens
ccatgttggccaggctgggctccaacccctgacctcaggtgatccacccatctcggcctctcaaaatgctggrattacaggtgtgagccactgtacccggccagtcatgaaattttaaactttagaaggataaagtcagttttgaggtttttactgatctgtttttaaatatctggagaaaatttcaggaacgaatcaatataatttataatgttgatataatttataattttataatgtcaaagacagtattgttccaacacccatgggtattttggatgtgcctccagcttatgattttcaatcagaacatttaaattattttatttttatatttaatgattcccttacccccccccacgcacaaatctaaaaggaacatgttcatcaattatagaggttatgttcctgaacgggactgtggttggcaaaactattattgctaagatcatgatcacaaagaatatacagttttaaggggaaaatgtatgccataaaaatattatatgcatttttaactcagtaaattaaaggagacgtcgtctgcttttgaaacaaaccagatttgctggcatccatacctgctc

SEQ ID NO: 568648 - DNA, 587 bp, Homo sapiens
ccatgttggccaggctgggctccaacccctgacctcaggtgatccacccatctcggcctctcaaaatgctgggattacaggtgtgagccactgtacccggccagtcatgaaattttaaactttagaaggataaagtcagttttgaggtttttactgatctgtttttaaatatctggagaaaatttcaggaacgaatcaatataatttataatgttgatataatttatamttttataatgtcaaagacagtattgttccaacacccatgggtattttggatgtgcctccagcttatgattttcaatcagaacatttaaattattttatttttatatttaatgattcccttacccccccccacgcacaaatctaaaaggaacatgttcatcaattatagaggttatgttcctgaacgggactgtggttggcaaaactattattgctaagatcatgatcacaaagaatatacagttttaaggggaaaatgtatgccataaaaatattatatgcatttttaactcagtaaattaaaggagacgtcgtctgcttttgaaacaaaccagatttgctggcatccatacctgctc

SEQ ID NO: 568649 - DNA, 543 bp, Homo sapiens
tagctaagaaagtaggagatagcagcttcactgtctgggactgttcgaatgtcccttcacatagctcagttggtacagggtgaaggctgcaaaagccagcagtttcacttccagaggggacagacctgatttgaggcagygggcaaaagcccacactcagcagtgttgccagtaaaatgagcaaatttgataggaaacgaatgggaagatcccacagctctgctagtctgaagcttcagtcgtggttcgggtgaaggacagatcagtggaccagccagatatgtcaccagatttggaaatgagagaaccaaagagggactacataggctccccttacaaccctagttgactaggaggctacatgcaaataaatggaaggccacagagggcccaagctccccatacactccttactgaaagggctacatgcacatcatggggagataaagagggcctagcagaaattaaaattcaagaaaaacttgaaaatggcctaattttttttcttttatactttaagttctggggttcatgtgcacaatg

SEQ ID NO: 568650 - DNA, 543 bp, Homo sapiens
tagctaagaaagtaggagatagcagcttcactgtctgggactgttcgaatgtcccttcacatagctcagttggtacagggtgaaggctgcaaaagccagcagtttcacttccagaggggacagacctgatttgaggcagcgggcaaaagcccacactcagcagtgttgccagtaaaatgagcaaatttgataggaaacgaatgggaagatcccacagctctgctagtctgaagcttcagtcgtggttcgggtgaaggacagatcagtggwccagccagatatgtcaccagatttggaaatgagagaaccaaagagggactacataggctccccttacaaccctagttgactaggaggctacatgcaaataaatggaaggccacagagggcccaagctccccatacactccttactgaaagggctacatgcacatcatggggagataaagagggcctagcagaaattaaaattcaagaaaaacttgaaaatggcctaattttttttcttttatactttaagttctggggttcatgtgcacaatg

SEQ ID NO: 568651 - DNA, 538 bp, Homo sapiens
ttattgaatgatgaataattaatagtacaccatgcagcagagaactaggggataggttcccagggaagactgtgtcctctttaaatttacaacttgcctctcaatatttatgcacacactgctacatgatgtaaacattggtgtaaacattgaaatatttatcatagaataaatttagataaaaagcgataaaaataaaacaakattactaatttttgattaaatttatgtgagaaaataggtacagtcttttgagcaaattgcaaagaaattgatttctatagcagtagtataaggataataataaaaattatgtaatatactgagctactgcaatcacaaaagcatgtatactatgatgtgaatgaactacccacacttctaatatcagcctcctcactggaagtggataagatcgatctcatctactcttgttctgcaagaatagatcccatcgattctttgctttctttctttcctttcttttctttttctttagagacaggttctcactctgttgcccaggctggagtgcagt

SEQ ID NO: 568652 - DNA, 538 bp, Homo sapiens
ttattgaatgatgaataattaatagtacaccatgcagcagagaactaggggataggttcccagggaagactgtgtcctctttaaatttacaacttgcctctcaatatttatgcacacactgctacatgatgtaaacattggtgtaaacattgaaatatttatcatagaataaatttagataaaaagcgataaaaataaaacaagattactaatttttgattaaatttatgtgagaaaataggtacagtcttttkagcaaattgcaaagaaattgatttctatagcagtagtataaggataataataaaaattatgtaatatactgagctactgcaatcacaaaagcatgtatactatgatgtgaatgaactacccacacttctaatatcagcctcctcactggaagtggataagatcgatctcatctactcttgttctgcaagaatagatcccatcgattctttgctttctttctttcctttcttttctttttctttagagacaggttctcactctgttgcccaggctggagtgcagt

SEQ ID NO: 568653 - DNA, 363 bp, Homo sapiens
ctttgtttatttttttaatatgttgttcatcttttcctaattaatttatgagttatttatttattctgaatataattggagttctttgttccatgtgatcattgtgaataccttcttctaatctgtgacttgtcttgtataggaacaatgttctaacagaggaagatttctgcctaaaagtatcagaaaagaattcacyaatagcattgaacaccaaaatacatgtaggatttcattaggcagaaagtggtaatggacttttaagatgagacaattcataagaatgagtgatggtatggagttgaaaaagtgtgaagcttaagaagtagcagacctggaacccaagacacatgtgtcaagtga

SEQ ID NO: 568654 - DNA, 600 bp, Homo sapiens
tctaattaattaacatggtctgtccattatataggtctttgatttctttcacttcagcatgctggtcctgtcatgtttttttagacctattcctaaatatttcaattttggaagcaattataatagtctgtttcaatttccatgtgttcttgttactatatagaaatatgatttattttaatatgttgatcttgcatcccattactttactgatcttacttattaattctgggagttaattttgaatattccttgaaatttctatatagaacatttttatcatgtcactggtaaatgacaattttatttttcttttctgatctatatgcctttcttttccttttcttgccttatcatgctgggtaagacttctagtactgtgatgagtcagagtggtaagagccaacatctttatcttcgtcctgattttagggagatattgactgtgggttttttacagatgttgaagaagttcttctattcctagtttgctcagggttttttttcttgtttwtcataagtgggtgttggattttgtcaaatgctttctctgtatcaattgatataatcatgtcactttctttagcctgctaatatagt

SEQ ID NO: 568655 - DNA, 585 bp, Homo sapiens
tacttaaagtctttctccctctccttgtatacatatacattagatatatgtatgtatatataaagcacacacaccctaaatcagaaatttatattcccttatatttatgatttatctcattctcacccactcatgtttctgtaacacaagactgtaacagtcttactattgtaagacttcagacatatttaaacagttcacatgtatgtgcaaacatttatatttatagatatgtgtattcattgrcagcatattttgtaatagaaaaagatttgaggccgggcgcagtggctcaggcctgtaatcccagaactttgggaggccaaggcaggcagatcacgaggtcaggagatcgagaccatcctgtccaacacggtaaaaccctgtctctagtacaaatagaaaaattagctgggtgtggtagcaagcgcctgtagtcccagctactttggagactgaggcacaagaattgcttgaatccaggagccagaggttgcagtgagccaagatggtgccactgcactccagcctgggcaatagagcaagactctgtctccaaaaaaaaaaagaaaaaaaatgtaaaca

SEQ ID NO: 568656 - DNA, 475 bp, Homo sapiens
aaaagaaaaaataaaagtaattcaactgataagttggacaaaaaccaatggcctttaaaaaaagacaataaaatccttataaaaatactacatatataaaaattgtgatgtgtaatatgtaatcaaacattagtagacagatccggaattaagaaaatgtaaaaatgttcaggaaacatataaattaaaaataattaagaaatattagagatgagattagsaaacaaaagtgttaaaactgctattataaatatattcaagtatttaaaagaaaacatgaaaaagaaaatagaatatatcaaaatgaaatgtaatgaaaaattcaatggataagaaaaatagcaggttaggcacagtaaaaaaaagttagtgaacacaaagatatgaagataattataaagaacaatgttggccaggcgccgtggctcacacctgtaatcccagcacttcgggaggccgaggcaggtggatcacc

SEQ ID NO: 568657 - DNA, 482 bp, Homo sapiens
tttttttttttgcaagaacgttctcctacaatatagattggaaaatacccaaataatgaaatatctatttaacttaatacaactttagattataaattatgacatttgtctacaaggatttatcttattacttttacctaattattttattttaatggtttacctacattatttatgaaaactgtgacagttatgatttaaagttacagattaccaytgcaaaaatataactaaggcagtgaaaatgatatgccttaactgactccatcttgcttctagcctccaagctgtccttgttcatttctggactttgggaggaacttagtttatggtttagctttgaaacaaagacagtaacagtcctttcccaaaacaaacctccttactgcctgtggactagactccctaaagccacaagattagaagtcatggtaatcttactaaatttaagaagcagcagttttcattaattaaacatcaat

SEQ ID NO: 568658 - DNA, 462 bp, Homo sapiens
aagaaacccagggatgagagatgggaaagactcctaacagcctggagttccctgtgtcattctagttctgagcctctagagtcagggaatttcatcattcatctcatgatagtgctctctcttcttcattctcccttttactccccctaccgtgttcctatctcctcaggtttgccttgcaagtttctttatacagttatgcatcacttaacgacggggatacatgctgagaaatacatctctacgcaattttgtcattgtgtgaacatcatagagcatccttacacaaatctagatagtatagcctactacacacctaggctatatggtatggcctactgctcctagggtacaaatctgtacagcatgttatgtgctgaatactgtaggcagttgtagcacagtrgtaagtatctgtgcatctaaacatagaaacggtacagtgaaaatatggtattaaaa

SEQ ID NO: 568659 - DNA, 480 bp, Homo sapiens
aaatttcaatatccagatgggccattttcatcaagagcagcaactttcaaaaattgacacaatccttctcatatgatgtctcacatttttatctatggtaattagtacttttctcttatcacttatcagtaaaactttctggtcttcacactcacttccacatgtcaaattacagatccaggtagaaaataatataatctaaatttactatttttttaattgtttgaattcctaaattctaaggttataaacctttgatttatgtaatgtctcttttcaatgtatttcaactttctttaaaagagaacttcaggccgggtgcggtgactcatgcctgtaatcccagaactttgggaggcctaggtgggtggatcatgaggtcatgagtttgagaccagcctggccaatatggtgaagccccatckctactaaaaatacaaaaactagctgggtgtggtggcacgtgccatagttccagct

SEQ ID NO: 568660 - DNA, 565 bp, Homo sapiens
atcatctggggtttctttattcacatgctgctgcttagtgtcattcagcagtagtgaggccttcttcactcacatgttgctgcttagagtcattcacagtgcctacattgacttctccatttgatgtgagcttcttaccgtctagtgtctggtttctgagagagatcctgagcaggagagtctgcagaacaagctttcccagagaccaggagacaagctgtgtggccttttatagtatcagaagccatataacaccacttctcctattatctgtcaaagcagccacatcttcacccagatttgattaawgagtatgttaagttagaaactatgaaggatctgaggtcttacccaactgtgatattaataagccaaagatgatccttgtacattgattatccctatgattacttcttcacagcaggctgggacccattaggtcaaaagcctaccagtgccaaactcaattgttttcacaaacaattttttttttgaaacagtgtctcactctgttgtccaggctagagtgctgtggcatgatcacagctcactgctacctctacct

SEQ ID NO: 568661 - DNA, 565 bp, Homo sapiens
atcatctggggtttctttattcacatgctgctgcttagtgtcattcagcagtagtgaggccttcttcactcacatgttgctgcttagagtcattcacagtgcctacattgacttctccatttgatgtgagcttcttaccgtctagtgtctggtttctgagagagatcctgagcaggagagtctgcagaacaagctttcccagagaccaggagacaagctgtgtggccttttatagtatcagaagccatataacaccacttctcctattatctgtcaaagcagccacatcttcacccagatttgattaatgagtatgttmagttagaaactatgaaggatctgaggtcttacccaactgtgatattaataagccaaagatgatccttgtacattgattatccctatgattacttcttcacagcaggctgggacccattaggtcaaaagcctaccagtgccaaactcaattgttttcacaaacaattttttttttgaaacagtgtctcactctgttgtccaggctagagtgctgtggcatgatcacagctcactgctacctctacct

SEQ ID NO: 568662 - DNA, 565 bp, Homo sapiens
atcatctggggtttctttattcacatgctgctgcttagtgtcattcagcagtagtgaggccttcttcactcacatgttgctgcttagagtcattcacagtgcctacattgacttctccatttgatgtgagcttcttaccgtctagtgtctggtttctgagagagatcctgagcaggagagtctgcagaacaagctttcccagagaccaggagacaagctgtgtggccttttatagtatcagaagccatataacaccacttctcctattatctgtcaaagcagccacatcttcacccagatttgattaatgagtatgttaagttagaaactatgaaggatctgaggtcttacccaactgtgatattaataagccaaagatgatccttgtacattgattatccctatgattacttcttcacagcaggctgggacccattaggtcaaaagcctaccagtgccaaactcaattgttttcacaaacaattttttttttgmaacagtgtctcactctgttgtccaggctagagtgctgtggcatgatcacagctcactgctacctctacct

SEQ ID NO: 568663 - DNA, 579 bp, Homo sapiens
catcactgagtttggcttccacacatatgccaaaccaactggtccataagccaagcttggggttttgtgctcctcctacagctggtcatactggacccccacatggctggtgtgactgttgttgctgacatggtgttctgggcaaactgctcacacagctcatgtatgacctcagaacttgcttaggcttgatcttgtggtgatggctgctgggtacttctgactttgactggcaggtccaggagaaccaggtcgtggtgagcagtgctggaggatacatgataactttgtgcctcatggtcaacgaagcccagcattatgctaagagctatttctcagaaggtgtataattctctgttgtagacggcatggcctagttacagatcccaagaacctatggtatgggtttcttccagggcctttctaaaagctccatccagtgtattttcccactactgacacctctagcacctcaggatctgcgggagtgtatggcccaagtgcagggctgcttgcacagcagcctgaaacttccacagagccctttgctgctctttstcctacttgaagctggtagct

SEQ ID NO: 568664 - DNA, 629 bp, Homo sapiens
tttctgttatttattttaatttaatttcataattgcagaattaacttttttgatttcaactattttaatttgttaaggtttgttttatgatccaggatctggtctatcytgatgaattttccatttacatttgaaaagaatgtctattctgctgtttttgggttaaatgttctgtgaatatcaattaaattccatttgttggtgacctgttcagtttttctatatccttgctgactttatatctagtttttctgtttattactgagagaggagtattgaaatctgtaattgtgaatttgtctatttttccttttaattctgtcagtttttgtttatacattgtgaagctctgttgttaagtgtatgcatatttaggattactatgccatcttggtgaattgattctcttatcattatgtaatatcctttagcttttataattttctttgctctgaggtctgcgttgaagttaaaatagccattccagctttgtttcttttttgagacagagtctcgctctgttgcccaggctggagtgcagtggcatgatctcagctcactgcaacctccgcctcccaggttcaagcaattctcctgcctcaacctcctgagtagctgtgattacaggt

SEQ ID NO: 568665 - DNA, 629 bp, Homo sapiens
tttctgttatttattttaatttaatttcataattgcagaattaacttttttgatttcaactattttaatttgttaaggtttgttttatgatccaggatctggtctatcctgatgaattttccatttayatttgaaaagaatgtctattctgctgtttttgggttaaatgttctgtgaatatcaattaaattccatttgttggtgacctgttcagtttttctatatccttgctgactttatatctagtttttctgtttattactgagagaggagtattgaaatctgtaattgtgaatttgtctatttttccttttaattctgtcagtttttgtttatacattgtgaagctctgttgttaagtgtatgcatatttaggattactatgccatcttggtgaattgattctcttatcattatgtaatatcctttagcttttataattttctttgctctgaggtctgcgttgaagttaaaatagccattccagctttgtttcttttttgagacagagtctcgctctgttgcccaggctggagtgcagtggcatgatctcagctcactgcaacctccgcctcccaggttcaagcaattctcctgcctcaacctcctgagtagctgtgattacaggt

SEQ ID NO: 568666 - DNA, 629 bp, Homo sapiens
tttctgttatttattttaatttaatttcataattgcagaattaacttttttgatttcaactattttaatttgttaaggtttgttttatgatccaggatctggtctatcctgatgaattttccatttacatttgaaaagaatgtctattctgctgtttttgggttaaatgttctgtgaatatcaattaaattccatttgttggtgacctgttcagtttttctatatccttgctgactttatatctagtttttctgtttattactgagagaggagtattgaaatctgtaattgtgaatttgtctatttttccttttaattctgtcagtttttgtttatacattgtgaagctctgttgttaagtgtatgcatatttaggattactatgccatcttggtgaattgattctcttatcattatgtaatatcytttagcttttataattttctttgctctgaggtctgcgttgaagttaaaatagccattccagctttgtttcttttttgagacagagtctcgctctgttgcccaggctggagtgcagtggcatgatctcagctcactgcaacctccgcctcccaggttcaagcaattctcctgcctcaacctcctgagtagctgtgattacaggt

SEQ ID NO: 568667 - DNA, 568 bp, Homo sapiens
gacaaaaatcgcaaaggtcagaaagayacagttcaaaaaaaaaccagaaatagcacagtcaaaacagacattagagaaatatttgatatcagttttaatgaaagatatgtaaattttgaaggaatataatttatcatcaatcatattgtacgtattaaatgcacattcagaaatatgtaaattacttttaggctctgctttatgctatctggacacactggtgaatgagtgatcatttatcagtttatgtttattctactggatggatttaaccaataagtcttttgtttccttttagcttttttaactgatacattaataatcgtacatatttattaggtacatgggatattttgatacctgcatacaatatacaacaatcaaattagagtaattaggatatccatcacctgaaacacttatcatttctttgtgctggtaatattccaaatcttctcttctagctattttgaaatatacagtaagttattgttaactatcatcaccccactgtgctagcaaacactacaatttattccttctgtttttgtacccattagccaatacc

SEQ ID NO: 568668 - DNA, 599 bp, Homo sapiens
ttgtaaattgcctttttgtgttctttgcccatttttcttcttgtcatttaaaaaaaytgattggtaaaaatatctcataaattaaggatattaattgatataatttggatatttttccccctaaatctcatgttgaaatgtgattcccagtgttggaggtggggactagtgggaggtgattggatcacgggggcaaatttcttatgaatggttagcaccatccccttagtgctgtcctcatgatagtgagttctcacaagctctgtctgtttgaaagtgtttggtatctttcgctttgccctctcttctgctcctgctctcgccatgtgaggtgcctgctcccactttgccttctgccatgagtaaaagctccctgaggcttccccagaaacgaagcagacgccagccccatgcctggacagcaaaaccaggagccaattaaacctcttttctttatgaattacccagtcgcagggatttctgaacactttaaccttttatcaatcttatctattgaaataatctctgagtattttttatcacctgatatttcatactttttcactttattttaaaacttttcaaaatgtgtaattttt

SEQ ID NO: 568669 - DNA, 507 bp, Homo sapiens
aaacttgacgtgaaagtacagaaaatgaaaagtagaaattgagagggtaagaaagagcaagcagaaatgagtgctaaaaaccctcatcttgagaaatggagaatcaaatatattgtctgtggttgatgaaacaggcaataaaagtatattacacatttctaaaattttaatcacagcatgagtttactaaggctgccataacaaagaactacaaactgggtggcgtaaacaacagaaatttattttctcaccgtcctggagactagaagaagttcaagattggaagagttcatttcatcctgaggcctgtcttcttggctttcagatgtcccttctctccatgtgtcatttgttcttccccccatgcgtgtccgtgtcctaatctcctcttcttgtaaggacaccagtcatataggattacagcccatcctaatggcytcatttaaacttaagcacctctttaaagggcctatctccaaatacagtgacaatctgaggtactagggg

SEQ ID NO: 568670 - DNA, 612 bp, Homo sapiens
cacattgtgcacatgtaccctaaaacttaaagtataataaaaaataaaataaaaaaataaaataaaataaaataaaagaatatctttggtagtatttggcatgccagagccctcctgcatccttttttaagagctggcctttctttctgctttcagagtggctactgcttaagaattctatcacagcttttcattgctgttactgctgatgttaaactcttttgttttttgtttttctctttttttaagccttctggctctttttgtggatgtattgcctttcaaagatcaaaggacataatcaagtcagaataatacccatgaattacctctgatagacaataaggcattgtacacctataagatagggttacytcctatcagaacatgctttgcttcaggacttatggcttctaagtgattgctatccatggtctctttctgctaggtgctctggagctgcctcattagtcctgaaaagaatttttgaggacagggggagggagacatctttaaattcccatggctgaggccttactctattatgcagctacactcatgagtttaatgggaatgtacatacacatatttgtacgtatctgtacagacaca

SEQ ID NO: 568671 - DNA, 612 bp, Homo sapiens
cacattgtgcacatgtaccctaaaacttaaagtataataaaaaataaaataaaaaaataaaataaaataaaataaaagaatatctttggtagtatttggcatgccagagccctcctgcatccttttttaagagctggcctttctttctgctttcagagtggctactgcttaagaattctatcacagcttttcattgctgttactgctgatgttaaactcttttgttttttgtttttctctttttttaagccttctggctctttttgtggatgtattgcctttcaaagatcaaaggacataatcaagtcagaataatacccatgaattacctctgatagacaataaggcattgtacacctataagatagggttacttcctatcagaacatgctttgcttcaggacttatggcttctaagtgattgctatccatggtctctttctgctaggtgctctggagctgcctcattagtcctgaaaagaatttttgaggacagggggagggagacatctttaaattcccatggctgaggccttactctattatgcagctacactcatgagyttaatgggaatgtacatacacatatttgtacgtatctgtacagacaca

SEQ ID NO: 568672 - DNA, 566 bp, Homo sapiens
aaacaccaggaattccttgccattacatttgctagtccatcttcccaaacacccaacctgcttgtcttttgtcattttaattaagctttttattgaaatgtgacatccataaagaaaggcacaccattcataagtagccttatgaagttttaaaaaccgaggacctccagataatcatccctagctcaagatctagaacattgcagcatccaagaaggcctctcagactctctcccagtctctgttcccactcacaatttctatcagcagattagttcactcgttgttaagatttatatcaattaaagatatatgtactcttttgcatgtgactcctttcttttgtgttgtgcttgtgagagtcatccgtgttgttccacattgagtccttcatttgtttttgttgctgtatagtgttccattgtgtgaatgtaacacaatgcattgcttcattttaatgctgctatttggattgtttctagtttgggactattacatgtactgaagctatcaacatccttggcaggtctttagatgcatctytgtgagcttttctattgggtata

SEQ ID NO: 568673 - DNA, 554 bp, Homo sapiens
taaatatatacacctactatatactccccaaaattaaawttttttttaaattattgcttcttcactggttattgtaggctccagtattattacagctaattctaaagtataacgtgctatagtgatgagaggttgatagctcgtccagttacatgagtaccatgtaacagctcagggtggttagaggaagggagagagctgctggccactgggatctcctgccaggttagtatgtgaggccagccgtgctggtgccttcaaggaaaatgggacactaaagtgcacacgacttcataaaatcctcagcaaatccacagtccttagttaagcaaaatttgtccgctttcagtttttcaaacaaaacaccatggtgtcaattgcttgatttaaaaggatcaaaacaggctgggtatggtgacccactcctgtaatcccagcactttgggaagccaaggttggtggatcccctgaggtcaggagtttgagaccaccctggccaacatggtgaaaccccatctctcctaaaaataaataaataaaaactagctgggcat

SEQ ID NO: 568674 - DNA, 510 bp, Homo sapiens
tttttccactttattggttatttcaagtaggaaaatgaatccagctctgctattccatcctggttacaaatggagacctataattcaatatgtcatttttagttaccttttactaaaattaaatttatttatatgtaggaatctaatctacattattttgttttctgccaaatatctgagcagtatatgttgtctcatcatcacattattgaaacaatgcagaatgctatagtgactgacaytggaagaagtgatttctgatcaataaactgccaaaatgaacaccttcttgagcactacatgaaagcaaatattccaaatgtcagcattttatatacatgtgccttttgcttaagtatatacatagatttgttctttgtgcgtccattctgtaatctccgaggtaaaaattgtgacaaattagaattttcaataaaatattttaataaaataggccagacgcagtggctcacgcctgtaatcccagcactttgggaggccaagacgggc

SEQ ID NO: 568675 - DNA, 607 bp, Homo sapiens
cattcacaatgtaaatattaatttatatagaaagtacaaaatattctgtgcaaaaaactttactgcttctagactaacatttcttacatatgcatatggttatatggtcaagttattagatatgcaatgaaattcatggtatgtctggtttcatcacatgctgataaataaacgttcttactttttgtgcagtttaatgtatattaatggatcttcacacagtcactcttaaataataataatcattaccctttactattaagtagcgtttccaaagttataacctctcacaggatgccctttctgaaggataatatctgcatactcaaaatattttctttcttaaatgtctagattttgatctgtcttatgacacatattataaatctgaaaaatgacaacaaaacagcaataattttagtaacagaatccctaattctataatcttttctctacaataggtatactttttaaaattttcagtcgaactaaagagctttactaactaatatataagtagacatatatcattcatcggggackccccagaaaccataactctaaacatctttgaaaatctagaaatagtaaaaagttcaattttcta

SEQ ID NO: 568676 - DNA, 449 bp, Homo sapiens
attctaattactccacatcttagccaacacttactattgtatttttcattcattttgtttttgatagtagccattctaataggtgtgaggtagtatctcattggagttttgatatgcgtttgcctaagtattagtgatattgaacatctttttatgtgctttttttttgtatatcttctttggagaaatgtctattaaaatcctttgcccattttttaattggctcatatatttatttcttgttaraagttctctatatattttggttattcatattttatcagatatgtgacttgaaaatatattttcccaaaatgtgagtttcctttttactcttttactggtctcttttgatgcaaatatttttaaaaattttcatgaagtccaatttgtcattttcctgtttgttttcttatgcctttggtgtcttttattcaagattttaaaaa

SEQ ID NO: 568677 - DNA, 455 bp, Homo sapiens
aaatgcaatatatccaaaatggttttcttttttcttcaagtcagatcctctaccaatttgtctgtcttttaataatggtatcctgtgtttccaattatccttaaagcaaatatttcagtacctataattattcagtcacagagacccatcatttttcttcaaatgatgtgatattccttttccaaatttctgtctatttcaccttatcattctaacccatacccttaaccctcacatagcattattaaaatagccttctatgtaaccttctatactaaatttaccattcagtctataagataaatcccagatcctatagaattgaaaatggccatggaatcttggaaccccaamttttgtcatctgagtattatctccttttaatatttacctagaatattattatcacatcagttcttacaaagacaattctccccatctttcaaaaggagccc

SEQ ID NO: 568678 - DNA, 586 bp, Homo sapiens
tagagtatgctgcttatcttatattattttttcaatattaatatattttttggattttacagtttatctcatagcttcwttttgttatattattagctatgaaaattacatgaaaagaatgatttgagagactctgtgttctcagtattatggcattcatatacacgttctttttttgttcctgctacttaaacaaaagcctaatatctttggaatgatttcacgacaaaatataaacttttctacaaatttaaaaatataacttacctaaagaaattaagtagaacatatattcagagtgttacaaaattaacaaagtaaatcattttgtgttctacggaaaatctaatagattattttcagtacttccgaggccacctgaattctcttctgtcaggaacttaatccttccccaagaattaaccactatgttgagttgtgataatcattaatcattattttaatttctttattttagatttatgtatagattctgaagcaatactgtttttagttttgcttggttttaaaatgtgtaagaatggactcctaccatacatacttctgttccatatggtttcttttg

SEQ ID NO: 568679 - DNA, 261 bp, Homo sapiens
tttagaatatttacattttttaataagtttgagaaacactctgttatactctttctgtaagttgcactggcccacgaggcaagaaattcagatattwctcctggtattctacgtaatatcctagaatttctttcacgatactcagatttctaggtgtacttatttgcttgaaattgtctgattagctccattcttccctgtcatataataattgcagaactctgaattaatctagcacagtgcccacttctataacagctc

SEQ ID NO: 568680 - DNA, 588 bp, Homo sapiens
gtttagttatctcattccgatgacgtgtgttgcagattttcatgaaattaaggaatctattttctatcaactcaactttcaggcctgtaaacattttcaggtaagaaagcaatgcaacaaattcccccaaatttccatatggttaaaagctgttgaagtctagctctacaggaagtcataaatattctagtggaaaggtaatgaaaactaaatcctgagagttttaattggaagccacaggacccttagctgagatctgaggggaaagaattttgactgctctaggaartatttggtattgtggtgatagatctgaaaatgaggaaaaagtacattcaggcagcataggatgtcacaggctggccactgttaagtatttttttcaacagttatcagcccattcaaacgaccctacctctaactcagcaagggtaatattttaatcctctgggcatctttttgtctaatctttttctgtgtagccaccataaaaactataggctgcagatacactgctataaacagatttatgtaagaattttagaagagattttgttttcaaccctctttaaaatgaattacaaatat

SEQ ID NO: 568681 - DNA, 588 bp, Homo sapiens
agtctcactctgtcgcccaggctggagtgcagtggtgcaatcctggctcactgcagccttaatctccaaggctcaagctgtcctcccacctcagcttccctcgtagctgggaccacaggcatgccaccacacccagctaatttttgtgtttttttggagagatggggtttcctcatgttgcccacggtggtctggaactcctgggttcaagtgactggccctaccttggcctcccaaagttctatgattagaggcgtgagtcaccctccctcgccaggaagtatgacaaacagaatgagcctgcaaccagagtctttgattcaaacccttgcccaccatkcactgactgtttgagcctcagtatctttatgtggaacatgaggtctataacagaacttaacaaacaggagataattattaatgagattaaatgcaatgaggaatgtcagtggtaccctctctgtagaggaacttaaggagttgagcctccaagcttctttcttgatatgctgatgaaagacatagcctagtttatggtgggtgctgcttaaattccagccctctctctttcagtcaacaggcttggac

SEQ ID NO: 568682 - DNA, 468 bp, Homo sapiens
tttgtttttctcaagtcgcactgactggggcccgctatctaccctgggttctacctgcttctctctccacagtgctgagaggctcagaacaactataacttgagcttacagagaagtctgagactagaatctagtatcacactaaaagtcttcttttaacttgacttctggcagacttttaaaagagtccctcagacactctggcatatagataaggaaataaaaatgtgatggaaagatatgctataaaataaacaagarcactttcttactttatctttgaagaatctgttagaaaattcaaagaaacttcaggtgagtctgaagctatacctactccaaagagcttgttattccttgaccaccccttaaatgtgctttagaagccatataagaagtgaaaataagttcttgaagaatcataaagctttctccataccatacttgattaaaaaaatatgtaggtta

SEQ ID NO: 568683 - DNA, 631 bp, Homo sapiens
acattctgtcatgttgagggatggtctgagactggagacctttgtagctaatatagaactaagaagtaaataagaatactacagtgttcaaggctgtttgcatcttagcaaccgtacctttataactaacataaaactaagaagtacagtaagaatactacagtgttcaaggctgtttgcctcttagcaactgtacctttgtaactaacatagaactaagaagtacagtaagaatactacagtgttcaaggctgtttgcatctctgagttgctgtggttaaayatatcttagcaactgtacctttgtaactaacatagaactaagaagtacagtatgagtactgcagtgttcaaggctgtttgcagagttgctgtggttaaatacatcttagcaaccgtaggcaactttcttaaggtctccaagtaccttcatgtcaatgccagaaccaaagtcaaattttagagttattttaaatacttaaaaggatttgttattatacaataatttgttttatatatattaaatatgtatatatatggagcagttaacttaaaaaattcaacatgtcagtcctagttctgggatacatattgagaatttgtaaatgctaaatgcatcaggtacacattt

SEQ ID NO: 568684 - DNA, 553 bp, Homo sapiens
ctgatttagaaaaacaagctaattcatttacgaattgaatctcaggattacttttaaaatcccttgaagccacagaacacatggaaacaaaacataggtctaagcataaaacagggggtaacaaacaatataattagaagattgcaattttctagatgataaagtctaacaagattttgtactataaataatataaactaaaaaaattagtaacaattcttaagacaaatttctagaaaaaaatgtaaatagtcttatctgaacatttcttaattaggcctttgataatagccaaaaacataatataaagttcagctaygcacttactactacagcctgtgaaaaccttgagaccagcattcatgcttcattcatttttatttacctgagaccaagtactaccccacacagtataagtaatgaatttaactataaccttttgtcctgtcagctaacagttaagtgaatgtgatttagatagaaaatgccatattataagtgtgttatgtaacatatatgtttaaagtctcctcaaatatataattatataaaa

SEQ ID NO: 568685 - DNA, 553 bp, Homo sapiens
ctgatttagaaaaacaagctaattcatttacgaattgaatctcaggattacttttaaaatcccttgaagccacagaacacatggaaacaaaacataggtctaagcataaaacagggggtaacaaacaatataattagaagattgcaattttctagatgataaagtctaacaagattttgtactataaataatataaactaaaaaaattagtaacaattcttaagacaaatttctagaaaaaaatgtaaatagtcttatctgaacatttcttaattaggcctttgataatagccaaaaacataatataaagttcagctacgcacttactactacagcctgtgaaaaccttgagaccagcattcatgcttcattcatttttatttacctgagaccaagtactaccccacacagtataagtaatgaatttaactataaccttttgkcctgtcagctaacagttaagtgaatgtgatttagatagaaaatgccatattataagtgtgttatgtaacatatatgtttaaagtctcctcaaatatataattatataaaa

SEQ ID NO: 568686 - DNA, 586 bp, Homo sapiens
atggcactgcactctagcctgggcgacagagtgagaccctgactcttgggggggaaaaaaaagagcaaaatttttacaaaagggtagatggtcttgggatatcatataytgaagtgtttatcttcatgtttgcttttctttcttctccttccctttttcttccttcccctcctcttctctccttttctcattggaaggccaggcacagcagaagtttctgactatggaattcagtcgattgtcatcctctaggacttacagtttcttagggggagaacatcagataagtatttgaagtgctagagggactgtgacagtatttatgaaatgctgtgtatgcacaaagaagacagtggctaattctatctgagggaggagtgtacatggaagagagaacactttaattagatcgcaaaatattcagcaggaagatttttgagagaaataggcattccaggcaagaggagcagcatgagcaaagacttggagtgaagtagactgtcatgtttgcagagctggctgtagttccacaagtgtagttggatgtagttccacaagtgtagtgagtactacaaaggagaagcac

SEQ ID NO: 568687 - DNA, 586 bp, Homo sapiens
atggcactgcactctagcctgggcgacagagtgagaccctgactcttgggggggaaaaaaaagagcaaaatttttacaaaagggtagatggtcttgggatatcatatactgaagtgtttatcttcatgtttgcttttctttcttctccttccctttttcttccttcccctcctcttctctccttttctcattggaaggccaggcacagcagaagtttctgactatggaattcagtygattgtcatcctctaggacttacagtttcttagggggagaacatcagataagtatttgaagtgctagagggactgtgacagtatttatgaaatgctgtgtatgcacaaagaagacagtggctaattctatctgagggaggagtgtacatggaagagagaacactttaattagatcgcaaaatattcagcaggaagatttttgagagaaataggcattccaggcaagaggagcagcatgagcaaagacttggagtgaagtagactgtcatgtttgcagagctggctgtagttccacaagtgtagttggatgtagttccacaagtgtagtgagtactacaaaggagaagcac

SEQ ID NO: 568688 - DNA, 613 bp, Homo sapiens
aaacttgtgttgtttataactaggaggccgttgtactattattattcctattttatggttgagaaaaccaaggcatggggaaattaaatgacttgcctgaaggttttctactgctagtaattggcaagaggaaaagaaacgtgcaagaactttattgattggatgggaatggtagatacattaatttgaaggattttgtcttagtagatcttagagaaagaagagtacatttgggagaaataagtgaattttgttttagaaaaaaaaatatgcgtatgtgtgttttattttttagacagagtctcwctctgttgcccaagctggagtgcagtggcatgatctctgttcactgcaccctccatctctcaggttcaagtgattctcctgcttcagcctcctgagttgctgggactacacgccaccatgcctggctaatttttgtatttttagtagagatggggttttgccaagttggccaggctggtctcaaactcctgacatccttggcctcccatagttctgggattacaggcatgagccactgtgccctgccaaaaaaaagttttgaagtggaaatgcctagtaggtagctatcattatattatatatatta

SEQ ID NO: 568689 - DNA, 613 bp, Homo sapiens
aaacttgtgttgtttataactaggaggccgttgtactattattattcctattttatggttgagaaaaccaaggcatggggaaattaaatgacttgcctgaaggttttctactgctagtaattggcaagaggaaaagaaacgtgcaagaactttattgattggatgggaatggtagatacattaatttgaaggattttgtcttagtagatcttagagaaagaagagtacatttgggagaaataagtgaattttgttttagaaaaaaaaatatgcgtatgtgtgttttattttttagacagagtctcactctgttgcccaagctggagtgcagtggcatgatctctgttcackgcaccctccatctctcaggttcaagtgattctcctgcttcagcctcctgagttgctgggactacacgccaccatgcctggctaatttttgtatttttagtagagatggggttttgccaagttggccaggctggtctcaaactcctgacatccttggcctcccatagttctgggattacaggcatgagccactgtgccctgccaaaaaaaagttttgaagtggaaatgcctagtaggtagctatcattatattatatatatta

SEQ ID NO: 568690 - DNA, 618 bp, Homo sapiens
agaaactaaaactgcccttttccaaagctctgcaaactgaaactggtgactttaagcttcagaaaaatcactgcaacagagcacttatgccttaatgccaatcttaatgcctgctgctatctgggtcactcagagagtttaccagaatgtttaatgaawtaaccagagacattcaaattgcaaaccagtaaagcacatcacattgcaactgctatcttcagtctaccatttaaacttgcctcaaactcacctctagaaattgtttcacctagctgccctctaaactcaaaaactaagatcataatttgctccaaatattaactttgtttttttaatagaagaatactctgaattcctttcaagcaatacaatctaaaatgagcaagttagcctcaatagcaccccaaaatagaagttcttggtatcttaacagcttaacaaggaggagcttgtgttcctactgatgtcaaaagaaatgcttaaagatctcagttggctttatggtgattctagaactgggcaatacttgccaccttaaattagaataaggtttccaatgagttacagcagaggagattggcttcatagacagaaaaaggtctgaagaaagcagaaaca

SEQ ID NO: 568691 - DNA, 583 bp, Homo sapiens
gcaactgctatcttcagtctaccatttaaacttgcctcaaactcacctctagaaattgtttcacctagctgccctctaaactcaaaaactaagatcataatttgctccaaatattaactttgtttttttaatagaagaatactctgaattcctttcaagcaatacaatctaaaatgagcaagttagcctcaatagcaccccaaaatagaagttcttggtatcttaacagcttaacaaggaggagcttgtgttcctactgatgtcaaaagaaatgcttaaagatctcagttggctttatggtgattctagaactgggcaatacttgccaccttaaattagaataaggtttccaatgagttacagcagaggagattggcttcatagacagaaaaaggtctgaagaaagcagaaacaaagaatttaaagtggattggctattttaaagctggttaaagttgcaaaagacaggaatagggaaacagaataataaataactggttggttaacatcaggttactcttttgtaaggatgccaattgaaactggcctgtttggraaattagatttttaggttattaggtta

SEQ ID NO: 568692 - DNA, 541 bp, Homo sapiens
gttcatattatgttcattttgttcatttctcaagccattaccttgtttaataacttagaatggcaccattgtgcatcaagaagcctaaccctgaattgttaatctgtaattaatttctcatctcaaccaatctcatctcatccatctagtcattgaccccagttttaaacctcagtattactcttcacaaaaattacagtcattatcacattcttcttctacactccagggtacttgaagaggtgctttaaatcagtacctgcttcaaatgagtgtgcttagaatttttagcatcatgttggcacaaggtttttgcttgctgaagaaatctggaaatttgagacttagatgcatttaagcctcaaaaataccttacagataatattaaatcctgactagtttttagaaaactcaattaaagagaataaattaatctttactcttacttaatagaaagccatgttatttatgaaaccattttactttaacraatatttactaatcttctattatatgtaaaatgtcagtgataccatagtaa

SEQ ID NO: 568693 - DNA, 544 bp, Homo sapiens
ccggctaatttttgtatttttagtagagatggggtttcaccatgttaggcttgtctcatactcctgacctcgtgatccacccgcctcagcctcccaaagtgttgagattacaggcgtgagccactgtgcccagcctataaatatttttatggaaaggctgatggtagtgtgtccagagttgtaatccagttataattttaaattggaaggctcagattttcttccttacagttttcaaatacaaattatcaaatttcaccagttagatacataaaaataaaacatgttgcataggggakttctttaacttcctagagttgctatcagccattctgcttttatccagatttcatttgttaaatgtgttctctaagccagagttgatggaaccttctcttttgcttcattatcatgttgatactatatcattctcatatgataccataatggaattgcatgttttgcattcttatggaccttttaaaccacttatttgtattttctacagcattgttcaggatcaagcacagagaggaattcaatg

SEQ ID NO: 568694 - DNA, 441 bp, Homo sapiens
ttaaggaggaaaaaagaataaaaatgaaaatattgactttgactaagttgtaaactttcaaggacttgtgtagtgcaaatgcctgcatttatttctgtgaattctttatgctatgatgagttataggaaggtctggggggtattcctgggccagtaaaatcytgtagacttgggacatttttcaaagttaaataaattagctccctctatacattttttaaaaataactaaattccttgtcaacagggaggaaaactatagaagttgaaacatttttcaactggtttggtttgaagttgtggtcttcttaatgagtacattagatctgttctattgtctattggttgatcccacagaaactattgaccatttgacccaaaccaagcaaacccccaaacaaaaccaaatagaaactactaataccgtagttacaatggtgtg

SEQ ID NO: 568695 - DNA, 580 bp, Homo sapiens
ctcggctggggtaggcagagtgtcatagtatctgaagctgttctttcagagggctggtggccaggcaggactcatgaaacagacatttcttacccctaacctaattcacccccaagctgggagctgggaatactcagaagcaaatgtctcttccaggatctccttatgtgaccccacagacaggaatcaccctgaaacctcccattcctccaatcttgtcctctactctctttctctgacacacacacacacactcttttctctctcwcacacacacacacttttctctctcacacacacactcacacacactcacatatactctcacacacactctctcacacactctcacactcacactctctcaaacacacacactttcaccctcacacacactctctcaaacacacacacacactggctcactctcacacacacacacacaccctctcacactctcatacactcacactctcacacacacaatttctcacacacactcacactctcacacactttctctcacacacactcccacacacatactttctctcacatacactctttctcacacacacac

SEQ ID NO: 568696 - DNA, 580 bp, Homo sapiens
ctcggctggggtaggcagagtgtcatagtatctgaagctgttctttcagagggctggtggccaggcaggactcatgaaacagacatttcttacccctaacctaattcacccccaagctgggagctgggaatactcagaagcaaatgtctcttccaggatctccttatgtgaccccacagacaggaatcaccctgaaacctcccattcctccaatcttgtcctctactctctttctctgacacacacacacacactcttttctctctctcacacacacacacttttctctctcacacacacactcacacacactcacatatactctcacacacactctctcacacactctcacactcacactctctcaaacacacacactttcaccctcacacacactctctcaaacacacacacacactggctcactctcacacacacacacacaccctctcacactctcatacactcacactctcacacacacartttctcacacacactcacactctcacacactttctctcacacacactcccacacacatactttctctcacatacactctttctcacacacacac

SEQ ID NO: 568697 - DNA, 449 bp, Homo sapiens
tatgactgatgatcttgtgtgatcacactccgaagccatccatttgattatctgaccttccctgctgaaaccatgaactccctctactaaagtgctaaatagatggaagaaaaatacctgaaatgcagaaaaattaacatagttttgaggaagttgagatagttcttgaggtcattgtgtcattctctcagggtggcacacacaaaaatggagaatactttacagccaaacaaaatttaaaaatcattaataagaaaatgctattttaatgaacatggtttatgggaggaagagagagaaaaaccctagattttcttttctttcctttctttatttgagacagaatctttctctctsttgcccaggctggagtgctgtggtgtgatcctggcttgctgcaacctctgcctcctggctcaagcgatcctcccacctcagcctcttgagta

SEQ ID NO: 568698 - DNA, 531 bp, Homo sapiens
cagctttctcagagtaaagtaactcagtygctacaggcaatgggaaaaactgactgaaggaacggggcatgtggaatttgaaggctcccaatcttatctttggatataagtggatacagtcatttctaactatctttatttttcttttgaggcccatgtcaatctttttccctggtgcattgggtttcaaaagaaccaagcactcggctgcggctggaagtagtctaagaggttagctggcacccagccttctagtactcagatgatacaacagagcctccagaggggagggtgaacagacaaaagacctcttagaacccagctcttggccgctctcatcagcattcttcttttcataccaaatgtgggagggacacatatttccccctcaaacattttcagtttctatttagaacagtccaggtaacaacaacaacaaaaatgtatacagcacattttttttccctaagaataaaaaataagtttgtggtaatttgctatgtaaagggcaaaagagttcaagacaatata

SEQ ID NO: 568699 - DNA, 586 bp, Homo sapiens
atagctaggactacaggcacgagccactgtgcccggctaattttgtattctggttagagacaggggtttcaccatgttgggcaggctgatcttcaactcctgacctcgagtcataccgcctgcctcaacctcacgaagtactgagattgcaggtgtgagccactgcgccctgcgcagatgttgaagttatgctaacacttcatgtctcagtttttcaagctttttgtggtttttgttctgtgttttaaaagaytttcttaatttcattttccaaattactaatctaatcctcaactatgtccttttgagaatttggtccatctttggatgtttttatttcagtaattatacatttcatttcagagaactctttctcctactctgattgcaaagttttcttgttttatggattaaatattctcttctattcctgagggtactatttagaatattttaaaagttctcttatgttctttatataatttatttttctcatcatcagatactgtttgttaatcttggtttttgccccttccagattgatttttctcaaatacctgttgtccctttgtatgaaaagctagcc

SEQ ID NO: 568700 - DNA, 472 bp, Homo sapiens
cttctgattttagagccaatgaaagtgaacttgagagaacttggagccaatgcgacttgcctacatccacagggtcaaaaataaaactggtctctaatcaacgagaatctgataaaacatgctgtatgttctgaaasccaattctaatcatgagccttggattaattaaagtccctggaacttgcaatttctgttctctccctctgcctcctcatacattctctttggatggcatgtgtaccaaacaacattgctgtgtggtttacactagaggctggagactatgagaagaggaataagacccaacacctacctttataaaagactcacaatcggccgggcgcggtggctcacgcctgtaatcccagcactttgggaggccgaggcgggcggatcacgaggtcaggagatcaagaacatcctggctaacacagtgaaaccctgtctctactaaaaatacaaaaaaaattag

SEQ ID NO: 568701 - DNA, 472 bp, Homo sapiens
cttctgattttagagccaatgaaagtgaacttgagagaacttggagccaatgcgacttgcctacatccacagggtcaaaaataaaactggtctctaatcaacgagaatctgataaaacatgctgtatgttctgaaacccaattctaatcatgagccttggattaattaaagtccctggaacttgcaatttctgttctctccctctgcctcctcatacattctctttggatggcatgtgtaccaawcaacattgctgtgtggtttacactagaggctggagactatgagaagaggaataagacccaacacctacctttataaaagactcacaatcggccgggcgcggtggctcacgcctgtaatcccagcactttgggaggccgaggcgggcggatcacgaggtcaggagatcaagaacatcctggctaacacagtgaaaccctgtctctactaaaaatacaaaaaaaattag

SEQ ID NO: 568702 - DNA, 575 bp, Homo sapiens
tgacacaaaccttcaatttgtaaaaaacacagtatctgtgaagcacaataaagtgagatgtacctgtgtgtgaagagagtttcagtgtcttgccttgcaaagcactgagccatgccttttatggctctgctgtagatattcaacttcacactccctcatataaaatgatgatcggcatgacaatggcatgtttcttaaacaagtcttatatattctatctgacaatgccccacaatgttcagacattacttgggcaagttttaggacctgtgatagaacacaaattcctaggtgagaacactttgattagttttctattgctgcccaacaaattatcacaaacctagtagcttaaaacaagacaaatgtattatattatcacagattctgtgggtgaggattccagcacatttctgttgcatcctgtactcacagtctcataaagctgcaatcaaaatgtcagccaggactgcactttaagtttggcttaaagttctaaggcttaagttcttcttccaggctctttggttgttgscagaatttggttcctttggctaaaggaccaaggtactctc

SEQ ID NO: 568703 - DNA, 587 bp, Homo sapiens
agaatgggggctataaaatatgacctgtctcccaatttatgaacaccttctatgaaatcacggacaattttcaccaggacactctcactgacagctaaactataaaaaaaaaaaaatgaacaaacaaaaaattttttttatcaccttttatccatttatcacctttgacatgtagataacctcagctacagttgacccttgaacaaygcaggagttaagggaactggctccctgcaatgttagaaatacaagtataacttttgactccctaaaaacttaactacttaattgccttctgttaactggaagccttgcggtgacacaaacggtcaattgacacatattctgtagattgcatatatattatatactgtattcttacaataaaggaagctagagaaaataaaatgaaggccattatcttcagcagactaatgcaggaacagaaactcaaataccacagattctcacttgtaagtgggagacaaatggtgagaacacatggacacgaagaggggaataacagacactggggcctatcagagggtggaaggagggagaggatcaggaaaaatactaatgggtac

SEQ ID NO: 568704 - DNA, 495 bp, Homo sapiens
aactggttattctggttaacagctcctgtgatgttttatcatagttcttggcttctttgtactgggttagaacatgttcctttagctcaatgaaattcattattacccaacttctgaagcctacttctatgaatgcaactgtcttagcctctgcccagtactgtgcccttgttaaagaggtgttgcaatcatttggaggagaagaggcactctggctttttgagttttcagcattttttcatkgattcttttccatttttgtgagtttattgagcttcagtctttgatgctgctgacctttggatggggttttttaagagactttttttgatgctgctgttgttgctttctgtttgtttttcttccaacagtcaggcctctcttccatagggctgctgctctttgctgggggtccactctagacccgagtcacctgggtccctcccacacctggaggtgtcaccagtggaggctgaagaacagcaaaaatgaata

SEQ ID NO: 568705 - DNA, 610 bp, Homo sapiens
taaagaaaccaaaagtgtttattaaagktgccgctgatggccactgcttaattgaatcaagccaatagggcagagttttttagaaacagagcattgagaaagtgtaggttttgcatatttaaatggataacaatccagtaacaaatattacattacgttaatatgtataatttagttcgttagcttgaattgtaaagaaatctcttcactgcacaaaatacattgacttttctaactgtgtgtgtgtctattagccaatttagcttctcttttctgcccattcacttgtaaaagctgctaattcatcaacagaaagtggatacaatctacatacaaaatgagttagaggcaaggaagcagttgattgcagacatcaagtaacttattagcaatgttttacatagctttgttctttaatggattgtgcaggttcattcttcattgtgttgacatttaagagagaaattaaggaaaagtgaatggtggttaaacatttggtacaaatacaatagcacgatgagtgtgggtattgaagaaggtatgtcagatgaatgccagatagtgagttgcaggcttatgtatcacctggtttctataaaatgagcagaaa

SEQ ID NO: 568706 - DNA, 538 bp, Homo sapiens
actggacttggggtaaccactaatgaagatatggctgcagtgacaaaggacttagatcacaacactaaattccctttgaatacttagaaagccttcccaagaaggagtacaaacaatccagactgtgagactacaataaatacccaaacattgacaaatattcacaagcatcaagactacccaggaaaatgtgacctcactaaacaaactaaataaggcaccagtgactaatctcagagtgacagagatatgtaatttttcagacagagaattttaaaatagctgttttgaggaagctcaatgaaattaaaaataacatagagaaggaattcagaattctatcagataaatttaacaaaaagattgagataattaaaaaatatcaaggagaatttctggagctgaaacattgaattgacaaactcaagactgcatcagagtctctcaacagcacaatggataaagtggaagaaarcactgaggacaggccatttgaaaatacatagtcagaggagacaaaagaaaaaataatgaaaag

SEQ ID NO: 568707 - DNA, 622 bp, Homo sapiens
agaattggaagactatctgccattaaaaagaatgaaatcctgtcatttgcagcaacatggttgaaactggagttcattatcttaagtgaaataatctaggcacaaaaagataaatatcacatgttctcacttatatgtgggagctaataacttgattacatgaaggtggagaatggaaaggtaggtaggaaacagagactggaaaggatgaatggagggtaggagggaaggtgaagagaagagagttaaaargtgtaaacatatagttaaaagaaataaattcaatgcttgatagcagagtacagtgactacagttaacaaaatgtattatactcaggtgatgaacacctaaatacttgatcactatgcaattatatacgtgtaacaaaatcactatgcactatatacgtgtaaaattaaatgcgtacaaataaaaataataaaatactaatccagtatcattcactgacaatgttaactcaggtggataggcattaagtcaatactactataagaaccacttcttgtttatgttaatgccatatagaatgaaataaaattcactaaaatccaaaaaattagaaaaactatcaaaactcaataatattaagacaacccaata

SEQ ID NO: 568708 - DNA, 501 bp, Homo sapiens
atcattaaaatcatacggtgtaggtaatcaccctttgagagcactagtaaggtggagaggggagcgaaactggctgacttgatgcagccaggaggaacatctccaaccgagtgacaggaacatcaggaagattggcacactttgagcagatcttgagggaaggcattgagagtggatggagggaaaacacagatgctgggctgaaggaggaggaaactgggaacgctgcatggggctgcctaaaactgrgacttattgctggcacccagtgactcctggggaagtgatgagttgaacaagtaaggagtggcctgttgctaccatggatattgagaattctaacagcaggaaaacccatgacccccatgggcacttgagctgccatggtgagatgctaagagaggtggtaggggaaggattccagcctttgcaaagaccagggtgtttggcaccagaatggctacagaagaacatggccaggaatatctatccctgaaggct

SEQ ID NO: 568709 - DNA, 547 bp, Homo sapiens
tcactatttcacttatccatgagcatgggatgtgtttccatttgtttgtgttgtctataatttctttcagcagtgttttgtagtttttcttgtagaggtctttcacttccttggttagatatcttgctaagtattttattttatttttttgcagctattgtaaaaggggctgcgttattgatttcattctcagtttggttgctgttagtgtatagcagagctactgatttgtgtacagtaattttgtatccagaaacattgtttcatttaccagttctaggagctttttgtatgactctttagggctttctagatatacaatcatatgatcagcaaacagagtttgacttccctttaccgatttggatgccatttactttttctcttgtctgattgctctggctaggactcccagtattatgttgaacaggagtggtgaaagtgggcatccttgtcttgttycatttctcaggtggaatgttttcaacttttcccagttcagtataatgttggctgtgagtttgtcatagatggcttttattacctt

SEQ ID NO: 568710 - DNA, 581 bp, Homo sapiens
tgagaagttgaaggtactttattcccatatttacaataaaataaaatgcaacaaactgtaaattcatgaccagttttgaacccattataaagctaagttgacagagcaactgtgatattgtgaaatacatatatttagtcttcagtccccattttttgacatttaactcataaaatccttggactatccagtgttataaaattttctatgctactgacttgactagtggctgacaacctctaggtagccacaggattgggctggtcactagaaagactaaggcaggattagacggctgagactttcagtaccactcctaaaccttcagtggggagagaggggctaaaagctcagttgagcaccaacagcaaatggtttaatcaatcatgcctatgtaataaagcytccataaaacccctcaaaaaacaggattcagaatgcttctggatagctgaacatgtagaagtttttgaagagtggcatgcatgaggagcgtatgaaggctccatgcctcttcacgcatgcattgctgtatgcatcttttcatttgtatcctttgtattattctttataataaactg

SEQ ID NO: 568711 - DNA, 560 bp, Homo sapiens
gaattaaaattttaaaaaatatatttttaaatatttcctcttatttccatgctcttaattgatgttagtggctttaggtacattttaagactttgtacattacttaactcatttggttatcaccctttagccaatgtattagttacccagttttaccaatgtgctatctgaataccctgaaaatagaaataagatgacagtgactgtttccatcaaattgtgctattagaaytttaaataaataggaaataattaaatatctacaaagtcataacaacttctaactcgttctcaataaatgatgctgtttgaaacttttttaattctggaaaattataaataacctagagataaataaattctgaattgataattgttaaaatacccagacattctgatgtaatcattaattgaatgtaatgccataaatgcacatttacgtgaagcaatatttatcccatattaagtgaaaaaaatgctttaaaacaacaataaattgcacctctcctagagtaagagagaatagattttccctccaatcttaaaattaaaaaataaaa

SEQ ID NO: 568712 - DNA, 560 bp, Homo sapiens
gaattaaaattttaaaaaatatatttttaaatatttcctcttatttccatgctcttaattgatgttagtggctttaggtacattttaagactttgtacattacttaactcatttggttatcaccctttagccaatgtattagttacccagttttaccaatgtgctatctgaataccctgaaaatagaaataagatgacagtgactgtttccatcaaattgtgctattagaattttaaataaataggaaataattaaatatctacaaagtcataacaacttctaactcgttctcaataaatgatgctgtttgaaacttttttaattctggaaaattataaataacctagagataaatmaattctgaattgataattgttaaaatacccagacattctgatgtaatcattaattgaatgtaatgccataaatgcacatttacgtgaagcaatatttatcccatattaagtgaaaaaaatgctttaaaacaacaataaattgcacctctcctagagtaagagagaatagattttccctccaatcttaaaattaaaaaataaaa

SEQ ID NO: 568713 - DNA, 513 bp, Homo sapiens
aatctaataggtcccaggccaaggacaagctattgaatagtggtcagcaaatcaattaatgtatctctgattctaagacccagggaccatggagaccaagtagatcatagatattttaatttatgagttccttgtgatagcaaactactgcatattactctacatactgctctgggtaatcgagtatagaattcattaccctatatttatttttctactttaagattaaattctatcagaaaatatccatatccacagaaactcagtcatacttaaagaaaaatcccagcagcaacagtccatatttacatggatcaattattgagtaaataaataaatgggtgagaaaamacacatctcctctaaggaaaattttcaaataatttatttagatatttgtattcaaggatgtgaggcataagcctctctccattaagtatggcctgggcatagtgacttccttgcaaagagaagagtgtcaaatagaggaaaagaaaagttacgtggcattga

SEQ ID NO: 568714 - DNA, 564 bp, Homo sapiens
cataaccacaagttagtcaaaggaagataggtcataaatggttcggataacatggttattggctatgattaagtgtcattagagttgggaagaaaaggccaacagcacaaacagaaatgtaggcctctggttaactgaatatttaagataagttgataggaccaatatatttgttcaagtttatattatacccttacatgccatatcatgaacattttagacctgcttggcttactttatctatcctctgggctctatgtttattgaagagaggaatttttctccaatcatggcaaaatttattccattaaggttatgcattaaatctcaaagttttataagcatttgttctctgactcttttgatgaattacttcttcttaaatgaaagtaactccagatagttttcatgagttcatgggatctaatacattaatcacttttggccccattttattaacattttaaaatttcctggccctggactataaactgcacactatgggttttccttatttattctcttctgcttctagataayggaatgtttagataacatcttacg

SEQ ID NO: 568715 - DNA, 530 bp, Homo sapiens
ttgtacaaacttttaaaacatggaaagctcccctctttttaggctttggctaaatatatggaaatatttttagtggaaaagtaaggatgaaaatattgtcaagttctataagggagtgcataaataaataaataaataaataaataaataactgatttctctttggcctaaataatattgttcatagcactgattgttgccagtagtctaaccatgacacacattgggacatctccttcccagtgtttcctccccagatcataagctgatgtgttctggcccagttccctaaccctggactagctgtaagtctctagaaacattgagactgatgcacatgcatacactggccacattagtttagattcaccatagacagataaaataactttgcaataatattttgtttacgtttgagtgatgaagtcaatattcaagcatggattagtgttaaatgggaatcatataatggtaggatacattttctgaattgcagtctaataytcaaaatttcccatgatatctaagaa

SEQ ID NO: 568716 - DNA, 563 bp, Homo sapiens
aacactttgtttctgagttatttcacctaaaaacccataaatctagtctaatgagaaaaacaacagacaaatttgaattacagtacatcttccaaaataatttcccaatactcaaaactatcaaggccatcgaaaacacagaatgtgagaaactgtgatagccaagagaagtctaaagagacatgaagcctaaaatatgttgtggtttcctagagaaaacraagagcatttgggaaaaactaatgaaatctgaatacagtatggactttattaaatagtaatgtgtcagtattgagtcattaattgtgatgaatgttgactgcgaatgtcagatattcataatagaagaaacagagtgtggaggatatgggaactttttttcattttttactgtaaatctaaaaacattgtaaactaaaaagtttatcttaaaaacctacttaaacatataacctaaattaataactgagcagtttgaagttattaatatgattcatattttgttttaactaagccaacaacctcaaaagtatttccaaggcttattatatgcttgagcaact

SEQ ID NO: 568717 - DNA, 429 bp, Homo sapiens
catgtggaactgtgagtccattaaacatctttgtttattaattacccaatctcaggtatgtcttaattagcagtgtgagaacagactagtataacatgattattttatgtggtgttaatgacctactagaatgtattcgatggatatggcaatacatagaaaaagctttttcatggcacataatagtttatatcaactggtgtattcacaggtttgttttctgtgtaactaaaaacaakggatgctgatatggtttgggtgtgttcccacccaaatctcatgttgaattctagtttccataatccccacgtgtcatgggagagacccaatgggaggtaattgaatcatgaaggtggttaccctcattctgttttcatgatagtgaatgagttatcatgatatctgatggttttataaggggatttttcc

SEQ ID NO: 568718 - DNA, 497 bp, Homo sapiens
actaccatatgatccagcaatcacactrctaggtatataccccaaagaaaggaaatcagtatatcaaagagatatgtgcacatttatgtttatcgcagcattattcacaatagctaagatgtggaagcaatctaggtgcccatcaacagacgaatggatttttgaaatgtggcgcacatacacaacgaactactattcagccataagaagaatcagattctgtgatttgcaacaatacagatggaactgaaggacattatgttaaatgaaataagccaggcacagaaagacagacttatcatgttctcattcatttgtgagagctaaaaattaagacacttgtactcgtggaggtagagagtagaatgatggttatcagaggctgggaagtggggagggggttggggagaagtaaggacggttagtgagtataaaaatgtagttacatagaataagatctgctttatagcacagcaggtaactacagtcaacagtga

SEQ ID NO: 568719 - DNA, 514 bp, Homo sapiens
aaaatgttctggaaactctcagcaatagaatcaaacaagcagaagaaagaatttcagagctcgaagacaaagttattgaattaacccaatccaacaaagaccacgaaaaaagaataagaaaaaatgaacaaagcctccaagaagtttgggattatgttaagtgaccaaacctaagaatgattggtgttcctgaggaagaagagaaatctacaagtttggaaaacatattttgggaaataatcagggaacacttccccagccttgctagagacctagatattcaaataaaataagctaaaaggacatctgggaaatwcatcataaaaagatcatcacctaggcacactgtcatcaggttatctaaagtcaagatgaaggaaataatcctaagagctgtgaggcaaaagcaccaggtaacctataaagaaaaatctatcagattaacagatttctcaccagaaactctacaagctagcagtgattggggccctatcttcagcttccttaaacaaaa

SEQ ID NO: 568720 - DNA, 514 bp, Homo sapiens
aaaatgttctggaaactctcagcaatagaatcaaacaagcagaagaaagaatttcagagctcgaagacaaagttattgaattaacccaatccaacaaagaccacgaaaaaagaataagaaaaaatgaacaaagcctccaagaagtttgggattatgttaagtgaccaaacctaagaatgattggtgttcctgaggaagaagagaaatctacaagtttggaaaacatattttgggaaataatcagggaacacttccccagccttgctagagacctagatattcaaataaaataagctaaaaggacatctgggaaatacatcataaaaagatcatcacctaggcacactgtcatcaggttatctaaagtcaagatgaaggaaataatcctaagagctgtgaggcaaaagcaccaggtaacctataaagaaaaatctatcagattaacagatttctcaccagaaactctayaagctagcagtgattggggccctatcttcagcttccttaaacaaaa

SEQ ID NO: 568721 - DNA, 587 bp, Homo sapiens
tcctggttttctcatttttcattcatttattcaacaaccatatgttcaggaactaggacaagcaccgaaattacatgacgaagatgatacagtccacccctcaacattgcatgctacaacctgaaaagcaagcagacacgcaggcaatttccacagacagtcacagacactatggcaggtattaaacagggcactgttggaacacacagaagagacatgtttctcagtttcatgtcaatattgtaggctgtttgctggagacaatatgtaggttagtayctgaaggacaagagagaagaatggctgatggagggaagaacacgtgcagagagctggagccgaggaaggtccctgtgttctgcgtagctgactttggcgagatgatagagcaaagggacagagtatggcaagtgatgagagatgaggcagaataacttgacaggagccaaactgatttgggtgtttttactccatgctaggaatctggaacctttcctgagagcaaaagtaaaccaatgacaaagtaaatgactggagatttaaaatgtcacctgtcacgtggctgcctttgaactggagtagcctga

SEQ ID NO: 568722 - DNA, 587 bp, Homo sapiens
tcctggttttctcatttttcattcatttattcaacaaccatatgttcaggaactaggacaagcaccgaaattacatgacgaagatgatacagtccacccctcaacattgcatgctacaacctgaaaagcaagcagacacgcaggcaatttccacagacagtcacagacactatggcaggtattaaacagggcactgttggaacacacagaagagacatgtttctcagtttcatgtcaatattgtaggctgtttgctggagacaatatgtaggttagtacctgaaggacaagagagaagaatggctgatggagggaagaacacgtgcagagagctggagccgaggaaggtccctgtgttctgcgtagctgactttggcgagatgatagagcaaagggacagagtatggcaagtgatgagagatgaggcagaataacttgacaggagccaaactgatttgggtgtttttactccatgctaggaatctggaacctttcctgagagcaaaagtaaaccaatgacaaagtaaatgactggagatttaaaatgtcacctgtcacgtrgctgcctttgaactggagtagcctga

SEQ ID NO: 568723 - DNA, 531 bp, Homo sapiens
atcagaattatgctgccctcatagaatgagttagggttgaagtccccccttttcagttttttggaatagtttcagtagaaatggtaccaggtgttctttgtatctctggtagaattcagctgtgaacctgtctgaacctgggctttttttttttttttttttttttttggktgttgtttttgttggtaggctatttactaccgcctcaatttcagaactcattattggtctatgtagaaattcagtttcttcctggtttagtcttgggaggatgtacatgttgaggaacttatcagtttcttctagattttctagtttatgtgcataaaggtgtttatagtattctctgatggtttcttttatgttggtcagtggtgatacccccaaattatttcttattgtgttatttgagtcttttctcttttcttatttattagtctggttagtggtctatttcattatttttttcaaaaagccaactcctgcatttgttgattttttgaagagtgtgtgtgtgtctctatgtccttc

SEQ ID NO: 568724 - DNA, 531 bp, Homo sapiens
atcagaattatgctgccctcatagaatgagttagggttgaagtccccccttttcagttttttggaatagtttcagtagaaatggtaccaggtgttctttgtatctctggtagaattcagctgtgaacctgtctgaacctgggctttttttttttttttttttttttttggttgttgtttttgttggtaggctatttactaccgcctcaatttcagaactcattattggtctatgtagaaattcagtttcttcctggtttartcttgggaggatgtacatgttgaggaacttatcagtttcttctagattttctagtttatgtgcataaaggtgtttatagtattctctgatggtttcttttatgttggtcagtggtgatacccccaaattatttcttattgtgttatttgagtcttttctcttttcttatttattagtctggttagtggtctatttcattatttttttcaaaaagccaactcctgcatttgttgattttttgaagagtgtgtgtgtgtctctatgtccttc

SEQ ID NO: 568725 - DNA, 388 bp, Homo sapiens
ctcatttggcctttctgaaaagtaaccagttgcagaagatgctcaattakgtgaaattagtaaatatagaagaagcatcagttgattactgtagcagttcaacactaaggaatatgatggttggtttggttaaattttacttaaagtgattcaacttaaacttggggggaaaaaatcttaggtcaacaattagtcggtacttagtctctgccaggtgtggactgaactatccaaagcatgctggagttggaaagagccaatgggagaaatgaggcaagggtcacgctgagttcagcccagaatttggggcatgctctacaaaaccgtgctgcctagggctggccacagagtcactgggggcaaaaggactaacaaaactgtaaaagtg

SEQ ID NO: 568726 - DNA, 530 bp, Homo sapiens
cagaagattacctgaataacatttggccaattagtaaaatctttttctaatgactgaatacacagtgctataaactaaatatttgtctcccacccccaaatttctatatggaaattctaaccctaaatatgacggtttagaaggagggcttttgggaggtgattagattatgatggtaaagccctaataaatgggattagttcccttattaaaaagaagacctcaaggctgagtgctgtggttcaagcctgtaatcytagcactttgggtcgctgaggtgggcatactgcttaagctcaggagtttgataccagcctgggcaacacggcaatactgtgtctctacaaaaaatacaaaaattagttgggtgtggtggtacttggcttgtagtcccagctacttgaggggtcgaggcaggagaaacccaggaagtcaaggctacagtgagccaaggttgtgccactgcactctagcctgggtgacaaagtgacaaagtgagaccctgcctaaataaataaataaataaataa

SEQ ID NO: 568727 - DNA, 506 bp, Homo sapiens
tccggtctgcagctcccaaggtgattgacacagaagacaggtgatttctgcatttccaactgagttacctggttcatctcactgggactcattggacagtgagtgcaacccagagggttagccgaagcagggcagggtatcacctcacccaggaagcacaaggggtgggggagatttccctttcctaggcaagggaagctgtgacagactacctggaaaaacaggacactcccacccaaacactgcatttttcccaaggtcttagcaactggcagacaaggtgattctctcccatgcctggctcagtggctcccacatccamaaggcttgctaactgctagcacagcagactgagattgatctgtgagactgcagcctggctgggggaggggcttccaccattgctgaggcttgagtaggtaaacaaagcagctgggaacctcgaactggccagagcccaccacagctcaacaaggcctactgcctctggactccatctctgtggg

SEQ ID NO: 568728 - DNA, 506 bp, Homo sapiens
tccggtctgcagctcccaaggtgattgacacagaagacaggtgatttctgcatttccaactgagttacctggttcatctcactgggactcattggacagtgagtgcaacccagagggttagccgaagcagggcagggtatcacctcacccaggaagcacaaggggtgggggagatttccctttcctaggcaagggaagctgtgacagactacctggaaaaacaggacactcccacccaaacactgcatttttcccaaggtcttagcaactggcagacaaggtgattctctcccatgcctggctcagtggctcccacatccaaraggcttgctaactgctagcacagcagactgagattgatctgtgagactgcagcctggctgggggaggggcttccaccattgctgaggcttgagtaggtaaacaaagcagctgggaacctcgaactggccagagcccaccacagctcaacaaggcctactgcctctggactccatctctgtggg

SEQ ID NO: 568729 - DNA, 524 bp, Homo sapiens
tgttcactgcaacctccgcttcccgagctcaagtgatcctttcacttcagcctcttgattagtagctgggattacaggtgtgtgttaccacacccagctaatttttgtatttttagtagagatggtgtttcaccatgttgaccaggctggccttgaactccccacctcaggtaatcctcccacctcggcctcccaaagtgctgggattacaggcatgagccaccmtccccagctggacatgcttaattcttttggcaactgaaagttgtgacaaaaattgtgaaattttgtctaccaaaaaaggcctttagagactcaatgcccaaagttttgttgggggctaattgtagacaccatctgcctagcacataccaaaattctagactctcagaaggaaagcaagtgttcagaatatgccatattgtttagacacagtgagctgcacttattcatctaggcaaagttattatcagcataagggacagtttaccattcaagtgcccagatgccagccaagggccaac

SEQ ID NO: 568730 - DNA, 589 bp, Homo sapiens
tgggcgagggattttgagaattktgattatggatttctaggtaatacttttgtaaattctgcgtgtggtctagtgtacttcattcaatttaacactgtgtaatacaagtgacagacacccaacccaactcaactttgtttaagcaaaatggaggatttgttataaaggacattggaatgtctcctggaacctgagagcatgatttcaatgggggcttaggaattgctataaccaagttcccacattccctcaggactccctccacatctcatgttagtgcttgtttcctagcctctgttgcattttttctccctgagagtgaactcacgtccctcacttctctgttcccatcattggaaatatggctactggcagctcccaaaatatatatcttctagttcagccacaagagactttccactctcaggcctaagaccaaaaatcctccagaagtgggcactgtgttgtgtgcctgtagtcccagctactcaggaggctggagcaggaggattgcttgagcccaagagtttgactctagcctgggcaacgtagcaagaccctatctctaaataaataaataaataaataa

SEQ ID NO: 568731 - DNA, 589 bp, Homo sapiens
tgggcgagggattttgagaattgtgattatggatttctaggtaatacttttgtaaattctgcgtgtggtctagtgtacttcattcaatttaacactgtgtaatacaagtgacagacacccaacccaactcaacttkgtttaagcaaaatggaggatttgttataaaggacattggaatgtctcctggaacctgagagcatgatttcaatgggggcttaggaattgctataaccaagttcccacattccctcaggactccctccacatctcatgttagtgcttgtttcctagcctctgttgcattttttctccctgagagtgaactcacgtccctcacttctctgttcccatcattggaaatatggctactggcagctcccaaaatatatatcttctagttcagccacaagagactttccactctcaggcctaagaccaaaaatcctccagaagtgggcactgtgttgtgtgcctgtagtcccagctactcaggaggctggagcaggaggattgcttgagcccaagagtttgactctagcctgggcaacgtagcaagaccctatctctaaataaataaataaataaataa

SEQ ID NO: 568732 - DNA, 493 bp, Homo sapiens
tattattaatttaccaataagaaacagaggctcagacaggctacaggtttttcttgatatcatgttgagttagtaataaagtcaaaatgaaaattctgcttttttgatttctcattcgatttttgtttttcttcagttcaccatactgaatgttcacactttgcaccatgaacccaggtgaggtacctatgatcatccaggccaggaccagggtgaggcaagtgaggagctgaaggtatttgcaaaactgtgagagtggtgtccccttcaatgttgtgtcctagatgacttgctcacttcacctttatcccagccctggggatctcacatgtggaagcagggatgaaggggtagtgctcaagaaaagaaatctgcaggygagcttcgaagaattcattttcttcaggactagtacctggaagtctgggctctcagaacagaaagctggaaaggaattgctttttcagagatgtcaaaatagcaaagaaacatg

SEQ ID NO: 568733 - DNA, 567 bp, Homo sapiens
agctgggactacaggcttgtgccaccatgctcagttttgcttttagttttgtttaaggtatttgtgtccaaaaatttaaaatttgtatatattttcttaacaataaaaggcattcaggattccaaataactgacttataaatgagctttcgaaatattattgtttgtatattgtcttttatatagttactttatcatatgtcttaatctcttttctgcgtgtaaactccttgaaggcagaggtcatgacatttttttgaatcctccctagcaaccagcacacagcccacaatatagcagagctcaaaaatatctgggatgaaaagatactgtgcgtggggatttgctttgaagcaatccagtttgggggcaggagatggaaatgaggtaaagatgaaacagaactggccatttsttaatcattgttgaagctgggtgatgggtatatgttcattatactattatgtctacttttttgtatctttttttaatttccataatctaaagattgtgttttttaaaatgtttgtttcattgattggtcaacagcattagaaagagaacttct

SEQ ID NO: 568734 - DNA, 581 bp, Homo sapiens
tttttttatttgttggtgttttgttgttgttgttaatctacaagtgggttggtgctgccagcttcccatcccacttggatccttttggggaccaggagtaaggatgggcctggggccccttctttgttggcatcacagcagccctgaaaagatgcctggccccagcaggaattacttctcagcatcctgactaaaaatgtccccagtcttccctgccccacagaggctgagcatagctcaggaatctccaggtggaggaagaaatgggatagatctatcttgyacttttccttgactcttggtcctactgtccttggtgaatgcaggggaaggcagaagaggcctgcagcttgccctgcagtcaagcgtaagctcagacctgccccttccacgccaggctgggtatctctgctggagccaaggtcaaccccaaacctcccagtgagggacaagtccctccctgaagggacaagtgcctgccttatttctcttccccaaacccccaaggcctgtacaggcctcagcaaagtggtggcttttaataagacccttaactgctctggggaaaaaatgcactcact

SEQ ID NO: 568735 - DNA, 621 bp, Homo sapiens
gactttagggtcaagtctcttgctaacwtcctatgtgaccttgggtaaattctttgacccttatttttcttacctgtaaaataaaagaattgggctagatgtctctgacagtcctccctgtatctacaatctgtgccaagatctaaagtcaaacaccctgcaaggccctgtgatacatatataaaccacaaagacagagccccgtcttccttgagtccacagttcaccctgcatgtccccatcatggttccccaacatgtcctctgtccccaaaatccagcacctcacccagtgctcaatcagtaggcattgctcaataactgttggtggttcgtgaataaatgccccatatgacagttaaaatcaggcatctactccaagcagcttcccagggtgtcaaggttccctggggagatattatgggatggcaaacttcccttactgaaaaagtagtcaaaggagaacaataagcccactcagtaaatatcagaactggaaagcccttcagaatctttcagatcactgcagatgaggaatgggaagcccagactagggatgtgacctacccagggccacacggcttgcttgcggcagaactaggagttaggagtggccccctag

SEQ ID NO: 568736 - DNA, 517 bp, Homo sapiens
gtgggtaagctctggatgttattcccaagctgcagccacagtgaggaggcacasaatttccacactgaaatcccagcagcacaggcaggtaataagtggatctgcctctgtattgtattgtgagtaggtggcctcctaacccttcggccctcccatgccagaaataatctctgagtacaggctgggcttctgactctgtgacctcttcctgtctcattcctactgaatgactctttacccggtcaagaagcgttccctttcatcacttctgaatgtatccttgctgctccgggtcagctaacactcacagagcttccttgacctggggcagctggaccgagcaggtggaggagctgcgaacctttccatgggagctttcagaagcctcacatctcttagctgggttcttcttgtagtttcctttatttttccggttgggtgtcactgccccatctcttcccctgccaggtttctggctctttgaacgtggactgaaccccccaccgccacctgtcac

SEQ ID NO: 568737 - DNA, 517 bp, Homo sapiens
gtgggtaagctctggatgttattcccaagctgcagccacagtgaggaggcacacaatttccacactgaaatcccagcagcacaggcaggtaataagtggatctgcctctgtattgtattgtgagtaggtggcctcctaacccttcggccctcccatgccagaaataatctctgagtacaggctgggcttctgactctgtgacctcttcctgtctcattcctactgaatgactctttaccckgtcaagaagcgttccctttcatcacttctgaatgtatccttgctgctccgggtcagctaacactcacagagcttccttgacctggggcagctggaccgagcaggtggaggagctgcgaacctttccatgggagctttcagaagcctcacatctcttagctgggttcttcttgtagtttcctttatttttccggttgggtgtcactgccccatctcttcccctgccaggtttctggctctttgaacgtggactgaaccccccaccgccacctgtcac

SEQ ID NO: 568738 - DNA, 565 bp, Homo sapiens
aggcccacactgaaatcacttctagatggtgcttgatacccggactgtgtaagcagatttgatgaggtaccctgcagtgaggtccctgaagtcaaggatcctgcctygtgtttctgtgcctgctccgaaactgctccccaggatctggcctctagagggtacacagtaagtactagtggagtaaatgagtggctttgctctgcctggtggccagctgctcgtctgttgacctcatttcctgtagcaagcttgtcctgagtcaggggcagggctgctgtcttctctgatgtcattagagaaggccgaggctgtgcatggtcacttacacctgcattcctaacactacgggaggctgaggcaggcggatcacttgaggtcaggagttcaagaccagcctgtccaacatgatgaaaccccatctctattaaatataccaaaaaaaaaaaaaattagctgggcatggtggtgtgtgcctgtaatcccagctactcgggaggctgaggtgggaggattgcttgaacctggaagacagaggttgcagtaagccgagactgtgtcactgcac

SEQ ID NO: 568739 - DNA, 565 bp, Homo sapiens
aggcccacactgaaatcacttctagatggtgcttgatacccggactgtgtaagcagatttgatgaggtaccctgcagtgaggtccctgaagtcaaggatcctgcctcgtgtttctgtgcctgctccgaaactgctccccaggatctggcctctagagggtacacagtaagtactagtggagtaaatgagtggctttgctctgcctggtggccagctgctcgtctgttgacctcatttcctgtagcaagcttgtcctgagtcaggggcagggctgctgtcttctctgatgtcattagagaaggccgaggctgtgcatggtcacttacacctgcattcctarcactacgggaggctgaggcaggcggatcacttgaggtcaggagttcaagaccagcctgtccaacatgatgaaaccccatctctattaaatataccaaaaaaaaaaaaaattagctgggcatggtggtgtgtgcctgtaatcccagctactcgggaggctgaggtgggaggattgcttgaacctggaagacagaggttgcagtaagccgagactgtgtcactgcac

SEQ ID NO: 568740 - DNA, 565 bp, Homo sapiens
aggcccacactgaaatcacttctagatggtgcttgatacccggactgtgtaagcagatttgatgaggtaccctgcagtgaggtccctgaagtcaaggatcctgcctcgtgtttctgtgcctgctccgaaactgctccccaggatctggcctctagagggtacacagtaagtactagtggagtaaatgagtggctttgctctgcctggtggccagctgctcgtctgttgacctcatttcctgtagcaagcttgtcctgagtcaggggcagggctgctgtcttctctgatgtcattagagaaggccgaggctgtgcatggtcacttacacctgcattcctaacactacgggaggctgaggcaggcggatcacttgaggtcaggagttcaagaccagcctgtccaacatgatgaaaccccatctctattaaatataccaaaaaaaaaaaaaattagctgggcatggtggtgtgtgcctgtaatcccagctactcgggaggctgaggtgggaggattgcttgaacctggragacagaggttgcagtaagccgagactgtgtcactgcac

SEQ ID NO: 568741 - DNA, 631 bp, Homo sapiens
ttgtcagcactgtagacgtttggcctctactctcatactgaatgaaccagaacctgaattttaagatctccatatcccatgtatttccatcaaaagccaagaagcactgatacaatgcatagaatgtgtggtgcctgataattagagctcaataaatattacccaatagtagccacttttcattmacaagtggcaacaacgaccaaatattctatttcacttctctgtatataatatatgacttcaaaacataatgcttctcaaatatagtaaaccacagagttgatagaaaggcaacaggaaaatatatggaaggcctagaagggaaggagtttagtggagacacgggattcttcacgtaaacaaggagctaagtgccaataggtgactcgtgaaagacatttaagtgtcagaaattggtgcaataaaaatgcaatgggcttctcacctgagttatccttactaaaggaaaaaattacagtcttttccctttacaatttttttttttttttttttgagacagagtctcactctgtcagccaggctggagtgcagcagatctcgactcacttcaacatccgcctccccggttcaagctattctccggcctcagcctcctgagtagctggga

SEQ ID NO: 568742 - DNA, 631 bp, Homo sapiens
ttgtcagcactgtagacgtttggcctctactctcatactgaatgaaccagaacctgaattttaagatctccatatcccatgtatttccatcaaaagccaagaagcactgatacaatgcatagaatgtgtggtgcctgataattagagctcaataaatattacccaatagtagccacttttcattaacaagtggcaacaacgaccaaatattctatttcacttctctgtatataatatatgacttcaaaacataatgcttctcaaatatagtaaaccacagrgttgatagaaaggcaacaggaaaatatatggaaggcctagaagggaaggagtttagtggagacacgggattcttcacgtaaacaaggagctaagtgccaataggtgactcgtgaaagacatttaagtgtcagaaattggtgcaataaaaatgcaatgggcttctcacctgagttatccttactaaaggaaaaaattacagtcttttccctttacaatttttttttttttttttttgagacagagtctcactctgtcagccaggctggagtgcagcagatctcgactcacttcaacatccgcctccccggttcaagctattctccggcctcagcctcctgagtagctggga

SEQ ID NO: 568743 - DNA, 532 bp, Homo sapiens
cacatttgctgtttgtctgcctgaaatactgagttctaggtcctcttgttgttgaatatttcttgttgtttaggtgtcagctcagatgctacctgctcagagatgccttactttactttctatagaaaaatagctaccttactctcatttaccaatctctttcaaataactataacttattttcgtttaactaagtatagaaaataatatatattatttattatttatgtctatatattgtgtgtgtcctcctatcaaacatctccttgcctatcttgttcatcactgaaatctttgactctggctaacaatttgcttcacaagaatttgtagatgaaaggagaaaaaaggaaaaaaaaggagaggagagaacaggaaaggagagaagaggagaagaaaggaaaggaatgaaaggggaaggaaaaaagaggaagaaagggagggagaaaacaaataaataaaatacttaggcaataaaatgagaaaaaatatgagaaaytatactgggaaaaaactatcaaggcattgtttt

SEQ ID NO: 568744 - DNA, 617 bp, Homo sapiens
atgccactgcactctagcctggacaatagagccagactatgagaaactttaaggaaaaamaaaaaagaagaaagaaagaaagaaaaactatacaaagaaatattgtattagtcagctgaggatgccataacaaaatatcatagactaggtggcttaaataacatgaatttatttcttacagttctggaaactgggaagtccaagatcaaggtgccagcaaggtagattccattctgagctttcactcttctcttggtttgtaggcagtgattgtcttgctgtgtattaatgtgacctcttatttgttcaagagctgagagacagacagctttctctcttccccttgtataagggcactaatcccatcatgagcttattgtcacctttatgaccttctctaactctaataacttccccaaagtcccatctccaaataccatcacattgcaggccagagcttcaatatataaattggagaggactcaattcaatccatagcaaatctactcaaaaacttagatattacaaattgaaatcctcccaaaatggcaaactcactcacaggaaggcaagaaaagggagacacagggatgagaaacagatggactagaaaacaa

SEQ ID NO: 568745 - DNA, 617 bp, Homo sapiens
atgccactgcactctagcctggacaatagagccagactatgagaaactttaaggaaaaaaaaaaaagaagaaagaaagaaagaaaaactatacaaagaaatattgtattagtcagctgaggatgccataacaaaatatcatagactaggtggcttaaataacatgaatttatttcttacagttctggaaactgggaagtccaagatcaaggtgccagcaaggtagattccattctgagctttcactcttctcttggtttgtaggcagtgattgtcttgctgtgtattaatgtgacctcttatttgttcaagagctgagagrcagacagctttctctcttccccttgtataagggcactaatcccatcatgagcttattgtcacctttatgaccttctctaactctaataacttccccaaagtcccatctccaaataccatcacattgcaggccagagcttcaatatataaattggagaggactcaattcaatccatagcaaatctactcaaaaacttagatattacaaattgaaatcctcccaaaatggcaaactcactcacaggaaggcaagaaaagggagacacagggatgagaaacagatggactagaaaacaa

SEQ ID NO: 568746 - DNA, 617 bp, Homo sapiens
atgccactgcactctagcctggacaatagagccagactatgagaaactttaaggaaaaaaaaaaaagaagaaagaaagaaagaaaaactatacaaagaaatattgtattagtcagctgaggatgccataacaaaatatcatagactaggtggcttaaataacatgaatttatttcttacagttctggaaactgggaagtccaagatcaaggtgccagcaaggtagattccattctgagctttcactcttctcttggtttgtaggcagtgattgtcttgctgtgtattaatgtgacctcttatttgttcaagagctgagagacagacagctttctctcttccccttgtataagggcactaatcccatcatgagcttattgtcacctttatgaccttctctaamtctaataacttccccaaagtcccatctccaaataccatcacattgcaggccagagcttcaatatataaattggagaggactcaattcaatccatagcaaatctactcaaaaacttagatattacaaattgaaatcctcccaaaatggcaaactcactcacaggaaggcaagaaaagggagacacagggatgagaaacagatggactagaaaacaa

SEQ ID NO: 568747 - DNA, 308 bp, Homo sapiens
atttactaaagactctataccacgaccaaactttcagttaattcagtcaaattggtgaaaaatcagtccagccattttgttttgtgtgtgtgtgtgtgtgtgttttgagccaaacaactagttaatttattgtgtcacttttcagtawttcatgaactgggctaattaaaaaataacattatataaaggacttacatatgtagaattttgccagaattttgactgcttggatcagaaatacccattagtaaatcctccttgggaatgacccctagaagttttacagtcacctgctgataatttgatgt

SEQ ID NO: 568748 - DNA, 516 bp, Homo sapiens
gatttgtggttggcccacattaccattgtgaaatctggtgggttggcagaaataattttttttttactttatttttttaaaagagtgagcattactgttttttgttaaagagggaccattgaaagtaaattttctagcaacaaaatttaccccaagaaggaatattatgaaacagactcaaagatttttatgagatacggacatagtggttcttgattttcttattttattttattaagttctgggatacatgygctgaatgtgcaggtttgttacataggtatacatgtgccatgggggtttgctgcacccattaacctgtcatcgtttcaagccccacatgcattaggtatttgtcctaatgctatcccttcccttgctctcctcccccacaacaggccctggtgtgcaatgttcccctccctgtgtccatgtgttctcattgttcagctcccacttataagtgagaacatgcagtgtttggttttctgttcctgtgtttgtttgctgaggatg

SEQ ID NO: 568749 - DNA, 540 bp, Homo sapiens
tgtgcagtgtagaagtcatgcaataggaagctgcagccctggctaagctttctgcatactttctcatttaattctcacaaaaattttccatgtatgaagaggtactttttaaaattttattttagagacagaatcttgttctgttgcccaggctagggtgctctgttgcctaggcagaacctctgagggtgaggcccagtaacctgtgctttaaacaagccttccaagtgagtctgatgcatgcagatatttgagaaccactggtctaagtattggttaaagtactgaattatccagagtactgaactataatggcgtgattatagctcattgcatctttgaactactggagtcaggcaatcctcttgcttcagcctcctaagtagctggggctacaagttgtatatatccagggccagctaattttwgtttttttctttctttctttctgaggcagagtctcactctgttgcccaggctggagtgcaagtggtgcaatctcagctcactgcaatctcttcctcccgggttcaagtgatt

SEQ ID NO: 568750 - DNA, 540 bp, Homo sapiens
tgtgcagtgtagaagtcatgcaataggaagctgcagccctggctaagctttctgcatactttctcatttaattctcacaaaaattttccatgtatgaagaggtactttttaaaattttattttagagacagaatcttgttctgttgcccaggctagggtgctctgttgcctaggcagaacctctgagggtgaggcccagtaacctgtgctttaaacaagccttccaagtgagtctgatgcatgcagatatttgagaaccactggtctaagtattggttaaagtactgaattatccagagtactgaactataatggcgtgattatagctcattgcatctttgaactactggagtcaggcaatcctcttgcttcagcctcctaagtagctggggctacaagttgtatatatccagggccagctaatttttgtttttttctttctttctttctgaggcagagtctcactctgttgcccaggctggagtgcaagtggtrcaatctcagctcactgcaatctcttcctcccgggttcaagtgatt

SEQ ID NO: 568751 - DNA, 591 bp, Homo sapiens
gttcaagtgattctcatgtctcagcctcctgagtagctgggattgcaagcatgtgccaaaacacctggctaatttttgtatttgtagtagatatggggtttcaccatgttggccatgctggtctcgaactcctrggctcaagcaatcctccctcctcagcctcccaaaatgttggaattacatgcatgagccactgtgcctggccagagatactattattaccttttcttacagatcagagaagatactatagaggcagtagtacaaacggtggcaacgctgagcagccagcatcaactaagcacttaatctgtgcaaacactgatctaaacacttcatgtgcaaaattttgctgtatcctcacaatgactctatgaattctattatcgtaaccattttactgataagaaaacagaggcttaaggagattaaaaaacttgcccaagttttcaaaatgagcaaagtattagatctgggactcaaacccagggttatttgactccagtgcagaacttctaagccgtcattctgtgttggctgtctcttatcccttctagagtctgctcaaagccactgccatctgaccacttc

SEQ ID NO: 568752 - DNA, 591 bp, Homo sapiens
gttcaagtgattctcatgtctcagcctcctgagtagctgggattgcaagcatgtgccaaaacacctggctaatttttgtatttgtagtagatatggggtttcaccatgttggccatgctggtctcgaactcctgggctcaagcaatcctccckcctcagcctcccaaaatgttggaattacatgcatgagccactgtgcctggccagagatactattattaccttttcttacagatcagagaagatactatagaggcagtagtacaaacggtggcaacgctgagcagccagcatcaactaagcacttaatctgtgcaaacactgatctaaacacttcatgtgcaaaattttgctgtatcctcacaatgactctatgaattctattatcgtaaccattttactgataagaaaacagaggcttaaggagattaaaaaacttgcccaagttttcaaaatgagcaaagtattagatctgggactcaaacccagggttatttgactccagtgcagaacttctaagccgtcattctgtgttggctgtctcttatcccttctagagtctgctcaaagccactgccatctgaccacttc

SEQ ID NO: 568753 - DNA, 575 bp, Homo sapiens
ttatttcatattgaaacttgcagagtagttccaccaagattttccactttatgtttatgtttgttacatcaactctttatagttagtactagaaaatattcaagtagaataaaaacaaacaatatctacaacaaactcgaacccttagaaagtgttaaatgaatgtcacatttacctcaggggcaagacagatgcaaaaaacaaggtttctatttttatatcactattgacacacacaaaaagatatctcttaataccttctctgcttctttactatctttcttttctttctgttttccttcattcctcagtcaaaaacctacaaatacgggattaaaagaaagccaaaaaaaaaatcaaatagaacagaattttaggaggccaacaggatcataacaagatatggcaaagacagcaagcagaatcatgcatcagaaagtcctaccagaacaatcaaagcacaggcattacatgatgggatagtgtgagttaaagggaagtgcttataaraaagaaacttcttaagactttgttttagaataagacattatttactttgacatggaaatctaaac

SEQ ID NO: 568754 - DNA, 481 bp, Homo sapiens
aaacaataaaactaaagcatctgtatgattttgaaaagttgatccaagacagagtttgtacaatgaatactggtccaraaagaccttctgaacccatcaatcctttgggattatccaagaattaatcatcattcttatgttgatcttgctatatattaatacttcgttgtaaacacatggacaatgaatggagtagacatagacagatgacagtgtttttaaagacatggcagtgtttcctgtaggataagtgttttcaaatatgatcacttaatcaaatgagtctttaacaggtttttatttccgaagagataaaatgaattcagcatttgggaattccatattgcaatttacaacctatatatgactttcactacacatcttctcactttcactatctgagagtacaagcctctagagccttcttagcaagttcttttgaattgatggcagtgaggacatattgattagatttcagtag

SEQ ID NO: 568755 - DNA, 481 bp, Homo sapiens
aaacaataaaactaaagcatctgtatgattttgaaaagttgatccaagacagagtttgtacaatgaatactggtccaaaragaccttctgaacccatcaatcctttgggattatccaagaattaatcatcattcttatgttgatcttgctatatattaatacttcgttgtaaacacatggacaatgaatggagtagacatagacagatgacagtgtttttaaagacatggcagtgtttcctgtaggataagtgttttcaaatatgatcacttaatcaaatgagtctttaacaggtttttatttccgaagagataaaatgaattcagcatttgggaattccatattgcaatttacaacctatatatgactttcactacacatcttctcactttcactatctgagagtacaagcctctagagccttcttagcaagttcttttgaattgatggcagtgaggacatattgattagatttcagtag

SEQ ID NO: 568756 - DNA, 496 bp, Homo sapiens
cttttgtgaaagtccataggatctgcagctgggtaatttgttcatctctagtagtgccgaaatagcccaatgacacctaaatgcactccctggcatacttgtgagattgctaacgcatcaattatagatgtctctgttaaagtttcctggaagtatgtgtcccagggagctaatttgtaggcttgaaggctttgatataggtgtcgattaagttgaatttggacttttcataattggaaaatgttaattgaaacaaattctcatttttcagtacagctaatcagttccagtctttagcacattcattccaaaaatttccccattacatttcaacatttcactgatgaccttcatatgaagttgagtgtgstattatcgagtaaagattttagtctgatagaagaacaccataatagctggtacatggaataattttactgaaaagagaagagacattatgtcattggagtgccatgtacaattctgtttgatttta

SEQ ID NO: 568757 - DNA, 591 bp, Homo sapiens
acattctagaaaagaacaaaagtgcattaactaaatctggttttaataacgaccaaaagcagagttacatgtaattgtttactgaccagaactattacctgataattaggtattactgttaaacaatttaacatacaaagcaattgtcccaaaagtacacctgagtttaccttcagtcaggctacacatctttttttttttttttctctcttgagatggagttttgttcccgtttcccaggctggagtgcaatggcgcgatctgggctcactgcaacctccgcctcccaggttcaagcgattctgctcactgcaacctccgcctcctgggttcaagcgattctcttgcctcagcctcccaagtagctgggattacaggtgcccaccaccatgcccagctaattttttgtattattagtagagacggggtttcactatgttggccaggctggtctcaaactcctgacctcaggcggkacacccgcctcagcctcccaaagtgctaggattacaggcatgagccaccacgcccagccaaggctacacatcttgggatatcacctcagggttccagatggagctaattaagtac

SEQ ID NO: 568758 - DNA, 599 bp, Homo sapiens
aattcaacatgagatttgggtggggacagaaagccaaaccatatcactggcattttcagctttgttgagttcccatatgcttattttctaatttttaatttcttatttcatattttaatatcttacataagcttattttatatttattctattattmtttctctgctttcctaagataaattattttctaattaattttcagactttcttctattctaatatcattctttatggctttatatagatggacctagcatgttttgatatgaagtatttttattatatatctagtccacatctattctaatttctattatggcttattctatcattaacaagttatttattagtgcatttcttgatttctagacatataaaattttcatagttatttttaaaaattgatttctaggctaggtgctgtggctcatgcctgtaatcctggcattttgggaggctgaagcaggtggatcacctgaggtcaggagttcgaggccagcctgaccaacatggcgaaaccccgtctctactagtaatacaaaaaaattagctgggtgtggtggcacgtgcctgtaatcccagctactcaggaggctgat

SEQ ID NO: 568759 - DNA, 620 bp, Homo sapiens
ttgctcacagtgggccatcttttaatcctatttcaattcagagctcagtgttcccagcttcatcagggtcctcccacatgtctctattccaagttgcagggtcccatacttttccaatcaatgccctcactttaacagtagacacctggcaaggctgtgcatgcagctttcattgcaagtcagccactcacatgataacagtttgtgtctgtttttccacagttttagctctttctctccaggaggtaagactctcactcagggcagtcttagcagatttgaggytcagtatctgcttctgaagacaggagatagaatccctgaggtcatcattttctttcatcactttgtccgctgaacttaagagggaccaaccagcttcattgtgttccttggttcttgacatatggtcaatggtattatgtatagagtcgctaaactccttgcctcttatgagtgatgaatcaggagtgtcaaatgcatttattttgcataactctctaaacagttcctgccaaggactatcaatgctctccatactattagaaagtagagtctttagcattttggggtctagtcatattaagcagccaaatccagaaacctcaaaaccaatgaaa

SEQ ID NO: 568760 - DNA, 497 bp, Homo sapiens
tctgacaatttgcacactcttttgacatctatttaggtttgttgcaattttttaccattataaaaaattctctcacagtttaataaactttaattttatctaaatctgcaattagtgtaatatctttacaaattccctttcaaagatytcttcctaatatttttaaagactatgctttgtaaaacttcataccaaaaccagacaaggacacaacaacaacaacaaaaagcaagtccaggcatggtggctcatgcctgtaatcccagcaatttggaggctgaggtggagggagcacctgaggccacgaatttgagaccagactgggccatacagcaagaccccatctctgcaaaaacggtttttaaacattaatcaggcgtggtgttgtgcacctgtagtcccagctactcaggaggctgaggcaggtggattgcttgagcccagaaggttgagactgcagggaatcaagatcatggcactgcactccagcctaggtg

SEQ ID NO: 568761 - DNA, 497 bp, Homo sapiens
tctgacaatttgcacactcttttgacatctatttaggtttgttgcaattttttaccattataaaaaattctctcacagtttaataaactttaattttatctaaatctgcaattagtgtaatatctttacaaattccctttcaaagatctcttcctaatatttttaaagactatgctttgtaaaacttcataccaaaaccagacaaggacacaacaacaacaacaaaaagcaagtccaggcatggtggctcatgcctgtaatcccarcaatttggaggctgaggtggagggagcacctgaggccacgaatttgagaccagactgggccatacagcaagaccccatctctgcaaaaacggtttttaaacattaatcaggcgtggtgttgtgcacctgtagtcccagctactcaggaggctgaggcaggtggattgcttgagcccagaaggttgagactgcagggaatcaagatcatggcactgcactccagcctaggtg

SEQ ID NO: 568762 - DNA, 497 bp, Homo sapiens
tctgacaatttgcacactcttttgacatctatttaggtttgttgcaattttttaccattataaaaaattctctcacagtttaataaactttaattttatctaaatctgcaattagtgtaatatctttacaaattccctttcaaagatctcttcctaatatttttaaagactatgctttgtaaaacttcataccaaaaccagacaaggacacaacaacaacaacaaaaagcaagtccaggcatggtggctcatgcctgtaatcccagyaatttggaggctgaggtggagggagcacctgaggccacgaatttgagaccagactgggccatacagcaagaccccatctctgcaaaaacggtttttaaacattaatcaggcgtggtgttgtgcacctgtagtcccagctactcaggaggctgaggcaggtggattgcttgagcccagaaggttgagactgcagggaatcaagatcatggcactgcactccagcctaggtg

SEQ ID NO: 568763 - DNA, 497 bp, Homo sapiens
tctgacaatttgcacactcttttgacatctatttaggtttgttgcaattttttaccattataaaaaattctctcacagtttaataaactttaattttatctaaatctgcaattagtgtaatatctttacaaattccctttcaaagatctcttcctaatatttttaaagactatgctttgtaaaacttcataccaaaaccagacaaggacacaacaacaacaacaaaaagcaagtccaggcatggtggctcatgcctgtaatcccagcaatttggaggctgaggtggagggagcacctgaggccacgaatttgagaccagactgggccatacagcaagaccccatctctgcaaaaacggtttttaaacattaatcaggcgtggtgttgtgcacctgtagtcccagctactcaggaggctgaggcaggtggattgcttgagcccagaaggttgagactgcagggaatcaagatcatrgcactgcactccagcctaggtg

SEQ ID NO: 568764 - DNA, 538 bp, Homo sapiens
ctcaccgttgagctccaggatggtattttctctcactttgcatcattaccgaagtggctatcaagattccctcccctaccttctttttcttttttcaatgtttaagagctggagttaatttcttgactcctttggtaacacatgcmcatatataccactcaaggcctgttggattaaactgttaaatttgtcatctagctaatgttttctcagaaccagacaaattaaacagagtcaattgttgaaattatttcaaaagataaacaatcatagaatggaaataaactacagaaagtagggagcaggagtaactaagtctcctagaaaacatttgcagcagatgttaagtatccagtctcgttgttataaatgaatttcaaagaatctcagagcagctttacaaaattttactgcactaacaaatggcagccaacctctgtagtaaacacaaaatactgtaccatcctttgtatctccttaaattaagccaatttctgcttacacagaaaatctgtctgtggaaaacactgcttagaat

SEQ ID NO: 568765 - DNA, 538 bp, Homo sapiens
ctcaccgttgagctccaggatggtattttctctcactttgcatcattaccgaagtggctatcaagattccctcccctaccttctttttcttttttcaatgtttaagagctggagttaatttcttgactcctttggtaacacatgcasatatataccactcaaggcctgttggattaaactgttaaatttgtcatctagctaatgttttctcagaaccagacaaattaaacagagtcaattgttgaaattatttcaaaagataaacaatcatagaatggaaataaactacagaaagtagggagcaggagtaactaagtctcctagaaaacatttgcagcagatgttaagtatccagtctcgttgttataaatgaatttcaaagaatctcagagcagctttacaaaattttactgcactaacaaatggcagccaacctctgtagtaaacacaaaatactgtaccatcctttgtatctccttaaattaagccaatttctgcttacacagaaaatctgtctgtggaaaacactgcttagaat

SEQ ID NO: 568766 - DNA, 437 bp, Homo sapiens
cctggccaacatggtgaaaccctgtctctactaaaaatacaaaaattagccgggcatgatggcacatgcctgtggtcccagctacccaggaggctgaggcaggagaattgcttgaaccgcggaggcagaggttgcagtgagccgagatcacgccactgcactccaacctgtgtgacagagtgagactccttaaaaataaataaataaataataaataaacaaataaataatttaaaaaagtcattgctttatttttaaaaaagtaatagtttcaaaatgtatacatrtaaaatctaactgggaatactttgtacctacttgtagcccaagattaagtttattctcaattactaggaggtttgcacaatagagtacatatttaatctgtatgactaaaagcctcattgtcaatgtgactgtgtcatcattatcacatt

SEQ ID NO: 568767 - DNA, 437 bp, Homo sapiens
cctggccaacatggtgaaaccctgtctctactaaaaatacaaaaattagccgggcatgatggcacatgcctgtggtcccagctacccaggaggctgaggcaggagaattgcttgaaccgcggaggcagaggttgcagtgagccgagatcacgccactgcactccaacctgtgtgacagagtgagactccttaaaaataaataaataaataataaataaacaaataaataatttaaaaaagtcattgctttatttttaaaaaagtaatagtttcaaaatgtatacatataaaatctaacygggaatactttgtacctacttgtagcccaagattaagtttattctcaattactaggaggtttgcacaatagagtacatatttaatctgtatgactaaaagcctcattgtcaatgtgactgtgtcatcattatcacatt

SEQ ID NO: 568768 - DNA, 666 bp, Homo sapiens
aaaagtacaacattttatagttttaattttatcttttaaaatgttttaacctaaaggtagtggaagacgttactaaaggaagcttaggtagtaacgtatttgtcgtctcagttaacacaaagaccatagatggggcagatctgcaggatgcaaaaactttcttttttctcacctcatagtagccatatggctactgcaattctctggtttcatgtgcttacaaaatgtcctttagttaaaaacaaaaagaaagagaaagagagaaagaaagaaagagaaagaagaaggaaaaaagatagagraaaaataatttcttcatgtgtctatttaaattaacaaagacgtgaattgtcccagacctccctgtgatgattaatttcatgtgtcagttttactgggctaagggttgcccacatggctgataaaacattatttctgagtatgtctgtgtttccagagaaattagcatttgaataggtaggctgagtgaagaggatcatcctcaccaatatctatgggcatccttcaatctcttcagagcccaaataaaacaaaaaggcagaggaagggtgaatttaatctgtcttcttgagctgggacatccatcttctcttatcctccaatattggaacacctggtctatgttggtaggagtgtaaattagtt

SEQ ID NO: 568769 - DNA, 666 bp, Homo sapiens
aaaagtacaacattttatagttttaattttatcttttaaaatgttttaacctaaaggtagtggaagacgttactaaaggaagcttaggtagtaacgtatttgtcgtctcagttaacacaaagaccatagatggggcagatctgcaggatgcaaaaactttcttttttctcacctcatagtagccatatggctactgcaattctctggtttcatgtgcttacaaaatgtcctttagttaaaaacaaaaagaaagagaaagagagaaagaaagaaagagaaagaagaaggaaaaaagatagaggaaaaataatttcttcatgtgtctatttaaattaacaaagacgtgaattgtcccagacctccctgtgatgattaatttcatgtgtcagttttactgggctaagggttgcccacatggctgataaaacattatttctgagtatgtctgtgtttccagagaaattagcatttgaataggtagrctgagtgaagaggatcatcctcaccaatatctatgggcatccttcaatctcttcagagcccaaataaaacaaaaaggcagaggaagggtgaatttaatctgtcttcttgagctgggacatccatcttctcttatcctccaatattggaacacctggtctatgttggtaggagtgtaaattagtt

SEQ ID NO: 568770 - DNA, 579 bp, Homo sapiens
gcttggacctgtgatgtggaggttgcagtgagcagagatcacgccaatgcactccagcctggttgacagagcgagactccgtctcacaaaaaaaaaaaggaaagaaagttggagttttttagtctctacactgytggcagaggcaggggatgggagccggtagaaaagagaaaacaattagttggtttgcctctaaaattttgcaaagagatgaatctaagtaaaagtaattctgggtaataatatggttcttgaataaaaactgaaattttcaaaatagaaaacattgcatcataaacatattaaatccagtaggcttattggtttcatttaaatgccagagatttcattactgtagaggaaatgtcttatagctcttctatttaaactttggtcgggctcttaatttttaaagaggtaggataattaagactcattatgagtgtgactttgtaacttggaagtactatcttcacatttcaagatatttaaggattgctttagaataaacaaatgcattatgtgaattaattgattgtacctttatacacaaagcatgtaagtacttgtgtaaactta

SEQ ID NO: 568771 - DNA, 579 bp, Homo sapiens
gcttggacctgtgatgtggaggttgcagtgagcagagatcacgccaatgcactccagcctggttgacagagcgagactccgtctcacaaaaaaaaaaaggaaagaaagttggagttttttagtctctacactgcyggcagaggcaggggatgggagccggtagaaaagagaaaacaattagttggtttgcctctaaaattttgcaaagagatgaatctaagtaaaagtaattctgggtaataatatggttcttgaataaaaactgaaattttcaaaatagaaaacattgcatcataaacatattaaatccagtaggcttattggtttcatttaaatgccagagatttcattactgtagaggaaatgtcttatagctcttctatttaaactttggtcgggctcttaatttttaaagaggtaggataattaagactcattatgagtgtgactttgtaacttggaagtactatcttcacatttcaagatatttaaggattgctttagaataaacaaatgcattatgtgaattaattgattgtacctttatacacaaagcatgtaagtacttgtgtaaactta

SEQ ID NO: 568772 - DNA, 579 bp, Homo sapiens
gcttggacctgtgatgtggaggttgcagtgagcagagatcacgccaatgcactccagcctggttgacagagcgagactccgtctcacaaaaaaaaaaaggaaagaaagttggagttttttagtctctacactgctggcagaggcaggggatgggagccggtagaaaagagaaaacaattagttggtttgcctctaaaattttgcaaagagatgaatctaagtaaaagtaattctgggtartaatatggttcttgaataaaaactgaaattttcaaaatagaaaacattgcatcataaacatattaaatccagtaggcttattggtttcatttaaatgccagagatttcattactgtagaggaaatgtcttatagctcttctatttaaactttggtcgggctcttaatttttaaagaggtaggataattaagactcattatgagtgtgactttgtaacttggaagtactatcttcacatttcaagatatttaaggattgctttagaataaacaaatgcattatgtgaattaattgattgtacctttatacacaaagcatgtaagtacttgtgtaaactta

SEQ ID NO: 568773 - DNA, 539 bp, Homo sapiens
gccaaacagctctccaaagggattgtttccatttgcgttcagtttgtgttccacacacgagcatgccagtgtcacagaaagcttgccaacatgtttttttaaaatcaatttcctttatttttttcaagttcaacttgtatgaagtggggctttctgattgttgctgtatcagggttatcatcagtgaggctaaaattatgatacagagcttggtaaatagaagcacttaataatcagtattgttattataaaaagaggaatcctaggaggatgaagcatgcttgttctatcctcaaacctctttcttttctactcctgcctccatttcaatttactgcaaatagtttctccttaccttcaatgttgcctccaattaaagtgctaccagttcttctctattctaaggtagcagaggctccttaaagttagaagtcttgggccatgctgtttccccactgattgtcccctcctttccatatctctgtcaagagaggatcctcagtaaatatgggttgtycccaaagcagattcttatgttc

SEQ ID NO: 568774 - DNA, 574 bp, Homo sapiens
cacaagctcacaatgattcactcaaatgctttgagttttacagtttattccatacatttaggtctttgatctattttgagttaatttgtttgcattgtgtaaagaaagggtccaggttcatgtttttgcatgtgaatatccagttttcctagcactttttgtggaaaagattgttctatcccccaatgaattatctaggcacccttattaaaggtcaatcagtcataaatgtaaaggtttatttctggactctcaattctgtttcattggtcctacatatctatgttatgccattaccacactaycttgattactatacctttgcagtaagtttccactcaacaagtgtgcatcctccaactttattctatttaaagattgctttgtctattcttggctatttgcatttctatatgaatgttagggtcagtttgccaatttctcccaaaccctatcagctaggattttgatagggatttgattgtatctgtgggtcagtttagagactcttgccattttaacaatattaagtattttgccttgggagcatagattgtatcttcattaatttgtg

SEQ ID NO: 568775 - DNA, 653 bp, Homo sapiens
tgctgcaatgaacatacaggtgcatgtgtctttataatagaatgatttatattcctttgggcagatactcagtaatgggattgctaggtcaaatgtatttctggttctaggtctttgaggaattgccacactctctttcacaatggttgaactaatttacactcccaggaagagaacaagagcctctttctggcaattcagagaattctctgcggagaattttgtggagaaaagcattcctttttctccaccacctcaccagcatctgttgctttttaactttttaataatagccattctgactggtgtgagatggtatcaactcattgtgtttctgatttgcatttatctaatgattagtaatgttgagctttgttcatgtttgtyggccacatgtatgtcttcttttgagaagtgtctgttcattatactactgagctatagtaaccaaaacaggatggcacgagtatgaaaacagacacatagaacaatggaacagaatagagaacccagaaacaaataaacacacctacagtgaactcatttttgacaaagctgccaagaacagtggggaaaaggcagtctcttcaataaagggtgctggcaaaactggatattcatacataaaaggatgaaactagattcctgtttct

SEQ ID NO: 568776 - DNA, 506 bp, Homo sapiens
ttaatttttgtgcaaggtgtaaggaaggggtccagtttcagttttctgcatatgactagccagttttcccaacaccatttattaaatagggaatcctttcctcatttcttctctttgttaggtttgtcaaaaatcagatggctgtagatgtatggtgttatttctgaggcttctgttatgttccattggtctatatctctgttttggtaccagtgacatgctgttttggttactgtagccttgtagtatagtttgaagtcaagtagcatgatacctccagctttgttctttatgcttaggattttsttggctatataagctcttttttggttccatatgaaatttaaggtagttttttctaattctgtgaagaaagtcaatggtagctttatgggaataactttgagtctatatattactttgggcagtatggccattttcacaatattgattcttcctatccatgagcatagaatgtttttccatttgtttgtgtcctctcttat

SEQ ID NO: 568777 - DNA, 575 bp, Homo sapiens
aagtagcggggagctctatcaaataatgcagggaatttgaccaaattctgtggtcaatgggaagtcactgaaatgttatgcaaaatcactcagaaggctgaatttgggatgaaatgaaagagttaaaaataagacaatggcagaaatggtaattaggaaagtttctgtagtaagcctagccaagtgaaaagctaacctattyatattgagactggagaaaagtgaatagtttgaacagatatttaggagagggagcaaatttcattctcccaggcaattcatgaaatattggaagaatgaagagttaagaatgattcccagattcctgactcaagcaattgccatcattcctgatggacaacacaagcagtcagtaaatatcagaccaagagtctgaacagcatatgctattcccctggttactcagggtatgttttagcatttctagttgttccagaaatctaaacccttgtgattttctgttatggactgaaccatgttcctacaaaattcaggtatctacctccaaatgtgactatatttggagacaaggcctttaaagaggtaattaatgt

SEQ ID NO: 568778 - DNA, 594 bp, Homo sapiens
tctctctcaatctctctctctctctctgtatgcatgtatataaatatatatataatatatatataatatatatttaaaaactgcatttttactctatcaatacctatattcccaaatttaattcaagaaaattaggtagatacccaaatgaagtgaagataggcagttggatataagagtctagagctcaggagaagggttcaggctggatgagagctccaagggagtggtagagataaagaagaaaagagcctcaaggctatagactgataagctccagtattaggatggtgagaagaaaaggagcaactcacaaagaaaastaaggaagtctggctcagtctcattcaaagcagccttcactgggaggagtagaacattcctactgactcctaaagattgtgtccttggtttttcctatcctctctgcatgctcccactcttacttatctcatttagccctatgtccattaaacattcatcctcatgaaaattactccaaactctgtctctattcctaccttcgggacagctttacctggctatctatacccaggtagtgtctcagtgaaacatgtcccaaatcaaactaat

SEQ ID NO: 568779 - DNA, 594 bp, Homo sapiens
tctctctcaatctctctctctctctctgtatgcatgtatataaatatatatataatatatatataatatatatttaaaaactgcatttttactctatcaatacctatattcccaaatttaattcaagaaaattaggtagatacccaaatgaagtgaagataggcagttggatataagagtctagagctcaggagaagggttcaggctggatgagagctccaagggagtggtagagataaagaagaaaagagcctcaaggctatagactgataagctccagtattaggatggtgagaagaaaaggagcaactcacaaagaaaactaaggaagtctggctcagtctcattcaaagcagccttcactgggaggagtagaacattcctactgactcctaaagattgtgtccttggtttttcctatcctctctgcatgctcccactcttacttatctcatttagccctatgtccattaaacattcatcctcatgaaaattactccaaactctgtctctattcctaccttcsggacagctttacctggctatctatacccaggtagtgtctcagtgaaacatgtcccaaatcaaactaat

SEQ ID NO: 568780 - DNA, 570 bp, Homo sapiens
tttttccccttcttccatcctttgtcacctctccactcccaacaataagccaagcatcatcaaaatcctaaaattttaacttctctttctaaaagggrtcagtttatgcaagcaagcaaaggccatccttttaaaatttttatagagttgcttctgaacatctgctatggttcaaatgtttgtcccctccaaaactcatgttgaaatgtggttgcattgtggtagtgggaaccttgtgaggagattgggccgtgagagctcccctcatggtgggattaatgctgctataaaaggccaggtttggcctcttttgccttctttcctttctgctttctgccacatgaggacacagcaagaatgccctcatcagatgctggtaccttgaccttggacttcccagactccagagttgtgagaaaatacattcctgttcattacaaattatccagtatgtggtattccatgatagcagcacaaaacagactaaaacaacatcctatacacaaaaactctagtatctgctcattaagctagaaaatcttgaatatttattgcaaataaacaaaggac

SEQ ID NO: 568781 - DNA, 549 bp, Homo sapiens
gtctccccaaattcgtacattgaaatcctaactgccaaggtgatggtatgaggaagcraggtctttgggcattgattagatcacaagggcagaagaatcctcttgggtgggattagcaccctcataaaagacccagacagagaccactcactccttccaccacgtgagaacacagaaacagggcctcactaagcaccaaatctgctgatgccttgatcttggacttcccagtctccagaactgtgagaaataaatgtctgttgcctataagccacccatttaatgatactttgttacagcaaccccaatggactaagacatacataataacaaagtaagctcttcaaactctgcttcccatttctgttttgaaactaaggtagattttttttgaaaagtctagtctaggctgggcgcggtggttcatgcctgtaatcccagcacttagggaggccgaggcgggtggataacgaggtcaagagatagagaccatcctggccaacatggtgaaaacctgtctttactaaaaatacaaaaattagctgggtg

SEQ ID NO: 568782 - DNA, 555 bp, Homo sapiens
ttcatcgtggccacttttagggtataggagggccagataataaatgggatccagggcctatgtatgtccatgaatgcatggacccatccagtgctatttctttgttctcaaaaggtatatggaatgaayaaaatggtagaatagtagtaatgggcagaatatccacattgatttattagctttaagagccatcatagtagtgaagcctgagtggaagcctctgaaactgcccatttcctggccaaattactaaaaaataaaaatctaatctcaaagggaaatggcagatatcaatgccatctttaagaacctaatgatactagggtggtggtatcattaggttcttaaaggtttcgtttaattcaccagtgtagttcctacaaaaaccggaaagatcctacaaattcaacaaagcattaaccccaaatgcagctgctgtgctacatgtgtggtatctttgcttagagattattacagcctcaaatacgtggtatggggcaattgatctggcaaataccttcttttccattccttatcagaaagaatgattgtgga

SEQ ID NO: 568783 - DNA, 555 bp, Homo sapiens
ttcatcgtggccacttttagggtataggagggccagataataaatgggatccagggcctatgtatgtccatgaatgcatggacccatccagtgctatttctttgttctcaaaaggtatatggaatgaacaaaatggtagaatagtagtaatgggcagaatatccacattgatttattagctttaagagccatcatagtagtgaagcctgagtggaagcctctgaaactgcccatttcctggccaaattactaaaaaataaaaatctaatctcaaagggaaatggcagatatcaatgccatctttaagaacctaatgatactagggtggtggtatcattargttcttaaaggtttcgtttaattcaccagtgtagttcctacaaaaaccggaaagatcctacaaattcaacaaagcattaaccccaaatgcagctgctgtgctacatgtgtggtatctttgcttagagattattacagcctcaaatacgtggtatggggcaattgatctggcaaataccttcttttccattccttatcagaaagaatgattgtgga

SEQ ID NO: 568784 - DNA, 598 bp, Homo sapiens
ctactaaaaatacaaaaattagctgggcgtggtggcaggcgcctgtaatcccagctactcgggaggctgaggcaaaagaatctcttgaactcgagaggtggagtttgcagtgagccgagattgtgccactgcactccagcmtgggtgacagagcaagactccatctcaaaaaaaccaaaacaaaatccaaaaaagaaagtaaaataatgaaaaagacatagcatgtaaatattaatcaaaagaaaagcagtagctatattaatattgaataacgtagacttcagagcaaagaaaattactagaggcagaaagggatgttacataataataaaatacttgaaattataaaaatgtagaaacagagaacatattagaggattcctgaagttaaggaagggatggggatgggacagaagttgttgtggctatgaaagagtaatgtgaggggttattgtgctcatggaaatgttctgtatcttgactgtatcactgccagtatcctcgttgtgatattacactacagtttttcaaaatgcgttcattggaagaaattgggtagagggcatataagatctctctgtattaatttcatttctta

SEQ ID NO: 568785 - DNA, 598 bp, Homo sapiens
ctactaaaaatacaaaaattagctgggcgtggtggcaggcgcctgtaatcccagctactcgggaggctgaggcaaaagaatctcttgaactcgagaggtggagtttgcagtgagccgagattgtgccactgcactccagcctgggtgacagagcaagactccatctcaaaaaaaccaaaacaaaatccaaaaaagaaagtaaaataatgaaaaagacatagcatgtaaatattaatcaaaagaaaagcagtagctatattaatattgaataacgtagacttcagagcaaagaaaattactagaggcagaaagggatrttacataataataaaatacttgaaattataaaaatgtagaaacagagaacatattagaggattcctgaagttaaggaagggatggggatgggacagaagttgttgtggctatgaaagagtaatgtgaggggttattgtgctcatggaaatgttctgtatcttgactgtatcactgccagtatcctcgttgtgatattacactacagtttttcaaaatgcgttcattggaagaaattgggtagagggcatataagatctctctgtattaatttcatttctta

SEQ ID NO: 568786 - DNA, 598 bp, Homo sapiens
ctactaaaaatacaaaaattagctgggcgtggtggcaggcgcctgtaatcccagctactcgggaggctgaggcaaaagaatctcttgaactcgagaggtggagtttgcagtgagccgagattgtgccactgcactccagcctgggtgacagagcaagactccatctcaaaaaaaccaaaacaaaatccaaaaaagaaagtaaaataatgaaaaagacatagcatgtaaatattaatcaaaagaaaagcagtagctatattaatattgaataacgtagacttcagagcaaagaaaattactagaggcagaaagggatgttacataataataaaatacttgaaattataaaaatgtagaaacagagaacatattagaggattcctgaagttaaggaagggatggggatgggacagaagttgttgtggctatgaaagagtaatgtgaggggttattgtgctcatggaaatgttctgtatcttgactgtatcactgccagtatcctcgttgtgatattacactacagtttttcaaaatgcgttcattggaagaaattgggtagagggcatatragatctctctgtattaatttcatttctta

SEQ ID NO: 568787 - DNA, 445 bp, Homo sapiens
aaagaactattacaactccttaatttaaaaattcaattataaaatggacaaaaggttcgaataaacatttctgcaaagtaagcatatgaaaagatgtgcaacatctgtatagtttcctattgctgctgtgacaagctgtcactaatttagtggctgacaactatacaaattaattascttataggtctaaagctaagaagtccaaaatggttatcataaggctatgcttcttctggagtaatgctccagggaaaacatctattttattgatttccagcttctagaggctgcctgcattccttggcttatgtccttttcttctatcttcaaaggaagtctcatagtattaatgttggtgcaaaagtcattgctgtttttgccattaaaagtaatgacaaaaattacataaatctgtcatagtttatacacaccatgaaaagtaatg

SEQ ID NO: 568788 - DNA, 550 bp, Homo sapiens
ttatagaattatagctcttccatttatcatttagggttttgcctgatgtctacacaaatgcctaagactaaaaatagtcaactttttgttgrcttttcagatcattagacaatatattatttgaaaccacaatgaaattttatattgcaatccaaatgtatatttttatttaatttatttttgagttctcctgattaatctctttgcaaattgtactaaaatgacttttttttttttttgagactgagtctcgctctgtcaccaggctggagtacagtggcatgatcttgtctcattgcaacctctgcatcccgggttcaagcgactttcctgcctcagtctcccaagtagctggggctgcaggcactcaccaccacccgcagctaatttttttgggattttttttttagtagagacggggtttcaccacattggccaggatggtctctatctcctgatcttgtgatctgcctgcctcggcctcccaaagggctaggattgcaggtgtcagccaccgtgcccagccaagatgactttttagattattctc

SEQ ID NO: 568789 - DNA, 550 bp, Homo sapiens
ttatagaattatagctcttccatttatcatttagggttttgcctgatgtctacacaaatgcctaagactaaaaatagtcaactttttgttgacttttcagatcattagacaatatattatttgaaaccacaatgaaattttatattgcaatccaaatgtatatttttatttaatttatttttgagttctcctgattaatctctttgcaaattgtactaaaatgacttttttttttttttgagactgagtctcgctytgtcaccaggctggagtacagtggcatgatcttgtctcattgcaacctctgcatcccgggttcaagcgactttcctgcctcagtctcccaagtagctggggctgcaggcactcaccaccacccgcagctaatttttttgggattttttttttagtagagacggggtttcaccacattggccaggatggtctctatctcctgatcttgtgatctgcctgcctcggcctcccaaagggctaggattgcaggtgtcagccaccgtgcccagccaagatgactttttagattattctc

SEQ ID NO: 568790 - DNA, 564 bp, Homo sapiens
atctgcctgctttccaggttttattcctctcaagtatatagtgcccggttttttagaatgataccaaatactttctctctttggagttctgaatgaagctttaacacaggccacaccaaattagaccaccactttgattttggtttataaaatgctgttgtgtacatttttgctttatttgtattgttaaaaaccagtgttgttattctgtaatagtttaaattractcataatcacatatatcaactaggctccaaatgttttgatacatttaatcgatctttagaatgtttctggcaaattagtgttgttaggcatggctaaaatttttgctcaagagagcaatatggctattaccaaatacagttttgagcagatactatcattgtgctgtgtacatatacctacttacatttagttcttcagtgacaaaacctgtagtgaacaaaacacaaaaggttttataattcctacagtttttgttgttatttaatatctggctcaatttctttttgaaaaaatggcagaattaacttaaaatacatgtgcaatgtatttaatttc

SEQ ID NO: 568791 - DNA, 497 bp, Homo sapiens
cacctctgggggcagggcatatatgaacaaaaggcagcagacaacttctccagacttaaacgtccctgcccgacagctctcaagagagcagtagttctcccagcacagcgtatgagctctgataayggtcagactgcctcctcaagtgggtccctgacccccgtgtagcctgactgggagacacctcccagtaggggccgacagacacctcatacagtcaggcacccttctggaatgaagcctccagagaaaggatcaggcagaaatatttgctgttctgcagcctctgctggtgaaacccaggcaaacagggtctggagtggacctccagcaaactgcaacagacctgcagctgaggggcctgtctgttagaaggaaaactaacaaacagaaaggaatagcatcaacatcaacaaaaaggacatccacaccaaaacctcatatgtaggtcaccaacatcaaagaccaaaggtagataaaaccacaaaacgaggaga

SEQ ID NO: 568792 - DNA, 497 bp, Homo sapiens
cacctctgggggcagggcatatatgaacaaaaggcagcagacaacttctccagacttaaacgtccctgcccgacagctctcaagagagcagtagttctcccagcacagcgtatgagctctgataacggtcagactgcctcctcaagtgggtccctgacccccgtgtagcctgactgggagacacctcccagtaggggccgacagacacctcatacagtcaggcacccttctggaatgaagcctccagagaaaggatcaggcagaaatrtttgctgttctgcagcctctgctggtgaaacccaggcaaacagggtctggagtggacctccagcaaactgcaacagacctgcagctgaggggcctgtctgttagaaggaaaactaacaaacagaaaggaatagcatcaacatcaacaaaaaggacatccacaccaaaacctcatatgtaggtcaccaacatcaaagaccaaaggtagataaaaccacaaaacgaggaga

SEQ ID NO: 568793 - DNA, 607 bp, Homo sapiens
attattatcactagacaaaattagaaaagaaaattttattttccctttatttctacaattcttagcaattcacagttgcaaagtcgtttctatatctctaaacagtagtattaatagcatggctgctctgtgaaacaaattattctctggtgacccctttaaaggcaaacatcattgtaaaaggaggagaaatttaactaatgggtaatattttcaaacctaatattctgttatgtagaaatttgacagtatgcttttgcaatatttattttctccttcattctatttgcaaagttttatggtattatatagcattgtggagtgtgatggacatgataagccatccggatccccctcaggaataacrgagactttaccttagtttctgggagtgctgccagaagaaagacctcatctgcaaaggtctgccccctttggggattgctacagcttcagagagccacctccctctcctaacgtcatgattcttccccatcaagcatacccagtgactaggtgatgcaggtataaaaaggcctcccctgtctcctgaaccctggacaattctaaagggcattccatctccataactccccgcagggttgtc

SEQ ID NO: 568794 - DNA, 545 bp, Homo sapiens
gggggccaacacccatggcccccacaatgtatacatataatttttctttcaaattcaagccatattaaatcctttctcagtcaaggtagggcatacacaaaacacaaaaatggagaaacaacctcaagccaacattacatactctttaagagatgaaaaactgttttcacagtcaataactaatattgtagcttgcttaactrgctctgatacttgcaaagctagcccaggtcctaaaactctgtaaatatcctcctcggacttcctgattccaaggcactattggtcatctgtcatggtggtattctgtctaactacagtacatctaataaccttgcatttcttggtcaaaagtatttcttggatcattaaggaattaagagtttacatcaggaacagattttggcagaagtacagtgtaaaccctatattgagagatggacctccaagctacttcaggtttccaactcccagtgacagacaggttcccaacaatctgctccaaaaccctacaactgtgaaatcctgcacagtcagagccagta

SEQ ID NO: 568795 - DNA, 569 bp, Homo sapiens
ctcccacctcagcctcccaagtagctgggactacacacttgygccaccacacctgcctaattttttttttatttctaggagagaagaggtcttggtatgtcgcccaggctgttctcaaattcctgagctcaacggatcctcccacctgggcttcccaaagtgctgggataacaggcatgagccaacctgcccagccagaaaagagagattttaatgcttatgtgctttatgtgatttgctccggttcatttagctggtaaagcctgggctctgaaatgcagatctctgtgcttacagaaaacatgcttttaaaaaaaaagttatgaataaatgcaggcaaataaattataagctctgaaggacagaggatgtttttaagactatctgcatactaaggtatggatgtaagacataccaccatttggaatttttcccttgagcatacacagatatagtcatgagtggcagctgtgatagcacagcttctgaaggagagaaagcaactaaggactgccttgaaaatatttaaggagttatttgagctgctgtgttgcaagttcgcctaatta

SEQ ID NO: 568796 - DNA, 605 bp, Homo sapiens
taatatcaagtgttttaaaccgctaacacatttaacaggcttctgaaaatcaaattcagtttcaaaattttctttcctgatgcctggctttttgatgcttcagagagcccttggagtatccaaaagagaggaaaacaggattatttgacatatttaggtatatgagattaccaaaatggtgttcaatattctttaggttatattttggtaaataatactaatatgtgtttcaaatttgtatgggattttaaaaattctaatgtctgagtatacgctatcataattaaggtttttatgttaaataattgtaaatgacagagataaccaagcttctttgtcaattgtgtttctaactgtaactaacctggacattttgttattcacagacaattttcttgttttaattcttttcaaaagatggcttataataagctgtagaactctgacaggtgctctcaaatacaggtttctgataactttggaataaagggaaaacacacagaactcatgaagagctaaaatattcacaaacccataaaaaaactgaggcaatctttttgayttttgcttggaatattgctgatccttgtttttttttcagagtc

SEQ ID NO: 568797 - DNA, 412 bp, Homo sapiens
ctggtgtggggtgggaggagcacggagggatakcattagaagatatacctaatgtaaatgacgagttaatgggtgcagcacaccaacatggcacatgtatacatatgtaacaaacctgcaagtgcacatgtaccctataacttaaagtgtaataaaaaaaataaaaaataaataaaaaaagaggtttaatcagttcacagttccaagtctatgcacgaagcatgatgctggcctctgcttatcttctgaggaggcctcatgaaacttgcaatcatggtggaagatgaaagaggagcaaaccatctcacatgactggagcaggagcaggagagtaaggggggaggcaccacaaacttttaaacaaccagatcttgtgagactcactcactatcatgaggttagtaccaagaga

SEQ ID NO: 568798 - DNA, 461 bp, Homo sapiens
agctcctgaatctcatttcatcccctcatggccaccacagctaggcttggaagctgacccaagaactgcaaraaacagtcaattgtgctactactagatttattagattatcaacataaaaacctctttagtgttggcactatgtgttaattgcttagtacataagccttaatgtcaaaaacagatggatagatagatgaaagatagatagaattaataagaaatcataggactagagtagatgcagcatagaagcatagaacgtttaggaaagaatcaatatggaatacttttcatatccaaaacaaagtcttctagattctttatacatcctattcaatgctcatgtcaatgctgtgaagtcaggagtcaagagcctggtcattgaatcataggaccaatacttactagtgctatgactttaagcacgttaactaatctcattgtgctttcatttcttc

SEQ ID NO: 568799 - DNA, 412 bp, Homo sapiens
ctggtgtggggtgggaggagcacggagggatatcattagaagatatacctaatgtaaatgacgagttaatgggtgcagcacaccaacatggcacatgtatacatatgtaacaaacctgcaagtgcacatgtaccctakaacttaaagtgtaataaaaaaaataaaaaataaataaaaaaagaggtttaatcagttcacagttccaagtctatgcacgaagcatgatgctggcctctgcttatcttctgaggaggcctcatgaaacttgcaatcatggtggaagatgaaagaggagcaaaccatctcacatgactggagcaggagcaggagagtaaggggggaggcaccacaaacttttaaacaaccagatcttgtgagactcactcactatcatgaggttagtaccaagaga

SEQ ID NO: 568800 - DNA, 461 bp, Homo sapiens
agctcctgaatctcatttcatcccctcatggccaccacagctaggcttggaagctgacccaagaactgcaaaaaacagtcaattgtgctactactagatttattagattatcaacataaaaacctctttagtgttggcactatgtgttwattgcttagtacataagccttaatgtcaaaaacagatggatagatagatgaaagatagatagaattaataagaaatcataggactagagtagatgcagcatagaagcatagaacgtttaggaaagaatcaatatggaatacttttcatatccaaaacaaagtcttctagattctttatacatcctattcaatgctcatgtcaatgctgtgaagtcaggagtcaagagcctggtcattgaatcataggaccaatacttactagtgctatgactttaagcacgttaactaatctcattgtgctttcatttcttc

SEQ ID NO: 568801 - DNA, 412 bp, Homo sapiens
ctggtgtggggtgggaggagcacggagggatatcattagaagatatacctaatgtaaatgacgagttaatgggtgcagcacaccaacatggcacatgtatacatatgtaacaaacctgcaagtgcacatgtaccctataacttaaagtrtaataaaaaaaataaaaaataaataaaaaaagaggtttaatcagttcacagttccaagtctatgcacgaagcatgatgctggcctctgcttatcttctgaggaggcctcatgaaacttgcaatcatggtggaagatgaaagaggagcaaaccatctcacatgactggagcaggagcaggagagtaaggggggaggcaccacaaacttttaaacaaccagatcttgtgagactcactcactatcatgaggttagtaccaagaga

SEQ ID NO: 568802 - DNA, 551 bp, Homo sapiens
tctgttgcacaggctgaagtgcagtgcctgctttaacggctcactgcagcctcgaccttcctgggctaaggtgattctcctacattagcctcccaagtagctgggactatgggcacacaccactatgcctggctaatttttgtattttttgtagagacgaggtctccctatgttgcccaggctggtctcaaactcctgggctcaagtgaattatctgcctcagtctcccaaagtgctgagattacaggaattagccaccatgcctgaccctaatatgcttataaattgagggaggtgattgtgttcaggaagggtactcagggggacattagggtctctaggataattgtgtcattctaatcttgatttggtagtggttattaaagattcattctataatcattcaactatacatttttatgctatgatctcagcgtatatttttattgtaaataaagattatgttttatcctcccccaaaataaatracagctttggagtaatttatatgtaaattaaatgtatgcattcctgtagtaaaaaagtagtta

SEQ ID NO: 568803 - DNA, 544 bp, Homo sapiens
gcactgctttcccactgaacctagatgtatcttcagaatattttccatggaagaattcaggaagctaccgccagtaaatcagagcaagaaaatttgtccttcataaatccctgcataaagcccttggattcttctcttcatattttacctttaatcatttatccagtggtattcaagaggaatcaaggagaaaggaagggcatctctttactgttttcaaygacatggattatctacatgaagacacaaagtggacctccaggttggtatgactgtgtttaggaactctgttctgaacatacagctaccacaactggggagtaaactatccactctcctggtgagaggctaaaatatttccaaaatccaaaataaccttcctagctgtttcagttgtggatgcccagccatggagacacctgtttatcttggcacaagtggattgtatagtccagatcacacaaaataatccattttataaatagaatcaacggcaaaatgtatgcagactcagagcacctcccgaaggaagaaagaaaaatgc

SEQ ID NO: 568804 - DNA, 583 bp, Homo sapiens
tctagctatttttatactaaattaaaactgcagtaggagagtaaaacctgtggaattaatttaggacccttattcagggaactatgtgttacataaagttaagtactggtaagacattctgatacagaaagtccttgtcatatggaagaactcatgggcagttcagaaatctgtggggctactagagatcacagtccagaatatgataaaaggattcagccctagggtaaggacaaacataaggagaggggtatagcctcacataatgatgaaaatagtgtcaatgagcctaactcttgctgcacttgtccctcagggacaatttcccrtctcacctgagctacatattatgttcttgctatgtatcaccttagcaaattgtaattcccagataactcagattattttgttattttaaaaattttatctcaacttcctctaatgaaggtagggattacatatacagtattccgctctcgtattcctagtgtttatcacaatttcttgtccttcatagatactcagaaaactactgaagaaaggaaaggcaaaaaagaaggaagggaggaaggaaggaagagaa

SEQ ID NO: 568805 - DNA, 522 bp, Homo sapiens
aagagctggagagtactccagggagtggacacagcacagtgcacggatctgtagaaccaggcagattttgccacttggtagacacgcagagggtcagcagctctcaaaagacaaggagggagactgtccatagggaagaagctgagttccccaggagcgggcttagtattgcccacatggagacaacaggccaaccgcacacacttgagcacagaatgcagtgcatgagggctaggagagagaagcaacaacacaccgggagawtgctgggagcttgcagagaatgtcaacaccagaagcagacagctctttcattccttgggcttagagccattcagggaaaatgagggtaaaactggcaggactgagcacccaaccccaaagctcttggtttacctgaatgtgactgttctaaattgggcaagcagaagtgtgtcttttcacaacaactcatcagaatgggagcgccaaagaaaaaggagggcagataaagaaaacaacagtattctgggagaaggggcg

SEQ ID NO: 568806 - DNA, 503 bp, Homo sapiens
tcagtgctgtgctggcttcagatctgtccaagtacagttttggtaccagccacaggggtgctcatgtcacttcttccttagcaccaggaacctgagcacagagaaagagacttcgttaacttggcagaaagtaaggaaaaagaactagaatttctgcctggtaatccagagaattcttctagatctcatccaagaccattaaggtggtacctcttcaaatctgtgaaaaccatagcattactgaacctggggtgctgcctaatgcagayatagctgcagtgaccaaaaaagatcataacatccaagatccttcaaattcctggaaagccttccaaagaaggacaggtacaaacaagctcagatagtgagtctaaaataagtagtaaagtttattcaaagagataataccagagcacttctcaaacctatagaaaggtaccaatatccaataacaagaaggttatagaacaccaaggagatttaactcaaagaagactacctca

SEQ ID NO: 568807 - DNA, 608 bp, Homo sapiens
ttatttcctcaaagaatccagctgccgggtaccctattgtgaaatagatttaactggtgatatactttggatgtgtgtccccaccmaaatctcatcttgaaatggaatccccattgttgaaggtgggacctggtaggatgttattgtaccatgtgattgaaccatgggagtggacttctcatcagtgatttatcaccatccccctgggtgctgtcctcatgatagtgagtaagttcttgggatatctgattgtgtaaaaatgtgtggcacctcctgcctccctcttgctcatgcttttgctttctgagttgcctgctcttgttttgcctcctgccatgattttaagtttcctgagacctgtccagaagccaggcagataccagcatcagccttcctgtacaccttacagaaccttgacccaattaaaccttttttctttacaaaatacccagtctcaggtatttatttatagcaataggagaatggtcaaatacaactggatttggagaagtagagacttctccatcttaacaacagaaatttaattttaaatattagatatatatatctctgtttttaacacaaatgaacatataatactataaaaa

SEQ ID NO: 568808 - DNA, 608 bp, Homo sapiens
ttatttcctcaaagaatccagctgccgggtaccctattgtgaaatagatttaactggtgatatactttggatgtgtgtccccacccaaatctcatcttgaaatggaatccccattgttgaaggtgggacctggtaggatgttattgtaccatgtgattgaaccatgggagtggacttctcatcagtgatttatcaccatccccctgggtgctgtcctcatgatagtgagtaagttcttgggatatctgattgtgtaaaaatgtgtggcacctcctgcctccctcttgctcatgcttttgctttctgagttgcctgctcttgttttgcctcctgccatgattttaagtttcctgagacctgtccagaagccaggcagataccagcatcagccttcctgtacaccytacagaaccttgacccaattaaaccttttttctttacaaaatacccagtctcaggtatttatttatagcaataggagaatggtcaaatacaactggatttggagaagtagagacttctccatcttaacaacagaaatttaattttaaatattagatatatatatctctgtttttaacacaaatgaacatataatactataaaaa

SEQ ID NO: 568809 - DNA, 587 bp, Homo sapiens
aaatcataactgcataaaattaactgtagtgcatactgtactactgtaataattttgttgtcaccttctgttgttattgtggtgagctcaagggtggcaaatatctgcttaaaaccccatgtgagagtaatcatctctgtgtgagccgttcatctgtccagtaaattgtgtaacgcagtaaaaggtgatccctctcggttctcacgtatttttcattgtgtttagtgcaatattgcaaaccttgaataacaccatgggagccacacaatgtgccaatagtggtgctgaaagtgcccctaagaatcagataaaagtcatgacatacaagagaaagctgagttgcttgatatgtactgtagattaaggtctgtagctgctgttgcctgccattttagacagacrattcatcttctaaagagatgacataaattttgggtattgataagtacagaacagtactctctttcttatgattttcttaataatattttcttttctctagtcttctttattgtaagaatataatacataatacatgtaacacataaaatatgtataagtcagctgcttgttattgataaagctcc

SEQ ID NO: 568810 - DNA, 587 bp, Homo sapiens
aaatcataactgcataaaattaactgtagtgcatactgtactactgtaataattttgttgtcaccttctgttgttattgtggtgagctcaagggtggcaaatatctgcttaaaaccccatgtgagagtaatcatctctgtgtgagccgttcatctgtccagtaaattgtgtaacgcagtaaaaggtgatccctctcggttctcacgtatttttcattgtgtttagtgcaatattgcaaaccttgaataacaccatgggagccacacaatgtgccaatagtggtgctgaaagtgcccctaagaatcagataaaagtcatgacatacaagagaaagctgagttgcttgatatgtactgtagattaaggtctgtagctgctgttgcctgccattttagacagacgattcatcttstaaagagatgacataaattttgggtattgataagtacagaacagtactctctttcttatgattttcttaataatattttcttttctctagtcttctttattgtaagaatataatacataatacatgtaacacataaaatatgtataagtcagctgcttgttattgataaagctcc

SEQ ID NO: 568811 - DNA, 519 bp, Homo sapiens
gcctctagttttgattgtatgtttaatataatttgattctttcacctctcagtacaycaattttaattcatttcaattttgtttttgttattgtcctagagtttacaatcatatttgcaactacctccgctggcttttgaataaccttatattgctttatggatatttcatgaaccttttataataagagtatttcctattcctccatctaatcccttattaaattactataatccatttattaatcaataggttataatccctgaatacattgtgactatcgttacttttaatagttttctatcaaattaattgagaatataagagtgaaaataaaatattttattttaactttatttcctccttctccaacattcctccctgattatttgtgacgtgagcttatgatctctctatttttcttccatgtgaagaacttttaaaaacatttcttggtgagagtctagttttgctgtttgttttgtctctataagctgtatttttacttgccattagcat

SEQ ID NO: 568812 - DNA, 577 bp, Homo sapiens
attctgaaaatagccataaattggacattctgagagtggccattattattattattttgagaaaggctttcactgtgtcacccaggctggtgtgcagtggcactgcaacctccgccccaggggctcaagtgatcctctcacctcagcctcctgagtagctgggaccacatgcgtgcaccaccaagccaggcaacttttttttttttttttgtagaattggggatctcaccatgttgccctggctggcctgaaactcctgaacttaagcaatccatccacctcggcctcccaaagtgctgagattacaggtgtgagccactgaactcggcccaagaatggcctttagtaaaattcctcttttcttttgaattgtgaaccacactaaaaatatgcactggagtctgatgaagatgagtattaataactgctttattaatagtaaagctgtatttgaactggtagctatgacttttgactccacaaaacctytccatgctctatacagttcaccatgtggagttctgcttcatactttctcagtcttcagaaatagaaatctagataaggcatgggaaca

SEQ ID NO: 568813 - DNA, 314 bp, Homo sapiens
caaataatagtaaccttcaccagtttaaggaagaaaatagaatttgagaaatgcactcaggaacattaacaatattgatagtattctcttttattaagctcaggagttaattggggaaaaaagagaaackgttctattttagaatacttttggatttatggaacagttggaaatcagtacagagagtttattgatatccaacacaattttctttatttttaatctcttagtgtgggatatttgtcacagttaacaaagggaacgttacacagttaacaaaatgaacgttacacattcattaacacacattattt

SEQ ID NO: 568814 - DNA, 488 bp, Homo sapiens
taatataactgacagtaattttaagatggcattctggattaggtgtggaatagataaatacatcattatcagaaatcacggtaaaataggaagaaagtttgtagatcagctgatggttttgaaaaacagttaaaattcttagttttcattaaaactatattatggttataatagataataacattgtagttagctgaaggttatacaaaactctctgtactaccagtgcatctttatgttaatgtgcagttatttcaaagtaaatgttttttaaaattattaatttgttttatagaaataaaatgaagacataaggcaaaaatttggcctccagagacacaatagcatgtagggwgagaatagcaaactggcttttcttatctagtcacctttctaaacccaggtgcacctgcttcaggaaggcaccatcaagctccagggactgtcatcctctttctccgtccccattatgcagtcaccagtttgaa

SEQ ID NO: 568815 - DNA, 587 bp, Homo sapiens
acaggctttgaggattacggtggtcccctgtcatatagattgtattgctaaactgcttaataaggtaagagaaaacccatagaacgaactacctttgctttatgtacctcaccttactcaaactgccataccactgctaacagcaaccctatgctgtgttgttagaacagatgaagatgcaatgcatcagtggggtattgtatcttagtttatttgcagtgttatgtttaatttttaatatcagataatatatgcatatcaaacaatgcaaactcacacagcacctaaatttgtaggattaccagaacacactccacaatttgtactttacaaaaatatatcatgtttggaacagttgctggaaaaccaaggaattgataacaataatatttagagcctcaattagaccatttccttgacattcatttgacccaatacaatgcctgaagagtttccatacacatatctattcagtgcatcyactttttttaataacagagatagggttggttccaagtctttgctgttgtgaatagtgccacaataaacatacgtgtgcatgtgtctttatagcagcatgatttata

SEQ ID NO: 568816 - DNA, 495 bp, Homo sapiens
cttgccagcatctgtagtttttctgactttttaataattgccattctgactggcatgagatggtatctcattgtggttttgatgtgcatttctctaattatcagtgaggttgagatttttttttcacgttttttggctgtctgtatgtcttattttgaaaagtggtcattcatctcacttgcccactttttaatggggttgttcatttgttctgttttgtttattcaaatttgtttaagttccttgtagactatttgacctttgttagacsaatgcattgctaaaattttctcccattctgtaggttgtctgcttactttaatgttagtttcttttaatgtgaagaagctgtttagtttaattacatctcatttgacaatttttgctttggttgcaattgcttttggcattttcattatgaaattttgcctgtgcctatgtactgaattgtattgcctagatttattctaggatttttatagttttgagttttac

SEQ ID NO: 568817 - DNA, 615 bp, Homo sapiens
tccctgcagcctcaaactcccagattcaagcgatcctcccacctcatcctcctgagtagctgagactacaggcatctgaactgcactcaactagttctttttatttgtgtgaagaagggggcctcgctattttgctcaggctggtcttgaactcctggcctcaagccatcctttcacctcagcctcccaaaaagctgggattacaggtgcaccgggtsactgttaccaccagttcttaaaatttacacatctacagccatgagacactgagcttattctggattttaacatctcacagatacaagaagtcaggacagaagcacaggcggaaggcctagttacttttgaagggagtcttattgaaggggatgactcaattcaaaagcagagttttggagcaagaaaaggagaggcagaaagcacaagtgtccctgctcgtcccctccccgcttctgtgtcctcgctaaatccttaccctgctgttccctaactcttcttaggctaagaaccacatttccctaatcagctcatgtttaaacagtctggtttcaaactggccatgttataaaccacactttcatcatcctgtctcagagacccagctaaacaagactt

SEQ ID NO: 568818 - DNA, 615 bp, Homo sapiens
tccctgcagcctcaaactcccagattcaagcgatcctcccacctcatcctcctgagtagctgagactacaggcatctgaactgcactcaactagttctttttatttgtgtgaagaagggggcctcgctattttgctcaggctggtcttgaactcctggcctcaagccatcctttcacctcagcctcccaaaaagctgggattacaggtgcaccgggtgactgttaccaccagttcttaaaatttacacatctacagccatgagacactgagcttattctggattttaacatctcacagatacaagaagtcaggacagaagcacaggcggaaggcctagttacttttgaagggagtcttattgaaggggatgactcaattcaaaagcagagttttggagcaagaaaaggagaggcagaaagcacaagtgtccctgctcgtcccctccccgcttctgtgtcctcgctaaatccttaccctgctgttccctaactcttcttaggctaagaaccacatttccctaatcagctcatgtttaaacagtctggtttcaaactggccatgttataaaccacactttcwtcatcctgtctcagagacccagctaaacaagactt

SEQ ID NO: 568819 - DNA, 351 bp, Homo sapiens
cataaaaaaaccataactgcacagtaataatacacacacacacacacatatatatacaaacatattgatctacccctccacctctctctgtgggttcttactatatatacattattttgcagcttgagttttgatttaacaatataccatcagtgctgtaaatattggcattcctcagggttttctcccaagttttctcttccctctctgcctactctgaattgtgttacctsacttgtggttttggtcaccctcctgatcattctcaaatatgtattgccagccctagtctgtctctaagattccagctcctctatttatcattgcctacttagatgctgcatgggtcct

SEQ ID NO: 568820 - DNA, 609 bp, Homo sapiens
acaactagccttgtttgcagtatatactgccatgaagggtcttttataactcttgtactactatgtgacatcmtgttaactacacatcagtacaaagtaacagcatgcaagtatcctgacttacaattgttggaataagggaaggtgttgacaagatttgcttgataattctgtatcggtcataaagcggctttatgaggttcttgtcttgcttagttacctgaaaaacatgaaattaattattattcctctctcagacaagaatgaaaacgtcaacatttttagcagacaaaaagcctcaaagtaaaggattataatactataatgcagcagttatcatgaaaaggaaagtcatttatttatttatttatttatttatttatttatttatttagagacagagtctcactctgtcacccaggtggagtgcaatggcatgatcttggctcactgcaacctccacctcctgggttcaagcgattctcttgcctcagcctcctgagtagctgggactacaggcacgcaccaccatgcctggctaattattttgtatttttagtagatacagggtttcaccatgttggccaggttggtttcaaactcctgacc

SEQ ID NO: 568821 - DNA, 609 bp, Homo sapiens
acaactagccttgtttgcagtatatactgccatgaagggtcttttataactcttgtactactatgtgacatcatgttaactacacatcagtacaaagtaacagcatgcaagtatcctgacttacaattgttggaataagggaaggtgttgacaagatttgcttgataattctgtatcggtcataaagcggctttatgaggttcttgtcttgcttagttacctgaaaaacatgaaattaattattattcctctctcagacaagaatgaaaacgtcaacatttttagcagacaaaaagcctcaaagtaaaggattataatactataatgcagcagttatcatgaaaaggaaagtcatttatttatttatttatttatttatttatttatttatttagagacagagtctcactctgtcacccaggyggagtgcaatggcatgatcttggctcactgcaacctccacctcctgggttcaagcgattctcttgcctcagcctcctgagtagctgggactacaggcacgcaccaccatgcctggctaattattttgtatttttagtagatacagggtttcaccatgttggccaggttggtttcaaactcctgacc

SEQ ID NO: 568822 - DNA, 604 bp, Homo sapiens
caacctccaacttccggattcaagtgattgttgtgcctcagcctctcaagtagccaggattgcagatatgcaccaccacacctggctaattttcatatttttagtagagatgagctcttgccatgttgaccaggctcgtctcaaactcctaggytcaagtgatctacctgcctcagcctcccaaagtgctgggattatggatgtaagccactgtgcccggctctgttttctcagaagcttaacaggcatacaattttgaaaattaagcttgataataatattctaactttacctgaactccaagcattttatatagctgtacttattaaatatatgtattggactggttctaaaagaggaagagtgagcaataaaataggacttgatcttgtaaatatgaatacaaagtaaatatatatagtatacattttttgccttactatatataataaatagatacgtgacaaatgagtcatgataaatttaaaaagaactaaaattttcatcttgctatacacagaatctttaaaaaataaaataagtcaacttttttgtgtgtgaatggaaaaacttctaaagcaaaaataacttgtggtaaagatct

SEQ ID NO: 568823 - DNA, 604 bp, Homo sapiens
caacctccaacttccggattcaagtgattgttgtgcctcagcctctcaagtagccaggattgcagatatgcaccaccacacctggctaattttcatatttttagtagagatgagctcttgccatgttgaccaggctcgtctcaaactcctaggttcaagtgatctacctgcctcagcctcccaaagtgctgggattayggatgtaagccactgtgcccggctctgttttctcagaagcttaacaggcatacaattttgaaaattaagcttgataataatattctaactttacctgaactccaagcattttatatagctgtacttattaaatatatgtattggactggttctaaaagaggaagagtgagcaataaaataggacttgatcttgtaaatatgaatacaaagtaaatatatatagtatacattttttgccttactatatataataaatagatacgtgacaaatgagtcatgataaatttaaaaagaactaaaattttcatcttgctatacacagaatctttaaaaaataaaataagtcaacttttttgtgtgtgaatggaaaaacttctaaagcaaaaataacttgtggtaaagatct

SEQ ID NO: 568824 - DNA, 604 bp, Homo sapiens
caacctccaacttccggattcaagtgattgttgtgcctcagcctctcaagtagccaggattgcagatatgcaccaccacacctggctaattttcatatttttagtagagatgagctcttgccatgttgaccaggctcgtctcaaactcctaggttcaagtgatctacctgcctcagcctcccaaagtgctgggattatggatgtaagccactgtgcccggctctgttttctcagaagcttaacaggcatacaattttgaaaattaagcttgataataatattctaactttacctgaactccaagcattttatatagctgtacttattaaatatatgtattggactggttctaaaagaggaagagtgagcaataaaataggayttgatcttgtaaatatgaatacaaagtaaatatatatagtatacattttttgccttactatatataataaatagatacgtgacaaatgagtcatgataaatttaaaaagaactaaaattttcatcttgctatacacagaatctttaaaaaataaaataagtcaacttttttgtgtgtgaatggaaaaacttctaaagcaaaaataacttgtggtaaagatct

SEQ ID NO: 568825 - DNA, 482 bp, Homo sapiens
attgttaatttgtaaatgttgtcacaaattaattttaatttctactcaattgacaaacacatatctctgacttccttgctcatcactgatacttgcatggtatttttttctcctgggttcttgtttcatcttgctgaaatacattcactggcagtcttcagtatcgtttasaggtgatatggtttgtctctgtctccctacccaaatctcatgttgaattgcagttctcaatgttgggggaaggacctggtggcaggtaattggatcatgggggtgcatgtcccccttgctgttctcatgatagtgagtgaattctcgtgggatctggtggtttaaaagtgtgtggcactcccacttctctgtctctctcatgccaccatgtaaagacatgcttgcttccccttcacccttccaccatgattgtaactttcctgaggcctccccaggcatgcctcttgtacagcctgtggaactgtgagttg

SEQ ID NO: 568826 - DNA, 475 bp, Homo sapiens
tctgcaacatgaggatttggaaccstcatttaggataagctgagtatatgcatgtgggtttctttctggattctcttatctgtttcaacatttatttttctgtctttatgccagcaccacactgttttgattactgtaactttgtaatatgttttgaaataaaaaagaattatgcctctgagtttattctttttttcaggttgtttggctacttttgcttttttgagtatttatagaagttatagggcaatattcggtggctcactcctgtgatcccagaacatgggaagccaaggcagttggattgctggagcccaggagtttgaggccagcctgggaaatatagagaaaccctgtctcaacaaaaaatacaaaaactttctgggcatgatggcatgcaactgcagtgccagctacttgtgaggctgaggtgggaggatcaatagagcttgagaggtcaaggctacagtgagcc

SEQ ID NO: 568827 - DNA, 606 bp, Homo sapiens
ttttgtgcaaaaagtgggtaataaaacataaatatacatatttatttatattttcataaagaaataatgaaacaataagtaaaattaaattttaaaaatgcttcactatagtggaagggagaatagagratggaggagccagggacagaagcttctctagatgtagatttgaccagcattcctggagtctgggcctgtaactggctgtgagcatactgctggccaagcagggcacaagatttagcctagactgaagggaggagaaggagactccaactctccatgggaagtgtgacaaacaatatatggccagcttttctaaaagcaggacaaccggacatgatgtgcttcgtaagaggggcatactaaaaagtatacaatagctacaaagtgatcttgccttaaaaatatacttgaatgtctaatcaagcctctaactctcagtttctaggcaatataagggatagaaggaaatgtttaacttttaaaaggttaaagaagcaatcagacaaattcagaatgtgaaaaattctagaggatcaaacaatcagagggaactgtcacagaacaactgaatgtaatatgaaggtgtggtttggattctaa

SEQ ID NO: 568828 - DNA, 511 bp, Homo sapiens
tttgatgtggttgtgcttgacgttctcaagtctctggttttcaaggtgggacagacttaccatgagatgcaggtatctcaagcaaggtccagcacgacttactaactgcggggatggtcaagatagggtgttaggggcctggcttacttcgctgccaggcagttctttctctgacattcctttaggtaagatcagttccccaggtagaagagatgtattggaagagagcctcacgttggtgtcagccttgacaggaacttaggatgaaggagactccttgactgactgactgacttccttccttccttccttccttccttccttccttccttccttcttctctctctctttctttctttttttattttgagacaaagaatcactctgttgcccaggctgaagtgcagtggcgcgatctcagctcactgcaacctctgcctcccgggttcaagcgattctcrtgcctcagcttcccgagtagctaggattacaggtgcctgctaccccaccc

SEQ ID NO: 568829 - DNA, 535 bp, Homo sapiens
ttcatcttcagtggctacttaccatccccatagctggagtttaaggaaatctatccctaaagaaggggtccaacctcagtcttaacttttttttttttttgagacagagtttcactattgttgcccaggctggagtgcaatgacacgatctccactcaccacaacctccgcctcccgtgttcaagcaattcctcctgcctcagcctcccaagtagctgggattacaggtgtgcgccaccacgcctggctaattttgtatttttagtagagacggggtttctccatgttggtcagsctggtcgtaaactcccaacctcaggtgatccgcccacctcagcctcccaaagtgctgagattacaggtgtgagccaccgcgcccagccatctctctttatttgagatggagtctcactgtgtctccaaggctggagtgcagtggtgcaatcttggctcactgcaaccttcgcctcccgggttcaagtgattcttgtgcctcagtctcccaagtacctgggattacaggcatgcaccacca

SEQ ID NO: 568830 - DNA, 535 bp, Homo sapiens
ttcatcttcagtggctacttaccatccccatagctggagtttaaggaaatctatccctaaagaaggggtccaacctcagtcttaacttttttttttttttgagacagagtttcactattgttgcccaggctggagtgcaatgacacgatctccactcaccacaacctccgcctcccgtgttcaagcaattcctcctgcctcagcctcccaagtagctgggattacaggtgtgcgccaccacgcctggctaattttgtatttttagtagagacggggtttctccatgttggtcagcctggtcgtaaactcccaacctcaggtgakccgcccacctcagcctcccaaagtgctgagattacaggtgtgagccaccgcgcccagccatctctctttatttgagatggagtctcactgtgtctccaaggctggagtgcagtggtgcaatcttggctcactgcaaccttcgcctcccgggttcaagtgattcttgtgcctcagtctcccaagtacctgggattacaggcatgcaccacca

SEQ ID NO: 568831 - DNA, 620 bp, Homo sapiens
ctcactcccttgtcctagacctgtcacttggaggaccaaacagaataactggtcagctatgtggaccgagacatacaatagtgggagaattatttccattaatgctagatgcttccctactggcaaattgtgtttcctgtactctgtccttctcagtaaacctcttgtcaggtgtggcctatgagagccaagggagtctgaatgcttattacttctaaaaagaccccttgtgggcactgcacaggtgctatgtttcgtactttacaggtattatcacatttagtccttgaaacgactctatgaaaaaggtagtagtagtagtagcagcagcagcagtagtagtagtagcagtgatcccattaagatgagaaaatagactcagatgttaaataatttactcygagtcacacggcaaggatgtgatgataccatttactatggaacccattaaagtgtgtaccctagttctgtgatgaccatgttttaagatatagtgtaaactcacggtgaaaccccgtctctactaaaaatacaaaaaaattagctgggtgtggtggtgggcgcctgtagtcccagctactcgggaggctgaggcaggagaatggcttgaacccaggagg

SEQ ID NO: 568832 - DNA, 620 bp, Homo sapiens
ctcactcccttgtcctagacctgtcacttggaggaccaaacagaataactggtcagctatgtggaccgagacatacaatagtgggagaattatttccattaatgctagatgcttccctactggcaaattgtgtttcctgtactctgtccttctcagtaaacctcttgtcaggtgtggcctatgagagccaagggagtctgaatgcttattacttctaaaaagaccccttgtgggcactgcacaggtgctatgtttcgtactttacaggtattatcacatttagtccttgaaacgactctatgaaaaaggtagtagtagtagtagcagcagcagcagtagtagtagtagcagtgatcccattaagatgagaaaatagactcagatgttaaataatttactctgagtcacacggcaaggatgtgatgataccatttactatggaacccattaaagtgtgtaccctagttctgtgatgaccatgttttaagatatagtgtaaactcacggtgaaacccygtctctactaaaaatacaaaaaaattagctgggtgtggtggtgggcgcctgtagtcccagctactcgggaggctgaggcaggagaatggcttgaacccaggagg

SEQ ID NO: 568833 - DNA, 596 bp, Homo sapiens
taataggattctttctaaaaycaacaaagttacagttagttttaaagttgtgataaataaggatgcataaaattcctttgtgataattatttttaaatgacattatttttatatttgtgggtaatataaaaatattttttataatccattaactgctatgtagaatattgggggtttgcttgccagtgttcttaactaacttgtttaatctatgtctagaagccacagaagaagtttctttggacagccctgaaagggaacctatcctatcctcggaaccttctcctgcagtcacacctgtcactcctactacactcattgctcctagaattgaatcaaagagtatgtctgctcccgtgatctttgatagatccagggaagaggtacaggaaaatgtattctaaattaatatgtaaatatataccttttttccccacccaacatcactctgctgttagtcatttctaatcaaagccttttagacattttgggaaaagaatattggactaaattagttatgggatctggcttctatcttccccactctacccagtgacctgggcatatcatttaccttgttaagtgaaggagtttgt

SEQ ID NO: 568834 - DNA, 439 bp, Homo sapiens
atattgcatgttctcactcataagtgggagctaaataatatgtatagatggacatagagagtggaatcatggaaatagagagtggagagattcagtaggatgaaggagtgggagggggtgaatgatgagaaattatttaaagggtacaatgtatattatttgggtggtggataccctaaaagccctgacttgacatctacacaatctatgcaggtaaaaaactgcacttgtaccccataygtttatataaaacccccaaaatacccatacatttttagtcctagtcccatatatattttcgtctattctatactccagtcacatttaaataatctctcatttacttattcatctatataatacctacttgttgagcacttacacttaccaggcatgctggaagcagtgtgtattaattatattttcttattttctatat

SEQ ID NO: 568835 - DNA, 597 bp, Homo sapiens
cactcctgtgttacagtaaccttcctggttggatatttatcatttgactcctatctaccacatactagttaataattcttgtgtttccatggcatcttagagtgtgcagaatgctttcatgggcaytatattgtttagtcatcacaaagacccttgtgaactatgtggcctttaggggaaattattttctcccccaaatcatattacctgtgcgaggagttgctatttagataacttacagttactgcaaagtgactgctcttcaaagtatatagagcagaagaaatagggacaagcaatttcattcccagctagcagagctctcatacaggttcataatctcaggaagaatgggttattttggacatttgagaaagtttaaacaacagatgatccaaggacttagcaacctttacagccgcacagtgaaaatcctggcacaaaggggaactgttcttgaataaattctccaatgtcacaggcaaaaatagcccttgtcgtggtttggcctcagcagctgtttgctctgcctggatcagagcatggcagaatagtattctggctggacagtatcactatcttgtacatttcattatc

SEQ ID NO: 568836 - DNA, 597 bp, Homo sapiens
cactcctgtgttacagtaaccttcctggttggatatttatcatttgactcctatctaccacatactagttaataattcttgtgtttccatggcatcttagagtgtgcagaatgctttcatgggcactatattgtttagtcatcacaaagacccttgtgaactatgtggcctttaggggaaattattttctcccccaaatcatattacctgtgcgaggagttgctatttagataacttacagttactgcaaagtgactgctcttcaaagtatatagagcagaagaaatagggacaagcaatttcattcccagctagcagagctctcatacaggttcataatctcaggaagaatgggttattttggacatttgagaaagtttaaacaacagatgatccaaggacttagcaacctttacagccgcacagtgaaaatcctggcacaaaggggaactgttcttgaataaattctccaatgtcacaggcaaaaatagcccttgtcrtggtttggcctcagcagctgtttgctctgcctggatcagagcatggcagaatagtattctggctggacagtatcactatcttgtacatttcattatc

SEQ ID NO: 568837 - DNA, 522 bp, Homo sapiens
taggtggaagcatgaagttgttaactgttgttgcatggaagttaaaatacatggagaggagcgattaggagtgctgagaaaccaaagaaggtgactctgtgatgctgggaggactctgaaaattacattttccagttacccttgccagcargcttccttttaggttccatctgcaggatgcatagagagaagagcagaaggaacttccttcctgtttttcctgtctttgacggcattgctagatccagcctcccatgagttgtggcatttccagcacagcgctgtggcacactctcggaggaatcagcagctctagggcagtggctattttcctagaagtatagaaccagctctgcagagcccctcttctaagctcctagattctggtaaccccaccccttcccttttgtttcaacaaccagcagtatcagctgttgcctgagtttttaaatctctgtgttaccctttttctctttcaggcacccaacatctgtggaaaacacctcttagactgagatatcc

SEQ ID NO: 568838 - DNA, 539 bp, Homo sapiens
tgtgttgatgcaagcagagactaggcaaataatttaaaaaggttgttgctttgccaaaagtaccacaaaagtgagagaaagcaaaggggttcagagcagtttcaaagaataattagaaggactgccatgaatttaagctgggtaaggagaaaggagaggacatgaggagagaaaagagttattaggattgatgtgctggggcaccagattggtgaaataattgttagagttcyattctagtaagcattggcaggcaaagaggaggtgtcagctggagaatgtgatgcttgaaactgaaaatttggaggaacttcagggctgccattgacaaagatgacagcatgaccctgaatgttagcgtctgggatagggtacaagaaagatcactgggagacagactgccaaggaatttagagtccaagatatcgacagataatctacacagatatcacatgttgaaaagagtgatagtgtttcaggtgctgaaatctttgaggaatgaggaaatgtgaaaataagaacagtgaatgacttagaaa

SEQ ID NO: 568839 - DNA, 525 bp, Homo sapiens
ctaacaagcaaatggaacaccaaaaagagcaagcattgctattctatttaagacaagatagactttaaaccaacaattatcaaataggacaaagaagggcattacataatgataaaagattcaacataagaagacccaactatcctacatatatatacacccaccactgtggcacccagattcataaygcaagttcttcgagacctatgaagagacttagataaccacacaataatagtgggagacttcaacacaccattaatagtgttagacagatcatcaaggcagaaaactaacaaagatacttgggatctaaaattaacacttgaccaaactgacctgataggctttgacaaaatactccatgcaccctcaacaaaacatactttcttcctatctgcacacagcaaacactctaagatctaccatacactggtgataaaacaattctcaacaaatccaaaaaaaactgaaatcatatcaaccacactctcagaccacagcaataaaaatagacaccaaggc

SEQ ID NO: 568840 - DNA, 579 bp, Homo sapiens
ggtgaaaccccatctctattaagatacaaaaaaattagytgggtgtggtagcaggtgcctgtaatcccagctacttgggaggctgaagcagagacttgcttaaacctgggaggcggaggttgcagtgagctgagattgtgccactgcactccaacctcagcaacagagagagattctgtctcaagaaaaaaaaagaaagaaaccaataccaagatctctcaaaatcatacaatgacatggacatttaataactgtatcctgaatgatttttggataaaaaatgacattaaggcaaaaaaagattgtaactaataaaaatacacaatgtaagtacatctctgggacacagctcaagtactgttaaaaggaaagtttatatactaaatgcctacatcaagaaattagaaagactgcaaattaacaacctaacatcatacttagaggtgctagaaaaacaagaccaaacaaatcccaaagctagaaggagaagataacaaaaatttgagctaaattaaaactgaaaagcaaaaatccattcaaaagattaatgaaaccaaaagtttggttttttgcaagaat

SEQ ID NO: 568841 - DNA, 579 bp, Homo sapiens
ggtgaaaccccatctctattaagatacaaaaaaattagctgggtgtggtagcaggtgcctgtaatcccagctacttgggaggctgaagcagagacttgcttaaacctgggaggcrgaggttgcagtgagctgagattgtgccactgcactccaacctcagcaacagagagagattctgtctcaagaaaaaaaaagaaagaaaccaataccaagatctctcaaaatcatacaatgacatggacatttaataactgtatcctgaatgatttttggataaaaaatgacattaaggcaaaaaaagattgtaactaataaaaatacacaatgtaagtacatctctgggacacagctcaagtactgttaaaaggaaagtttatatactaaatgcctacatcaagaaattagaaagactgcaaattaacaacctaacatcatacttagaggtgctagaaaaacaagaccaaacaaatcccaaagctagaaggagaagataacaaaaatttgagctaaattaaaactgaaaagcaaaaatccattcaaaagattaatgaaaccaaaagtttggttttttgcaagaat

SEQ ID NO: 568842 - DNA, 556 bp, Homo sapiens
tttggtgcacagtaaagaagtgtgtgaycaccatggttttgttagtaccacatacatccaatagaagaatactactattactactttgtaataatgcctttgctttgaattattctaattattctgtgcatgaatctaggcgtatattcatcttttcagcttttgatatctactatagttttaacagagctattagagatgcaaaataaataacatcaagaatggaaaccaagcatcatttactacatagatattgcaatgataaacactttaatattattttctcctctgcacaaatatttctttttaaaatagccgtgcgtatatttcaatgacatttatattcaaagcgatgacaaatttcctaacatgtccttatttcagtaaatataattattttatcttgaaagagaaaacaacactatcttaaaaagacagactattgttgaaaacctcaaactctgtaagatacttacctttttatacttttgcattaaattacagatatatggtttaacagactttctctgacattcatacaaagttttcatgaaaa

SEQ ID NO: 568843 - DNA, 436 bp, Homo sapiens
ttgggaggctgaggcagatggatcacttgaggtcaggagttcaagactagcctggcaaacatggtgaaactccactctactaaaaatacaaaaattagttgggcgtggtggcatgtgcctgtagtcccagctactcaggaggttgaggcatgagaatcacttaaactyggaaggcggagtttgcagtgagccaagaaggggctactgcactccaaccatgggcgacagagggagattctgtatcaaaaaaaaagaaaggagagagagaggaaaaagaaaaagaggagaaggaggagaagaaggagaaggagaaaaaggaggaggaggagaaaagagaaaagaaaagaaactaaaaacgttgttccccctctggaaaccagtacttttaaaatccatgaaaaatgaggatgtagacacaaagcaagacacaaaaaga

SEQ ID NO: 568844 - DNA, 570 bp, Homo sapiens
gacatttagtttcacttcttttccatttaggacactagctgctgtaatctcggtactacttttttttaagttatcttccccaagcagtgttacaatccagctggaatgggcattagatatacacatcattagactcttaaaaagaggcccgatggcctctcatttaaccagaatattaaaaaagaaaatatatgtacacacatataaatatatttaagttcacacttttttattttttatttatttatttatttattgagacagagtttcactctcgttgcccaggctagagtgcaatggcatgatctcggctcactgcaacctccmcctcccgggttcaagcgattctcccacctcagcctcctgagtagctgggatgacaggcatgtgccaccacacctggctatttttgtatttttagtagagatggggtttcatcatattggtcaggctggtcttgaactcttgacctcaggtgatccgcccacctcggcctcccaaagtgctgggattacaggcatgagccactatgcccggcccacattttttaaaaaagttaaaatgtaaaag

SEQ ID NO: 568845 - DNA, 638 bp, Homo sapiens
agtgccattcttccacagtccttatcaaataaataggcctttgagtcttggaattgttgagagtaagaaagcaaataatatataaagttgacaagcacaaaagacacaaagaggccaggcatggtggctcaagcttgtaattccaacactttgggaggccagggcaggggggttgtctgaatccaggagttcaagaccagcctaggcaacataatgagatcccatctctacaaaaaataaaaacaaaagtagccagacatgatggtgcatgcctgtagtcccagctactcaggaggctgaggtgggaggatcacttgaggctgggaggtcgaagctacagtgagctgtaattgcaccactgcactccagcctggggaacagtaagaccatgttggaaaaaaagaaraggggaggggaaggggaggagagaccacaagaaacaaatataatgaataatagtttactattcctgagaaaaagagaataccaaatgtaagagaatgtgtaactagggttggggagagcgggctggagagagacagcacacaaagacaacagagagaagtcaaataggaaatttcaaaatgagaatcagctgatgtataaaaaagagcaaaataatttttttaccgatagaa

SEQ ID NO: 568846 - DNA, 447 bp, Homo sapiens
ttgtaaaaaaaaaaaagaatctcttcattattttaaaaaccatttgtgtttcctttttctgtaatttattcatatttgtccatttttaattgcagtgttattcttgttattgattttttaaaacgtggtctttatatttgagtgaaattaaccttccatcatgagttggagcattttttccccaatatatacttctcttttgattttgcttatggtcattttataatgccatggtttttttgttgtttgtttgttttgttttttttttgagatggagtctcgctctctcagccaggctggagtgcagtggcgtgatctcarttcactgcaacctccacctccccgtttcaagcgattctcctgcctcagcctcctgagtagctgggattacaggcgtgcaccaccacgcctggctaatttttgtatttttagtagtaatggagtttc

SEQ ID NO: 568847 - DNA, 447 bp, Homo sapiens
ttgtaaaaaaaaaaaagaatctcttcattattttaaaaaccatttgtgtttcctttttctgtaatttattcatatttgtccatttttaattgcagtgttattcttgttattgattttttaaaacgtggtctttatatttgagtgaaattaaccttccatcatgagttggagcattttttccccaatatatacttctcttttgattttgcttatggtcattttataatgccatggtttttttgttgtttgtttgttttgttttttttttgagatggagtctcgctctctcagccaggctggagtgcagtggcgtgatctcaaytcactgcaacctccacctccccgtttcaagcgattctcctgcctcagcctcctgagtagctgggattacaggcgtgcaccaccacgcctggctaatttttgtatttttagtagtaatggagtttc

SEQ ID NO: 568848 - DNA, 447 bp, Homo sapiens
ttgtaaaaaaaaaaaagaatctcttcattattttaaaaaccatttgtgtttcctttttctgtaatttattcatatttgtccatttttaattgcagtgttattcttgttattgattttttaaaacgtggtctttatatttgagtgaaattaaccttccatcatgagttggagcattttttccccaatatatacttctcttttgattttgcttatggtcattttataatgccatggtttttttgttgtttgtttgttttgttttttttttgagatggagtctcgctctctcagccaggctggagtgcagtggcgtgatctcaattcactgcaacctccacctccccgtttcaagcgattctcctgcctcagcctccygagtagctgggattacaggcgtgcaccaccacgcctggctaatttttgtatttttagtagtaatggagtttc

SEQ ID NO: 568849 - DNA, 447 bp, Homo sapiens
ttgtaaaaaaaaaaaagaatctcttcattattttaaaaaccatttgtgtttcctttttctgtaatttattcatatttgtccatttttaattgcagtgttattcttgttattgattttttaaaacgtggtctttatatttgagtgaaattaaccttccatcatgagttggagcattttttccccaatatatacttctcttttgattttgcttatggtcattttataatgccatggtttttttgttgtttgtttgttttgttttttttttgagatggagtctcgctctctcagccaggctggagtgcagtggcgtgatctcaattcactgcaacctccacctccccgtttcaagcgattctcctgcctcagcctcctgagtagctgggattacaggcgtgcaccaccacgcctggctaatttttgtatktttagtagtaatggagtttc

SEQ ID NO: 568850 - DNA, 585 bp, Homo sapiens
gccatgatgacgatggcggttttgtcgaatggaaaagggggaaatgtggggaaaagatagagaaatcagattgttgctgtgtctgtgtagaaaraagtagacataggagactccattttgttctgtactaagaaaaagtcttctgccttgggatgctgttgatctatgaccttacccccaacccggtgctctctgaaacatgtgctgtgtccactcagggttaaatggatcaagggtggtgcaagatgtgctttgttaaacagatgcttgaaggtagcatgctcgttaagagtcatcaccactccctaatctcaagtacccagggacacaaacactgcaaaaaaaaaaggccgcagggtcctctgcctaggaaaaccagagacctttgttcacttgtttatctgctgaccttccctcctctattgtcctatgaccctgccaaatccccctctgcaagaaacacccaagaatgatgaattaaaaaaaaaaaaaaaaaaaaagagaattgcttgaacccgggaggcagaggttgtagtgagccaaggtcacgccagcacaagactctatttcaaaaaaaaaaaaaaa

SEQ ID NO: 568851 - DNA, 585 bp, Homo sapiens
gccatgatgacgatggcggttttgtcgaatggaaaagggggaaatgtggggaaaagatagagaaatcagattgttgctgtgtctgtgtagaaagaagtagacataggagactccattttgttctgtactaagaaaaagtcttctgccttgggatgctgttgatctatgaccttacccccaacccggtgctctctgaaacatgtgctgtgtccactcagggttaaatggatcaagggtggtgcaagatgtgctttgttaaacagatgcttgaaggtagcatgctcgttaaragtcatcaccactccctaatctcaagtacccagggacacaaacactgcaaaaaaaaaaggccgcagggtcctctgcctaggaaaaccagagacctttgttcacttgtttatctgctgaccttccctcctctattgtcctatgaccctgccaaatccccctctgcaagaaacacccaagaatgatgaattaaaaaaaaaaaaaaaaaaaaagagaattgcttgaacccgggaggcagaggttgtagtgagccaaggtcacgccagcacaagactctatttcaaaaaaaaaaaaaaa

SEQ ID NO: 568852 - DNA, 553 bp, Homo sapiens
ttttgtatttttagtagagacagtgtttcactgtattggccaggctagtctcgaactcctgacctcgtgattcatctgcctcaacctcccaaagtgctgggattacagacgtgagacaccttgcccggccttaaaaataaattttacaaaatgtttcacttatgtatatttcatgttttgctgcttatggacaactccctttttgttttgtgcttttagagtaaaactcgaaaggacttctgtttttgtttttctacagtttaaacttaaaacattgatacactatatgccccttaatttttgtaattgatattacagtrtagtttattcatttatctagaacatgctgatggtttatgccacaagttgacaactgtgtgtccaactgtgaaacctcagactcaaggtctagcaaaagatgcttgggaaatccctcgagaatctttgcgactagaggttaaactaggacaaggatgtttcggcgaagtgtggatgggtaagaagcctgaatttttgttttctgtcattgtttagctgtggattaaagtgcaac

SEQ ID NO: 568853 - DNA, 543 bp, Homo sapiens
aggccagttatgtaatgtcacggcgattttgagaatctgattcagatgttgccagctacagctaatataattgaaraatagtcagatagggtcaggagtggtggctggctgggtgtggtggctggctgggtgtggtggctcatgcttgtaattccagcactttgggaagccaaggtgagcagatcacttgaggtcaggagttcgagaccagcctggccaacatggtgaaacccctgtctctactaaaaatacaaaaattagccaggcgtggtggcgggcacctgtaatccccactactcgggaagctgaggcaggagaattgattgaacccaggaggcagaggttgcagtgagccgagatcacaccaatacagcctggacaacagagcaacactccatctcaaaaaaaaaaaaaaagaaaaaagaaaaagaaaaatagatagaaggagcccattttatttttcatctcagaggggagcagccttcaacctggcttaggggtcaatacagtgacaaaggaaatgcagatcctacacttgaccct

SEQ ID NO: 568854 - DNA, 471 bp, Homo sapiens
cctgtatagggttcctgacctatagtcaatacagaacgtcactttctaacaggtccaggaactccaagtttattatggtacctggagaggaaaggatcacccaactcacaggtatttgaggatgcaaatgcatggctggactcagcttaaaaagttcttatctgagattccttgtggaacagagttcccttaaagccaatccaaaaggcctatgtagaaataattattcttgctgcactttatgcaaataatcaggccaagtataagactaaagtctattttgaaaacaactcaatcctgttatgattttttttaacaaaaatgaggactggagagagagaaattatgtttcaaaacttatcwtgcatttttcattaaattctaaactcattagttgtttttaagtatttacctacccttttatactaaccctgcttgttcctgtgaaccaaccagcaatctccatctgca

SEQ ID NO: 568855 - DNA, 599 bp, Homo sapiens
acaaaaggtttacctccaacatttatctcacttacatgttctcaattctttcatttttaacagcttatctagattatttctaaaaaccgatacattaaacatagctagccatcatttaaaaatagttatttctttgttaacctttatttgtttatttatttttcatagccagtgaacattagcgaacatagaaaaacccttaaagttagctacatggrcattttcaccagtaactctgaagattcagctgttttcattaaaccagcaacattacatcagtcttacttatccaaaaaaattacacaaagatcattttgtttggctgggttcatagttttataaccttttatgccaaactctgacacttcaaaatatctagcagagataaaaattaacccagaaaaaaaaatgcatgctagcaattctgaagaatttctgtttttattttaccaacaattttaaaaccagcttatttattaaaagtttacttaagtcctgtgaatttgagaaatactttgggcttaatttatgaatgcttttttatttttaaaccaatttggtaggcacgacatataacataataaatgtacatacataag

SEQ ID NO: 568856 - DNA, 358 bp, Homo sapiens
agctatcagactatcttataagaaaagctaagggaaattctccagaccgaaagcaagtgactccagacagtaatccaaatgtataagaacaaagaaagagcactggtaagggtaattatgtaatyacaaaaggcaatttaaaggcattttttcctttttgaaaaactgatttaaaaaccaataagttcaaagcatatttacaaataagaatattttaagaaataaaatgtgatattcaattccattttttcatttaagaaaaaaaatcttagatgtctaaggacttagttacattgcttcaaaatatgtaaaagaaaaccaaatagaattcaaagaagaaatacaaaaatacaaaaat

SEQ ID NO: 568857 - DNA, 468 bp, Homo sapiens
gttttttattttctcctctgtgtattttcaaatagcctgtcttcaagctcactaattctttcctctgcttaatcaattacactattaaaaggttttgatgcattcttccrtatgacaattgtatttttcaagtacagaatttctgcttaatgctttttaattatcttcatctctttgttaaattgatcggatagaattctgaattccttctctgtgttatcttgaatttctttgagtttcttcaccactgctattttgaattttctgtctgaatgatgactttgaattttctgtctgaatgatcatttacctctgtttctccgggattggttcctggtgtcttatttacttcatttcatgaggtcatgttttcctgaatgatgttgatgctactagatgttctttggtgtctgggcattaagttaggcatttattgtattcttcactgtctgggattgttttcagcag

SEQ ID NO: 568858 - DNA, 419 bp, Homo sapiens
tgttttttattttctcctctgtgtattttcaaatagcctgtcttcaagctcactaattctttcctctgcttaatcaattacactattaaaaggttttgatgcattcttccgtatgacaattgtatttttcaagyacagaatttctgcttaatgctttttaattatcttcatctctttgttaaattgatcggatagaattctgaattccttctctgtgttatcttgaatttctttgagtttcttcaccactgctattttgaattttctgtctgaatgatgactttgaattttctgtctgaatgatcatttacctctgtttctccgggattggttcctggtgtcttatttacttcatttcatgaggtcatgttttcctgaatgatgttgatgctactagatgttctttggtgtctgggcat

SEQ ID NO: 568859 - DNA, 479 bp, Homo sapiens
aattcttcattgttttttattttctcctctgtgtattttcaaatagcctgtcttcaagctcactaattctttcctctgcttaatcaattacactattaaaaggttttgatgcattcttccgtatgacaattgtatttttcaagtacagaatttctgcttaatgctttttaattatcttcatctctttgttaaattgatcggatagaattctgaattccttctctgtgttatcttgaatttctttgagtttcttcaccactgctattttgaattttctgtctgaatgatgactttgaattttctgtctgaatgatcatttacctctgtttctccgggattggttcctggtgtcttatttacttcatttcatgaggtcatgttttcctgaatgatgttgatgctactagatgttcttyggtgtctgggcattaagttaggcatttattgtattcttcactgtctgggattgttttcagcag

SEQ ID NO: 568860 - DNA, 579 bp, Homo sapiens
ttcgccctcttccaagagtactttacttccatttgttcctgttccaaagctttttataaaatttcactcctgctctgaaatttccctcggtctttccttctgccttatgcccctcagctgaatttatttatcttgaggaggcaagaattgagtttgatacagacctgtacagattcacttctgctaacaattacactttgcaaaacatgcaaacacttaaactttgcaaaacatgcagtattagttacttggtcctgatccagatactgattttcatttcaccttccatttcaactttttatcaggctggagccctctgctttagaagacaatttgaccaaacaattgacgtcttcccrgaaaaagatgtaacacttaagtccttatcaatacaaatgggcttttaattcctagctattggccatttgacaagaagtagactagatatgttcagccttgttgcttgctctagaagcaataattcaggctttgaaccaacagaccagagcttttggccttgagtaataagactaaatgttgtatattgagggcctgatccatgactcttatttgtgactt

SEQ ID NO: 568861 - DNA, 578 bp, Homo sapiens
aatgtataagcccccatcctccctactcctgtaactcctactcccgcagttaatgtttgtacctatatttccaaaagtttttatatatatacaaaaaataattatttacagaaatgagattaatacactattgtgaaactttctctttttgcttaataaattgtcatcatctttccatgtcgtgttaaacagatactttattatttttaaaagcagcttagtaatcttttatgtatatattgtatataccattacttatttaataatttcattgttgatatttcgattatttccaattccttattgtgaacaataatgtaataaatgtctttgtatatatatawaaaaaaaaatctctctgtcccaagtagatctggaatctcacacaggttcagattagcatgaaaactagacaaaaagaaaatacagaccaactatattaatattttcatcattagaccatagcccaattctttatttgctccaccgtgatttattttaggtcaaggatatgagacttcaattattttcaagtattctaaggaaaaaatcatttgtcctcattactttataagtaa

SEQ ID NO: 568862 - DNA, 548 bp, Homo sapiens
atggtaaaaccccatctctactaaaaatacaaaaatcatctgggtgtggtggtgcatgcctgtagtcccagctacttgggaggctgaggcaggaggatcacttgaacctgggaggcagaggttgcagtgagctgagattgtgccactgcactccagcctggacaacagagcgagactccgtctcaaaaaaaagaaaaaaaaaaatcattcttcactgtgtaraaagagttattcttctaaaatgcaaatgtcgttccgataccccccttaggaggacgaaaatctttgatgtcttttgctttcaggataaagatccaatttcttgctatgccttaaaaagcattgtccttagtcaactatgtagtcttatgcccaccctcccaatcacccttccaactcctttgacctccatgcactgcatgttcagcacaattttattctttcaggtcctagtgcctgtcagttcttacttacctctggactttcttatgggctttttcctttatctggaatactctttcccctttatcttggataattcttcctca

SEQ ID NO: 568863 - DNA, 583 bp, Homo sapiens
gttgctttcagtagcagctcaccataatgttgttagggcctcgcatcctacatttctggatgactattaaatatttactaaatgaataaataaatgaaattcactgaatctgtaagcaagaaataccaatgatggttcactttgtcccagcacaattcccrtatgaagacaaatgatataaaacattaaaaaaattaagaaaaaattatcatgaaaaaatagggtaatagtaaataaatttggccttcagctaaacagagagagaaaattctatttaacacaaactgcatttaatagtgaaataattcccaattatcctacattttaaagcttgtactatcacacctgaggaaattctatttatttctgaattggcatataaacctgtgcataaataatctattacatttctgtttattacatgatattcacagtgatatattaaaatgtgatgattttaaatatattggttatttgggaattttgacccacaaatctatagctatgctgagaaagccctaaagtagaattttgctttatttcaaaaagtttatttttcatgcttcaatgattttcttgcaaa

SEQ ID NO: 568864 - DNA, 583 bp, Homo sapiens
gttgctttcagtagcagctcaccataatgttgttagggcctcgcatcctacatttctggatgactattaaatatttactaaatgaataaataaatgaaattcactgaatctgtaagcaagaaataccaatgatggttcactttgtcccagcacaattcccatatgaagacaaatgatataaaacattaaaaaaattaagaaaaaattatcatgaaaaaatagggtaatagtaaataaatttggccttcagctaaacagagagagaaaattctatttaacacaaaytgcatttaatagtgaaataattcccaattatcctacattttaaagcttgtactatcacacctgaggaaattctatttatttctgaattggcatataaacctgtgcataaataatctattacatttctgtttattacatgatattcacagtgatatattaaaatgtgatgattttaaatatattggttatttgggaattttgacccacaaatctatagctatgctgagaaagccctaaagtagaattttgctttatttcaaaaagtttatttttcatgcttcaatgattttcttgcaaa

SEQ ID NO: 568865 - DNA, 583 bp, Homo sapiens
gttgctttcagtagcagctcaccataatgttgttagggcctcgcatcctacatttctggatgactattaaatatttactaaatgaataaataaatgaaattcactgaatctgtaagcaagaaataccaatgatggttcactttgtcccagcacaattcccatatgaagacaaatgatataaaacattaaaaaaattaagaaaaaattatcatgaaaaaatagggtaatagtaaataaatttggccttcagctaaacagagagagaaaattctatttaacacaaactgcatttmatagtgaaataattcccaattatcctacattttaaagcttgtactatcacacctgaggaaattctatttatttctgaattggcatataaacctgtgcataaataatctattacatttctgtttattacatgatattcacagtgatatattaaaatgtgatgattttaaatatattggttatttgggaattttgacccacaaatctatagctatgctgagaaagccctaaagtagaattttgctttatttcaaaaagtttatttttcatgcttcaatgattttcttgcaaa

SEQ ID NO: 568866 - DNA, 554 bp, Homo sapiens
tgcctcagcctcccgagtagctgggactacaggcacccgccaccacgcccggctaattttttgtatttttagtagagacagggtttcaccgtgttagccaggatggtcttgatctcctgaccttgtgatccgcccgcctctgcctcccaaagtgctgggattacaggggtgagccaccacacccatcctgtcttgttttattttatgcttaggaatctatttaatttaaaaacatgtgatgtaacctgtaaggtatcttcatagagttggtatctagtagacatcaatctatggatcaaataccctgagagctggtctaacacttaaatagctgtacccctcattctttcttctctcttccgcataggaaccatgagtttcctttgttatagtggtgaacttttttgtcacatccaggtggaggaaattctgggtattcgctgagagcaaacaaamggacacacgttgggtcctatactggtggtgttatatccaacactgggaaggctatttcctcatcatgctgctttcagggcacatggaaacactagaaa

SEQ ID NO: 568867 - DNA, 529 bp, Homo sapiens
tttacattgaagcagaattgtcttcaatattgatgttgatacaggaacatccagttagcccttgaggagaaggcttggattttgtttactcccatataagaatctttctaatataatacagtgcttyctactttttagtagtgaccaagtgcatatcttatctcttcccaggagtagaaggggctctgtgaatgtgaatacagggagcttttctaatttaccttgaatcccttccaccttatcagatcgtgatttgaaaatataatagtacttgaacagtatatatttaagaagtggacaacagagaaaggaagagagggagatgggagagtggagaaaacaaacactattatgctatttcccatggccagagaggaagcaagagagagaaactgacaaagtcagactctttttaacaacctgctgtctcaggacctcatccattcctgccacaacgagaagttactcactcctgagagagggcattactcattccatgaggtaccacccccaaacacctcccactagg

SEQ ID NO: 568868 - DNA, 529 bp, Homo sapiens
tttacattgaagcagaattgtcttcaatattgatgttgatacaggaacatccagttagcccttgaggagaaggcttggattttgtttactcccatataagaatctttctaatataatacagtgcttcctactttttagtagtgaccaagtgcatatcttatctcttcccaggagtagaaggggctctgtgaatgtgaatacagggagcttttctaatttaccttgaatcccttccaccttatcagatcgtgatttgaaaatataatagtacttgaacagtatatatttaagaagtggacaacagagaaaggaagagagggagatgggagagtggagaaaacaaacactattatgctatttcccatggccagagaggaagcaagagagagaaactgacaaagtcagactctttttaacaacctgctgtctcaggacctcatccattcctgccacaacragaagttactcactcctgagagagggcattactcattccatgaggtaccacccccaaacacctcccactagg

SEQ ID NO: 568869 - DNA, 453 bp, Homo sapiens
cctcctcaagtaggtccttcaccacgaactgcttaactgggaggcactccccagtaggggcagactgacacctcacccagccgggtactcctctgagacaaaacttccagacaaaaggtcaggcagcagcatatgtggttcacaaagacctgctgttccacagccactgctgttctacagccactgctgttccacagccactgctcttctgcagrcaccactgctgatacccaggaaaacagtgtctggagtggaccactagccaactccaacagacatgcagctgaggaccctgtttgttagaaggaaaactaacaaacagaaagggcatccacactgaaaacccttctgtacgtcaccatcatcaaagaccaaaagtagataaaaccacaaagatggggaaaaaacagcagaaaaactggaaactctaaaaagcagagtgcttcccctcct

SEQ ID NO: 568870 - DNA, 592 bp, Homo sapiens
taaagtgggaggaattagtctacctgatttcaagatactgtctagctacagtaatcaagactgtgtgacattggtgaaaagatagacgcatagatcaatggaacaaagtatggaacccagaaacatacccacatatttatacccaattgatttttcacaargctgcggacacaattcaactgagggaaagatagccttttgaatgaatggagctgaaacaattggtcatccacaggcaaaaaataaaataaaaaaagacctaaacttcacaccttattcaaaatcaactcaaaatggatcacagacttaaatgtaatatgtacaactaaaaaactatataactacagaaaaaaatgtgagaacatcaggctctaggaccaggcaaagtgctcttagccttgaaacagaaagaatggtccataaagaaaaaattaataaattggactccatcaaaattaacaatgtttgttctgtgaaaggtcctgttaacagggtgagtaaacaagctgcacactaggaggaaatatttgcaaatcacacatctgacaaaggactactatctagaacataaaaagaattctcaaaattcaac

SEQ ID NO: 568871 - DNA, 557 bp, Homo sapiens
aaatgtcagtatctagatggacttttaaataatttagttgctcatgttttttaaaggtaatgggatataatgaktattcttgacatgaaaattttactcagatgatacatttgacataattgggcctataaaactcaatttgtggatttttaagatgtcatttttgaggacatggattgactcttcattctgttatgaaatcatcataggtaggtatgtcaaatacagaggtagctttattaatgcacatccaaactacagctcctcatctaaacagaaacccaggaaccagcaaattgcagtttgatgcttacaactcaccaaccctgattgtcagtgaagtcaagttttgataataaccaaaactatagtgagtcagtagcattttatctttgttatttagcatttttgtaacattttgtgttttcaaagggaatatcatcaccatttctcctagtcattcaagagaatatctacctgcatattttctctggtatgtaagaaccaccataactgttcatttcaaaccctagcacatattctgaaaatgtttttag

SEQ ID NO: 568872 - DNA, 214 bp, Homo sapiens
acactgagctcaagtcacaamcttttcttcctgccccattcctagaattggcaggagaacatttaaatacaatagtgcataattatactaaacaataaaaagaggtgttctcagtagaccagaaattagtagaaaatacagaaagagaaaccgcaagggtgactaaatggtgagtagagcagcctccctctgacttcatccccttccccagcaa

SEQ ID NO: 568873 - DNA, 506 bp, Homo sapiens
cagaatcgagaactcgcttagatacttgcacacgcatttttataacagcacaattcgcagttgcaaaaatatggaaccaacccaaatgcccatcaatcaatgagtggataaagaaactgtgttttatatatrtatgaaggaatactactcagccataaaaaggaattaattaatagcatttgcagcaacctggatgggattggagactgttattcgaagtgaagtaactcaggaatggaaaaccaaacatctatgttctcacttataagtgggagctaaactatgaggatgcaaatgtataagaatgacacagtagacttgggggactcatggggaaagggtgggaagcaggtgagggataaaagactacaaattctgcttggtgtatttgtacagtgtatactccttggatgatagatgcacgaaaatctcacaaattaccactaaagaacttactcatgtaacaaaataccacctgttccccaaaaacctatggaaatagaaaa

SEQ ID NO: 568874 - DNA, 602 bp, Homo sapiens
tgaaatccataacttaactctgaaattttctttatgckctgacatttaaaaagcaatatactatgctgtatttaccactctctagaaacctctctgagtttatgaattccctgcatttctttcttctcaacttgttccagagttaccttcagtcttctgtgctagtaagcctatgcctagaaaatcccattttttttgtctttcttataagtttttctatccataatatttcttttttcattgatcagttcctcttcttgctggtttaatccttgaaaacaactttccccattacggaatttttattctcttcttacatatgcttaagacctggaggagaagtaactgacctcaactactctttatactgtgtctcttcttatagccatttgttcactgaatgagcacctacataggtggtggctaaagatgaatacaacaggctgggtgtggtggctcacgtctgtaatcccagcactttgggaggccaaggcgggtggatcacttgaggtcaggaattcaagacctgcctggccaacatgatgaaaccctgtctctactaaaaaatacaaaaaattagctgggcgtggtggagggtgcct

SEQ ID NO: 568875 - DNA, 602 bp, Homo sapiens
tgaaatccataacttaactctgaaattttctttatgctctgacatttaaaaagcaatatactatgctgtatttaccactctctagaaacctctctgagtttatgaattccctgcatttctttcttctcaacttgttccagagttaccttcagtcttctgtgctartaagcctatgcctagaaaatcccattttttttgtctttcttataagtttttctatccataatatttcttttttcattgatcagttcctcttcttgctggtttaatccttgaaaacaactttccccattacggaatttttattctcttcttacatatgcttaagacctggaggagaagtaactgacctcaactactctttatactgtgtctcttcttatagccatttgttcactgaatgagcacctacataggtggtggctaaagatgaatacaacaggctgggtgtggtggctcacgtctgtaatcccagcactttgggaggccaaggcgggtggatcacttgaggtcaggaattcaagacctgcctggccaacatgatgaaaccctgtctctactaaaaaatacaaaaaattagctgggcgtggtggagggtgcct

SEQ ID NO: 568876 - DNA, 574 bp, Homo sapiens
caggtcagtaaggaaacggaagatgtgaagaayactataaaccaactagccctgactgatatctgtggaattctccatttagcaacacaacatactcctaaataaccaatggattaaaggaatcaaaatggaaattagaaaatactttgagatgagtgaagattaccaaaacttatgctacaacagtgcttaaggaaaaatttacacctataaatgcctgtattaaaaaagaataggctgggcgcagtgtctcacacctgtaatacaagcaagcactttgggagacccaggtgggtggatcacttgagcccaggagtttgaaaccagcttggacaacatgacgaaaccccatctctacaaagaatacaaaaattagccaagtgtggtggtgtgtgcctgtggatccagctacttggaaggctgagacgggaaaatagcttgagcctttggggtcaagcctgtagcgagctgagatttcaccacgacactccagcctgggtgacagagtaagagcctgtcacaaaaaataaaaataaaaaatgaagatctcacatagttaactttaccttaagat

SEQ ID NO: 568877 - DNA, 513 bp, Homo sapiens
aaacttatgctacaacagtgcttaaggaaaaatttacacctataaatgcctgtattaaaaaagaataggctgggcgcagtgtctcacacctgtaatacaagcaagcactttgggagacccaggtgggtggatcacttgagcccaggagtttgaaaccagcttggacaacatgacgaaaccccatctctacaaagaatacaaaaattagccaagtgtggtggtgtgtgcctgtggatccagctacttggaaggctgagacgggaaaatagcttgagcctttggggtcaagcytgtagcgagctgagatttcaccacgacactccagcctgggtgacagagtaagagcctgtcacaaaaaataaaaataaaaaatgaagatctcacatagttaactttaccttaagatactaaggggaaaagagcaaactaaacctaaagcaagtagaagaaaggaaataataaaaactaaagtgaaaattagtagtgatgtcccagaatagtgttaagaagtgt

SEQ ID NO: 568878 - DNA, 513 bp, Homo sapiens
aaacttatgctacaacagtgcttaaggaaaaatttacacctataaatgcctgtattaaaaaagaataggctgggcgcagtgtctcacacctgtaatacaagcaagcactttgggagacccaggtgggtggatcacttgagcccaggagtttgaaaccagcttggacaacatgacgaaaccccatctctacaaagaatacaaaaattagccaagtgtggtggtgtgtgcctgtggatccagctacttggaaggctgagacgggaaaatagcttgagcctttggggtcaagcctgtagcgagctgagatttcaccacgacactccagcctgggtgacagagtaagagcctgtcacaaaaaataaaaataaaaaatgaagatctcacatagttaactttacyttaagatactaaggggaaaagagcaaactaaacctaaagcaagtagaagaaaggaaataataaaaactaaagtgaaaattagtagtgatgtcccagaatagtgttaagaagtgt

SEQ ID NO: 568879 - DNA, 513 bp, Homo sapiens
aaacttatgctacaacagtgcttaaggaaaaatttacacctataaatgcctgtattaaaaaagaataggctgggcgcagtgtctcacacctgtaatacaagcaagcactttgggagacccaggtgggtggatcacttgagcccaggagtttgaaaccagcttggacaacatgacgaaaccccatctctacaaagaatacaaaaattagccaagtgtggtggtgtgtgcctgtggatccagctacttggaaggctgagacgggaaaatagcttgagcctttggggtcaagcctgtagcgagctgagatttcaccacgacactccagcctgggtgacagagtaagagcctgtcacaaaaaataaaaataaaaaatgaagatctcacatagttaactttaccttaagatactaaggggaaaagagcaaactaaacytaaagcaagtagaagaaaggaaataataaaaactaaagtgaaaattagtagtgatgtcccagaatagtgttaagaagtgt

SEQ ID NO: 568880 - DNA, 552 bp, Homo sapiens
gaggcctcagaaaacttacaatcatggtggaaggggaagcaaacacatctaatacagtgacaggcaagagagcttgtgcagaggaactcccctttagaaaaccatcagatctcatgaggagacttattcactatcacaagaacagcctgagaaagacccacccccgtgattcaattacttcccaccaggtccctcccacaacacatgggaactacaggagccacaattcaagatgagatttgggtgcagacacagcsgaaccatatcggtcaccttcttgaatgaacacttcagcacactatcatacttgtattaatttaaaagcatatttttcaataaccttcatttctagaaatatcattatataaggcagaaattcatgagaatttaataaatgttattcatactagtaatagggagactattatatgtgatcataaatatgagtagatatggaaccataagaggttgtctggctgggtgcggtggctcacgcctgtaatcccagcactttgggaggccaaggtgggcagatcacgaggtcaggagatc

SEQ ID NO: 568881 - DNA, 431 bp, Homo sapiens
atcgccttctcattggcaagggagtcacctcccaatggtaggggaattacttaggtctctctctgtgctcgtgtgtgtgtgtgtgtgtgtgtattttatgcaggcaagttggatttttgacgtgtactttgagccaagccaagtacaaataattttaatttcctgaaacaagaatttgaattaarggtgccagaggctagatatcaccattaaacctcgtaattctagcttgaacatggcttgactacccaacaccctgggctcaaaccaactagattggtctctgtttatacacagtaactctccttaatactaaagggtgcatttatatttttcagttgtaagttaataaatttttataagggaataatgtgttatggtgatattaaaaatttggagattctcaacgatatgtcacttcatgaacacat

SEQ ID NO: 568882 - DNA, 564 bp, Homo sapiens
gtataactggggctgggtgcggtggctcaygcctgtaatcccagcactttgggagaatgaggcaagcagatcacttgaggtcaggagttagagcccaggctggcccacatggtgaaatcccatctctactaaaaatacaaaaattaactgggcatgatggcaagtgcctgtaatcccagctacttggcagggtgaggcacaggaatcacttgaacccgggaagcagaggttgcagtgagccaaggtcatgctactgcactccagcctgtgcaacagagcgagactccatctcaaaaaaaacaagaaaaaacaaaaacaaaggtataattgaagtaccacattggagaaaacacttgaaagggtagggcaccatctttcaggatgggtatatttattaaatcaaacacctctacatggcctgtgtccacaagagaaaagacacctggatccaggaatcaagagatggaagcaaaagtggcctctataaccatcgctctcaatgacacagttggaaacactgtatttctggttcccacagactctgggccctgcagttttaaaagc

SEQ ID NO: 568883 - DNA, 564 bp, Homo sapiens
gtataactggggctgggtgcggtggctcacgcctgtaatcccagcactttgggagaatgaggcaagcagatcacttgaggtcaggagttmgagcccaggctggcccacatggtgaaatcccatctctactaaaaatacaaaaattaactgggcatgatggcaagtgcctgtaatcccagctacttggcagggtgaggcacaggaatcacttgaacccgggaagcagaggttgcagtgagccaaggtcatgctactgcactccagcctgtgcaacagagcgagactccatctcaaaaaaaacaagaaaaaacaaaaacaaaggtataattgaagtaccacattggagaaaacacttgaaagggtagggcaccatctttcaggatgggtatatttattaaatcaaacacctctacatggcctgtgtccacaagagaaaagacacctggatccaggaatcaagagatggaagcaaaagtggcctctataaccatcgctctcaatgacacagttggaaacactgtatttctggttcccacagactctgggccctgcagttttaaaagc

SEQ ID NO: 568884 - DNA, 564 bp, Homo sapiens
gtataactggggctgggtgcggtggctcacgcctgtaatcccagcactttgggagaatgaggcaagcagatcacttgaggtcaggagttagagmccaggctggcccacatggtgaaatcccatctctactaaaaatacaaaaattaactgggcatgatggcaagtgcctgtaatcccagctacttggcagggtgaggcacaggaatcacttgaacccgggaagcagaggttgcagtgagccaaggtcatgctactgcactccagcctgtgcaacagagcgagactccatctcaaaaaaaacaagaaaaaacaaaaacaaaggtataattgaagtaccacattggagaaaacacttgaaagggtagggcaccatctttcaggatgggtatatttattaaatcaaacacctctacatggcctgtgtccacaagagaaaagacacctggatccaggaatcaagagatggaagcaaaagtggcctctataaccatcgctctcaatgacacagttggaaacactgtatttctggttcccacagactctgggccctgcagttttaaaagc

SEQ ID NO: 568885 - DNA, 353 bp, Homo sapiens
tttgggaggctgagacaggaggattgctggagcctakgagtttgataccagcctgggcaacacagtgagactccatctctacagaaaagtttaaaacttagcagggcgtggttttgcatatctgtagtcccagctatttgggaagatgaggtgaaaagatcacttgagcccacgaagctgaggctgataagagccatggtagtaacactgcactccaggctgggtgatagagaaagacctttactcaactcccaccccacctaccccaccccctaaaaagagaaaataactgaaagtataatggaaaagagaaagattgaggaaaaataatttagtagtaggtgtgcaaaagc

SEQ ID NO: 568886 - DNA, 573 bp, Homo sapiens
taaggcaaggtctatgaagggtcttggataacttgaaggctctggacacatggacctctgggcctcagtttccccatctgtaaaatgggggtgatgataatagtccacactttctatggttgtgatttttmactaagatggttgtgtaaatgctagcatatgaaaatggataaatgctagctatgaccctttattattttcagcatcgctgttaaacaaagagtaactgtgaatgaatgattcaggcattaccaaacataaatacaaattttacgcttccttttattattttcctgtgagaaggaagtgatccttttaaacacataaataatttacattgagggttagagaaagtgcctgtggcacataatgaaaaccaaaccaccgtgagcaggtatgtttgaagtccccagtgatgatcgcgttcacgctcctaataagtgcctacagaggatggcagcccggagtggaaggagccgttgaaggctgagtttttgccttcccaggctctgtcagagcagcacagatttcagagtcatttcttttggtgagaaaaacagtgtagtaaggaat

SEQ ID NO: 568887 - DNA, 573 bp, Homo sapiens
taaggcaaggtctatgaagggtcttggataacttgaaggctctggacacatggacctctgggcctcagtttccccatctgtaaaatgggggtgatgataatagtccacactttctatggttgtgatttttcactaagatggttgtgtaaatgctagcatatgaaaatggataaatgctagctatgaccctttattattttcagcatcgctgttaaacaaagagtaactgtgaatgartgattcaggcattaccaaacataaatacaaattttacgcttccttttattattttcctgtgagaaggaagtgatccttttaaacacataaataatttacattgagggttagagaaagtgcctgtggcacataatgaaaaccaaaccaccgtgagcaggtatgtttgaagtccccagtgatgatcgcgttcacgctcctaataagtgcctacagaggatggcagcccggagtggaaggagccgttgaaggctgagtttttgccttcccaggctctgtcagagcagcacagatttcagagtcatttcttttggtgagaaaaacagtgtagtaaggaat

SEQ ID NO: 568888 - DNA, 573 bp, Homo sapiens
taaggcaaggtctatgaagggtcttggataacttgaaggctctggacacatggacctctgggcctcagtttccccatctgtaaaatgggggtgatgataatagtccacactttctatggttgtgatttttcactaagatggttgtgtaaatgctagcatatgaaaatggataaatgctagctatgaccctttattattttcagcatcgctgttaaacaaagagtaactgtgaatgaatgattcaggcattaccaaacataaayacaaattttacgcttccttttattattttcctgtgagaaggaagtgatccttttaaacacataaataatttacattgagggttagagaaagtgcctgtggcacataatgaaaaccaaaccaccgtgagcaggtatgtttgaagtccccagtgatgatcgcgttcacgctcctaataagtgcctacagaggatggcagcccggagtggaaggagccgttgaaggctgagtttttgccttcccaggctctgtcagagcagcacagatttcagagtcatttcttttggtgagaaaaacagtgtagtaaggaat

SEQ ID NO: 568889 - DNA, 651 bp, Homo sapiens
aatagaaggcatttaaactcagagagattaaatggcgagcataacttacagtgaatgacagatacaggtcagatgttgccgtccttcatagaaaagactcatggccattgaatgcaacatcagcagcataggaaggccttcgtggaggacccttagtttgcatgtagtcagcctcggaacagaccctgcaatagtaactttaattttattcattgtaactttcaattctatttctaactaggtaagtcttattatgaaagagatggttcaggcaacccaggaactacctgrccaagataacttaatatcacttcaaatccaggaacagggagaaaataagacattcataatctaaaactaagttacaacttagccaaatatgcaaatatgtttcttggccatattgttctgctatgcatacttaaggaatcttttgaattcccattattatatgttgaaatgataacacttgaaactgttaaaaataacaccttgaatagatttatgaatagtctatttagaaaattaatttattcttgttatattcattaagtaattggaaacaacttgggttcttactacatatcaggtattgcttatgcagtgatgtccaggacaaatagagccccttattccctcaagctcacaaca

SEQ ID NO: 568890 - DNA, 651 bp, Homo sapiens
aatagaaggcatttaaactcagagagattaaatggcgagcataacttacagtgaatgacagatacaggtcagatgttgccgtccttcatagaaaagactcatggccattgaatgcaacatcagcagcataggaaggccttcgtggaggacccttagtttgcatgtagtcagcctcggaacagaccctgcaatagtaactttaattttattcattgtaactttcaattctatttctaactaggtaagtcttattatgaaagagatggttcaggcaacccaggaactacctggccaagataacttaatatcacttcaaatccaggaacagggagaaaataagacattcataatctaaaactaagttacaacttagccaaatatgcaaatatgtttcttggccatattgttctgctatgcatacttaaggaatcttttgaattcccattattatatgttgaaatgataacacttgaaactgttaaaaataacaccttgaatagatttatgaatagtctatttagaaaattaatttattcttgttatattmattaagtaattggaaacaacttgggttcttactacatatcaggtattgcttatgcagtgatgtccaggacaaatagagccccttattccctcaagctcacaaca

SEQ ID NO: 568891 - DNA, 491 bp, Homo sapiens
ccaattcatctcaaatgatattcatgtaacaaataaaacactatattctaaacttagtaggtagtatatctttttcctttccatagataaagtaaaagtaacacatcaacagtcttttaacaaattatgcctgcatacaatgacwcctgttcctctttttctcacttctgaagatgaaatcatcacaaataaaattttaaaataaatcatatgctttggtgaatatgaattggtatatataaaatgtaaaagccattactaatgaaagtaaatatcgataaattttattatacaaaaataaaggtaatgtaaatttaccatacacaaattaaataattatatgtaacccccataccaaaaatatttcaaactggaaaaagtttcaacatatcataggcaaatagcaaatattctttataaagaacaaagccagaggcatcacattacccaacttcaaattatattataaggccatagtaatcaaaacagca

SEQ ID NO: 568892 - DNA, 553 bp, Homo sapiens
gttaagaggaataaaaatctttgaccaattgttcttttgtattataaaaatgttcatagtgttattcttattcagcttttgaaagttaatgacaattggattctcttatctctactagccctttcatttacctgtcttcatgacagttgttttcttttccagtaacatccataatttattaggatgttttgctaggggtggcaaatatctgagtctcatgccaccaaatatgttactggtggaaggtatctgagctatcagcagtgagtccatatgggtctgcagcaacctcagttcttgccgcctcagaagaaagaatttgactgaggggcataagacagaaaaagagactgaggcaagtttcagagcagaagttgaagtttattttaaaagggtttacaacaggaaagaaaggaaagtatgcttggaagagacccaagggggcaacctgaagaacaagtgcagtgttgaactttgatcctaggactttagaggcttgtgyctttcctaggattctttccttagggtgagctgcgtgcatgagtgccttcct

SEQ ID NO: 568893 - DNA, 183 bp, Homo sapiens
gactcttaaaaaacttactatattttaattttagattatatgtttttrttgatatataataattgtatatatttttgaggtatatgtgatttttgatacatgaatacaatgtgtaatgatcaaatcagcttaattgagacaacccttacctcaaacatttgtcttttctttgtgttaggaaca

SEQ ID NO: 568894 - DNA, 557 bp, Homo sapiens
gtaacttctgggtgttgccatagcaatgataaactgatgtggcactggtgggcatgtcttatggagaggtgcttttgcttcctccatttcagctagtcctcaatctggtctgcagtctgagcctcacctctagagtcgagtcccaccttttacctcacatccagacaatggaatattattcggtgcaaaaaaaaaaaacaaaaaacagctatcaagccatggaaataaatkgtggaaacttaaatgcatattactaagtgaaacaagtcagtctgggccaggcgcagtggctcatgcctgtaatcccagcactttgggaggccgaagcaggtggatcacctgaggtcaggagttcaagaccagcctggccaacatggcaaaatcccatctctactaaaaaaaaaatacaaaaattagccaagtgtggtggcaggcacctgtaatcccagctacttgggaggctgaggcagggagaattgcttgaacccaggagacagaggttgcagtgagccgagatcccatcattgcactccagtctgggtgacagagcgagactc

SEQ ID NO: 568895 - DNA, 492 bp, Homo sapiens
gggtggggcagaaaatgcttttctcttacacccagggacacagacaaaagtgggagtgaagatatctgatgttcaagatgggagtaaagaagcaggggcgaaacctaaaagcaggaatccttgctggtcctttgcagtgcctagactgggctgtcgcccgcatttacttggaactgtgtgttggtctcctggcagctctctccatctgtccttgctccctccctctcactacccccagagggatcattcttatgtgtgagacagatcacattacaraacccctccacccatcctcggtccctttgggcagcggctcctctgtcattcatgggtgctgaaccagtttctatgctccattcctcaggtggcaggtttttatactttttattttctgcacagtttctgtaaatttggaccctgaatctataataacaagttgaacagggctttcaacttcttataagagctgtttttttgttgtttttttttttt

SEQ ID NO: 568896 - DNA, 596 bp, Homo sapiens
atgcctgtaatcccagctactagggaggctgaggcaggaggattgcttgaaccgaggaggtggaggttgtagtgagccaagatcgagccagtacgctccagcctgggcaacagagtgagactctgtcacacatacataaaaaagctaagacctgcagaacttgatggattcgaaatgggatatgaaagccaggcattagagaagtgtgtgctagtggatggagggtggaaatattccttaacattgaattgctgaggaaccccaggtcacacagctaataagagaaagaggaggaatccacctaggtattcgagctcaagggtccctactccctaaccagtacattatatcacatattttaaaaaatcactcctgggaagacggaggagacatagcatagctcccaacaaacagcataattaaagtcctcattagacaattttctttcttttcttcagttcatattggaccaccagctgccagtcttctggccctggacccttgccctccacagccttcctgctactcragggctgccgtccaccatcctggctcaggatgcctcctcatctctctcccttttttttttttttttg

SEQ ID NO: 568897 - DNA, 622 bp, Homo sapiens
attcagtataatgttaactgtgtgtttgtcatatatggcttttattattttgagatatgttcctcctatggttaatttgttgagggtttttatcataaggtgatgatggattttatcaaattcttttcctgtatctgttgagatgatcataatgttttcgggtttttttctgtttatgtagtraatcacatttattgacttgtgaatgctgaaccattcttgcatccctgggatgaaaaccactttatcatggtgaattttctttttgatgtgctcttggactcagtttgctagtattttattgaagatttttgtttctgtgttcatcaaggatgttggtctgtagttttctttctttttttgttgttgttatatccttttctggctttggtatcagggtgatactggcttcatagaatgagttagggaggattccctccttcttgatcttttgaaatagtttcagtaggattggtgccaattcttctttgaatgtctggtagaattcatctgtgctactattgctagtatccccgtgaagacttttaaattaattctacaaagagaaacgttttaaatacaaaacaatttactattgatgaaagtcaaattccactggcaa

SEQ ID NO: 568898 - DNA, 397 bp, Homo sapiens
ataaaacagaactctaatacatctggcagccaatatttagtggaaaacttgcagatttttttacaggagagggtggcatgacatacttaaagtgctgaaggaaaaaacaaaaacaaaaacaactttacactagattagtttatccagcaaaaatatacttcaagcatgaaggagaaataaaggatttaccaaacaaacaaaagctgagggattacatcaatagcagatctatcctaccaraaatgctctagtgatttcttcaatatgaaagaaaaggacattaattagcaataaggaattatctggaagttcgatgggaaaaagaggatattaatgagcaaatgagcaatacctaattacctgaatgtgaaaaacttggtaataataagcacacaga

SEQ ID NO: 568899 - DNA, 550 bp, Homo sapiens
tgggaagctaatgtgagttacatatagcaaggatatccccacatggaaatacaatatgcttaaaatatgatgaaacagcacactatattaatatttactccataaaaacaaatacatctcaaattctcaaagtatctctgttctggcaagcagaacaattattttggtagagtgtattttttaaaaaagaaattgaaggaattttgcaaaggtaagttaaaataggtgacaacccaaagatatcaacatactgtcagaatttgatccaaattcagtgtgtttttattgagatcagtagtgactrataatcatgtgaaaattaaaagttgagaccacttgtgattaagatcatttcccaaatgcttcacctcattaaacttagaaggcaatgacattcatggcaggatggggtggggcatttttactagatgtttactacacaacagcacaatatgctaattgaagaaaaaatctaaatctttccatggtaatcattttatttctttattagtgttctactgctgttataaacacttttcagaaacttact

SEQ ID NO: 568900 - DNA, 550 bp, Homo sapiens
tgggaagctaatgtgagttacatatagcaaggatatccccacatggaaatacaatatgcttaaaatatgatgaaacagcacactatattaatatttactccataaaaacaaatacatctcaaattctcaaagtatctctgttctggcaagcagaacaattattttggtagagtgtattttttaaaaaagaaattgaaggaattttgcaaaggtaagttaaaataggtgacaacccaaagatatcaacatactgtcagaatttgatccaaattcagtgtgtttttattgagatcagtagtgactgataatcatgtgaaaattaaaagttgagaccacttgtgattaagatcatttcccaaatgcttcacctcattaaacttagaaggcaatgacattcatggcaggatggggtggggcatttttactagatgtttactacacaacagcacaatatgctaattgaagaaaaaatctaaatctttccatggtaatyattttatttctttattagtgttctactgctgttataaacacttttcagaaacttact

SEQ ID NO: 568901 - DNA, 579 bp, Homo sapiens
atagaactaccatttcatccagcaaccccactcctgggtatctacccacgagaaatgtagtcattatatgaaagacactcacttgcacacacatatttatagcaacccaattcacaattgcaaaaacatggaaccagcytaaatgcccatcaatgaatgagtggatacaaaaaaatgtggtatgcacatatatatacacaccacggaataccactcagctataaaaaggaataaaacaatggcattcacagcaacctggatgcagtcagagaccattactctaagtgaagtaactcaggaatggaaaagcaaactttgtaggttctcatttataaatgggagctcagctatgaggatgcaaatgcataaaaatgatatgatggattttgtatattggggggaacattgggagggagtgaaggatataagattacaaactgggtacagtgtatactgctcgggtgatcagtgcacccaaatctcagaaatcaccactaaagaacttatccatgtaaccaaaaaccacttgttttccccaaactattgaaataataaatatataaataaataataagtaag

SEQ ID NO: 568902 - DNA, 579 bp, Homo sapiens
atagaactaccatttcatccagcaaccccactcctgggtatctacccacgagaaatgtagtcattatatgaaagacactcacttgcacacacatatttatagcaacccaattcacaattgcaaaaacatggaaccagcctaaatgcccatcaatgaatgagtggatacaaaaaaatgtggtatgcacatatatatacayaccacggaataccactcagctataaaaaggaataaaacaatggcattcacagcaacctggatgcagtcagagaccattactctaagtgaagtaactcaggaatggaaaagcaaactttgtaggttctcatttataaatgggagctcagctatgaggatgcaaatgcataaaaatgatatgatggattttgtatattggggggaacattgggagggagtgaaggatataagattacaaactgggtacagtgtatactgctcgggtgatcagtgcacccaaatctcagaaatcaccactaaagaacttatccatgtaaccaaaaaccacttgttttccccaaactattgaaataataaatatataaataaataataagtaag

SEQ ID NO: 568903 - DNA, 579 bp, Homo sapiens
atagaactaccatttcatccagcaaccccactcctgggtatctacccacgagaaatgtagtcattatatgaaagacactcacttgcacacacatatttatagcaacccaattcacaattgcaaaaacatggaaccagcctaaatgcccatcaatgaatgagtggatacaaaaaaatgtggtatgcacatatatatacacaccacggaataccactcagctataaaaaggaataaaacaatggcattcacagcaacctggatgcagtcagagaccattactctaagtgaagtaactcaggaatggaaaagcaaactttgtaggttctcatttataaatgggagctcagctatgaggatgcaaatgcataaaaatgatatgatggattttgtatattggggggaacattgggaggkagtgaaggatataagattacaaactgggtacagtgtatactgctcgggtgatcagtgcacccaaatctcagaaatcaccactaaagaacttatccatgtaaccaaaaaccacttgttttccccaaactattgaaataataaatatataaataaataataagtaag

SEQ ID NO: 568904 - DNA, 334 bp, Homo sapiens
cccagctaatttttgtattttagtaaagayggggtttcaccatgttggccaggctggtctcgaacacctgacctcaggtgatctgcccacctcggcctcccaaagtgctgggattacaggcctgagccactgcacccggcctatccttcctttttcaggggtggaaactcaggctcacaggggataattctctgaagtcacatgtttgttaagtagctgttacggcatgtgtgagtgaatgaaaatttattgaacaattgtgtgcttaaatgtgacctaatctttttcactgatgtctcttattttatcttcataaccaccaatacaccaggca

SEQ ID NO: 568905 - DNA, 431 bp, Homo sapiens
tcacttacatgtagaatcttttaaaagtgaatttacagaaatagagaggagaatgacagttacaggggtgggcagggaggacagggagtgaagttgctggtcaaagggtacaaagtttcagctagacaagaggagtaagttttaacaattattgcacagcagcatgactatagtccacaataatgtgttatacatttcaaaataactgagagtaaatttgaaacatatcaccataaaaatgttaagtgagtgaggtgagggttatgttaattagcttgatttaatcattccacattttatacatatatcacattttatacatacatcacattgtactccatagactatattagtcaattaaaatattaatttttaawttaaaatttttctaaaaaaatatgcataacaatttatagtcaaaaatatatgca

SEQ ID NO: 568906 - DNA, 431 bp, Homo sapiens
tcacttacatgtagaatcttttaaaagtgaatttacagaaatagagaggagaatgacagttacaggggtgggcagggaggacagggagtgaagttgctggtcaaagggtacaaagtttcagctagacaagaggagtaagttttaacaattattgcacagcagcatgactatagtccacaataatgtgttatacatttcaaaataactgagagtaaatttgaaacatatcaccataaaaatgttaagtgagtgaggtgagggttatgttaattagcttgatttaatcattccacattttatacatatatcacattttatacatacatcacattgtactccatagactatattagtcaattaaaatattaatttttaaattaaaatttttctwaaaaaatatgcataacaatttatagtcaaaaatatatgca

SEQ ID NO: 568907 - DNA, 543 bp, Homo sapiens
ggcacagaaagacaaataccacatgatctcacttacatgtagaatcttttaaaagtgaatttacagaaatagagaggagaatgacagttacaggggtgggcagggaggacagggagtgaagttgctggtcaaagggtacaaagtttcagctagacaagaggagtaagttttaacaattattgcacagcagcatgactatagtccacaataatgtgttatacatttcaaaataactgagagtaaatttgaaacatatcaccataaaaatgttaagtgagtgaggtgagggttatgttaattagcttgatttaatcattccacattttatacatatatcacattttatacatacatcacattgtactccatagactatattagtcaattaaaatattaatttttaaattaaaatttttctaaaaaaatatgcataacaatttatagtcaaaaatatatgcataacttcatataattatttttgtgttgagaacacaaaagatgaggagaytgatttgagtaataataaaactccagtttcccaca

SEQ ID NO: 568908 - DNA, 636 bp, Homo sapiens
gtctctcattatgtagttttgatttacatttatctgatcaatgatgttgaatatcttttcatataccttttgccatttgtctgtcttcttttgagaaatatctattcagatctttcacgcatcttctaaattagactattccctatagagttttattgggattattatgtattcttgtcattaaatcatttttctgatggatagtttgcaaatattttcttccatggtgtgggtggtcytctcactttcttgaatgccttctttgctgtgcagaagctttttaatttgatgtgataccatttgtccatttttacttgggtacctgtgcttgtgagatattgcttaataaatctttgcccagaccaatgtcttgtagatttttcccaatattttcttttagagtttcatagattgaggttttagatttaagttttttaatctatttagatttgattttggtacatggtgagatatggggtctagtttcattcttctgcacatggatatccagttttcccagtgccatttaatgaagtgatcgtccttccccttgcatatgttcttggcacctttgttgaaaatgagttgagtgtgaatgtatggatttatttttagtttttctattctgttccattg

SEQ ID NO: 568909 - DNA, 636 bp, Homo sapiens
gtctctcattatgtagttttgatttacatttatctgatcaatgatgttgaatatcttttcatataccttttgccatttgtctgtcttcttttgagaaatatctattcagatctttcacgcatcttctaaattagactattccctatagagttttattgggattattatgtattcttgtcattaaatcatttttctgatggatagtttgcaaatattttcttccatggtgtgggtggtcctctcactttcttgaatgccttctttgctgtgcagaagctttttaatttgatgtgataccatttgtccatttttacttgggtacctgtgcttgtgagatattgcttaataaatctttgcccagaccaatgtcttgtagatttttcccaatattttcttttagagtttcatagattgaggttttagatttaagttttttaatctatttagatttgattttggtacatrgtgagatatggggtctagtttcattcttctgcacatggatatccagttttcccagtgccatttaatgaagtgatcgtccttccccttgcatatgttcttggcacctttgttgaaaatgagttgagtgtgaatgtatggatttatttttagtttttctattctgttccattg

SEQ ID NO: 568910 - DNA, 416 bp, Homo sapiens
agttgaaaccaggaatatagagagtagaaggatggttaccagaggctggaaatggtgctgggtgttggagggggaggtgagaataattaatggttacaaaaaagtagaaataatcaataagacctactgtttgatagcaaaatagggtgattagattgaataataacttaattgtatattttcaaataacttaaagaatgtaattggattatttgtaactcaaagtrtaaatacttgaagggatacataccccattctccatgatgtgcttatttcaaattgcatgcctgtatcaaaacatctcatgtatcccataaatacatacacccactatgtacccacacattatttttaaagtaaataaataaaaacaggaaaatgtaagaaaatagactggccacattatatcaaaaagt

SEQ ID NO: 568911 - DNA, 416 bp, Homo sapiens
agttgaaaccaggaatatagagagtagaaggatggttaccagaggctggaaatggtgctgggtgttggagggggaggtgagaataattaatggttacaaaaaagtagaaataatcaataagacctactgtttgatagcaaaatagggtgattagattgaataataacttaattgtatattttcaaataacttaaagaatgtaattggattatttgtaactcaaagtataaatacttgaagggatacatrccccattctccatgatgtgcttatttcaaattgcatgcctgtatcaaaacatctcatgtatcccataaatacatacacccactatgtacccacacattatttttaaagtaaataaataaaaacaggaaaatgtaagaaaatagactggccacattatatcaaaaagt

SEQ ID NO: 568912 - DNA, 617 bp, Homo sapiens
gaagtaatgctggaatgagttaagactttggaggattattgggaaggcataactggttttgaaaatgtgaagagaatgagatttgggagtgaccagggacagaataatatggtttggctctgtgtccccaccctgatctcatctcaagttgtaatccccatgtgtcaaggtagggactgagtgggaggtgattgaatcatgggggcagttttccccatgctcttctcattatagtgatagaggtctcagaaaagctgatgactttaaaagtgtttggcagttcttacttcattcactcttctcttctctcctcctggcatgtaagatgtggcttgcttgccattctatcatgaytgtaagttttctgaggcctctccagccatgcagaactgtgcatcagttaaaccacttttctttatgaattacttaatctcaggcatttctttatagccatgtgaaaacagcctaatacatccattcatttgttgatggacatttaggttgctttcaaatcttggctattgtgaatagtgcagcaacaaacataacagtgcggatatctcttcaatatactggttttctttcttttgtgtctgtacctagcagtagcattgctt

SEQ ID NO: 568913 - DNA, 520 bp, Homo sapiens
gggagggaccctgagaaaggtaattgaatcatgagagcaggtctttcccttgctgttctcatgacagtgaataagcctcatgagacctgatggttttataagggggaatttccctgcacaagctctctctttgcctgycaccatctacagctgtgacttgctcctccttgttttctgccatgattatgagccctccccagccatgtggaatagtaagtccattaaacctctttcttttgtaaattgcccattctcaggtatgcgtttattaggagcatgaaaatgaactaatatatgcttcaatttgaatttttaatagcatattttatagatcactaattctctttttggtttgtcaattttgctgctaattatcagttattgaattgtacatttaatttttttaattcttgaatatatattttatgcctcccatttgttttttttttctggcactttattctggcaaaaatatttctacttttttataatttattgatattttatttatagttgcctt

SEQ ID NO: 568914 - DNA, 589 bp, Homo sapiens
tttaaaaccacataagataaaattctcacccacttctccatcctcagtcattgcgtacctaattcgtattcgttcatttataagaattttgaatatacaccttcttcatatgcacaaagcatgcccattggatgcaggcctacgtgaagttttataattttaaaacctggcctatttctttctcttgttagtcaggttaggttgttggtgtgccagaaatgtctattttagactcattttccatgagcattttgcttgaggagtgcaggggctgctgctcctatttgcctgttgatgcagaagccatattccaatarcttctgagctctatgctattcactctgcaaatttacttatgactctacctgaccatggcatcagcagaatgaccttcagaactgcaaaggagtcaaaaaacatcctggcattttaagttaagtggaaaactttatatttaacttacagaataccaaagcttctgagtacttagattttttaatgctaggactcattttctcagtggagaatgaggcatgaaacaacatgacgaagattatatttgataattttaacatcacggtttacattt

SEQ ID NO: 568915 - DNA, 597 bp, Homo sapiens
catttcattttagattgtaacttttttgatgataggatatgatacctaagcaaggctgagtttataataggtactaggtttgataatacctagctatataaacatattatgaaataaatgttattttctttggaatgagaatttctaacaaggagagagttatatttgctgaaagaattgttcaaatcctccagataggttgcagaatctcatggggctatagacttttattttcctcatcatactcaggcttgataaagtccaggggaactgctatgcatgagacctagggactaatggtaggaagaaaatttcctaacagaactccagggccctggatgacagaaagtagacacttgagtcaagccttgacaaataaatgaaattgtttaaaaaataagttaaaagaaaaattaagaaattctaagtgaagtcagagtgtttatggtatttgttaggaatagtaaagtgatgaattgtcctagagtakatagcgtacatagggaggagaagaaactgtgcttgggaggagccagttagcaaagatgttaaaatccaggcacagaagtttccatatttcctgaaatatgatgggta

SEQ ID NO: 568916 - DNA, 460 bp, Homo sapiens
tatatatataatagtatagtgtttaccgtccagaattaggctttttttcatgatgttttcatgaatctgtagagcatggacatgactgtgtccatcaatatttgctatgaattccttttgtgaaaatgcaactttatctgtatacctaggttagaatgacctacacaaaaaagaagtaagtcyacagaagggcagtgaggggacagaaatgagaagtggtgtctttttgtttaagcctagactgaaattttgtatcagggcactgattggttggcttatatcttaaccacgctactccacgacaaaaattccagttcctttaacttatacttaaatgtttcattcatttctgattttctttacatttgaagatctttaaaatctaaaatgaatattctttattactttaaacataccttctgtattctgttatgaaagagaataataaaaattatgtcag

SEQ ID NO: 568917 - DNA, 623 bp, Homo sapiens
gccaaatcttgggtttatgtggacataaagatgtgaataatagacagtggagactccaaaaggaggaagagagggagggaggaaagggatgaaaaacttcctattgggtactatgttcactatcttggtgatgggatagatagaagcccaaacttcagcaccacacattatacccccgtaacaaacctgcacatgtaccccaagaatctaaaatgaaaayggagatgaaaggaataacagtaatagcagagaggccagttagtatattgtaataatctgaataaaattgacaagggcttaaattaggtcccactgatgtcaaaatggaagcagaggcagaaatgggaaattatttagtaggtacattttactggatgtggaaattagttggatgagagaataaagacagggcatggggagacatcaatgatcactctaccagaaagctgcaatcagaattgcagtgcttttgctcatgaaactgagtaagcagggccctttttaaaaaatcttatattacactttggctttatgtgaacatttacaatttactatgacatcacaaaacctggaagagagagaaacaaaataaaaataaaaaaaacaaaagaataagtatctgt

SEQ ID NO: 568918 - DNA, 623 bp, Homo sapiens
gccaaatcttgggtttatgtggacataaagatgtgaataatagacagtggagactccaaaaggaggaagagagggagggaggaaagggatgaaaaacttcctattgggtactatgttcactatcttggtgatgggatagatagaagcccaaacttcagcaccacacattatacccccgtaacaaacctgcacatgtaccccaagaatctaaaatgaaaatggagatgaaaggaataacagtaatagcagagaggccagttagtatattgtaataatctgaataaaattgacaagggcttaaattaggtcccactgatgtcaaaatggaagcagaggcagaaatgggaaattatttagtaggtacattttactggatgtggaaattagttggatgagagaawaaagacagggcatggggagacatcaatgatcactctaccagaaagctgcaatcagaattgcagtgcttttgctcatgaaactgagtaagcagggccctttttaaaaaatcttatattacactttggctttatgtgaacatttacaatttactatgacatcacaaaacctggaagagagagaaacaaaataaaaataaaaaaaacaaaagaataagtatctgt

SEQ ID NO: 568919 - DNA, 623 bp, Homo sapiens
gccaaatcttgggtttatgtggacataaagatgtgaataatagacagtggagactccaaaaggaggaagagagggagggaggaaagggatgaaaaacttcctattgggtactatgttcactatcttggtgatgggatagatagaagcccaaacttcagcaccacacattatacccccgtaacaaacctgcacatgtaccccaagaatctaaaatgaaaatggagatgaaaggaataacagtaatagcagagaggccagttagtatattgtaataatctgaataaaattgacaagggcttaaattaggtcccactgatgtcaaaatggaagcagaggcagaaatgggaaattatttagtaggtacattttactggatgtggaaattagttggatgagagaataaagacagggcatggggagacakcaatgatcactctaccagaaagctgcaatcagaattgcagtgcttttgctcatgaaactgagtaagcagggccctttttaaaaaatcttatattacactttggctttatgtgaacatttacaatttactatgacatcacaaaacctggaagagagagaaacaaaataaaaataaaaaaaacaaaagaataagtatctgt

SEQ ID NO: 568920 - DNA, 613 bp, Homo sapiens
atttatataatatatgaaagaaccaggcaaataatcacgctcgttcaaaagcaaatactccgatcttttccttaggccacatcatttcactacttaaattaagaaaaccagcttcaaagatattcatgtttgcagcagttcctccttatctgtggtttcactttccacagtttcagctacctgcaaccaaccacagtctgaatataggtaaatacaatataataagactcttttgagagagaaagagaccacattcatataacttttattacagtatattgttataattgttctattttattaytagttattgcttttaatctcttaccatgcctaatttataagttaaactttatcataggtatgtatgtataggaaaaaaatatagtatatatagtgtttagtgctaattgatgtttcaggtatccaaggttggtcttggaacatatcccccgaggataaggtggggttactatatccttttttatcatatgaaaaaagcaatacagaaatgtatatataatttttacctttcaattaaaaagaaaaaagaacaaaaaacagttgtagacgtttccacattttcagtaagaaaacattgtgggatgagaac

SEQ ID NO: 568921 - DNA, 593 bp, Homo sapiens
ccaccacgcctgactaatttttgtatttttagtagagatggggtttcaccatgttggtcaggcttgtctcgaacttctgacctsgtgatctgcccacctcagcctcccaaagtgttgggattacatgcataagccactgcacccagcctatgtagccttttaagtaagctagttcccaatgggaccagtgattttagtacataaatagcaaagaaaatcagttgcccctttcctggctgtgagtttaccatttgccagcacaattgtagtatctgtttgcttctgcatcagagttagtgggtttttttgtttgtttgttttttcttttcatatgtcttgtgcttcacggagagaaagatatgtggttcactttcttagcagatccaacacccacctctattgtttctcatctgcacagttgttatttcttacagtctatgtcccaagttgctaaactgaactggttttggtgtcaacaggctgtgccttcaagttgttgtaacaagagactaagaagtgaaaaaaatatgtccatcaaggtgctttttaatttacatgtcacaaaaggtttgtctgtttactcattttccccc

SEQ ID NO: 568922 - DNA, 593 bp, Homo sapiens
ccaccacgcctgactaatttttgtatttttagtagagatggggtttcaccatgttggtcaggcttgtctcgaacttctgacctcgtgatctgcccacctyagcctcccaaagtgttgggattacatgcataagccactgcacccagcctatgtagccttttaagtaagctagttcccaatgggaccagtgattttagtacataaatagcaaagaaaatcagttgcccctttcctggctgtgagtttaccatttgccagcacaattgtagtatctgtttgcttctgcatcagagttagtgggtttttttgtttgtttgttttttcttttcatatgtcttgtgcttcacggagagaaagatatgtggttcactttcttagcagatccaacacccacctctattgtttctcatctgcacagttgttatttcttacagtctatgtcccaagttgctaaactgaactggttttggtgtcaacaggctgtgccttcaagttgttgtaacaagagactaagaagtgaaaaaaatatgtccatcaaggtgctttttaatttacatgtcacaaaaggtttgtctgtttactcattttccccc

SEQ ID NO: 568923 - DNA, 593 bp, Homo sapiens
ccaccacgcctgactaatttttgtatttttagtagagatggggtttcaccatgttggtcaggcttgtctcgaacttctgacctcgtgatctgcccacctcagcctcccaaagtgttgggattacatgcataagccacygcacccagcctatgtagccttttaagtaagctagttcccaatgggaccagtgattttagtacataaatagcaaagaaaatcagttgcccctttcctggctgtgagtttaccatttgccagcacaattgtagtatctgtttgcttctgcatcagagttagtgggtttttttgtttgtttgttttttcttttcatatgtcttgtgcttcacggagagaaagatatgtggttcactttcttagcagatccaacacccacctctattgtttctcatctgcacagttgttatttcttacagtctatgtcccaagttgctaaactgaactggttttggtgtcaacaggctgtgccttcaagttgttgtaacaagagactaagaagtgaaaaaaatatgtccatcaaggtgctttttaatttacatgtcacaaaaggtttgtctgtttactcattttccccc

SEQ ID NO: 568924 - DNA, 593 bp, Homo sapiens
ccaccacgcctgactaatttttgtatttttagtagagatggggtttcaccatgttggtcaggcttgtctcgaacttctgacctcgtgatctgcccacctcagcctcccaaagtgttgggattacatgcataagccactgcacccagcctatgtagccttttaagtaagctagttcccaatgggaccagtgattttagtacataaatagcaaagaaaatcagttgcccctttcctggctgtgagtttaccatttgccagcacaattgtagtatctgtttgcttctgcatcagagttagtgggtttttttgtttgtttgttttttcttttcatatgtcttgtgcttcacggagagaaagatatgtggttcactttcttagcagatccaacacccacctctattgtttctcatctgcacagttgttatttcttacagtctatgtcccaagttgctaaactgaactggttttsgtgtcaacaggctgtgccttcaagttgttgtaacaagagactaagaagtgaaaaaaatatgtccatcaaggtgctttttaatttacatgtcacaaaaggtttgtctgtttactcattttccccc

SEQ ID NO: 568925 - DNA, 532 bp, Homo sapiens
atgtcttgattgatttagttattgattcatattacaatggaaggctgaatcaacttatacggctttgaattaattgtataccttctattgatgagtgaataaatagttttttaacattmaccacaaaacatataaacattaacaattttgtgatattttacataaaacgtgcaagaaattctaaatttgaaattagtatttattttatagaacatattatgaaatactttttaaattagtaatcagaaaaaagatgattaaatagtaaaaacaatcatttgtatttttaccagatatcatcacttttaaaagtttggtttatattcttccagatagaacaatatactaaaataatataaataggttattatgtcaacaaacatttatatatatttttacagctggttacccccatgcaaaaacgtgccatatgtaatttttctatctaatatatttgaaaatgtatgttatttaaaagttttcctattgtaaacaatactataatgaatattattaaagacagtcttaagtt

SEQ ID NO: 568926 - DNA, 565 bp, Homo sapiens
acagtaatgattaaaaaaatgcgctagcatcctaaattcagaagaacactacattaatctgataaaatataagtagaaaaatcatttacaacaaccatcatgtgtaataataaaatgttgaatgacaagaattcccagtacaaatgctttcactcactattgttctggaaatcttagttaaaaaaaaaaaaacaaaacaaaacaataaataactttttcaggatgaaaaaacctaaataaaagccaaagagtttgagacatgcctgggcaacatagggatacctcatttcaacaaaaagaaaaaaaaagtaagtcaggcgtagcaatgcacaccaaagtcctagctacttgaggtgctaagctgggaggattgcttgagtccaaaagatcgaggctgcagtgagycaagatcatgccacagcactccagcctggacgacatggtgagactttttctcaaaaaaaaagtcattatttgtagaagatataatccacaagaaaattcaccagaatctacagataagttatcagaactgacacattagtatagcaagatttgtagttac

SEQ ID NO: 568927 - DNA, 556 bp, Homo sapiens
tatacaagacttctaaacagaaaactataaaaatattattgccacaaacaaaaactttaataaataggagacaatcatagtaaaaggatgaaaaatgtgaattatctctgaaccaatctatgaatttgattcaatatcaatcaatattgtgaaagtttgctttttcttctgggggttgtgtgtgtgtgtgtgtgtgtgtatcttataacttaatgaactgattctaaaatgtatgtgataatggaaagagccaagaagagttgaaaaagcctttaaaaaggaaaaactgagtgaatgcattttatattagatatcaatacttttaaatctacagaaattagatcatcatacagttaagctaagaataacaaaaggccaaataaatggagtctagaaacaggacaatgataatatggacytatgatgacagtcgtgacactgcagcgaagtataaaatgaacagtcttttaatgaatatgattggacagtcaactattcctatgaaaaaataataaaattgacccctactcatacattcacaaatatcaaataccga

SEQ ID NO: 568928 - DNA, 497 bp, Homo sapiens
tgccatgtttgcccaggctggtcttgagctcctgggctcaagtggtccacccgcctcagcctctcaaaagtgttgggattacaggcatgagccactgcgtctggccatgattgtcagtttgtttttggtgtttctttttgggggggacagggtctcactctgtcacccaggctggagtgcagtggcgtgatctcagctcactgcagactwgacctctcaggctcaggtaatcctcccacctcagcctcccaagtagttgggactacagaaacatgccaccatggccagctaatttttgtatttttttgtataaatgggtttttgccattttgcccaggctggtctgcaactcctaggctcaagcaatctgcccacttcagcctcccaaagtgttgggactacaggcatgagccactgctcctggctgtcacggtattttttaatacctccaacagaagtcttccagagttttactgaggcgtcacagggtaaaaatg

SEQ ID NO: 568929 - DNA, 542 bp, Homo sapiens
tgtcctaattttgaataatgtgtatttgtcactttcattggctcataattccatttaagattaggtgtctgtattttttcataaattttttgatgcctaatatttctgcatatttatgaggtacatatcatattttgttacatgcatagaatgtgtaataatcaagtcatggtatttaggatatccatcacctcgagcatttatcattttgttgtgttgggaacattgcaaaccctctcttctagctattttgaaatatatattgttattaactgtagtcaccctaatgtgttactgaacattagaacttattctatctgcatgtatgtttgtactgattaactcacctctctttatctcyccacaatccccccaaaacacacacacccatcccagccactagtaactatcattctactttctacctccatgagatcaactacttttagctcccccatgagtgagaacatgtgatatttttgtctttctgcatctggcttatgggtgcctgtatttaagaagcataaatggatttgcatcag

SEQ ID NO: 568930 - DNA, 552 bp, Homo sapiens
cagcaatctttgctgctctgcagcctccactggtgatacccaggcaaacagggttgggagtggactttcagtaaactccagcaggctgacagcagaggggcctgactgttaaaaggaaaagaaacaaacagaaaggattagcatgtccactcaaagaccccatccaaaggtcaccaacatcaaagaccaaaggtagataattccacaaagatggggaaaaaccagcacaaaaaggctgaaaattccaaaaaccagaacacctttcctcctccaaaggatcacaactcatagccagcaagggaacaaaactggatggagaatgagtttgatgaactgacagaagtaggcttcagaacgatggtaataacaaacaactccaagctaaaggagtatgttctaacccactgcaaggaagctaagaaccttgaaaaaaggttagtcgaattgctaactagaataaccaatgwagagaagaacataaatgacctgatggggctgaacacagcacaagaacttcgtgaggaatacacaagtatcaatagccaaatcaat

SEQ ID NO: 568931 - DNA, 569 bp, Homo sapiens
ttgttccttctgagtgtatttttgtgckcattaaccaacctctcttcatctcccctctccgcccaaccttcccagcttctggtaaacacctttcaattctctatcttcatgagatccactattttaactccaacatgagtgagaacaggcaatatttttctctttgtgcttggcttactgcacttaacataatgccttccagttccgtctatgttgctgtaaatgacagaatttcattcttctttatgactgaataatattcctttgtgtatatatatatatctcacaatttccttataatttcatccattgatggacacttaggttgatttcatatcttgctattgaaatgcctcagtacattggtctaggcaaagatttcttcagtaagacctcaaaagcacaggaaaccaaagcaaattgacaagtgggatcacatcaagctaaaaagcttcagaggaaacaatcaacaaagagaagagacagcccacagaatgggaaaaaaatatttgccagctattcatctgacaagtgattaataaccagattatgtgaggaactcaaacaac

SEQ ID NO: 568932 - DNA, 593 bp, Homo sapiens
tgtatttttgtgctcattaaccaacctctcttcatctcccctctccgcccaaccttcccagcttctggtaaacacctttcaattctctatcttcatgagatccactattttaactccaacatgagtgagaacaggcaatatttttctctttgtgcttggcttactgcacttaacataatgccttccagttccgtctatgttgctgtaaatgacagaatttcattcttctttatgactgaataatattcctttgtgtatatatatatatctcacaatttccttataatttcatccattgatggacacytaggttgatttcatatcttgctattgaaatgcctcagtacattggtctaggcaaagatttcttcagtaagacctcaaaagcacaggaaaccaaagcaaattgacaagtgggatcacatcaagctaaaaagcttcagaggaaacaatcaacaaagagaagagacagcccacagaatgggaaaaaaatatttgccagctattcatctgacaagtgattaataaccagattatgtgaggaactcaaacaactcaagagcaaaaagacaaataatctgattaaaaaatgg

SEQ ID NO: 568933 - DNA, 565 bp, Homo sapiens
tggtagctactctgttagacaggtcaggattagagactggggaatgtcttagcagtgtgctgcgcccgaccccaagactccataataattccaaagggccagagactgtggctggaccactgttctartgatggaatgagcagaaagggctgcactggaaacagcctgctctcccagaatttgttggggcaaaggatacatgaatatttcttacagctgtcttgggagaaagagcctggagtcactttaaaccccatctaggaggaaaccaaaaggagtgatgtgacctcattggaatggtatgcttttgtgactagaagtggttgggagactttttaattatctgagaatgaccagaaaaattatagatctacacaaaatcttatgtagtattgagagaaaaggaacccctcattgtggatttcagaggtcgaccaggaaagaaaatgtagtttttttctgagtgtacactatgatccctgcttgggctaatctaacatttataattaaaaagcactttaagctctttaaaggagaagatgctgtatctcaagtagcttcaacc

SEQ ID NO: 568934 - DNA, 596 bp, Homo sapiens
aggaaaggagtcctgattgagacccccagagagggttcttggatctcccacaagaaagaattcagggtgagtccatagagtaaaatgaaagtaagtttattaagaaagtaaaggaatagaagaatggctattccatagacagggcagcccagagggctactggttacacatttttatgcttatttcttgattatatgctaaacaaggggtggattattcatgcatcccccttttagaccatatagggtaactacctgaccttgccatgggatctgtaaactgtcatggcggtgggcggagtgtagcagtgaggacgactgtaggtcactctcattgccatattggttttggtgggttttagccagcttctttgctgcaacctgttttatcaggaaggtctttacgacccgtatcttgtgccaaccycctatctcatcctgtgacttagaatgctttaaccgtctgggaatgcagcccagtaggtctcagcctcattttacctagctcctgtttaaggtggagttgctctggttcaaacgcctctgacagtggcacatttactaactactgtgattttgaagtaacaagtataaata

SEQ ID NO: 568935 - DNA, 476 bp, Homo sapiens
tagttttgatctaagaaatttctcgtamcatttcttcacaaacacttagagaagcactagaagcagtggcctgtgtaaagaagtcaccaaagaaagatgacctgcttgccttagtcctaagcataattttagacagaaaaatataaaagaaattcctctgctattcatttattaataatgtacaatacagtgaacacaacataggttcagcatcacataattttgatattttatataaacaaaaacagaaaattttttctccaaaattaggaaaatcaaagatacaattttctttaaaattcccttaggtaggtaggtacaaatattaacttcctcgatgttgtatcaaaatatatggtatggcccaagactatccttatatgactagttttttatttagaaataagtttaaaagcaagagcacattatctgattttagagatcccaaggaaaacaagctctaccacaaataaata

SEQ ID NO: 568936 - DNA, 424 bp, Homo sapiens
ttactgctaagttctgactcaagggaagcagtttcaggcagagttaaggaagtcaaaggtttctttctaggtagagaagcccagttcatcagcctatgaaagaacactggaatttagaacacaaactctagggtgtaatgattgtacactggttagtgttacttagtactgtatttctaaggaaaccaagcttgctgatgggacagaagagggagacaattttcaatgtcattttmctctaactgtatggtctctctcacaggtatacaaggtaagtatcaaagatttgtttccttctgtttttaagactgtatagtattccattgtgtatatatgccacattcattcattcaactgctaatgaacactaaggttgatttcatatcttgactatcatgaataatgctgcaatgactatgggagt

SEQ ID NO: 568937 - DNA, 509 bp, Homo sapiens
taataataatataccttattgtgtaacaattctagaacagaaaatagatatgtaaaaatgaagcttctgaaggattgattttgaytgtatgaatgacataaggaaaaaggcttatcttctagggcttaacctcagaggaaaagtataagcacagcactggaagggatcattgaactgctataggtttacattacattagccagagcctttgtgattatagaaaaagagaaagagcagccaaactatctttgcctgctacacagttttggattggctaaaataccacgggtgttattttcaaagactattggagaattcgtttcaattgtgtgcttttttctctatagtacattataaaaacttgaaaaagcctgaccacctcttctcaaaagttgtcaaatattaagacagcaagaaaacaaacctctttgcctttaagacctatttggcgttgttgtctcttgtgttcttgaccacacttcccttttgcccttgtgtactttcagctt

SEQ ID NO: 568938 - DNA, 606 bp, Homo sapiens
gtactgttgattgatagtgttgttcagttctgttatttctttgcttattttctctagtacttctgtcaattgctaaaaatggtgtgtggaacctgtaattataattgtagatttgtctatttcttccttcaaatctggcagtttttgtttcctgggtcttgagatgctactctttgaattgkatacatttaagattttttatgtcttactggtgtattgatcatttgatcattatgtaataatcttctttgttctaggaattttctttgccctgaagactactttaactgatattaatatagcccccttgcttttttcttaaattaacgtacacctggtatattattcttatccttttactttcaatttgcttatgtaattatctttgaagcaagtttcatttagacagcatattattgtatcttaaatttttaatttgtcatccaaatttattttaaaaaatacatgtagttagaccatatacatttaaggtaattactaatatgttagggcttaattccgccattttattatttattttctatatatttcacatgtttcctattcctctgcttcttttttttacgttttttatgaatagtttga

SEQ ID NO: 568939 - DNA, 621 bp, Homo sapiens
agataaataataaaaattagagcagaaatcaacgaaattgaaaaaataaaaccaatagaaaaaaatcaacaaaactgaaagctggttmtttggaagcatcattaaaattgataagtcttgggtgggcatggtggctcacacctgtaattccagcactttgggaggccgaggtgggcagatcacaaggtcaagagtttgagaccagtctggccaaggagttcgagaccagtctggccaacatggtgaaatccagtctctactaaaaatacaaaaattatccgggcacggtggcacatgcctgtagtcctagctactcaggaggttgaggcaggaaaattgctcaaacccgggaggcagaggttgcagtgagctgggattgtgccactgtactgcagcctgggcaacagagaaagactctgcctcaaaacaaaagaaaaaataaaaaaaatcgataagtctctagccaggctaacagagagaagggaagagggagtgggagaagagggaggcagagggagaaagtaagagagagagagagagagagagagagagagagaagacacaaattactagtattgtaagatcaccacagatcctattgaaacttaaaggataataaag

SEQ ID NO: 568940 - DNA, 605 bp, Homo sapiens
ttttcacatttcctggttaatataatgactaattagaaaaataatgatgttcatttctttccaaaactccccttgctccttgtttgattattcatayctctcttgttttctctctattgtttttcaataaaatgggcaagttggagtttttgaatagtagggattacttgcagttttgtttatctaaattgtctggcaatggctgtagttctgtttctcttcagctatggagaactgagaagaaacattaccacacctgtcaagaggaaatagcgaagaacataatttcaccagaaatatgcatcaattcagagcatctatggatacttagggaatttgaggtcctaaagtaatgtatcagaggaaccatgaagtatatgttaaactcaaaggttctttttcctataaaactacataaaggagtgtataagcagtattagtattcatttcatgaagctacttatgtttctgtgtgtcttattttaaaaatgagaatctttaaacattgaaggctcaaattagagactattgtcataagttatggtgcattacatatttcaagagtcaacgcagctccatgatttgaaagccataaaatgtaatat

SEQ ID NO: 568941 - DNA, 501 bp, Homo sapiens
cccccagatatgagaaaaaaattaaaataaagctttatatgatgacatgcttctttctctaagtttaaatacattttttttaagtaattaaaataggccaggcacagtggctcacacctgtaatcccagcactttgggaggctgagatgggtggatcacttgaagtcaggagtttgagactagcctggccaaaackgtgaaaccccatctctactaaaaatacaacaattagccacgcatagtggcgggcacctgtcatctcagctactcaggaggctgaggcaggagaattgttgaaacctgggaggcagaggttgcagtgagctgagtctgcgccattacactccagcctgggtgacaacagtgggactccgtctcaaaaaaaaaaaaaaaaaagtaattaaaatagaattttttgtctccattctaaaataaaatgccttagtcttactctattacaatttcacttttttttttcttattttaccacaatggtattaa

SEQ ID NO: 568942 - DNA, 563 bp, Homo sapiens
gaactgtaaagagaaatagatgaatctactctgtagttagaaacttcaccacccctctattagacataaacagatctagcaggcagaaagttaaggacagttgaactcaacagcaccatcaatcaacaagatataatagataaccatagactacttcatccgaatataacagattacatatttttctcaactcacatggaacgtccactaagatagacctcaactgagccataaaacacactttgatgaatttaaaagaattgaaataatacaaaatctgctgtcaggctgcaatggaatttgagctaggggttaataattccaatatagctggataatttcaaaatacttggagattaaacaacayatttttaaataatacacgggtcaacaaaggactgtccaaagaattttaaaaatattttgcaataaatgaaaatgaaaatgaaacatggcttatccaaatttgtaaaatgcaacaaaaacggtgcctagagggaaatttctagcattaagggcatatattagagaagaagaaagacccagaatccataatataaatt

SEQ ID NO: 568943 - DNA, 573 bp, Homo sapiens
ctttactctgttgattatttcttcttctgtgcagaagctttttagtttaatatagtcttatttgtctatttttgtttttgttccctgtgtataagctgtattattagttgcccaaacttttgaaagccactaagatgttctttaacagatgaatggctgtataaactacagaatatctaaacaatgaaatactattcagtgttaagaagaaatgagctatcaacccatgaaaagacatggaagaaacttgtatgcatatcactgagtgagggaagccaatctgaaaagagctaacattatataattccagctatatgacattctagaaaagtcaaactttgaagaaaggaaaacattcagtggttgccagaggtcagtggagagggagaaataaataggcagagcatagaggatttttaaagcaatgaaactattstgcatgatactataatggtagatacatgccattacacatttccagacccatcaaaggtacaacaccaagaactatccctaaaataaccatggactttggctgatgtgtcaatgtaggtccatcaattgtaaccaata

SEQ ID NO: 568944 - DNA, 500 bp, Homo sapiens
caaacataagtttaaaaacactttgtctttttattctcagataaagtaaatgagacaggctatatataatcttgttcttcagtttatcattgaatctagtacacatatctatgagggaagtttttgtgcttattttagttgagtatgtagctttgatcaattaaaaaaamcactgtggaacaaattaaacctcaaagcaattatgaaactgtaggccttactctacagttatatctttagttattttggcctttaaacttttatgtagtataaccattatgttttcaaaataattttttaaaaatcttaagttttatgtaaactcttatcatatgtataacataatggggaagtttagctgctaagcatttttaaaccataaaagccataataaacagtattacatatatttgctattcattaggataatttaattttctctaaataaaacaaaagagaaaattgttgtaattattatgttttaaactgttaatgaattt

SEQ ID NO: 568945 - DNA, 523 bp, Homo sapiens
aggcacccaccatcacgcccggccaattttttgtatttttttttttagtagagacagggtttcaccatgttagccaggatggtctcgatttcctgaccttgtgatccgcccgcctccgcctcccaaagtgctgggattatagacatgagccacygcgcctggcaatgtgtttattttcactagagatttgcagtttcatgatatatatatttttcaacttttattttagatacagggagtacatgtgcaggtttgttacatggatacattgtaccaaggtactgagcatagtacccaataggtggtttttcgacctgcaccatcctccgttcctccaccctctactagtccatagtgcctatggttcccatgtttatacccaggtgtgctcaatttttagctcccacttataagtgagaacatactatttttggatttctgtttctgcattaatccatttaggattatggcctccagatccagccatgttgctgcaaagaatataattttattcttttttatg

SEQ ID NO: 568946 - DNA, 615 bp, Homo sapiens
taatgaataatctaatattaatgaaaataaccaaaatactaaaataggcatgaaaaaatatccaattctctagtctcattatgcatcctactaatgtttattaagggatgctaagtcccaggcagagaactgggttttagagataaggaggaaaatagttatacaacctcgtgaaaactgcaaggttttctttttaaaggactcakaacttgtctaagaattttgaaaaaacagctggtatgtatgagagcaaaggcccagaaacattgagaaggcctttggaaagtacaaattttaaagaaagttgagggttcctaagtcgtcatgttctgtctctcttcaaggtcactaagcttcccatcaggaaactaatgatttcctcatcaccatctttgttctttgtgtagtatttgacactagtgaccaccaccttgatagaattcttcctaaatctctaaccacttcactgatgcttttattggctcttcttccctttctaggcctgaaaaagggacatatttcccagaattttattgtaagccccttaccttgtggatacattctctcctttgaagacccaaacaccactccaatgaaaattatcagaactggcag

SEQ ID NO: 568947 - DNA, 425 bp, Homo sapiens
tagtaaaactaggtttaaagaaagtatgcttgcattataattgatgttagcaattccaaaaacatttttaacaataattttaaaactagctttatttaccaaagattatctcagatcacctgaagtaaaagacattagtttctgttttctgagagaatatttatttaagcatcactttttaaaagccagctaaatagagcttttatttatttatttatttatttatttatttttgagacagggtctctgttgcctatgctagtgtgcagtggtgtcatcacggctcactgtaacctccacrtcctgggctcaggtgatcctcccacctcagcctcccaagtagctgagaccatggtcctacaccaccatgcctggcaaatttttgtattttttgtagagtcagggtttcactatgttgctcaggc

SEQ ID NO: 568948 - DNA, 611 bp, Homo sapiens
ggataattttaaaagaatgaaatatgcaagttatcaactttttgtataaatattctgttctcatttatgttaaaacacattaatacaaacaatatatgtatatttttattatttattatttatttatttgaatttctttaaaattacttattttatttttttttaaatgaatcattgaactcctaggtatattgggatagttcagttattaaagagaagagaaattggaaaagcctccttaaagccacataatagcatcttttgaaaaatcgatggctataaggctgagtaaggtcaggtaagtcaacttttaattatgtttaaccyttttctggtcttagaataggcattctgtggcattcaggagcaacaatgaagatatagaaagcaatcataaggaataaatatgttgttgtataagatacagtgatattgtattggaatgagtcttcattagacttgtgaaagtcttcttgaattttcactctttttcaacaataaccatttaaaataaaaatactattgagttgaactaaaagcgaagacattaccgtgtcactgagccaccatttcatccccacactgtccatgtctagcaatgtttattatgt

SEQ ID NO: 568949 - DNA, 611 bp, Homo sapiens
ggataattttaaaagaatgaaatatgcaagttatcaactttttgtataaatattctgttctcatttatgttaaaacacattaatacaaacaatatatgtatatttttattatttattatttatttatttgaatttctttaaaattacttattttatttttttttaaatgaatcattgaactcctaggtatattgggatagttcagttattaaagagaagagaaattggaaaagcctccttaaagccacataatagcatcttttgaaaaatcgatggctataaggctgagtaaggtcaggtaagtcaacttttaattatgtttaacccttttctggtcttagaataggcattctgtggcattcaggagcaacaatgaagatatagaaagcaatcataaggaataaatatgttgttgtataagatacagtgatattgtattggaatgagtcttcattagacttgtgaaagtcttcttgaattttcactctttttcaacaataaycatttaaaataaaaatactattgagttgaactaaaagcgaagacattaccgtgtcactgagccaccatttcatccccacactgtccatgtctagcaatgtttattatgt

SEQ ID NO: 568950 - DNA, 582 bp, Homo sapiens
gcattgcttcttattagccatataaaatatcgtattatataaagagataactttagataaaaattggctattgtgcaaatggaaattaaagtmgactgaatttcaagaaaattgtggtgtttaaaaggcatggaactacgtgttttgaaaatcagaaatctgtttttttattgaggccatggaggttcctgaaatcatccagaaatagtatgctgagagagacaaaaataaagttttggatgggaaagcaaagatgttctagaaaaccctaaactttgattctgtggcaattgtgtaatcaaaacctacagcgagtttttgcttcagttttgtgttagtttggttctactgaaggcatgttaccgagagctgcatttggggtttatgaagaaaacatagtatcttttctttggcataccctcattgatttgaatattgtggagacagacagagaagctaaaactcctactgtctgtaatatttgctaagaaatatcttcttcaagttccaagagaacaagtataacataaacacagaaaataagaaattttcttgatttttcattaagcaaagagtaacttt

SEQ ID NO: 568951 - DNA, 582 bp, Homo sapiens
gcattgcttcttattagccatataaaatatcgtattatataaagagataactttagataaaaattggctattgtgcaaatggaaattaaagtagactgaatttcaagaaaattgtggtgtttaaaaggcatggaactacgtgttttgaaaatcagaaatctgtttttttattgaggccatggaggttcctgaaatcatccagaaatagtatgctgagagagacaaaaataaagttttggatgggaaagcaaagatgttctagaaaaccctaaactttgattctgtggcaattgtgtaatcaaaacctayagcgagtttttgcttcagttttgtgttagtttggttctactgaaggcatgttaccgagagctgcatttggggtttatgaagaaaacatagtatcttttctttggcataccctcattgatttgaatattgtggagacagacagagaagctaaaactcctactgtctgtaatatttgctaagaaatatcttcttcaagttccaagagaacaagtataacataaacacagaaaataagaaattttcttgatttttcattaagcaaagagtaacttt

SEQ ID NO: 568952 - DNA, 582 bp, Homo sapiens
gcattgcttcttattagccatataaaatatcgtattatataaagagataactttagataaaaattggctattgtgcaaatggaaattaaagtagactgaatttcaagaaaattgtggtgtttaaaaggcatggaactacgtgttttgaaaatcagaaatctgtttttttattgaggccatggaggttcctgaaatcatccagaaatagtatgctgagagagacaaaaataaagttttggatgggaaagcaaagatgttctagaaaaccctaaactttgattctgtggcaattgtgtaatcaaaacctacagcragtttttgcttcagttttgtgttagtttggttctactgaaggcatgttaccgagagctgcatttggggtttatgaagaaaacatagtatcttttctttggcataccctcattgatttgaatattgtggagacagacagagaagctaaaactcctactgtctgtaatatttgctaagaaatatcttcttcaagttccaagagaacaagtataacataaacacagaaaataagaaattttcttgatttttcattaagcaaagagtaacttt

SEQ ID NO: 568953 - DNA, 582 bp, Homo sapiens
gcattgcttcttattagccatataaaatatcgtattatataaagagataactttagataaaaattggctattgtgcaaatggaaattaaagtagactgaatttcaagaaaattgtggtgtttaaaaggcatggaactacgtgttttgaaaatcagaaatctgtttttttattgaggccatggaggttcctgaaatcatccagaaatagtatgctgagagagacaaaaataaagttttggatgggaaagcaaagatgttctagaaaaccctaaactttgattctgtggcaattgtgtaatcaaaacctacagcgagtttttgcttsagttttgtgttagtttggttctactgaaggcatgttaccgagagctgcatttggggtttatgaagaaaacatagtatcttttctttggcataccctcattgatttgaatattgtggagacagacagagaagctaaaactcctactgtctgtaatatttgctaagaaatatcttcttcaagttccaagagaacaagtataacataaacacagaaaataagaaattttcttgatttttcattaagcaaagagtaacttt

SEQ ID NO: 568954 - DNA, 661 bp, Homo sapiens
tgattaaaaaaatacatagaaaagaaaactgaaattggaaaaacagagagtcaacaaaattcgactgctatttggattcacctcagggagtcaagaaaagatgtgcctgggctccaacagcccatagagagagcagttccctagcaacaatgtccattcatctaactctgtcaggtgaatcaatccactgtgagtctcagtggaagacttccaaaattgttaaagaattcttttcaaaaaaaattataactgacctagagatattagatgaactcttgttagatatttaactcagcattaatgagggagcaaggragaacttacaaccagttcaaaaaagatttgaaagaaacaaacttattttgagttttaaaatgttgaagtgaatttgccaatgtattcaaaagtagcttttaaaaaacagtagtgagggaaaggaagagaagaaagtccattgaatccccactggacagaattcatttggatgttcatagacaagacttattttgcatcagtttcacttatctacaatttgcagagttataaattagctttaaggcaatacaagtctgaaatcagttaatctggaaggatgtcctctaaagaatttgtactattccatttagacatctattttcttttctttttatttcaaaatttc

SEQ ID NO: 568955 - DNA, 661 bp, Homo sapiens
tgattaaaaaaatacatagaaaagaaaactgaaattggaaaaacagagagtcaacaaaattcgactgctatttggattcacctcagggagtcaagaaaagatgtgcctgggctccaacagcccatagagagagcagttccctagcaacaatgtccattcatctaactctgtcaggtgaatcaatccactgtgagtctcagtggaagacttccaaaattgttaaagaattcttttcaaaaaaaattataactgacctagagatattagatgaactcttgttagatatttaactcagcattaatgagggagcaagggagawcttacaaccagttcaaaaaagatttgaaagaaacaaacttattttgagttttaaaatgttgaagtgaatttgccaatgtattcaaaagtagcttttaaaaaacagtagtgagggaaaggaagagaagaaagtccattgaatccccactggacagaattcatttggatgttcatagacaagacttattttgcatcagtttcacttatctacaatttgcagagttataaattagctttaaggcaatacaagtctgaaatcagttaatctggaaggatgtcctctaaagaatttgtactattccatttagacatctattttcttttctttttatttcaaaatttc

SEQ ID NO: 568956 - DNA, 659 bp, Homo sapiens
ttgaaccataatacagaatccatgctctgtgtatgaaactaatcttttgaaagagcaagtcttggaaaatacgtgctcaaaaacttccttacatcagatagtyagttgtatggttctataatagtttaattatctgtcaaagagaataattaagttcagtatatcatgaatataaaattctgttaaaaaaggcagatattaatacacattttagaaactactacacaccagacactttgttaggtgatttgcttcacctcaattaaaatacaaaattctctcatgttagatctgtgtgaactacatatttggattacactgtgaatacttttagttttgggctttgggagaggctttgtaaaatctgagcatctaaactatgaatacatagacctatagtcccatagaagctatattcctgttagtaagtaaggcctgatactccctaaggaaactagcctaccaatagctatagttctacaatagaacaggggatcttaactatttggggtttcacaccttgttgcatatccagtgggattaagggagttaattttccacagtgcacctaattgatattttccccgcatcatttcagaatattgtggactgcctaaattttgtcccatgggtcataggataaaaacaaacaaacaaac

SEQ ID NO: 568957 - DNA, 659 bp, Homo sapiens
ttgaaccataatacagaatccatgctctgtgtatgaaactaatcttttgaaagagcaagtcttggaaaatacgtgctcaaaaacttccttacatcagatagttagttgtatggttctataatagttkaattatctgtcaaagagaataattaagttcagtatatcatgaatataaaattctgttaaaaaaggcagatattaatacacattttagaaactactacacaccagacactttgttaggtgatttgcttcacctcaattaaaatacaaaattctctcatgttagatctgtgtgaactacatatttggattacactgtgaatacttttagttttgggctttgggagaggctttgtaaaatctgagcatctaaactatgaatacatagacctatagtcccatagaagctatattcctgttagtaagtaaggcctgatactccctaaggaaactagcctaccaatagctatagttctacaatagaacaggggatcttaactatttggggtttcacaccttgttgcatatccagtgggattaagggagttaattttccacagtgcacctaattgatattttccccgcatcatttcagaatattgtggactgcctaaattttgtcccatgggtcataggataaaaacaaacaaacaaac

SEQ ID NO: 568958 - DNA, 659 bp, Homo sapiens
ttgaaccataatacagaatccatgctctgtgtatgaaactaatcttttgaaagagcaagtcttggaaaatacgtgctcaaaaacttccttacatcagatagttagttgtatggttctataatagtttaattatctgtcaaagagaataattaagttcagtatatcatgaatataaaattctgttaaaaaaggcagatattaatacacattttagaaactactacacaccagacactttgttaggtgatttgcttcacctcaattaaaatacaaaattctctcatgttagatctgtgtgaactacatatttggattacactgtgaatacttttagttttgggctttgggagaggctttgtaaaatctgagcatctaaactatgaatacatagacctatagtcccatagaagctatattcctgttagtaagtaaggcctgatactccctaaggaaactagcctaccaatagctatagttctacaatagaacaggggatcttaactatttggggttkcacaccttgttgcatatccagtgggattaagggagttaattttccacagtgcacctaattgatattttccccgcatcatttcagaatattgtggactgcctaaattttgtcccatgggtcataggataaaaacaaacaaacaaac

SEQ ID NO: 568959 - DNA, 608 bp, Homo sapiens
aactgtaccaaattttcttctgccttggtattcctcatcccagtaaatctcagcctcgwaactgtatcattactgctgcatattgaagacatacttgatttctccaacacactatatccaatccatcagcaattttcatgtttctagtttcaaagcatataccaatatgaactcatcccattagcttaattattctaacatctactcaactcaccaccatctcttgcctgtattttgattgtaaacttttatttggtctctctacatccatgctttccagtttatattcatctcttcattcacacagtagtcaaaacaatatttaaaaagaaaaattggaatacaataccctcttgccatagtacattccaactgctgctccttatatttataacaaaatctagaccctcctctaaaggtctgcaagatatcacatgatcaagtgctgtcatctttccactttcctgtctaccactgttcctttcctctactaactacataaaaacaacacttaatattttggtgtcctttactaattccaaatttgttcttgacttatgatctctatattaactgtttcctctgcttttatattattttttggaatg

SEQ ID NO: 568960 - DNA, 572 bp, Homo sapiens
aactgtaccaaattttcttctgccttggtattcctcatcccagtaaatctcagcctcgaaactgtatcattactgctgcatattgaagacatacttgatttctccaacacactatatccaatccatcagcaattttcatgtttctagtttcaaagcatataccaatatgaactcatcccattagcttaattattctaacatctactcaactcaccaccatctcttgcctgtattttgattgtaaacttttatttggtctctctacatccatgctttccagtttatattcatctcttcattcacacagtagtcaaaacaatatttaaaaagaaaaattggaatacaataccctcttgccatagtacattccaactgctgctccttatatttataacaaaatctagaccctcctctaaaggtctgcaagatatcacaygatcaagtgctgtcatctttccactttcctgtctaccactgttcctttcctctactaactacataaaaacaacacttaatattttggtgtcctttactaattccaaatttgttcttgacttatgatctctatatta

SEQ ID NO: 568961 - DNA, 616 bp, Homo sapiens
attgtgtatatgcactacatttttttatccattcatctgttaatgggcactgagattgatactwttataaatagggtaaatattaaaaattaaatattgtaaatagttctattcaactgaggttgaggctattgtaaatagtgctgcaataaacataggattgcagctatcccttcagcaaactcacttcaagtcttttgcattaatactcattagtggaatttctggattatatgataattctatttttagtttgttgggaaatctctatactgttttccataatgactgcacaaacttatttgtttgtgcacatttgtatactatttccaccaatagtatacaagtgttcccttttctctatatccttgccaacacttgtctttttttgatgtaaaacgttcctttttgaaatgaagtatgagataaaaatataatagtaaacattttagaagacattctgacaggtgagagatggtatctcactgtggtttgaaattgcatttctctaatgattattaatgagcatttacccatatgtgatggccatttggcactatatatatctgttggtatctttatttatctatatagatatatagacatgtatggttta

SEQ ID NO: 568962 - DNA, 616 bp, Homo sapiens
attgtgtatatgcactacatttttttatccattcatctgttaatgggcactgagattgatactattataaatagggtaaatattaaaaattaaatattgtaaatagttctattcaactgaggttgaggctattgtaaatagtgctgcaataaacataggattgcagctatcccttcagcaaactcacttcaagtcttttgcattaatactcattagtggaatttctggattatatgataattctatttttagtttgttgggaaatctctatactgttttccataatgactgcacaaacttatttgtttgtgcacatttgtatactatttccaccaatagtatacaagtgttcccttttctctatatccttgccaacacttrtctttttttgatgtaaaacgttcctttttgaaatgaagtatgagataaaaatataatagtaaacattttagaagacattctgacaggtgagagatggtatctcactgtggtttgaaattgcatttctctaatgattattaatgagcatttacccatatgtgatggccatttggcactatatatatctgttggtatctttatttatctatatagatatatagacatgtatggttta

SEQ ID NO: 568963 - DNA, 616 bp, Homo sapiens
attgtgtatatgcactacatttttttatccattcatctgttaatgggcactgagattgatactattataaatagggtaaatattaaaaattaaatattgtaaatagttctattcaactgaggttgaggctattgtaaatagtgctgcaataaacataggattgcagctatcccttcagcaaactcacttcaagtcttttgcattaatactcattagtggaatttctggattatatgataattctatttttagtttgttgggaaatctctatactgttttccataatgactgcacaaacttatttgtttgtgcacatttgtatactatttccaccaatagtatacaagtgttcccttttctctatatccttgccaacacttgtctttttttgatgtaaaacgttcctttttgaaatgaagtatgagataaaaatataatagtaaacattttagaagacattctgacaggtgagagatggtatctcactgtggtttgaawttgcatttctctaatgattattaatgagcatttacccatatgtgatggccatttggcactatatatatctgttggtatctttatttatctatatagatatatagacatgtatggttta

SEQ ID NO: 568964 - DNA, 525 bp, Homo sapiens
atacacacacacacacacacacacatatatggcatatatatatatacacacacatatatggcatatatatatatatacacacgcacacacacacacacacacatatggcatatatatatatatatatatatatatatatatatgccattgcccaaaccctgtggtgacacctttgtggatgccaaggcacacagggatacacacacacatacacacacacatatacacaatttacatcccacattgtagaaaaaatacatcacacagtttagaagaaatgaacaggggaattttgcagaacataktccagagagatttattctcagtattttcactcttaaatgggttggaatgtgtagggtgaattctacaggaacatgttctaattcaaaaagcaagtgctttcaaaatggtaacaaaattaagtaagtgttaggtgttgcctcccttattctctattctccctcatattaacatatgtaaattacctccagacctgggtttcccatcctcccacatatacct

SEQ ID NO: 568965 - DNA, 525 bp, Homo sapiens
atacacacacacacacacacacacatatatggcatatatatatatacacacacatatatggcatatatatatatatacacacgcacacacacacacacacacatatggcatatatatatatatatatatatatatatatatatgccattgcccaaaccctgtggtgacacctttgtggatgccaaggcacacagggatacacacacacatacacacacacatatacacaatttacatcccacattgtagaaaaaatacatcacacagtttagaagaaatgaacaggggaattttgcagaacatagtccagagagatttattctcagtattttcactcttaaatgggttggaatgtgtagggtgaattctacaggaacatgttctaattcaaaaagcaagtgctttcaaaatggtaacaaaattaagtaagtgttaggtgttkcctcccttattctctattctccctcatattaacatatgtaaattacctccagacctgggtttcccatcctcccacatatacct

SEQ ID NO: 568966 - DNA, 601 bp, Homo sapiens
tgcatggctgcctctacatcaaaggtcatgagcaaaagccttggtgaacggtccacagccgttatagacagatatagatgactaccaaagttaaatcaatatgaccttttaatatcattctcaaaaatcgtgtagtagaaaggcatgggtgtcaaatatattagaaattcaaagccagattacaaaacttacatgtattgataataagctgtgtgctaaaaacgttacatgtaattctgtattgccttagtcattttcacaagaatataggcttctgttttgataagaaatactaaggaagttgaattaaggtttataataaacacatatctttaaaatgcctttacttgggcacctaatgctttataattatttattgtcaaacataaagaacatacaatggaagttattaattgaagtggggtcaawgtaatttgttttttgtgaaacttaaataatattaaatcagtgataaactaaaggtataaataatcattttgttgtattgtcaatagtacagtaaagttttgaataaagtagacttaggctgtgaaaatttatcaagattatttccttcatgaaagtaagttttatatgtatt

SEQ ID NO: 568967 - DNA, 589 bp, Homo sapiens
tataggtttagtgcattccctttcaaaataccaatgacatttttcacagaaatagacaaacaatcctaacatttatatggaaccacaaaaaaactcagaatagccaaaattattctaagtaaaagaaataaaactttcagaatcacattatctgacttcaaattatactgcagagttatagtagacaaaatagcatggtactggcatgaaaacagacgcrtagactaatggaacacaatagaaatcccagaaaccaatctacacatctacagtgaactcatttttgacaaaggtgccaagaacatacattgaggagaagacagtgtcttccataaatggtgctggaaaaactggacatccatattcataagaataaaactggacccctatatctcactataagtaaaaataaaataaaaatgcagtcaagacttaaatctaagccctcaatctatgaaactacaagtaaaccatcatgaaaatatccaggacgttggtctgggcaaaaatgtcttgagcgttacctcaccagtacaggcaaccaaagcaaaaatgaataaatgggatcacatcaagttaaaaagcttac

SEQ ID NO: 568968 - DNA, 564 bp, Homo sapiens
tgttaagtgatttgaaatgctaaaaatggcacttcagcattggctgtatgagaattttaatattcctgccagctgagatacagrcaattttatatttaattactaaaataaatgtaatttaagaattttgttacacacctaaagtcagaaaataaagtgctctcttaagtataataaaatgccttgatctaagttggacagattatagcactacattcagcattggaagggagcatcaaagtgatctagcccaatctcttggagttggaaccccttggacataccaggaggtgtccactaagtcactgctggatggcagctgggctgcacaattacttgtacataaatttgtcaactgtcctcaaacatcacccaagaaccttattcttattcagtctgcaaagtgacctgatttggtatcttagattgtcatggacagcagctgcgtccaattctaacattaacctaacttaggacaaaaacagaaatcttggaaagttctattgcattgggaaagcttactatagaaaacacaaatctggtctcccaagtccacaagagaat

SEQ ID NO: 568969 - DNA, 614 bp, Homo sapiens
gacacagtgtccatcagtaggacaatgaagaaacaaactgtggtatatccatacaataaaatactacttgtcrgtaaaaatgaatgaactaatgatatactgaataatatgaatgaatctcagaaacattatgttgagcaaaagaagccagattcaaaagattacatactatatgattccgttgatatgaaatttgagatatgctaaactaatctatggtgagattttgaaatcaaagcagtagctgccttggggttacaagggattgacctgaagtgcatgtgaggaaccttgatggggagataaaaatttcctatatctttatttggttgttggttacatagctgtttatatttacttaaggtctggaatttcactgtatgaattacctaaataaaacagtttaaaaatttcattgattcaaagatttcagatttcttataaatcacaattgtttagagcaaagattttaaaggttattaattgctcagtttctaaaattggcctttatcttaatatgaagtttccctgtcaaatttaatttttgtggttttgtttcaaatatgagtggggttcttcattggagaatattttcaaccaaattgggactttga

SEQ ID NO: 568970 - DNA, 479 bp, Homo sapiens
accaaacactgcatgttctcactcataagtgggagctgaaaaatgagagcacatggacgcagggaggggaacaacacacactgggacctgtcaggggggtggtggaagggagtgcatcaggacaaatagctaatgcatgtgggtgggttgataggtgcaggaaatcatcatggcacatatttacctatgtaacaaagctgcactttctgcaaatgtatcccagagcttaaaattaaattaaatttttttaaaaaggtgatgtgcctcctcaacacttctctttccacagtggtgttttagctcgtgcatcacargatgactaaactcctgagtcaccagatagaggacaacccttgctcacctgaattggaatttgaatgacaggaaataaacttttgatctgatatatcactgagatttggagtctattattactgcagtatgttcttcattctatatttattttggtcataaaatgt

SEQ ID NO: 568971 - DNA, 479 bp, Homo sapiens
accaaacactgcatgttctcactcataagtgggagctgaaaaatgagagcacatggacgcagggaggggaacaacacacactgggacctgtcaggggggtggtggaagggagtgcatcaggacaaatagctaatgcatgtgggtgggttgataggtgcaggaaatcatcatggcacatatttacctatgtaacaaagctgcactttctgcaaatgtatcccagagcttaaaattaaattaaatttttttaaaaaggtgatgtgcctcctcaacacttctctttccacagtggtgttttagctcgtgcatcacaggatgactaaactcctgagtcaccagatagaggacaacccttgctcacctgaattggaatttgaatgacaggaaataaacttttgatctgatatatcactgagatttggagtctattattactgcagtatgttcwtcattctatatttattttggtcataaaatgt

SEQ ID NO: 568972 - DNA, 671 bp, Homo sapiens
gagtgagaacatgcagtgtttggttttttgtccttgcgatagtttgctgagaatgatggcttccagcttcatccatgtccctacaaaggacatgaactcatcattttttatggctgcatagtattccatggtgtatatgtgccacattttcttaatccagtctatcattgttggacatttgggttggttccaagtctttgctattgtgaatagtgccgcaataaacatacgtgtgcatgtgtctttatagtggcatgatttgtaatcctttgggtatatacccagtaatgggatgactgggtcaaatggtatttctagttctagatccctgaggaatcgccacactgacttccacaatggctgaactagtttacaatcccatcaacagtgtaaaagtgttcctatttctccacatcctctccagcacctgttgtttcctgactttttaatgatcgccattctaactggtgtgagacagtatctcattgtggttttgatttgcatttctctgatggccagagatgatgagcattttttcatgtgtcttttggctgcataaatgtcttcttttgagaagtgtctgttcatrtcctttgcccactttttgatggggttgtttgtatttttcttgtaaatttgtttgagttcattgtagattctggatattagcc

SEQ ID NO: 568973 - DNA, 590 bp, Homo sapiens
taaatcttattcattgcaggcaacacattttactttctcatagaaaatctatgctcaaggaaagtacatacagtagttacagaaagcatatgcaaaaacaatgttttgtttccttttatgcttttctatattttctataataagcaaatattaattctagaatcaggaaagattgcattaaaataaagcaaaagagttattttaaaaatcttgtttcaatgattcatgtcattctttatttaaaacacagctcaaagagaaggtgcaatgataatcatgctgaaaaactgaagggaagctctctgcttaagtatgaataaggtaacatacaattttttgccaaaactagaacaattcttgagagtaaaagaaagcactgtcaattatatmtgacaacagggttaagttagaactgttttaaaaatacttgaagtttatgtaggtgccctagggagccttctccttaaagatagggtttgcatgaatacaaagaagtcaactcttatctagtccatgcacactaacaaacgttgttgccaccttcttactttcccttctaggttaagtataccattgtttgtcattattgt

SEQ ID NO: 568974 - DNA, 590 bp, Homo sapiens
taaatcttattcattgcaggcaacacattttactttctcatagaaaatctatgctcaaggaaagtacatacagtagttacagaaagcatatgcaaaaacaatgttttgtttccttttatgcttttctatattttctataataagcaaatattaattctagaatcaggaaagattgcattaaaataaagcaaaagagttattttaaaaatcttgtttcaatgattcatgtcattctttatttaaaacacagctcaaagagaaggtgcaatgataatcatgctgaaaaactgaagggaagctctctgcttaagtatgaataaggtaacatacaattttttgccaaaactagaacaattcttgagagtaaaagaaagcactgtcaattatatatgacaacaggrttaagttagaactgttttaaaaatacttgaagtttatgtaggtgccctagggagccttctccttaaagatagggtttgcatgaatacaaagaagtcaactcttatctagtccatgcacactaacaaacgttgttgccaccttcttactttcccttctaggttaagtataccattgtttgtcattattgt

SEQ ID NO: 568975 - DNA, 509 bp, Homo sapiens
atatactcagtaatgggattgctgggttgaatggtagttctacttttagctctttgaggaatcaccacacagctttccacagtggttgaactaatttacactcccaccaacagtgcctaagtgtttacttttctctgcaaactcactagcatttgttattttttattttttttaataatagccatgccaactggtgtgagatggtatgtaattgtggttttgatttgcatttctctaatgatcattgatgttgagcttttttccataggcaatcctatccttctagaaatgggcaaagattycataagaaagatactaaaagcaatcacaataagaacaaaaactgacaagtgggatctacttaaatgtgagagctcttgcacagcaaaatactatcaacagagtaaagacagctgacagaatggaagaaaatatttataaactatgcatctgacaaaggtctaatatccagcatctataaggaatttaaatttacaagaaacaaacag

SEQ ID NO: 568976 - DNA, 543 bp, Homo sapiens
atagctgcattcttttgagcttctcattagccttaggagatggtgcaggaagaaggtaatttttccctgaagcccagccatctctggccaggctcccctccaaaactgcaccatctgaagttagccatccttatccatagtctccaatgttcagttacctctctgctcactgctcagtcacttttatccccgacattcagcagtttgtatccctgaggctcagctgcttgtgttgctgtagctttcttctgccagctgggctggtttttatgggcacaggatagggggcagggtgggtcaaaaaggcaatcatttggaaaaatggggtcagttgctttcacttaaggcctaggtcccaggcttgagcgtggagtgtagccaggagcccagcccttctgtatcagggtcagctgttttcacttagggctgaggttccaggtttgagggtggagtttggcaaggagccctgccttctgtatcaatggagggaggaaaacttgccttccttgttggaaacaagwaaaactcaaaaaacaaacaaac

SEQ ID NO: 568977 - DNA, 509 bp, Homo sapiens
ggctggggttcattggttttccatggacagacacttcagatttgaataatgttttctaagattcaattacatttacctaattggtttaagcacacaagttataaatgctataccttgtatactcatatcttatcattatgcagcaggttcttaattagtctatagaagtttgctgaatgagggctatctcaccagctatagtcaaattgagtgacattattatattttatttttctcccctaaattcaaatacactctgtacctataaaggtcaataaattgcgtagaatttttatactgtcagttttaggcatgggaaaagcagtgtagagtagatccacagtcagattcccctaatactttttgacgtttgccattgaagattgtagtttctctaaggttaagatgttaaaaagaataagctcctccaaatgaggaaataygctcaattattgtgagttttgctgaaatacaagtgaaaatttcagctggcactgtctttacacaat

SEQ ID NO: 568978 - DNA, 509 bp, Homo sapiens
ggctggggttcattggttttccatggacagacacttcagatttgaataatgttttctaagattcaattacatttacctaattggtttaagcacacaagttataaatgctataccttgtatactcatatcttatcattatgcagcaggttcttaattagtctatagaagtttgctgaatgagggctatctcaccagctatagtcaaattgagtgacattattatattttatttttctcccctaaattcaaatacactctgtacctataaaggtcaataaattgcgtagaatttttatactgtcagttttaggcatgggaaaagcagtgtagagtagatccacagtcagattcccctaatactttttgacgtttgccattgaagattgtagtttctctaaggttaagatgttaaaaagaataagctcctccaaatgaggaaatacgctcaattattgtgakttttgctgaaatacaagtgaaaatttcagctggcactgtctttacacaat

SEQ ID NO: 568979 - DNA, 545 bp, Homo sapiens
ttgattccaaagtgtagagtttagttcttcctgtgttggactgtcatggattttttccaattatttttttctgaagtatggcaagtccatgcacaggtctccactaaccaatgtcatragcagtccagtagctgtcatttttctttacaattccctactgctaaacctggtaatccaggaacccaatcaaagacctttggggtgaggcttcagattgtcaatctactgagatcacctccaaaggtgcttcgtgccacactcacacacccttgtcaaagacacccactgatggctgcaatccctctatgcccagctgaccttggggacacattgcttttggttcccagtgcccacatgcaactctgagctgtttccttccaaccaccagcaccctctagagtgctgggaacatatggctcaagttttaccactcttggatctgcccaccacccccctttccttgtcctgacttatggggaattccactcctttctgccttgaacacttctttttcaacacttagaagaaaaaaaaaaaacatgtct

SEQ ID NO: 568980 - DNA, 525 bp, Homo sapiens
tgtttttttgtttgtttgttttggtttttgttggttttttttgagacggagtctttctctgttgctcagcctggagtgcagtagcgcgatcttggctcactgcaacctccacctcccgggttcaagcaattctcctgcctcagcctcccaagtagctgggattacaggtacacaccaccgtgcccagctaattttttggtattttwttttttttagcagagacggggtttcaccatgttggccaggcaggttttgaactcctgactttgtgatcctcctgcctcggcctcccaaaaaagtgttcttgttttggcactgacgcaggcacagtgaatcagattcttcttaattgtgttttttgttttttgtttttcccctcaggtagtgtaggaggagcagtaaccttaggaagcaatcgagattatggaaagattgtaaactttggagtcagacccgtccttactcattcacttactagttgcatgaccttaagcgagtcatttaactgttctttttttttttttt

SEQ ID NO: 568981 - DNA, 549 bp, Homo sapiens
taatcatattaacaactactatgattgggggggttacatatgacagacatgttacatatacttgtttagatttcacaatagccctgccaagaaagtattattaacttgaggcccagagaggtaaggtaactcccctaaggccacacagctagtgaggcaaaatgtgatttgcccaatgaagtgtatgttgttctcaccatgctccaaggttatctacctcattataatccattgtccattcaagaccccaggctctacttttttgtccacaatcacagagctgcattaaggtggggcatttacaaaatactttcatagacattaaagagaaactcttcgaacaggttttgcctgatttccatgaagggatttggattatttagagttccaaattttccaaaggactaaagagtacattactaatagaataaatttaagggaaaaaaatatttactttataaccatactttacaatactaaataatccagttgcaaaagaacggaatcggtaaaggatggttctattcrttagccatagggaagtataga

SEQ ID NO: 568982 - DNA, 426 bp, Homo sapiens
ttagccgagcatggtggtgcacacctgcagtcccaccaaatcctagctactcaggaggcagaggtggaaggatcgcttgagcccaggaggcagaggttgcagcgagccaagatcgtgttcattccactccagcctggacgacagagcaagacgctgtctcaaaaaaaagaagataggtagcataaagttattaaaaggatgttgactttaaacctcacttaaaaacatggtttacataaagaatatgtataaaggttcattcagggatttaattttgtacttgtttatataaacattgactagtcatgtttgctagaattagggagcttggcagyatcaacatttttacatattgattctttccttttctttccttttttttttttttttttttttgggacggagtctgttgcccaggctggagtg

SEQ ID NO: 568983 - DNA, 575 bp, Homo sapiens
gcacttattttaaaaaactgaaatctaaaatctctgtctcctaagagacttaagaaaagcttaataaattaacttaaatattcttaagaaaatattccccaaagagcaaaataattacaatgtcaggacagagcctaaattctatctagtttaggtttatgcctctgayggtgactctaaatggatttgtcagggttgtcctttgatgtccccctcaaaacaacagtaccataacatactagattctagttgcccttaaggactatatggaactatcatcaatggatttatctaaacccattttgaagctgtgtggatattcattctttttgataagttcctgtgtccccgcccaaatctcaacttgaattgtatctcacagaattcccacgtgttgtgggagggacccaggggggaggtaattgagtcatgggggctggtctttcccatgctattcttgtgatagtgaataagtctcacgagatctaatgggtttatcaggggtttccgcttttgcttcctcctcatttttctcttgccgccaccatgtaagaagtgccttttgcctcctgcca

SEQ ID NO: 568984 - DNA, 607 bp, Homo sapiens
catctcattttttttgtcatttaraaattggtattttgttaaacgaaatctccgtattttacttaaaccttgcttgtctaattttcacaagtatctaaaaatgcatattgctgttcttggcagagcccaattccatctttatttatcttaagagtaacaattctccagacacaaaatgttttgttctttaaaaaacaacccagataacactgactgggtgcttaggagtggggcgggttttctactgagggcttcaaaatcatgactcataataatcctaggataggcaaaagtgtaattaccacattacagataaggaaactgaggctcaggaaggggaagtggtgtgcttaaggctctcatggcagaactgcaggctttagagagccgctgcccaagggtggcaacacaccgccgctgtcagcttaccgcctagctcccagactgaggccgtcaccaggagccacctccttcacacgccactgcccctggtggtgtgtaaacagtcggccactttcacaccctcatgcacacactcagcaaagattgctcttcaaacttaggctctcccttcctgttttgtgcgcctgcttctaattacacagtt

SEQ ID NO: 568985 - DNA, 564 bp, Homo sapiens
atcaaaaagtgggctaaggaaatgaatagacaattctcagaagaagatttacaaatggccagcaaacatatgaaaaaatgctcaacatgactaatgatcagggaaatgcaaatcaaagccacaatgcaataccaccttactcctgcaagaatggccataataaaaaaaaatactagatgttggcatggatgtggtgaaaagggaacacttttacactgttggtggaaatgtaaactagtacaaccactgtggaaaacagtgtggagactccttgaagagctaaaagktgatctatcatttgatccagcaatcccactcctgggtatccacccagaggaaaataactcattatacaaaaaagatacttgcacacacatgtttatagcagcacaattcgcattgcaaaaatatggaaccagcccaaatgcccatcagtcaaccagtgaataaagaaaatgtggtatatacatacaccatggaatactactcatccataaaaaggaatcaaatcatggcatttgcagcaacatgggtaggattggagaccattattctaagtgaagt

SEQ ID NO: 568986 - DNA, 627 bp, Homo sapiens
cccatcccaagaaagtgtcacaagatcagtgtctggaatgcccagatgagagccccaaactgactggcccctgggtcakaatcaatgtgcctactatgaacaaaagggctgttgacaatgagactgtcctaactgtccctactgacagagagaaaaaactctccatcaattctagagctaaccttcttccactagccccaatgagctgctttgctcaagtaagtttactagggatcttagatcctttacctgacaaacagcttcctgcagtggcagactagaggctgcctgaacatttttcttcagtgttccactgctgggtgagctctccagcagctcagagactcaggtctccccttcagtaacacagtttgccccctcctttccttattggctgctacaggatccccttccctgcctcttcctgtcttccatgcctattggggcaaataaagtttggtcaggtagacaggtcccagttttgtaaataacttggatcctgttatcctgcataggccctttgtttgaagtgtttgtgtgtatagacaggtattgtggcatgtcctgtgtctagcatgctatcagattggcttataaataaaagagcaagaataaattaaacatgta

SEQ ID NO: 568987 - DNA, 465 bp, Homo sapiens
tgtttcaggggtgccagtctaggatatgagatggatctcagagggagaaagctgaatatttatagcaaaagcaatgctaaatgaattataggcytagtttaaagaaagaggcaaaactatagatctaaatggcagctgaattctaggcaaaattaattaactataaatgaacacagaaaacttgaatgtatttttctttcaagaataaaaaatacattaacaagccaaaaaggttttctgtaaagaaacggatatcaggtttgtctcagaattttattgtatgaattttagtgtatagaaatcaaaatgaaatacctaacccatgtaagttttattatttacatcctgcaatagtgtattctagttagtactctgctggtcagcaaataatgctaatagaaaaatcaagaatggtgaagatgaagttaaaaaaactgatgacaagtaggaataaagctcaaaaga

SEQ ID NO: 568988 - DNA, 630 bp, Homo sapiens
tttaaatttatcaactgttttttccttgccaactataggtttttctataatgaaaaacagcatctactcactgtactcacaaaaattaaattgctttatctataatatcaaagaacragaatccgtcactgaaacaagaatgttttttaatttgtattttccttattactaagtcttggtaaggtgttcatggtgcgcagcaaataaaaactagaaatggtatagattcttaagggaaattcctgttccagctctgaagagaatgcatagaagggcatgcatacattcaaatatgccaaataattaaatatttcttactcaaacctgggcttctatactttctgagcttatagtgaagaaacatctaccgttacagaaaataaacataggataccagggaatcaactctatcaaccaaaatataagctaccttaaagcagtcaccacctggattaagaaaatgtggtgcatatacaccatggaatactatgcagccataaaaaatgtttgagttcatgtcctttgtagggacatggatgaagctggaaaccatcattctcagcaaactatctcaaggacaaaaaaacaaacaccgcatgttctcactcataggtgggaattgaacaatga

SEQ ID NO: 568989 - DNA, 630 bp, Homo sapiens
tttaaatttatcaactgttttttccttgccaactataggtttttctataatgaaaaacagcatctactcactgtactcacaaaaattaaattgctttatctataatatcaaagaacgagaatccgtcactgaaacaagaatgttttttaatttgtattttccttattactaagtcttggtaaggtgttcatggtgcrcagcaaataaaaactagaaatggtatagattcttaagggaaattcctgttccagctctgaagagaatgcatagaagggcatgcatacattcaaatatgccaaataattaaatatttcttactcaaacctgggcttctatactttctgagcttatagtgaagaaacatctaccgttacagaaaataaacataggataccagggaatcaactctatcaaccaaaatataagctaccttaaagcagtcaccacctggattaagaaaatgtggtgcatatacaccatggaatactatgcagccataaaaaatgtttgagttcatgtcctttgtagggacatggatgaagctggaaaccatcattctcagcaaactatctcaaggacaaaaaaacaaacaccgcatgttctcactcataggtgggaattgaacaatga

SEQ ID NO: 568990 - DNA, 630 bp, Homo sapiens
tttaaatttatcaactgttttttccttgccaactataggtttttctataatgaaaaacagcatctactcactgtactcacaaaaattaaattgctttatctataatatcaaagaacgagaatccgtcactgaaacaagaatgttttttaatttgtattttccttattactaagtcttggtaaggtgttcatggtgcgcagcaaataaaaactagaaatggtatagattcttaagggaaattcctgttccagctctgaagagaatgcatagaagggcatgcatacattcaaatatgccaaataattaaatatttcttactcaaacctgggcttctatactttctgagcttatagtgaagaaacatctaccgttacagaaaataaacataggataccagggaatcaactctatcaaccawaatataagctaccttaaagcagtcaccacctggattaagaaaatgtggtgcatatacaccatggaatactatgcagccataaaaaatgtttgagttcatgtcctttgtagggacatggatgaagctggaaaccatcattctcagcaaactatctcaaggacaaaaaaacaaacaccgcatgttctcactcataggtgggaattgaacaatga

SEQ ID NO: 568991 - DNA, 541 bp, Homo sapiens
cggtggctcacgcctgtaatcccagctttgggagtccaaggcgggaggatcacgaggccaagagttcaagactagcctggccaacatggwgaaaccctgtctctactaaaaatacaaaaaattagccagacgttgtggtgggggcctgtaatcccagctacttgggaggctgaggtaggagaattgcttgaacccaggaggtggggttgcagtgagcagagatagcaccattgcatgccagcctgggcaacagagcaagacgccatctcaaaaaaaaaatagaagaaatgaagggacaaaggaaggaaggaaggcaaacaaaggatggaagaactacaataatcccacgggagataaaccttgtgaataatcattgtgtatccttccaggcttttctttagatggatgtgtgtattatgtatcctattttaaaatcaaagtaggatcatacaattcagactgatttgtagtcccttttcatttttgaagtatattatgaatatatgtattaaatattctcctatgatatggctgcttcatt

SEQ ID NO: 568992 - DNA, 541 bp, Homo sapiens
cggtggctcacgcctgtaatcccagctttgggagtccaaggcgggaggatcacgaggccaagagttcaagactagcctggccaacatggtgaaaccctgtctctactaaaaatacaaaaaattagccagacgttgtggtgggggcctgtaatcccagctacttgggaggctgaggtaggagaattgcttgaacccaggaggtggggttgcagtgagcagagatagcaccattgcatgccagcctgggcaacagagcaagacgccatctcaaaaaaaaaatagaagaaatgaagggacaaaggaaggaaggaaggcaaacaaaggatggaagaactacaataatcccacgggagataaaccttgtgaataatcattgtgtatccttccaggcttttctttagrtggatgtgtgtattatgtatcctattttaaaatcaaagtaggatcatacaattcagactgatttgtagtcccttttcatttttgaagtatattatgaatatatgtattaaatattctcctatgatatggctgcttcatt

SEQ ID NO: 568993 - DNA, 603 bp, Homo sapiens
ccctacattctacaaagacagagactgggtctactttgtttattactgtatccctagcatctggcataatgtgaaatttagaatgagtggatgaatggaagacttcatctagccccaaaaatttaacaatcaatgtggaagaactccatatattaatactaatagttttagacctgatttcttccctgaactcaaaacctttgcttctagcagcctactttgttatagctacatgaatatcttccagaccctcaatgactcaataatatagcaaattatcctttcctaacttctaaagcctctccccttcctccctgtgtttccagttttcttttcttttctttctttctttcttcttgagakggagtcttgctttgtcacccaggctggagtgcagtggcatgatctcaactcactgcaacctctgcctgccaggttcaagcgattcttgtgtgtcagcctcctgagtagctgggaccacaggcattcaccaccacgccaggctaatttttgtatttttcgtagagacagggtttcaccatgtcagccaggctggtcttgagctcctgatctcaagtaatctgcctgccttggcctcccaaa

SEQ ID NO: 568994 - DNA, 474 bp, Homo sapiens
aaccaaaaaaaaaaatgagagagagagggactaacaaagggtagtttttgagtacaagggaatataattaggacatcagaaatccatatgtcagaatatgaatttacacttttacctcacaccacatagaaaaattaacctaaaatggatcatagatttaaatataaaagcaaaattaaaaagttagaaggaaacatgacagtacatatttgtgactttgtattaggcaatgatttcttagatatgacttttaaagccaaagaggtaaacaaaaatgtaataaattgtttatcaaaattcaaaatgttcatgcttcaaaaaagaccactaagaagatgaaaagacaaaccccaggctgaaataaaatatttgtaaatcatatttccagaatatgtgactcttacaacttaataaataaacgctcaaaagactacataaayattttaccaaataagtacacatatatctaataaa

SEQ ID NO: 568995 - DNA, 447 bp, Homo sapiens
tctgttttaaattctttgagaaatcttcaaactgctttccaaagtggctgaactaatttacattcccaacaacagtatataagtatttccttttccccatttttcctgcagcctagccagcatctgtttcttttctttcttgwtttttttttttttttttgactttttagtaatagccattctgtgaccagctggatatgaagacaagacccattggtgcactgtattcaagagacacatcatatttgcaaagatgcacataaactcaaaataaagggatggaggaaaaattaccaagcaaatggaaagcaggaaaaaagcaggggttgcaatcctagtttctgacaaaacagactttaaacaaacaaaggtcaaaaaagacaagaagggcattacataatgtgaaagggttcaattcaacaagaagagctaactatcctaaatata

SEQ ID NO: 568996 - DNA, 516 bp, Homo sapiens
atcgattttcccagcttctagaggatgcttgcattcctttgctcctggcctcatttcagtagttacatcattctgacctttgcctccactgtcacacccccttgtctgactcttactctcctgcttcctataaggactcctgcaattattttgagctcacccagattatcgagagtaatcacaagagccttaaattagctacatctgcaaactccctgttgtcatgtarggtaaattattcacaggctccacagggtttgggagccattatctgcctaaccaaaagaggcatgtaggaagggttccagatatttttttaaagagttgaataaaagatttttagttttatgcatatatataaatttcctgttttataaattggttgtataatgtaaatttgaaatttgggtttttcctggctcattttctcatttctttatattgctatgcacttatttgttgttttttgtttttgttaatcttccctagaacctggcatttatttatttgtttgcg

SEQ ID NO: 568997 - DNA, 381 bp, Homo sapiens
ttttttgagatggattcttgctttgtygcacaggctggagtgcagtggcctgatctaggttcactgcaacctctgcctcccaggttcaagtgattctcctgccttagcctcccgagtagctgggattacaggcgctggccacctcgcccccctaaattttgtatttttagtagagacagggtttcaccaggttggccaggctggtctcgaattcctggccacatcttactcttaatcaaacatcagtttctgcatgacatttgtaactgttgaccaaatatcacttatctttctttgtttagattttgtcccaaaatgtagaattcctgcaagctagtcttgactctctatgttccacaacaccaaattaatcagcctata

SEQ ID NO: 568998 - DNA, 381 bp, Homo sapiens
ttttttgagatggattcttgctttgtcgcacaggctggagtgcagtggcctgatctaggttcactgcaacctctgcctcccaggttcaagtgattctcctgccttagcctcccgagtagctgggattacaggcgctggccacctcgcccccytaaattttgtatttttagtagagacagggtttcaccaggttggccaggctggtctcgaattcctggccacatcttactcttaatcaaacatcagtttctgcatgacatttgtaactgttgaccaaatatcacttatctttctttgtttagattttgtcccaaaatgtagaattcctgcaagctagtcttgactctctatgttccacaacaccaaattaatcagcctata

SEQ ID NO: 568999 - DNA, 381 bp, Homo sapiens
ttttttgagatggattcttgctttgtcgcacaggctggagtgcagtggcctgatctaggttcactgcaacctctgcctcccaggttcaagtgattctcctgccttagcctcccgagtagctgggattacaggcgctggccacctcgcccccctaaattttgtatttttagtaragacagggtttcaccaggttggccaggctggtctcgaattcctggccacatcttactcttaatcaaacatcagtttctgcatgacatttgtaactgttgaccaaatatcacttatctttctttgtttagattttgtcccaaaatgtagaattcctgcaagctagtcttgactctctatgttccacaacaccaaattaatcagcctata

SEQ ID NO: 569000 - DNA, 539 bp, Homo sapiens
tctctgtcgcccaggctgactgcagtgatgcaatcatggctcattgcagcctcgacctcctgggctccagcagtccttcaacctcagcctcctgagtagctgggaccaaaggtgtgcaccaccatgcccagctaatttttaaattttttgtagagatggggtctccctgtgttgcccagtctgatcttgaattcctgggctcaagtgatcctcccacctcagcctctcaaagtgttgggattacaggcatgagccacctcacctggcccaaagaggaagtcttaagggaaatcaaaacatacattgaacagaatgaaaatatatacacaacatatcaaaatttgtgagaccaagctatacagtgtcaagagggaaattacattagaaaaaaggaaaaacctcaatgtacaatctcaggtcccacctgcagtacytagaagaggaagagcaaagcaagtagaaggaatgaaataatgaagagcagaagtcaatggcgcttagcccagtagaacaatagggaaaagcagtgaaacaaagag

SEQ ID NO: 569001 - DNA, 567 bp, Homo sapiens
  misc_feature 542: n = A,T,C or G
ctccctcaaatgagccacagaaaatactaagaaatgtaatactagttattttttatgccttaggagggtcctttatataaattgacataagacacagaacacttcaatagatcaaattggttattaaacaataagaagatttccttataattaaatttaaaatttaaataatcatctattctgtgwaccaagaatgtaatacactcactagaattggctttccttatgggtgacttaagtgatcattcataaagcgatatctatgaagactcaccaatacccaaatactttgcagtcttacccttttccttgattttgggttgattttaagcctagaaggattgtctcaatgaataaagatgcccttttcacaggcaatcagcatatgaagtgttacctcattcacttcggaaggcacaagaggtcaaagtgataggggaaaggagaaataagacaagaaggcagtaccatgctgacatatttaacttcattcctgaccttgtgtttgggcaattgtaaacttagatgaggtcaagtacttnttcacatattgaataaatgatgaac

SEQ ID NO: 569002 - DNA, 570 bp, Homo sapiens
tcaaacaaccacatcaagtttgtggctaatccaaaataataaataaaattataagcctctcctatctatattcttaacattttatatattttatgaagagatttaagtgttctactttctagagcacttttattgcctaaaaaaatctgcaagtaaagaaatattcttggtggttagggagaccttgcctggtattaaaaattagcatctaaattagccaccaagtggaaaatccataggcagataattgaggattaacagtatttcaaaataataaaggagaaattctaacatcttgggcctttaatgaatcaatttgcaatcacttttgtgctaagatttctatagcacaaaacaaagtaatgactttctccctcatacaaattgatagcacatgtatatcctttcttggtgccaattctgagaaatgcaataagtaaactggtagtattaggttagtgcaaaagtaattgcagttttgccattacttttttaattaattaattaattaataataattattattattttttgagaygagtctttctctgttgcccaggctggagcgca

SEQ ID NO: 569003 - DNA, 596 bp, Homo sapiens
attgctttcttcctgcttattaaggaaagaagagtttcacatgcagtgtgatcttatctcccaattgaagatataaatgatggtctcctgaaagtgctcagataccccatgtggtactttttcacctaagttcatgattgtcctaggagacatgcatttacattcttttagcttgctctgaacctcatgytttcctttagtgcttttcttgaaggatttctttggcattgtagtttcaaaagttgtattttgtttccaacattgtgtggcttatctctgtgatatttggggggcttttgtatagctatgactcttcttaaaaattgaggtggggcgcatgttctcactcaggtgggaattgaacaatgagaatacttggacacagggtggggaacatcacacaccagggcctgtcgtggggctgggagagtggggagggatagcattaggagatatgcctaatataaatgacgagttaacgggtgcagcacaccaacatggcacatgtatacatatgtaacaaacctgcacgttgtgcacaagtaccctagaacttaaagtataataaaataaataaataaataaataaataaata

SEQ ID NO: 569004 - DNA, 604 bp, Homo sapiens
gaactgtgagtcaattcaacctctttcccttataaattacccagtcttggatatttctttatagcagtgtgaaaaattgactaatacaagcctgctggtattactcaatacaagcagcaggggtggagccttcatggagaccctctactagggcagtgcagaggggtaaatgtggcattggagccctcacatagagtccccactgggacactgcttagtggagctgtgagaaggggccaccatcctccagaccccagaatcagatccatcarcaacttgcaccatgcacctggaaaagccacaggcattcaatgctggtcagtgaaagcagccacagggactgtaccctgcagatccacaggggcagagctactgaacgccttgggagcccaccccttgcatcaatgtagcctggatgtgagacatggagtcaaaggaaatcattttggagctttaagatttagtgactgccctgctggatttcagacttgcatggggcctgtagcccctttgttttggccaatttctcccttttggaatgggagcatttacccaatgcttgtctccccaggaattaactaacttgcttttgattttataggcc

SEQ ID NO: 569005 - DNA, 604 bp, Homo sapiens
gaactgtgagtcaattcaacctctttcccttataaattacccagtcttggatatttctttatagcagtgtgaaaaattgactaatacaagcctgctggtattactcaatacaagcagcaggggtggagccttcatggagaccctctactagggcagtgcagaggggtaaatgtggcattggagccctcacatagagtccccactgggacactgcttagtggagctgtgagaaggggccaccatcctccagaccccagaatcagatccatcaacaacttgcaccatgcacctggaaaagccacaggcattcaatgctggtcagtgaaagcagccacagggactgtaccctgcagatccacaggggcagagctactsaacgccttgggagcccaccccttgcatcaatgtagcctggatgtgagacatggagtcaaaggaaatcattttggagctttaagatttagtgactgccctgctggatttcagacttgcatggggcctgtagcccctttgttttggccaatttctcccttttggaatgggagcatttacccaatgcttgtctccccaggaattaactaacttgcttttgattttataggcc

SEQ ID NO: 569006 - DNA, 571 bp, Homo sapiens
gcaacaacaaatctgttttttgtctctgtagatcttcctattmtattttcatctaaatagaatcatacaataggtggccttttgtgcctggcttctttcagttggcataatgctatcaaggttcatatgcgtattggtactttatttctttttataactgtataacattcaattgcatggatataacattttgtttatccaataatattttgttgacatttgagttgtgttcagcctttggctattttaaatactgctgttaaaatacttgtgtataatttgtgtttgaacatctctttccaatactctgggggtatacctgggaataaatttctgggtcatatggcaattctatgtttaatatatttagaagccatcaacctattttccaaagtggccagttctagccacagagtatctcactgtggttttgatttgtagttgcctgatgagtgatgctgttgagtatctttttatgggattattgaccgttcgtgtatcttcttgggatacacaactattcctatcatttatcagttttgagttgggatttttgttactgagttaaaac

SEQ ID NO: 569007 - DNA, 633 bp, Homo sapiens
tgtagttgcctgatgagtgatgctgttgagtatctttttatgggattattgaccgttcgtgtatcttcttgggatacacaactattcctatcatttatcagttttgagttgggatttttgttactgagttaaaacaatttttctatattcaagatacatatataagcagacctatagatatgtgtttctcaaatattttctcacaatttttgagctgccttttgacttgattggttgtcttttgaaacaccaatctctttaatttttaagaaattttaactatctaatttttattttgttgctcatgtttttggtgttacagctatttctttgctagatccaaaatcctgaagattttcccatatgctttattctagctcttgcatgtgtgtctttaattcayttgagttaatatttttgtatgctttggggtaagggtttgaatttattattttgcaagtggcgatccacgtgtacgttgttgacccagtttgttcaaagactgtctcttcctcattgaattgcgcatggcaccactgtaagaatccattgactgtagatacatacttttatatatggactctcaattctcttccatcaatctatataaatttccttcatcagtattgtgtt

SEQ ID NO: 569008 - DNA, 531 bp, Homo sapiens
tggaagcagagtaacttatgataaaaacatgagcttgaaaatcctgcagagagggctttaaatcctgggtatgatattctgcttgtgtaggcaatagtgataaaaacacaacaaagagaggtaaagagcactttcctttgatataagtaaagggcacgtcttattgcacacacacacacacacacacacacacacacatatatatatgtattgaactgasattcaacatgtttctctcattgaaacagcaagctctccaggccttcatgttcccagtgaggtaggtaaccttctgatgattatactcaccctccctcattgcaaacctcccgttgttattgtcttggctctggattccctcaaaaatagactatgaaacaaatatctggggtcagatactttaatcagaaattgagtgagaaaacacagaaatggagaaaatgaaacagaacatgaagccagtgtgaatgagtagttactgctatgtgctcagtaatgatggaggtatggagattgtctcaaactaacttt

SEQ ID NO: 569009 - DNA, 531 bp, Homo sapiens
tggaagcagagtaacttatgataaaaacatgagcttgaaaatcctgcagagagggctttaaatcctgggtatgatattctgcttgtgtaggcaatagtgataaaaacacaacaaagagaggtaaagagcactttcctttgatataagtaaagggcacgtcttattgcacacacacacacacacacacacacacacacatatatatatgtattgaactgagattcaacatgtttctctcaytgaaacagcaagctctccaggccttcatgttcccagtgaggtaggtaaccttctgatgattatactcaccctccctcattgcaaacctcccgttgttattgtcttggctctggattccctcaaaaatagactatgaaacaaatatctggggtcagatactttaatcagaaattgagtgagaaaacacagaaatggagaaaatgaaacagaacatgaagccagtgtgaatgagtagttactgctatgtgctcagtaatgatggaggtatggagattgtctcaaactaacttt

SEQ ID NO: 569010 - DNA, 531 bp, Homo sapiens
tggaagcagagtaacttatgataaaaacatgagcttgaaaatcctgcagagagggctttaaatcctgggtatgatattctgcttgtgtaggcaatagtgataaaaacacaacaaagagaggtaaagagcactttcctttgatataagtaaagggcacgtcttattgcacacacacacacacacacacacacacacacatatatatatgtattgaactgagattcaacatgtttctctcattgaaacagcaagctctccaggccttcatgttcccagtgaggtaggtaaccttctgatgattatactcaccctccctcattgcaaasctcccgttgttattgtcttggctctggattccctcaaaaatagactatgaaacaaatatctggggtcagatactttaatcagaaattgagtgagaaaacacagaaatggagaaaatgaaacagaacatgaagccagtgtgaatgagtagttactgctatgtgctcagtaatgatggaggtatggagattgtctcaaactaacttt

SEQ ID NO: 569011 - DNA, 531 bp, Homo sapiens
tggaagcagagtaacttatgataaaaacatgagcttgaaaatcctgcagagagggctttaaatcctgggtatgatattctgcttgtgtaggcaatagtgataaaaacacaacaaagagaggtaaagagcactttcctttgatataagtaaagggcacgtcttattgcacacacacacacacacacacacacacacacatatatatatgtattgaactgagattcaacatgtttctctcattgaaacagcaagctctccaggccttcatgttcccagtgaggtaggtaaccttctgatgattatactcaccctccctcattgcaaacctcccrttgttattgtcttggctctggattccctcaaaaatagactatgaaacaaatatctggggtcagatactttaatcagaaattgagtgagaaaacacagaaatggagaaaatgaaacagaacatgaagccagtgtgaatgagtagttactgctatgtgctcagtaatgatggaggtatggagattgtctcaaactaacttt

SEQ ID NO: 569012 - DNA, 345 bp, Homo sapiens
tgacaagtaaagctggaataatcaataaattcctaaagacaaagtggggctggtgagattgggagaccgctgacagctgcagaagttgggaaagatccatcatcttgaaaactttttccccacaaacccactgcgatctctcaagcaattggtaaggaatccaagagagtctgtatatgacacagatcagggagagcagaacacttgggaggtgaccaggtcttgggggccgagcccttatgaatgggattagtgcctttataaaagaagctcaatggagttcttgtgtgccttccactatgtgargacatagaaagaaggcaccatctatgaaccatgaaatgg

SEQ ID NO: 569013 - DNA, 472 bp, Homo sapiens
cttgggggccgagcccttatgaatgggattagtgcctttataaaagaagctcaatggagttcttgtgtgccttccactatgtgaggacatagaaagaaggcaccatctatgaaccatgaaatgggctctcatcaacactgaatttgtgagcatcttgacctgagatcttacagcctcaagaagtgtgaaaaaagaaatatctgttgttttttagtyacccggtttattttattttgtcataagagtccaaatagaccaagatattccacttaatatgtaggggaaggcaacaaaaactgccacacttagaatactcctgatgctgggagtatgaaaacaggaaaaacaaaacaaaactgctcttgaaggtgaaggaggaatatcactgagctcaccaacacagccagggaaagaacagaagtgtgagaaggttacattcctgagaccctgagaaaaagtaccagcataagac

SEQ ID NO: 569014 - DNA, 472 bp, Homo sapiens
cttgggggccgagcccttatgaatgggattagtgcctttataaaagaagctcaatggagttcttgtgtgccttccactatgtgaggacatagaaagaaggcaccatctatgaaccatgaaatgggctctcatcaacactgaatttgtgagcatcttgacctgagatcttacagcctcaagaagtgtgaaaaaagaaatatctgttgttttttagttacccggtttatkttattttgtcataagagtccaaatagaccaagatattccacttaatatgtaggggaaggcaacaaaaactgccacacttagaatactcctgatgctgggagtatgaaaacaggaaaaacaaaacaaaactgctcttgaaggtgaaggaggaatatcactgagctcaccaacacagccagggaaagaacagaagtgtgagaaggttacattcctgagaccctgagaaaaagtaccagcataagac

SEQ ID NO: 569015 - DNA, 472 bp, Homo sapiens
cttgggggccgagcccttatgaatgggattagtgcctttataaaagaagctcaatggagttcttgtgtgccttccactatgtgaggacatagaaagaaggcaccatctatgaaccatgaaatgggctctcatcaacactgaatttgtgagcatcttgacctgagatcttacagcctcaagaagtgtgaaaaaagaaatatctgttgttttttagttacccggtttattttattttgtyataagagtccaaatagaccaagatattccacttaatatgtaggggaaggcaacaaaaactgccacacttagaatactcctgatgctgggagtatgaaaacaggaaaaacaaaacaaaactgctcttgaaggtgaaggaggaatatcactgagctcaccaacacagccagggaaagaacagaagtgtgagaaggttacattcctgagaccctgagaaaaagtaccagcataagac

SEQ ID NO: 569016 - DNA, 511 bp, Homo sapiens
tattttaaaaaaaattaagagagggagacagaaaaataaagaactctttaatctgcaggtaaacagattatgactgctgtaggtcaaagtatggcctcccaaaaattttcatgtcctaattcccagagtataacctacaaatatgttaggtttcacgacagtgtgaattagatttcaagtgaaattaaggttgcggaaaaatgatagagagattgacttaaatgggtgggatcaatgaaatcacaaacttcattataagtgaaagaagaaggcagaagaaaggcaaccttggaggtggtggcatgagaaattactcaacatcactgacttttaagatacaagaatgaagacccagcacggtggctcackcccaatcccagtactttgggaggttggggttggtttatcatgaggtcaggagatcgagaccatcctggctaacatggtgaaaccccatctctactaaaaatacaaaaaattaactgggcgtggtggcaagtgcctgtagtcc

SEQ ID NO: 569017 - DNA, 511 bp, Homo sapiens
tattttaaaaaaaattaagagagggagacagaaaaataaagaactctttaatctgcaggtaaacagattatgactgctgtaggtcaaagtatggcctcccaaaaattttcatgtcctaattcccagagtataacctacaaatatgttaggtttcacgacagtgtgaattagatttcaagtgaaattaaggttgcggaaaaatgatagagagattgacttaaatgggtgggatcaatgaaatcacaaacttcattataagtgaaagaagaaggcagaagaaaggcaaccttggaggtggtggcatgagaaattactcaacatcactgacttttaagatacaagaatgaagacccagcacggtggctcacgccyaatcccagtactttgggaggttggggttggtttatcatgaggtcaggagatcgagaccatcctggctaacatggtgaaaccccatctctactaaaaatacaaaaaattaactgggcgtggtggcaagtgcctgtagtcc

SEQ ID NO: 569018 - DNA, 626 bp, Homo sapiens
ctaacatggtgaaaccccatctctactaaaaatacaaaaaattaactgggcgtggtggcaagtgcctgtagtccaagctactcaggaagctgaggcagaagaatcacttgaacccgggaggcagaggttgcagtgagctgagatcgtgccactgcactccagcctgggtgacagaaggagactccatctcaaaaaaaaaaaaaaagaaaaataggatctaagaatgaggtcatgttctaaggaataaaggtgacctmtggttgctgaaaaaaatcaagtaatacattctgccacatagccctcagaaagactgcagccctgcccaaaacttgatgttagccctgtgagtttcatttaaggcttctgaactatagaactgtaggattaacggtcactttattgtaagatatgaagtttgtggtaattggttacagcagcaagaggaagtttatattgtaagtgtatcatcaaaatgagaaccataatttacaactgcttttaatactgcacttggatgtttgaaatcacgtacatggaaatgatctctatgtgcatgagggaggatagcaaattgatgccaaaataatgcaaatgcaaatcttgcactcatttctatgtaggtttca

SEQ ID NO: 569019 - DNA, 373 bp, Homo sapiens
gctgaggtttacaaatttgtaatctccttgtggaaaaacgggaaaacacatctcagcctaataagatttatctactaaagagtctagacttgatccatttgtccttgtaattcaaaagctaattcaaatactgatttgatgtattgtgtgaacaaccattgctgattatcatcgcatacctggcattctcttgtatctgatatctaaaatatttggtaattcctggactttctsttttcaaacccagtacggtttaatttgagtcttagaacagttgtctttgagaaattcttccctctactgcatctgagaatgggcatagcatggttacatacatactgtcactccatagaacatttgttaaattaaagcc

SEQ ID NO: 569020 - DNA, 373 bp, Homo sapiens
gctgaggtttacaaatttgtaatctccttgtggaaaaacgggaaaacacatctcagcctaataagatttatctactaaagagtctagacttgatccatttgtccttgtaattcaaaagctaattcaaatactgatttgatgtattgtgtgaacaaccattgctgattatcatcgcatacctggcattctcttgtatctgatatctaaaatatttggtaattcctggactttctgttttcaaacccagtacggtttaatttgagtcttagaacagttgtctttgagaaattcttccctctactgcatctgwgaatgggcatagcatggttacatacatactgtcactccatagaacatttgttaaattaaagcc

SEQ ID NO: 569021 - DNA, 357 bp, Homo sapiens
gtgcctttcagcttgcaccatgattgtgaggcctacccagccatgtggaactgtgcgtctattaaacctctttcttctggaaattacccagtctygggcatgtctttaccggtggtgtgaaaatggactaatacagtagcacacctcatagggctgaacaaaatggggaagatgagtggggagcaggagagagaaaaggggtctgtgggactccagcctttattgggcccagaacattacccaaataagttttccacggggcattagtcggtggggtgagtgccagcacgcacatttcttgactcccgctgcaaccgagcaggtcactctgggtgtgggggctgtccatgtgcgctg

SEQ ID NO: 569022 - DNA, 438 bp, Homo sapiens
aaaatgtttcagtatcttcacattctctccctgtccttttgttttgctcttatatggtgktcttgagtcttttctctggcttttcaaacctagtaagactaagacactaaagtaactttgcccgcagtttggtaatgccttccaaagcacatcctaagctcttgtgcatacaggggtctcctttgagctctgtgcttttgagatcccatatacctaaattccagtactccaaatcagtactgctcagttttagtgactaagtttaaaaatgtattttaatagcaagttagtttagtgcactcttgcttcttttttgactgcttgtatacatgtatattcctttaaatgaatcttggaatttatttaaaaattttaaagtatactaatgaaactgtatattgttgtgaattcataagtgaatttggaaagaatttgtct

SEQ ID NO: 569023 - DNA, 438 bp, Homo sapiens
aaaatgtttcagtatcttcacattctctccctgtccttttgttttgctcttatatggtggtcttgagtcttttctctggcttttcaaacctagtaagactaagacactaaagtaactttgcccgcagtttggtaatgccttccaaagcacatcctaakctcttgtgcatacaggggtctcctttgagctctgtgcttttgagatcccatatacctaaattccagtactccaaatcagtactgctcagttttagtgactaagtttaaaaatgtattttaatagcaagttagtttagtgcactcttgcttcttttttgactgcttgtatacatgtatattcctttaaatgaatcttggaatttatttaaaaattttaaagtatactaatgaaactgtatattgttgtgaattcataagtgaatttggaaagaatttgtct

SEQ ID NO: 569024 - DNA, 438 bp, Homo sapiens
aaaatgtttcagtatcttcacattctctccctgtccttttgttttgctcttatatggtggtcttgagtcttttctctggcttttcaaacctagtaagactaagacactaaagtaactttgcccgcagtttggtaatgccttccaaagcacatcctaagctctygtgcatacaggggtctcctttgagctctgtgcttttgagatcccatatacctaaattccagtactccaaatcagtactgctcagttttagtgactaagtttaaaaatgtattttaatagcaagttagtttagtgcactcttgcttcttttttgactgcttgtatacatgtatattcctttaaatgaatcttggaatttatttaaaaattttaaagtatactaatgaaactgtatattgttgtgaattcataagtgaatttggaaagaatttgtct

SEQ ID NO: 569025 - DNA, 200 bp, Homo sapiens
atatcaaaatggctattgagaatggctggaaatgcaaasttagctgcaaagctgtcttggggagatttgcatcggtagagaatctgccttgatgcagccaggctttctctgaggtcttcccccttgtctggatctaggaaagtttaactgagagtctgaggtctccaaaggtctgaaagaaacattttctgtctattctc

SEQ ID NO: 569026 - DNA, 581 bp, Homo sapiens
ctacatagtgtttcctgtctagatgatggtttctcaacgttggtgctacttacctttaggaccagaggattcttttttgtgggaggcttccctagcaatgctaggtgtttcgtttgacctctaaatatcacacctccaccagtcttgacatcccctagacattgacaaatgtctcctggggaaaactctccaccagttgacaggcgaagttctggaaatattrgaattgtgaattgagattttatgttatccaaaacaaatatttttctttgtttttaaacatctacttccatctacttatctacttatttttacttttatttgtaacttaattccatcaaggagagagagtgcattttctgttatgctaaatttttgaagaatgtattgattttttatgacctgatatatggatgataagtagatattacatgtttgtattatcaaatttcagggtgataataaaataaatacttataatatttatattgtcactgtatattagttatttactttcttcactacaggagtttttcaacctgtaggctatttttcaattctaggttatccagtagattttg

SEQ ID NO: 569027 - DNA, 581 bp, Homo sapiens
ctacatagtgtttcctgtctagatgatggtttctcaacgttggtgctacttacctttaggaccagaggattcttttttgtgggaggcttccctagcaatgctaggtgtttcgtttgacctctaaatatcacacctccaccagtcttgacatcccctagacattgacaaatgtctcctggggaaaactctccaccagttgacaggcgaagttctggaaatattagaattgtgaattgagattttatgttatccaaaacaaatatttttctttgtttttaaacatctacttccatctacttatctacttatttttacttttatttgtaacttaattccatcaaggagagagagtgcattttctgttatgctaaatttttgaagaatgtattgattttttatgacctgatatatggatgataagtagatattacatgtttktattatcaaatttcagggtgataataaaataaatacttataatatttatattgtcactgtatattagttatttactttcttcactacaggagtttttcaacctgtaggctatttttcaattctaggttatccagtagattttg

SEQ ID NO: 569028 - DNA, 325 bp, Homo sapiens
tatgttatccaaaacaaatatttttctttgtttttaaacatctacttccatctacttatctacttatttttacttttatttgtaacttaattccatcaaggagagagagtgcattttctgttatgctaaatttttgaagaatgtattgattttttatgacctgatatatggatgataagtagatattacatgtttgtattatcaaatttcagggtgataataaaataaatacttataatatttatattgtcactgtatattagttatttwctttcttcactacaggagtttttcaacctgtaggctatttttcaattctaggtta

SEQ ID NO: 569029 - DNA, 402 bp, Homo sapiens
ttctctgctctagggatagcaccactattgaaaacatatctttgtgacwttctctatgccaggaactcccaacacattttccttgaaactgatgaaatgaataaaaataaaccaagagatgtgctgtttgtttctttttcctcctttctgcagcccttcttgattatctaatattttaagtacattgtcaatcaccaaaaggagcataaggggtatattgatttgtagcagatgtattaatagcccagcccctattccttacctgtagctgctgggaagaaaaccattcttaacactctacagggtctcatctccagaatttgcagcagtttctagctgaggactttctctagcagcacgggagcttgatactgggcatgaagtgggaagaaaaggtgaggg

SEQ ID NO: 569030 - DNA, 402 bp, Homo sapiens
ttctctgctctagggatagcaccactattgaaaacatatctttgtgacattctctatgccaggaactcccaacacawtttccttgaaactgatgaaatgaataaaaataaaccaagagatgtgctgtttgtttctttttcctcctttctgcagcccttcttgattatctaatattttaagtacattgtcaatcaccaaaaggagcataaggggtatattgatttgtagcagatgtattaatagcccagcccctattccttacctgtagctgctgggaagaaaaccattcttaacactctacagggtctcatctccagaatttgcagcagtttctagctgaggactttctctagcagcacgggagcttgatactgggcatgaagtgggaagaaaaggtgaggg

SEQ ID NO: 569031 - DNA, 402 bp, Homo sapiens
ttctctgctctagggatagcaccactattgaaaacatatctttgtgacattctctatgccaggaactcccaacacattttccttgaaactgatgaaatgaataaaaataaaccaagagatgtgctgtttgtttytttttcctcctttctgcagcccttcttgattatctaatattttaagtacattgtcaatcaccaaaaggagcataaggggtatattgatttgtagcagatgtattaatagcccagcccctattccttacctgtagctgctgggaagaaaaccattcttaacactctacagggtctcatctccagaatttgcagcagtttctagctgaggactttctctagcagcacgggagcttgatactgggcatgaagtgggaagaaaaggtgaggg

SEQ ID NO: 569032 - DNA, 402 bp, Homo sapiens
ttctctgctctagggatagcaccactattgaaaacatatctttgtgacattctctatgccaggaactcccaacacattttccttgaaactgatgaaatgaataaaaataaaccaagagatgtgctgtttgtttckttttcctcctttctgcagcccttcttgattatctaatattttaagtacattgtcaatcaccaaaaggagcataaggggtatattgatttgtagcagatgtattaatagcccagcccctattccttacctgtagctgctgggaagaaaaccattcttaacactctacagggtctcatctccagaatttgcagcagtttctagctgaggactttctctagcagcacgggagcttgatactgggcatgaagtgggaagaaaaggtgaggg

SEQ ID NO: 569033 - DNA, 262 bp, Homo sapiens
tcgatttctattgagactggaaacataatagaagtgagcaaaaaagaatttaaattgtggatacttgagttttatacctaggatttcaagaaatacattttgttactatcaaagcagttggcacaarcgtgtacaaaattccctaattgtgtctatgtggagaagacatagacaaacagagaatagcaaaacagaaatagcaaaaaagcagaaataaattttacctgtatttttaagtaaaagccaattagagaaggaaaac

SEQ ID NO: 569034 - DNA, 262 bp, Homo sapiens
tcgatttctattgagactggaaacataatagaagtgagcaaaaaagaatttaaattgtggatacttgagttttatacctaggatttcaagaaatacattttgttactatcaaagcagttggcacaaamgtgtacaaaattccctaattgtgtctatgtggagaagacatagacaaacagagaatagcaaaacagaaatagcaaaaaagcagaaataaattttacctgtatttttaagtaaaagccaattagagaaggaaaac

SEQ ID NO: 569035 - DNA, 610 bp, Homo sapiens
cacaaaaacctgctgtggccgggacaaaacagtggaaatggggtgaaggccagcacagcttggcattcctgragtgtgatgtggaaggaaaagtgcagcggaagacaaagatgtaagtaggcttgactcagtgcagctaagaacacagatgttatcttgatgttagtctatcagctaattttttgtattttagtagagaaggggttttaccacgttggccaggatggtctcgatctcctgacctcatgatccacgcacctcagcctccaaaagtgatgggattagaggcatgagccacaaagtgctcaaaaaatctattaattaacaaatgtgtatgtagccgtctttaatctaccatgtccattagcagataaatactataagcaaaataacaacaatgaaagaaacatagagtagatactctgatttatttaataaaaatttgaaaatagaccaaattactgtatgataaaaaaaaatctgttactattgaggatgagggttagtgtttggaaaggggcaggagaagtatcacttttcagtaattgtctattttcatacatggttataagcaaatacatgtgtttcattaatcaagctatccatattt

SEQ ID NO: 569036 - DNA, 610 bp, Homo sapiens
cacaaaaacctgctgtggccgggacaaaacagtggaaatggggtgaaggccagcacagcttggcattcctggagtgtgatgtggaaggaaaagtgcagcggaagacaaagatgtaagtaggcttgactcagtgcagctaagaacacagatgttatcttgatgttagtctatcagctaattttttgtattttagtagagaaggggttttaccacgttggccaggatggtctcgatctcctgacctcatgatccacgcacctcagcctccaaaagtgatgggattagaggcatgagccacaaagtgctcaaaaaatctattaattaamaaatgtgtatgtagccgtctttaatctaccatgtccattagcagataaatactataagcaaaataacaacaatgaaagaaacatagagtagatactctgatttatttaataaaaatttgaaaatagaccaaattactgtatgataaaaaaaaatctgttactattgaggatgagggttagtgtttggaaaggggcaggagaagtatcacttttcagtaattgtctattttcatacatggttataagcaaatacatgtgtttcattaatcaagctatccatattt

SEQ ID NO: 569037 - DNA, 610 bp, Homo sapiens
cacaaaaacctgctgtggccgggacaaaacagtggaaatggggtgaaggccagcacagcttggcattcctggagtgtgatgtggaaggaaaagtgcagcggaagacaaagatgtaagtaggcttgactcagtgcagctaagaacacagatgttatcttgatgttagtctatcagctaattttttgtattttagtagagaaggggttttaccacgttggccaggatggtctcgatctcctgacctcatgatccacgcacctcagcctccaaaagtgatgggattagaggcatgagccacaaagtgctcaaaaaatctattaattaacaaatgtgtatgtagccgtctttaatctaccatgtccattagcagataaatactataagcaaaataacaacaatgaaagaaacatagagtagatactctgatttatttaataaaaatttgaaaatagaccaaattactgtatgataaaaaaaaatctgttrctattgaggatgagggttagtgtttggaaaggggcaggagaagtatcacttttcagtaattgtctattttcatacatggttataagcaaatacatgtgtttcattaatcaagctatccatattt

SEQ ID NO: 569038 - DNA, 411 bp, Homo sapiens
tagcagataaatactataagcaaaataacaacaatgaaagaaacatagagtagatactctgatttatttaataaaaatttgaaaatagaccaaattactgtatgataaaaaaaaatctgttactattgaggatgagggttagtgtttggaaaggggcaggagaagtatcwcttttcagtaattgtctattttcatacatggttataagcaaatacatgtgtttcattaatcaagctatccatatttaatcattgtacttttctgtatgtgtgatatatgtcaataaaatatatacagcaaaaatggacaaaaccacaagaagacatacacaaatgttaaacctagagagaaatttgaatataagtaagtctctgagtgactggtagaacaaaccgaaaaataatcaggatg

SEQ ID NO: 569039 - DNA, 411 bp, Homo sapiens
tagcagataaatactataagcaaaataacaacaatgaaagaaacatagagtagatactctgatttatttaataaaaatttgaaaatagaccaaattactgtatgataaaaaaaaatctgttactattgaggatgagggttagtgtttggaaaggggcaggagaagtatcacttttcagtaattgtctattttcatacatggttataagcaaatacatgtgtttcattaatcaagctatcyatatttaatcattgtacttttctgtatgtgtgatatatgtcaataaaatatatacagcaaaaatggacaaaaccacaagaagacatacacaaatgttaaacctagagagaaatttgaatataagtaagtctctgagtgactggtagaacaaaccgaaaaataatcaggatg

SEQ ID NO: 569040 - DNA, 411 bp, Homo sapiens
tagcagataaatactataagcaaaataacaacaatgaaagaaacatagagtagatactctgatttatttaataaaaatttgaaaatagaccaaattactgtatgataaaaaaaaatctgttactattgaggatgagggttagtgtttggaaaggggcaggagaagtatcacttttcagtaattgtctattttcatacatggttataagcaaatacatgtgtttcattaatcaagctatccatatttaatcattgtacttttctgtatgtgtgatatatgtcaataaartatatacagcaaaaatggacaaaaccacaagaagacatacacaaatgttaaacctagagagaaatttgaatataagtaagtctctgagtgactggtagaacaaaccgaaaaataatcaggatg

SEQ ID NO: 569041 - DNA, 411 bp, Homo sapiens
tagcagataaatactataagcaaaataacaacaatgaaagaaacatagagtagatactctgatttatttaataaaaatttgaaaatagaccaaattactgtatgataaaaaaaaatctgttactattgaggatgagggttagtgtttggaaaggggcaggagaagtatcacttttcagtaattgtctattttcatacatggttataagcaaatacatgtgtttcattaatcaagctatccatatttaatcattgtacttttctgtatgtgtgatatatgtcaataaaatatatacagcaaaaatrgacaaaaccacaagaagacatacacaaatgttaaacctagagagaaatttgaatataagtaagtctctgagtgactggtagaacaaaccgaaaaataatcaggatg

SEQ ID NO: 569042 - DNA, 222 bp, Homo sapiens
tgcaaaccccttcctgttgtgggaaaacaggcttccatatgtgtcttattgggaaacacataggcaatttctatgtttttctgcatctatttcakggatatgggaactgaatagtgcccatcaaagtctcacctgatgttggaaattgatctgagagcgcggaaggacagaattctttctttgttcctgggcagcggtggttgagggatcattttatggcag

SEQ ID NO: 569043 - DNA, 446 bp, Homo sapiens
gtcgagtccattcgatgattcctttccatttcattcaatgatsattccattcgtgtccattcgatgattctttttgagtcccttcgttgattccatccgattccatttgatgatgattccattcgtgtccattcaatgattccatttgattccattcaatgataattccattcgagtccatttgatgatgattccattcgattccgttaaatgattacattcgattccattcgatgattcccttcgattcctttctttgatgattccattacattccattcaatgattccattcgattctattccataatgattcctttcgattccatttgctgatgattccattcaattccattcaatgatgatttcattcgattccattagatgatgactatattcgattccattcatgatgattccaacggattctattcgatttctccattc

SEQ ID NO: 569044 - DNA, 446 bp, Homo sapiens
gtcgagtccattcgatgattcctttccatttcattcaatgatgattccattcgtgtccattygatgattctttttgagtcccttcgttgattccatccgattccatttgatgatgattccattcgtgtccattcaatgattccatttgattccattcaatgataattccattcgagtccatttgatgatgattccattcgattccgttaaatgattacattcgattccattcgatgattcccttcgattcctttctttgatgattccattacattccattcaatgattccattcgattctattccataatgattcctttcgattccatttgctgatgattccattcaattccattcaatgatgatttcattcgattccattagatgatgactatattcgattccattcatgatgattccaacggattctattcgatttctccattc

SEQ ID NO: 569045 - DNA, 439 bp, Homo sapiens
aggttcatatgcgtattggtactttatttctttttataactgtataacattcaatttcatggatataacattttgtttatccaataatatttttattgacatttgagttgtgttcagcctttggctattttaaatactgctgttaaaatacttgtgtacaatttgtgtttgaacacctctttccaatactctgggggtatacctgggaataaatttctgggtcatatgacaattctatgtttaatatatttagaagccatcaacctattttccaaagtggccagttctagccatagagtatctaactgtggttttgatttgtagttgcctgatgagtgatgctgttgagtatctttttatgggattattgaccgttaatgtatcttcttgggawacacatctaatcctatcatttatccgttttgagttgggatttttg

SEQ ID NO: 569046 - DNA, 446 bp, Homo sapiens
gtcgagtccattcgatgattcctttccatttcattcaatgatgattccattcgtgtccattcgatgattcyttttgagtcccttcgttgattccatccgattccatttgatgatgattccattcgtgtccattcaatgattccatttgattccattcaatgataattccattcgagtccatttgatgatgattccattcgattccgttaaatgattacattcgattccattcgatgattcccttcgattcctttctttgatgattccattacattccattcaatgattccattcgattctattccataatgattcctttcgattccatttgctgatgattccattcaattccattcaatgatgatttcattcgattccattagatgatgactatattcgattccattcatgatgattccaacggattctattcgatttctccattc

SEQ ID NO: 569047 - DNA, 446 bp, Homo sapiens
gtcgagtccattcgatgattcctttccatttcattcaatgatgattccattcgtgtccattcgatgattctttttgagtcccttcgttgattccatycgattccatttgatgatgattccattcgtgtccattcaatgattccatttgattccattcaatgataattccattcgagtccatttgatgatgattccattcgattccgttaaatgattacattcgattccattcgatgattcccttcgattcctttctttgatgattccattacattccattcaatgattccattcgattctattccataatgattcctttcgattccatttgctgatgattccattcaattccattcaatgatgatttcattcgattccattagatgatgactatattcgattccattcatgatgattccaacggattctattcgatttctccattc

SEQ ID NO: 569048 - DNA, 525 bp, Homo sapiens
aattttcacaacttattaatattatagaaaatgttgaacttaacagttaagatacaagtagtgaaaaatgatagtatttaaggagatctagaaattttaatatatacctgtaatgtgtgagaagtattagaataatgcttgtatttctggattggcatcaatttctattgagactggaaacataatagaagtgagcaaaaaagaatttaaattgtgaatacttgagttttgtacctaggagttcgagaaatacattttgtcactatcaaagcagttggcacatacgtgtacaaaattccctaattgtgtctatgtggagaagacatagacaaacagagaatagcaaaacagaaatagcaaaaaaagcacaaataaawtttacctgtatttttaagtaaaagccaattagagaaggaaaacatgaaatttgtgttttatcaaaatttttctctttctcatactatagttgaatatattactggaaaaaatttgaagcactggtatgttcacaaataaaagtaaaat

SEQ ID NO: 569049 - DNA, 525 bp, Homo sapiens
aattttcacaacttattaatattatagaaaatgttgaacttaacagttaagatacaagtagtgaaaaatgatagtatttaaggagatctagaaattttaatatatacctgtaatgtgtgagaagtattagaataatgcttgtatttctggattggcatcaatttctattgagactggaaacataatagaagtgagcaaaaaagaatttaaattgtgaatacttgagttttgtacctaggagttcgagaaatacattttgtcactatcaaagcagttggcacatacgtgtacaaaattccctaattgtgtctatgtggagaagacatagacaaacagagaatagcaaaacagaaatagcaaaaaaagcacaaataaaatttacctgtatttttaagtaaaagccaattagagaaggaaaacatgaaatttgtgttttatcaaaatttttctctttctcatamtatagttgaatatattactggaaaaaatttgaagcactggtatgttcacaaataaaagtaaaat

SEQ ID NO: 569050 - DNA, 323 bp, Homo sapiens
cttcacattgtgctatgattttaggagatccagctgttaatggataatattttactgctgaaactatcatgtgtgatayaattgctcattatgtgccttaaaacacaagcaatataattattttcaacttggagcaaattaaaatcttatcagcaatttaaaatctctagagtcgtcttcttctggttaattattttaaacttgtatttttctctttatgtttttagtgagttgtcttatcaaggagaataactcaagctgattattctttttttctcttccatccacctcgcaggtgtgttaataatttcatttctcagaca

SEQ ID NO: 569051 - DNA, 323 bp, Homo sapiens
cttcacattgtgctatgattttaggagatccagctgttaatggataatattttactgctgaaactatcatgtgtgatacaattgctcattatgtgccttaaaacacaagcaatataattattttcaacttggagcaaattaaaatcttatcagcaatttaaaawctctagagtcgtcttcttctggttaattattttaaacttgtatttttctctttatgtttttagtgagttgtcttatcaaggagaataactcaagctgattattctttttttctcttccatccacctcgcaggtgtgttaataatttcatttctcagaca

SEQ ID NO: 569052 - DNA, 435 bp, Homo sapiens
ttgacttcctgcctagaatagtttctgctgtgcttcttatccttcttgtggagatttcagattatctgaattgcttttctatattaagaaaaaacgcaacaattctcccacctgagaggaatgtaaactgtagcaagttagcagaaccaatcartaaagtttttacattgtttgttgcaaaatgcagcgctggtgtctccatcactaaccttttctaccccacattgctctttctttgactgcaataggatacctctaggaaaatctgtattctcgagacagagtgcccttttggtgagctataagcacactcaatggtaggctggaatactagcttttatctatggcgaaatggaatcatatcagtgatttttttaaaaaggaaatttaactcttgctatggtttgaatgcttgccccttccaatctcatgtta

SEQ ID NO: 569053 - DNA, 435 bp, Homo sapiens
ttgacttcctgcctagaatagtttctgctgtgcttcttatccttcttgtggagatttcagattatctgaattgcttttctatattaagaaaaaacgcaacaattctcccacctgagaggaatgtaaactgtagcaagttagcagaaccaatcagtaaagtttttacattgtttgttgcaaaatgcagcgctggtgtctccatcactaaccttttctaccccacattgctctttctttgactgcaataggatacctctaggaaaatctgtattctcgagacwgagtgcccttttggtgagctataagcacactcaatggtaggctggaatactagcttttatctatggcgaaatggaatcatatcagtgatttttttaaaaaggaaatttaactcttgctatggtttgaatgcttgccccttccaatctcatgtta

SEQ ID NO: 569054 - DNA, 473 bp, Homo sapiens
tgcccttttggtgagctataagcacactcaatggtaggctgraatactagcttttatctatggcgaaatggaatcatatcagtgatttttttaaaaaggaaatttaactcttgctatggtttgaatgcttgccccttccaatctcatgttaaaatttgatccccaatgttgcaggtggggcttactgggaggtgtttggtcatggggttggatcttcatgaatggataataccctcccttagaaatctaaagctatcctcccttcacggtgtcctcaggaatgagtgtaccattctttattcacctataattcccccacccatcctttttgagatattgattacatgtatgttacactgctgcatattgtctgacgtatcagtgagtttctggctttcttatttcagtttaccctttgtcctttagtttgtaaagcttctatttttttctattaattttcttatgttagggta

SEQ ID NO: 569055 - DNA, 435 bp, Homo sapiens
ttgacttcctgcctagaatagtttctgctgtgcttcttatccttcttgtggagatttcagattatctgaattgcttttctatattaagaaaaaacgcaacaattctcccacctgagaggaatgtaaactgtagcaagttagcagaaccaatcagtaaagtttttacattgtttgttgcaaaatgcagcgctggtgtctccatcactaaccttttctaccccacattgctctttctttgactgcaataggatacctctaggaaaatctgtattctcgagacagagtgcccttttggtgagctataagcacactcaatggtaggctggaatactagcttttatctatggcgaaatggaatcatatcagtgawttttttaaaaaggaaatttaactcttgctatggtttgaatgcttgccccttccaatctcatgtta

SEQ ID NO: 569056 - DNA, 473 bp, Homo sapiens
tgcccttttggtgagctataagcacactcaatggtaggctggaatactagcttttatctatggcgaaatggaatcatatcagtgatttttttaaaaaggaaatttaactcttgctatggtttgaatgcttgccccttccaatctcatgttaaaatttgatccccaatgttgcaggtggggcttactgggaggtgtttggtcatggggttggaycttcatgaatggataataccctcccttagaaatctaaagctatcctcccttcacggtgtcctcaggaatgagtgtaccattctttattcacctataattcccccacccatcctttttgagatattgattacatgtatgttacactgctgcatattgtctgacgtatcagtgagtttctggctttcttatttcagtttaccctttgtcctttagtttgtaaagcttctatttttttctattaattttcttatgttagggta

SEQ ID NO: 569057 - DNA, 560 bp, Homo sapiens
tgggtgacaaggcgagactccatctcaaaaaaaaaaaagaaagaaaaaaagaaaatgcacccaagtccctaagcagacatgagtgaaamccttttcctcagtgggatgccccaagagaatgtgtggttcatgtccccaggagatgttagccctgagtggctcattttccagtccttccgtgggacccatctattccttcaaactcacttctaggctgcattccaaagcactgggacaaattcaacccccaaaccctcaaaaaggaaggtctaattttcttgtgaaataaagcatggcccctctgcagaaaatcctcaaattagtctcctcagtcttttgtaaccaagagcagaataaggaggacagggctaaggagaaagaaaaatacagggacaaaaggcaagctcaactgttggctgctgtacaagccccagcccctccccatagctctaaggaaacttctccaggtagttgccaggccactggaaggcaaactaccccaatgggataaatgggaaaaagctctacatggctctgccacaagctcagccactggaaat

SEQ ID NO: 569058 - DNA, 495 bp, Homo sapiens
taatgtattatatattatatatagtattatatacaatrtattatatatagtattatatataatgtattatatatagtattatatataatgtattttatatataatattatatgtatttgtgtatatatatatttgtacagacaagatttggctatgttttctgggctcatctcaaattcctggcatcaagcaaaccccccacctcaatttcccaaattgctgagattagaggtaccagccacaatacttggctttgagcacatttctttatttgaggtaaatctttcccttgaaaatatttgatttccaacaagtcaatttcctgatgatttttttccaggaatttatttttcactgtttcattcacatttaatgctgtttttaaaaattctagttattttcagccattcttatgaaagatgaattgccacaggggttcaccaaaaagaaatggaatgacatttatcaaagataatcacagtcattaaaattgga

SEQ ID NO: 569059 - DNA, 572 bp, Homo sapiens
gtgtcatcatttaaaaatgatktcagaccttaattctcagacaaaagaaataaaatgtaacttcaagaatttgcaaaaaatatttttgtgggttcattttcactgtgcctaggcctcattcatctcgggatttgcacaggagcctgctggagggtctcagagttattaagtgacaatctaaaagccaatttaggattagccagtttaaccaggtgagcagagggtttcacttgggaaagcaagcagcagccctgccggaagtcaggattggaaggctgaagggctttactagcgccctgagagccgcgcgttccgaatgggtgcggatgggggacctggctcatcagggagggattaacgcggctcgggcaatcctgcgctaaagcccgctccccccgccgccagcaacgccgcggagccgccgcaccagcaacataaatattagatgagactctcctgtgtattaattagcactttctaggtgatcttgtcattgaatattatgagataatcactccaaaatcatgttgaaggagggcgcactttcaggtatcagggttgctagggtgctc

SEQ ID NO: 569060 - DNA, 524 bp, Homo sapiens
aggtcaggagttcaagaccaggagttcaccaacatggtgaaaccccgtctctactaaaaatacaaaaaattagccaggcatggtggckggtgcctgtaatcccagctacttgggaggctgaggcaggataatcgcttgaacccaggaggcggagcttgcagtgagcctcaatctctccactgctctccatcctggacaacaagagcaaaactcccatctcagaaaaaaaaaaaaattatctccgttcttcttggaccacttgacaactaccttgtttcagatgcctctctctttgcagtgagatacatttgccatcaggcaattgtttttctgagctacttgaagccacacaataaacattgtgcattttcctggaatatcttaactggttgggggagtagggtaggggtggagtcagatatgtgttatttaacttgtacataatttaaaactttaaatttataaggcaaacttgaatataatatgaagtagaatgcaaacttcacattaattttttaatagag

SEQ ID NO: 569061 - DNA, 524 bp, Homo sapiens
aggtcaggagttcaagaccaggagttcaccaacatggtgaaaccccgtctctactaaaaatacaaaaaattagccaggcatggtggctggtgcctgtaatcccagctacttgggaggctgaggcaggataatcgcttgaacccaggaggcggagcttgcagtgagcctcaatctctccactgctctccatcctggacaacaagagcaaaactcccatctcagaaaaaaaaaaaaattatctccgttcttcttggaccacttgacaactaccttgtttcagatgcctctctctttgcagtgagatacatttgccatcaggcaattgtttttctgagctacttgaagccacacaataaacattgtgcattttcctggaatatcttaactggttgggggagtagggtaggggtgkagtcagatatgtgttatttaacttgtacataatttaaaactttaaatttataaggcaaacttgaatataatatgaagtagaatgcaaacttcacattaattttttaatagag

SEQ ID NO: 569062 - DNA, 524 bp, Homo sapiens
ggtggcttataaacaacagaaatgtatttctcacagttcagaaaatggggaagcccaagatcaaggcactggcagattcartgtcttgttagaacccactttttcatagatggcaccttttcagtgtgtcctcatggtagaaaagccacataacctcccttgggcctctttttgtaagggcactaatctcatttatgagggctctgccttcatgtcctaatctcatcccaaaagaactccctcttaatgccatccccctggaggttagaagttcaacttatgaattttgggtacacacaaatattcaaaccaaagcacttaggaatttggaatacagactcagagatagctgattagcttctgccatatgaccaagaccaagagcctgctgacttgagaagtaaaggtgttatagactgaattatgaaccctcaaaatttacatgttgaaactctaaccccctagtgtgactgtctttggaaatgggttcttttgggcaataattaaggctaagcgaagttgtt

SEQ ID NO: 569063 - DNA, 333 bp, Homo sapiens
ttctacatagtttatgtcttatgttaacatacacagtatcatctaatatctcccctcttaaaatgtaagtcaaataaaacagggactaaggagcaatatgactaaaatgaacatgttcatcatttctagagggggaccatagaaaataatactgccttcttcaagacacgcctttatctcctcargctcctattcatgtgaggatgtccctcctgagtcccgcagagaggactgtatattatgtgtgtctttatatcccagcatgtagaagcatctgataggtagtgtacacacagttaggtgaatgaacgggcaatatatacatgaccacct

SEQ ID NO: 569064 - DNA, 333 bp, Homo sapiens
ttctacatagtttatgtcttatgttaacatacacagtatcatctaatatctcccctcttaaaatgtaagtcaaataaaacagggactaaggagcaatatgactaaaatgaacatgttcatcatttctagagggggaccatagaaaataatactgccttcttcaagacacgcctttatctcctcaggctcctattcatgtgargatgtccctcctgagtcccgcagagaggactgtatattatgtgtgtctttatatcccagcatgtagaagcatctgataggtagtgtacacacagttaggtgaatgaacgggcaatatatacatgaccacct

SEQ ID NO: 569065 - DNA, 511 bp, Homo sapiens
tccaataaaaacagtccagggccaaatggctttactactaaattctactgaacccctaaagaagaatgaataccaattattctcaaactatttcaaaacattgaagtaaagggaaatcttccaaactcattctgtgaggccagcataaccttgatatcaaaaccaaagacacaacaacaaaaagaaaactacaggtcaacatctctggtgaacagagtaaaaaatcctcaaaaaaatacaaacgaactgattccaacgatatataaaaaagataacacatcatgatcaaggtaggtttatcccaaaaattcaagaatggttcaaaatatgcaaatcaataaatacattatatcaacagaatgaaggacaaaaaacttatgatcatcttaatagatgcaaaaaattaaaatttgacacyactttctgattaaaacttgcaataaatttggaatataaggaaagtaactcaacataataaaggtcatatttgataaacctaaagctaatatca

SEQ ID NO: 569066 - DNA, 571 bp, Homo sapiens
ataagtgcaataaagtaggtgaaaggcatctacaaggaaaaccacaaaacgctatcaaaaagaaattgaaaaggacacagacaaattggaagacatcccatgctcatggatctgaagaattaatatagttaaaataaaaataccactgaaagaaatctacaggttcaatgcagtccctttctaaagaccaatgatattcttcatagaaataggaaacgaaaaacttagaacttgtatggaaccacaaaatccttgaataaccaaagcactaatgagcaaaaagaacaagctcgaggcatcacactaacagacttttaactgtactacaaaactgtagtaaccaaaacagcatggtaccagtataaaaacagacacatagaccaatggaacacaatacagaacacagaaattaatccacttctctatatagctagactgattttttacaaaggtgccaaaactgtttattgcaaaaaaatgacaccctctttcaataaatggtaccattaaaactggatattcatatacagataaacaaactaaacygtacctctcaccttatataaaaatc

SEQ ID NO: 569067 - DNA, 397 bp, Homo sapiens
acagatcctattgtctatgccaaaatgtaagtgtccgtaagtttttgtctgaaatttcattgtcattaytgtattaccccaaaactggcgcctttgacttgggtgggatatgatctttctatctttctaaagtaattattttattgtacgtatttttgttgtaagggttgatcattagaagtaattaatttctgcagggtgcagtggctcacacctgtaatcccagcattttgggaggccggggtgggcggattatgagttcaggaattcaagaccagcatgaccaacatggtgaaaacccgtctctactaaaaatacaaaaattagccaggcattgggcgcacatctgtaatcctagctactagggaagttgaggcaggagaatcacttgaaccca

SEQ ID NO: 569068 - DNA, 623 bp, Homo sapiens
ctgatatttgagggtttttgcagtctatattttttggattatttgtatcttgtcttgatggtatagctgctcaagtcaaaatagtgtaactcattctctcccccccaccccggaaataacacatgcatttctaatatctattcatattccatcaattgtttgtttctctttcagaaagttctcagattcacctattgaaaaaagccctggacaactgtctgaatctttgaacttttatttcattcatgaagtcttccccasacaatacaattgacagttatttcaactgtcaacagttgtgtgaggacaaaattcttgggttcacttctcaattagatatttaaaattgagtggcattggacttaacttctcacatgttaaataatgttagttaatagtttttgaaaatcaaatgagaggctgcgtgcggtggctcactcctgtaatcccagcactttgggaggctgaggaggacatatcacgaggtcaggagttcaagaccagcttgaccaacatggtgaaacgctgtctctactaaaaatacaaaaattatctggttgtggtggcatacacctgtaatcccagctactcagcaggctgaggcatgagaattgcttaaaccc

SEQ ID NO: 569069 - DNA, 530 bp, Homo sapiens
catttctaatatctattcatattccatcaattgtttgtttctctttcagaaagttctcagattcacctattgaaaaaagccctggacaactgtctgaatctttgaacttttatttcattcatgaagtcttccccagacaatacaattgacagttatttcaactgtcaacagttgtgtgaggacaaaattcttgggttcacttctcaattagatatttaaaattgagtggcattggacttaacttctcacatgttaaataatgttagttaatagtttttgaaaatcaaatgagaggctgcgtgcggtggctcactcctgtaatcccagcactttgggaggctgaggaggacatatcacgaggtcaggagttcragaccagcttgaccaacatggtgaaacgctgtctctactaaaaatacaaaaattatctggttgtggtggcatacacctgtaatcccagctactcagcaggctgaggcatgagaattgcttaaacccaggaggtggaggttgcagtgagctgagatcac

SEQ ID NO: 569070 - DNA, 567 bp, Homo sapiens
atttctaattttttttaaccttatctagatcagtgaactcctactccctaagatcaccacccaaataaactacacaaagtctcctatcttatcaatggctccactctccactccacggaaaagtaagatgaaaagtgtcataaaattgtggcaatgattcctaaggaatgcaaaagagatgtccaagtttttgagcagaaatgagaagggagttgggacatcatgctcataaacagacaagaataaaagaatttatccaacataaaaaaagtcatcagtaacagagaagcttactttagagagacaattctcactttagagagacaattctccacctgtattaaaaagtagaattagtagtgttgtcaatgtatgcatttagattagttcttcactattgtagcaggcacagctccaatgagggagttgtgtacagtttatatgagtgtcaatatattaaattattgtaagggccagtaggtgatataaagggttgtttttgtctagttggagattctaattaaatgaagaccacatgtcattytaacgtgggctgcgttattcagc

SEQ ID NO: 569071 - DNA, 547 bp, Homo sapiens
caaggtttaaaaaaaaaaaamatttgtcaaatgcatgctttatagcagatcattttgttttcctgcttctgcaatgtgacatagaaaaatgagtgttggattagaaaagtcccctggtaatagaatggtctatttgtttggctgattagaagcaggaaaaatagataaactaagaatttaggaaggcaaaatggacctctgataactgaggtgagataaacactaaagaaaactgccaaaagacaattttgactcaatataaactaaagaaaaaagtggtaacaagagagacaaaacctaacctggaaaaatttagtctacaataagctaaattaatgattaccaaaagttattgaataatgaccatgagccagatactaagtctgtcttatctattgtctgatttaattgccacagcagccctatgatatagtgactgttaacctaaatttacagataagaaaatgaagcctaagggtattttgcccaaaatcactgctagcatttagcatactggggtggaaattgaggtttaactgtgttagta

SEQ ID NO: 569072 - DNA, 546 bp, Homo sapiens
cactgttttaagtactttatatataaatttattttttctcattaagagtctataaaatatcattartaattatacctaaagcagtaaaaatgataacagcagattttataaagcacttacctgtggtccagatactgttgtaggtgattagctacatttcataaagaagagaacctaaagcacatagaagtgaagcaattttcttaaagtttcctaggtgttcatgaaagaacccggatactcacttgggcagtcaggctcctgctgcccatttaagaagtaagtattccatggtgtcttcagaaaagtgctcaacaaattattattactactattgttattggattattgttatcataggccagatgcttttctcacattattactaatctcttgcacaaaaggaaaccctggtagaaagatatctgggtcactaggcacaaaattatcagctcctagttaatcttgctaacggtctatcaattttgttcattttttcaaagaaccagctttttgtttcatttttctgtttcaatttcatttcac

SEQ ID NO: 569073 - DNA, 638 bp, Homo sapiens
cacacctgtagctactcgggagactgaggcaggagaatcgcttgaaccaggaggcagaggttgcagtgagctgagatcacagcactgcactccatcctgggtgacagagtgagactctgtctcaaaaagaagaaaaaaaagtattaattatgtgattttttcaggaaaccatcccttaacaattgaaataaaagctaccaatgtaagggtatttatcatatgttgataatctctcaaaagttctaaaattaatggcataaatatgttttaatcattttataatgtgtaaaatataaaatttcatgacttaaacagccccttttaatttctcttcgttgcgtgttattgtaccacaggttgctrctagaggaagcgaatatgcaaagaaggaagatttttaaagtatcctctcattcattaattccagtttcttagaagagtataaaagaagacaagtggaaatttactggcaaaaataaagtgtactaaacttcattgacctcatgggaagcaacggtgcttttccaatcttccactttcaagattctaagaaatcatgtccaatttaattacaggaaagagataaaaaaaaaccattaagattgggagtttcattgaaggggaggttcattaaaaaa

SEQ ID NO: 569074 - DNA, 638 bp, Homo sapiens
cacacctgtagctactcgggagactgaggcaggagaatcgcttgaaccaggaggcagaggttgcagtgagctgagatcacagcactgcactccatcctgggtgacagagtgagactctgtctcaaaaagaagaaaaaaaagtattaattatgtgattttttcaggaaaccatcccttaacaattgaaataaaagctaccaatgtaagggtatttatcatatgttgataatctctcaaaagttctaaaattaatggcataaatatgttttaatcattttataatgtgtaaaatataaaatttcatgacttaaacagccccttttaatttctcttcgttgcgtgttattgtaccacaggttgctgctagaggaagcgaatatgcaaagaaggaagatttttraagtatcctctcattcattaattccagtttcttagaagagtataaaagaagacaagtggaaatttactggcaaaaataaagtgtactaaacttcattgacctcatgggaagcaacggtgcttttccaatcttccactttcaagattctaagaaatcatgtccaatttaattacaggaaagagataaaaaaaaaccattaagattgggagtttcattgaaggggaggttcattaaaaaa

SEQ ID NO: 569075 - DNA, 638 bp, Homo sapiens
cacacctgtagctactcgggagactgaggcaggagaatcgcttgaaccaggaggcagaggttgcagtgagctgagatcacagcactgcactccatcctgggtgacagagtgagactctgtctcaaaaagaagaaaaaaaagtattaattatgtgattttttcaggaaaccatcccttaacaattgaaataaaagctaccaatgtaagggtatttatcatatgttgataatctctcaaaagttctaaaattaatggcataaatatgttttaatcattttataatgtgtaaaatataaaatttcatgacttaaacagccccttttaatttctcttcgttgcgtgttattgtaccacaggttgctgctagaggaagcgaatatgcaaagaaggaagatttttaaagtatcctctcattcattaattccagtttcttagaagagtataaaagaagacaagtggaaatttactggcaaaaataaagtgtactaaacttcattgacctcatgggaagcaacggtgcttttccaatcttccactttcaagattctaagaaatcatgtccaatttaattayaggaaagagataaaaaaaaaccattaagattgggagtttcattgaaggggaggttcattaaaaaa

SEQ ID NO: 569076 - DNA, 495 bp, Homo sapiens
cctggctaatttttttttttttttgtatttttagcagagacagggtttcaccattgttggccaggctagtctsaaactcctgacttcaagtgatctgcttgcctcgtcctcccaaagagctgggattacaggcgtgagccatcacacctggcttacttatttatttttttatccaactgaatttaatatttaaaccctgtttaattattattattatgtttgaaatggggtctcactgtgttgcccaggctggagtgcagtggcacaatcttggctcactacagcttcaacctcctgtgctcaagcaatcctctcacctcagcccccagagtagctggggctataggcgtgcacgaccatgctcagctaatttttgatttttttttttttggtagaggtggggtctcgctatgttgcccaggctggtctcaaactactggactcaagcgatcctcccaccttggcctcccagagtgcctgggattacaggcccga

SEQ ID NO: 569077 - DNA, 372 bp, Homo sapiens
ggatcacctgaggtcaggagttygagaccagcctggccaacatgatgaaatcctatctactaaaaatatgaaaaattagctgggcatgatggcggatgcctgtaatcccagctacttgggaggctgagtcagggaattgcttgaatctaggaggcagaggtcacattgagccgagatcctgccactgcactccatcctgggcaagaagagtgaaacttcgtctaaaacaaacaaacaaacaaaaaacaaagagtgaattcggctgtatgatttttatcttaatattcaaaaataaaaaagatataatttctttgacttcttccccaatctttggtattgtagtactaaaaaaacaattattgtccttcctcc

SEQ ID NO: 569078 - DNA, 609 bp, Homo sapiens
tggttagagcagtttggttttatacgttttaagaagacatgagacattaatcagcatatgtgagatgaacattggttcagtctggaaaggtgggacaactcgaagcaggggggttagaagtagggrgtgcttccaggtcacagatacataagagacaaatggttgcattctgattagtctctccaaaggaggcaatcagatatgcatttatctcagtgagcagaggggtgactttgaatagaatgggaggcagatttgccctaagcagttcccagcttgacttttccctttagcttagtgattttagggacccaagacattttcttttcacatttccccactttttaaaaattttttggagaaagcatattaaaagaaatgagtctctggtctcaggttttgtctgatctcttatggctaggatggtttattcctagactggtaggtcccaagttattaggaaagctcatttttagaaggttgtaaagtcttatgtcctatgaagagaaaataagggaaggaaggaggaaaaacaacaacaaacaaaagaacgatcctggaaaatcaatataggccatattgctctgaagtccatatattagtaggcag

SEQ ID NO: 569079 - DNA, 609 bp, Homo sapiens
tggttagagcagtttggttttatacgttttaagaagacatgagacattaatcagcatatgtgagatgaacattggttcagtctggaaaggtgggacaactcgaagcaggggggttagaagtagggggtgcttccaggtcacagatacataagagacaaatggttgcattctgattagyctctccaaaggaggcaatcagatatgcatttatctcagtgagcagaggggtgactttgaatagaatgggaggcagatttgccctaagcagttcccagcttgacttttccctttagcttagtgattttagggacccaagacattttcttttcacatttccccactttttaaaaattttttggagaaagcatattaaaagaaatgagtctctggtctcaggttttgtctgatctcttatggctaggatggtttattcctagactggtaggtcccaagttattaggaaagctcatttttagaaggttgtaaagtcttatgtcctatgaagagaaaataagggaaggaaggaggaaaaacaacaacaaacaaaagaacgatcctggaaaatcaatataggccatattgctctgaagtccatatattagtaggcag

SEQ ID NO: 569080 - DNA, 608 bp, Homo sapiens
ttattaatatcttcctttcactttcttttgatttgtcttctgctctctttgtagctttttaacttgatgagttaatatattttattgatgtatttattgctacaaaatttcttctgataactttcagttgattctacagctctcaaatttatagaatgttattgttactttcaagaaactattcacttcctgttttttaatagctttttttgccatatccagtgaataggccttttaacacactaattttgttactaatttctagttttagcacattaytatcagagaatgctaatatttgcatttgcctttttaatttattgcgatggtgtgtcctgtactaaatcagtttgcataagtgtttcattgtacttgagagtatagtttacatcatcagaggtctgaatttaatatatatttatagaatctacattattaatgatattgattgatcttaatctatcttagaccaaaagaggtttagtatgatatttctatagttgttttattatgtttctatttatctgtgcatctcttgtataatgaaaatcattattattgagtggtaacggaataattgttacattttcatttgaaaatttccttcc

SEQ ID NO: 569081 - DNA, 544 bp, Homo sapiens
aggaaatattggatttcagatatactttagacaaaatagacctaatggacatacacagaatattccaaacaatgacaacagactacacattcttctcaagctcatgtaaaatactttccaggatagagtatatattagaccataaaacaagtctaaaatttaagaagactgaaatcatatcaagcatcttttctgaccacattggaacgaaaccagaaatcagtaacaggagaaaaaaagagaaatccatgaatatgtgaaatgaaacaacacactcccaaacaaccaatgagtgaaagaagagtcagaaagtaaattttaacatgccttcagacaaataaaaayggaaatccaacattccaagtcttatagaatgcagtgaaaacagtatgagatttttatagtgataaacatctacatttaaaaaaatcacaaataaacaacttaatgatatatcacaaggaatagaaaaaggagaacaaattaagcccaaattaatagaaaaaaatgaagcaacaaagattattaataaagagcagaaata

SEQ ID NO: 569082 - DNA, 544 bp, Homo sapiens
aggaaatattggatttcagatatactttagacaaaatagacctaatggacatacacagaatattccaaacaatgacaacagactacacattcttctcaagctcatgtaaaatactttccaggatagagtatatattagaccataaaacaagtctaaaatttaagaagactgaaatcatatcaagcatcttttctgaccacattggaacgaaaccagaaatcagtaacaggagaaaaaaagagaaatccatgaatatgtgaaatgaaacaacacactcccaaacaaccaatgagtgaaagaagagtcagaaagtaaattttaacatgccttcagacaaataaaaatggaaatccaacattccaagtcttatagaatgcagtgaaaacagtatgagatttttatagtgataaacatctacatttaaaaaaatcacaaataaacaacttaatgatatatcacaaggaatagaaaaaggagaacaaaytaagcccaaattaatagaaaaaaatgaagcaacaaagattattaataaagagcagaaata

SEQ ID NO: 569083 - DNA, 562 bp, Homo sapiens
tgaaaacagctatgcatccacaggttaaatttttatttctgtggtttaaatctgatttcaccacattttcccccaatgaaatggatgcttggtaatgcagttaaatatctgacttttcaggagcataaaatagcagctcttcttcctggggatggggcagtggccaccccaaggtgtggagggctttcctgtggaagcatcacatggactcatcatctgtggctccagtggagaaacctggagtcaatggatgtacgctggagggagaccaacttcaacttcatacgaggaaacatttctaataattaggttagcggaggtacaaactgccttgaagggctgtgctttttctgcctctgaaatttcttcaggaaagcctgagctgtatgctgcaaatgagaagcttaacttgttaacctcaagcaaggattaaattaagttccagtgacatatcactgatcttcatatagaccaatggaacagagcagaggcctcagaaataaygccacacatctgcaactgtctgatctttgacaaacctgacaaaaacaagcaactggga

SEQ ID NO: 569084 - DNA, 616 bp, Homo sapiens
atgttttaagttctgggatacatgtgcagaacgtgcaagtttgttacataggtatacacgtaccatggtggtttgctgcacccatcaacctgtcatctacattaggtacttctcctctggaagtcctagccagagcaattaggcaagaaaaagaaacacaaggcattcaaactgaaaaagaggacgtcaaattgtccccgtttgcagatgacattacctgatatatagaaaaccctgaagtttccaccaaaaaacactgttagaagtaacaaatgagttcagcaaagtcacaggatacaaaatcaacatacaaaatcagctgcatttctaaatattaataatgaatcatttttaatawctgaaaaggaaattaagcaacagtcccatttacaataacattaaaaagaataaaatacttaggaataaacataattatagtggtaaatgacttgtactaaaaaccacaaaacattaatgaaagaaaaagacacaaacaattggaaaggtgtcctgtgtacatggaccatggaccggaagacttaatattgttcaaatgtccttacttcttattgtgcaatctgcaaatttatcatacttcctatcaaagtcccaaatg

SEQ ID NO: 569085 - DNA, 616 bp, Homo sapiens
atgttttaagttctgggatacatgtgcagaacgtgcaagtttgttacataggtatacacgtaccatggtggtttgctgcacccatcaacctgtcatctacattaggtacttctcctctggaagtcctagccagagcaattaggcaagaaaaagaaacacaaggcattcaaactgaaaaagaggacgtcaaattgtccccgtttgcagatgacattacctgatatatagaaaaccctgaagtttccaccaaaaaacactgttagaagtaacaaatgagttcagcaaagtcacaggatacaaaatcaacatacaaaatcagctgcatttctaaatattaataatgaatcatttttaatatctgaaaaggaaattaagcaacagtcccatttacaataacattaaaaagaataaaatacttaggaataaacwtaattatagtggtaaatgacttgtactaaaaaccacaaaacattaatgaaagaaaaagacacaaacaattggaaaggtgtcctgtgtacatggaccatggaccggaagacttaatattgttcaaatgtccttacttcttattgtgcaatctgcaaatttatcatacttcctatcaaagtcccaaatg

SEQ ID NO: 569086 - DNA, 572 bp, Homo sapiens
tcaaaattttatgggtaatcttcacttaaatattctttttctcactcagatctggaaaatttatgaaacagcttccatatccracaaataaatgagatttttttccaaatggaaacaatctattaaagagtcagaaaagagtgttgcacctattatgtttcctgggttgtaatgattgtgaatcagatttagagctagaaaaagtagcagatgaagttgatcaactctgtgtagtaaaggcagaaagcctagacttttaagatttttttttgtttctaattcagtttatgtagtgtaaaacatttattgacttgtatatgttaaaccatccctgcttctctggaatgaaccccatttgatcatggtgaattatctttttgatatactgttgtattcagttagctagtattttgttaaggactttttgcatctatattcatcagggatactggtctgtagttttcttgttttctgtcacgtcctttccccgttttggtattagggtgatgctggcttcatagaatgatttagggaggatttcctctttctctattttgtggaatagtgtcaac

SEQ ID NO: 569087 - DNA, 572 bp, Homo sapiens
tcaaaattttatgggtaatcttcacttaaatattctttttctcactcagatctggaaaatttatgaaacagcttccatatccaacaaataaatgagatttttttccaaatggaaacaatctattaaagagtcagaaaagagtgttgcacctattatgtttcctgggttgtaatgattgtgaatcagatttagagctagaaaaagtagcagatgragttgatcaactctgtgtagtaaaggcagaaagcctagacttttaagatttttttttgtttctaattcagtttatgtagtgtaaaacatttattgacttgtatatgttaaaccatccctgcttctctggaatgaaccccatttgatcatggtgaattatctttttgatatactgttgtattcagttagctagtattttgttaaggactttttgcatctatattcatcagggatactggtctgtagttttcttgttttctgtcacgtcctttccccgttttggtattagggtgatgctggcttcatagaatgatttagggaggatttcctctttctctattttgtggaatagtgtcaac

SEQ ID NO: 569088 - DNA, 365 bp, Homo sapiens
aaatttaaggttaatattgataagtgaggctttgatcctaccatgaggttgttagctggttgctttgtagtttctattgtgtagttgctttatatggtctgcaggctatgtacttaagtgtgtttttgcggttacaggtatcgttctttcatttccatgtttagaactccyttaaggatctctcttaaggctggtctagtggtaatgaattcccctaggacttgtttgtctggaaaatattttatttatctttcacttataaacctttgttgagatatagaattcttggttggaatttcttttctttaagaatgctgaaaataggcccccagtctctcctggcttgtaaggtttctggtgataag

SEQ ID NO: 569089 - DNA, 534 bp, Homo sapiens
agtgatctgcccctgccttggccttccaaagagctgggattacagtgtgagccaccatgcctggcctgatcttttaaacagcgtttaaaaggagaggatttgttttttaaacctttcatttcataactcttaattctctgatacacctgttttttaatactccttccttttgtcagattgcatgggttagttgtggatcagccactggaattgactacctccattttgtgtcttacrccctgttcatttttatattttatctttgttctttgaggtggtagataaatgtatttgcctagtgagttactaactagtgatcgaacttcaccattttgtatagatgggttcattagactcttttttttattgtgcataattctctcattttcaagttttgttttctttttaatactttactgttttctggttggactgtgtaagttatctttaggattatgaagaaattaatggaacagattagtcatattagcttaaagtcctggcttttcattagtgtcattcttactggatgac

SEQ ID NO: 569090 - DNA, 589 bp, Homo sapiens
cattagacagcaggagaatgcctattactaacaggtatgcttgcagcagtgagcaaggacagctaccagcctcaaaggaagggagaaatcaggaacactgcaaaaagtagctttaaaagctatataatcaaatcagtattcaccattttgcattgcagcaaaccttcctgtatccccctcctacaccccatatcaagcatacatagtcaattggtttctgagacagtctgattcagtaaatttacagtaaaggccaggaatctcaatcttaattttagttcctctcaaagtgatttgcctagatttttccaattaaaaaaaaaatgagagcacttctgttaatgatgttagtaatgctgttcttgtgtcccaaatgcctccaattttactagatatgtatcacttaacaatggggatacagtctgataaatgggtctttaggtgatttcactattgtgtgaacatcatagyatgtacttacacaaagctagatggtatagcctactatatacctaggctatatggtatagcctattgctcctaggctacaaacctgtacagcatgttactgtactggatattgtaggca

SEQ ID NO: 569091 - DNA, 574 bp, Homo sapiens
gtcaaattatccttgattgcagatgatataatctcatatttggaaaaacctagacttcacaagaaaactattagaaccgataaatttagtaagcttgtaggacacaaaatcaatatacaaaaatcaacagcgtttctacataccaccagtgaacaatgtgaaaaatttaaaaagtaatcccatttacaatagccacacataaaactaaatgcctaggaattaaccaaagaagtaaaagatctctataatgaaaaccatgaaacactgaygaaactttccatatgaccactgaaattattagtcaactgtctctgtccccataaaaaagtgtttggtttatgatgtgaaatgtgtatgtgataatatggagcaaatataaatatccggaaataataattattaaacatattttgaatatctgggtaatcttcccctgtaacagatcattctcattagctacaggataaatttaaataaacctaattactctaatttgatcattacacattgtatgcttgtatcagaatatcatatgtaccccataaatatgaacaactattacatatccataaac

SEQ ID NO: 569092 - DNA, 578 bp, Homo sapiens
tgtcccttaaatagttgctaaaccttatcaactaactagggaaatgcaagtgaaatcaccataagatactgttttgcccataccatagaattaattggaagtgctccttcctcttgtattttttggaaaagtttgtgaagaattggttggcattaattcttcattgcatgtttgatagaattcactgatgaatccatctgggtcagggtttttctttatgggaagcttttgattactaattcaatctctatacttgttataggtctgttgggatcttctgtttcttcttgagtcaattttatcagtttgtgtttttttaggaacttctaagtttcatctacattatctaattaatctaatttattggtatacattaaattgttcatagtattttcttattatccttttattttattgatataaagttggtaatgatgtcccttcytgtattcccaatcttggtaatctgagtcttctcccctgaagttcttcatcgatctagctaaagtttggtcaactttggtgatcttttttaagaacctacttttgtttttgttgtatctctatttttgtatcat

SEQ ID NO: 569093 - DNA, 602 bp, Homo sapiens
atttccctatttaattcttttatttctcttatgagatttttgtggttttccttatatagatcctgctaatgtgtccatttgggagtgctgatgtaaataatattgtgttttaattttaaatgccatctgctttttgctggtatatagaaaaacatttgccttttgtatattaactttgaatcctgygacattcttataatcacttattagttcctggagagttttcctttttttgctaattcttctgggttttctatgtagacgatcatgttatctgtgaacaaagtcagttctagttccttcttttcaatctgtatgcctttattttcttttcttgtcttattgcattatctagcactttcagtatgatgttaaaaagcagtggtgagagggcatatccttgccttgctccttgatcttacaggagagcttctagttaaccaccaccaagtcaatttttttttttttttgagacagagtctcactatgtttcccaggctggagtgcagcggtgcgatatcagctcactgtaaacaccaactcctaggtttaactgattcccctgcctcagcctcccgagtagctggattacaggcgtctgc

SEQ ID NO: 569094 - DNA, 463 bp, Homo sapiens
gctctgtcccaaatgtagggtctgttccctgaccagaaagaatggaagataatatacttctttcctggttttggaggagattttcttctgattgcattcagttcccaacatgttcaactgtgaagtttgaggacctgggaagatttcacctaaatatcatcaccattatccttctagatatccagtgctccaccctctaacttgaagggcttctgagtgctctgggaaactgaaaagcaggttacccacacaggacctcagttaataaattatagtctataacttactttcaaatagtatagcacatgcatttgatatatatgtgtgtgtatgatggctttaatgcacattactaggatgcatggctgcccaatctcaaaaattactctrtggatggtgagttagtatattaaaagtcacacttcagagactgtaactacaagcatttcacctacctttatat

SEQ ID NO: 569095 - DNA, 494 bp, Homo sapiens
gatcatttgttatttatgtttcaggaatttctcaacagtcccaaatagataacttttttttttttttttttttaggggacagggtctccttctattgcccaggctagagtgcagtggggtggtcatgtctcactgcagcctcaaactcctgagctcaagtgatcctcctgcctcagcctccaaagtagttggaactacaggcatgtaccaccatgcctggttaactttttttttttttttttttttttttwaaatacagggtctcactatgttgctcaggggggtcttgaactcttggcctcaagcagtcttctgctttggccttccaaagtgctgagattagaggcgtaagccaatatatccagaagataacataatcaatagtttacataagctagttaggtcaagaattatcccactacgtctctgatcaagctgcagtacaaaccatacagtcactcagttttaataatttaacaaaatttttacgaagg

SEQ ID NO: 569096 - DNA, 494 bp, Homo sapiens
gatcatttgttatttatgtttcaggaatttctcaacagtcccaaatagataacttttttttttttttttttttaggggacagggtctccttctattgcccaggctagagtgcagtggggtggtcatgtctcactgcagcctcaaactcctgagctcaagtgatcctcctgcctcagcctccaaagtagttggaactacaggcatgtaccaccatgcctggttaactttttttttttttttttttttttttaaaatacagggtctcactatgttgctcaggkgggtcttgaactcttggcctcaagcagtcttctgctttggccttccaaagtgctgagattagaggcgtaagccaatatatccagaagataacataatcaatagtttacataagctagttaggtcaagaattatcccactacgtctctgatcaagctgcagtacaaaccatacagtcactcagttttaataatttaacaaaatttttacgaagg

SEQ ID NO: 569097 - DNA, 586 bp, Homo sapiens
tcttctcacagatccactaggcagtgccctagtagagacccactgtggggactcccaccccagatttcccttctgcactgcccyagcaaaggttctccatgagggctttgaccctgcagcacacttctgcctggacatccacgtgtttccctacatcctctgaactccaggcagaggttcccaaacctcaattcttgacttctgtgtacacgcaggcccaacaccatgtgaaaaccaccaagacttgggccttgcaccctctgaagcagtggcctgaactgtacattgaccctttttagccatgctgggatgtagggcaccaagtcctgaggctacacagagcagcaaagctgtgggctgagcccacgaaatcattttttcctcctaggcctaccagcttttgatggaacgggctgccatgaagacctctgacatggactggagacattttctccattgtcttgcaattaacatttggctccttgatacatatgcaattttctgcagtcagcttgaatttttgctcagaagatgcatttttcttttctattgcattgtcaagctgcaaattttccaaacttttatg

SEQ ID NO: 569098 - DNA, 586 bp, Homo sapiens
tcttctcacagatccactaggcagtgccctagtagagacccactgtggggactcccaccccagatttcccttctgcactgccctagcaaaggttctccatgagggytttgaccctgcagcacacttctgcctggacatccacgtgtttccctacatcctctgaactccaggcagaggttcccaaacctcaattcttgacttctgtgtacacgcaggcccaacaccatgtgaaaaccaccaagacttgggccttgcaccctctgaagcagtggcctgaactgtacattgaccctttttagccatgctgggatgtagggcaccaagtcctgaggctacacagagcagcaaagctgtgggctgagcccacgaaatcattttttcctcctaggcctaccagcttttgatggaacgggctgccatgaagacctctgacatggactggagacattttctccattgtcttgcaattaacatttggctccttgatacatatgcaattttctgcagtcagcttgaatttttgctcagaagatgcatttttcttttctattgcattgtcaagctgcaaattttccaaacttttatg

SEQ ID NO: 569099 - DNA, 454 bp, Homo sapiens
gactgtgatcagtactaagcatgacaattacyacactataaactacactaaaactttaaagccatttgaaagtggaaggcaaagagacatctacttcaagcctctgcaaaaattataagctccagttcagcttttctatgatatttataaaattcacaaagaaatttcacagatattatcctttgaagctcaaattatgccatgagaggggggagaaaaatattcttattttacaaagaaaaaaaaagctgtcctaattaccagaggcaaaattgaaacctggttttactaactacaactccaatacattttatttttcatttacatacattttactgatgccttttcattcagaagcttgttgcttcttcagtttcttcaaactttctacccaaccccaaaagaataaatatgatcaaaggaaaaacaaatacatgagtattttattacaagt

SEQ ID NO: 569100 - DNA, 535 bp, Homo sapiens
actaaacacttcctatgtgtccaagaaataagcactattttattattcttcacataatatatgtgtagtagtcattattttactcattctacaggtaaagaaattagcattcagaaaggttaagtcatttcccacaaaaattgtacagcctgtacatatagaaactagaattcaattcaaggactacattaactacaaagcctgggtctttcgtcattaacttcaaaacaaaatggtgtatggctataagaaagacagcatgccttagtggttaacagcaaagtcttataagccagatgtccaagtataaattccagttctgccactaagaactctgaaaccttagcatgtcactcaaactctgtatcttaccttcctcatctataagacaaagatagtgacagtaataatataataatawctcctttctcaggttgttttgtctcctaaatgactaaaacatatttaaagcttaggactgtttgtgggatatttgcagccagctaatgtttcctattatttttgcaaagaggac

SEQ ID NO: 569101 - DNA, 551 bp, Homo sapiens
ttggccttcttggcttggacaggtggatcagaccaggttagttgttgcttgctgttgttgcataaactttgcagccacttactgatatctgtgcccatctatttaatttaatgtaaatacttagttgatagatatagtatagggaatttgagtaatggaaggtgggggacacaaatgtgcttttgtttctctaatggtaacaaaagttctttgcaggaggaaataattggaggaactctaatccagtcagctgctctctgtttcacctattgcatgatttgattaagtttttggctgtcccggtggacgtccttgccagagaacggggtgctacaggagaccacaccctctgagcaagtcctctctgtactcttccaccttgccctttccttcacycaaaactgtcagccttgcttttccaaacttttacatatcatgtgctctaactcaagctgttgcactcctctaaattgctgttcagattattttatctaagaagggaattctccaagtttaaaagtatcaggcatgcaatatttcagtcacataat

SEQ ID NO: 569102 - DNA, 600 bp, Homo sapiens
cctttcttcctttttttttctttcaaattcaacaaatatattgagatccaatatatccagtcttctctgctaggcactatgaggactataatgctgatggaatcccagggtcaaataatttaaaatttagtaaaggaattaataccaaaataatcatggtccaaggtacaacataagtaaaaatgtttagagagtatggaggaacgatgtatcacagctggttgagaagagaactctggaagtaagatgcttattatattgcctactacattatctcctaattaaggtatgcagactggcagaactagcattacctgaggakctgctagataggcagattttcaggccccagtaaaactcactgaatcacaatctttgaaagtgtggcttcagaatctgttttaacaagctgatatttacacatgctggtacactccactgaccattgaaattacccaatataagttgattgattgttgatttaacttggggggttcctttaaaatgttttatgtgatgaacaaatattcttcctctgtggtagggttcatcgcccttttgactccaattcctgggtttggctttacttgtgaccagctt

SEQ ID NO: 569103 - DNA, 563 bp, Homo sapiens
ccattttaatttaaattaataataattaaacttaacatttagtttcycctcacactggtatgtttcaagttctcactggctagtggctgcccctttagacagtgcaaatatagaatatttccatcatctcagaatgtttgagggggcagtgctggtttgaaaccagtatgttccatgcagaaagttttttgaaatgtttctctaaagtgtgttatctctcttttaagttatttatctaggtcacttttgaaaattgtcatttcataaaaagcaagacgtattatatatcatcttgtgatttgacaagtttgagaatttggaatagaattacaaaaataacttgtgaaaacacattaaaactgacttcaaatgatgatgtccttgtcgacaaagttctggtgttagggctaacaacaatcttttttttttttttcctacttgagaggcttaggcaggagaattgcttgaatctggaaggtggagcttgcagtgagacaagatcgcaccactgcacaccagcctgggtgacagagtgagactctgcctcaataaaaaaaaaaaag

SEQ ID NO: 569104 - DNA, 563 bp, Homo sapiens
ccattttaatttaaattaataataattaaacttaacatttagtttcccctcacactggtatgtttcaagttctcactggctagtggctgcccctttagacagtgcaaatatagaatatttccatcatctcagaatgtttgagggggcagtgctggtttgaaaccagtatgttccatgcagaaagttttttgaaatgtttctctaaagtgtgttatctctcttttaagttatttatctaggtcacttttgaaaattgtcatttcataaaaagcaagacgtattatatatcatcttgtgatttgacaagtttgagaatttggaatagaattacaaaaataacttgtgaaaacacattaaaactgacttcaaatgatgatgwccttgtcgacaaagttctggtgttagggctaacaacaatcttttttttttttttcctacttgagaggcttaggcaggagaattgcttgaatctggaaggtggagcttgcagtgagacaagatcgcaccactgcacaccagcctgggtgacagagtgagactctgcctcaataaaaaaaaaaaag

SEQ ID NO: 569105 - DNA, 531 bp, Homo sapiens
agacttgacactgggtgcaatgttgtacaatatcttttgcctgtttccatgtgacatcaaatttgttttttaatcctgctgcatttacatgagtcaaagcatgaagttcttgtgcttttatgartgcagatgataccagtaagtcagcttcttcatttgctttagtcaaaggccctggtaaattagtgtgtgctcgaatatgagtaatataaaatgggaaatttctttttcttacagtttgttgtaataaatggaatagctggtttaactgatcatccatgctatatttaattagagctgtctcaacatcccttgtagcctgtactacatatgcagaatctgatataatattgataggttggtcaaaatcttgtagcactgtaatgactgcaaccaactctgctctctgagctgattgatatggagttttgattactcgttctttcggccctgtgtaagctgcttttccattgctggaaccatcagtacatactgttagagcattttctaaaggttcacgtctggtaattt

SEQ ID NO: 569106 - DNA, 531 bp, Homo sapiens
agacttgacactgggtgcaatgttgtacaatatcttttgcctgtttccatgtgacatcaaatttgttttttaatcctgctgcatttacatgagtcaaagcatgaagttcttgtgcttttatgagtgcagatgataccagtaagtcagcttsttcatttgctttagtcaaaggccctggtaaattagtgtgtgctcgaatatgagtaatataaaatgggaaatttctttttcttacagtttgttgtaataaatggaatagctggtttaactgatcatccatgctatatttaattagagctgtctcaacatcccttgtagcctgtactacatatgcagaatctgatataatattgataggttggtcaaaatcttgtagcactgtaatgactgcaaccaactctgctctctgagctgattgatatggagttttgattactcgttctttcggccctgtgtaagctgcttttccattgctggaaccatcagtacatactgttagagcattttctaaaggttcacgtctggtaattt

SEQ ID NO: 569107 - DNA, 531 bp, Homo sapiens
agacttgacactgggtgcaatgttgtacaatatcttttgcctgtttccatgtgacatcaaatttgttttttaatcctgctgcatttacatgagtcaaagcatgaagttcttgtgcttttatgagtgcagatgataccagtaagtcagcttcttcatttgctttagtcaaaggccctggtaaattagtgtgtgctcgaatatgagtaatataaaatgggaaatttctttttcttacagtttgttgtaataaatggaatagctggtttaactgatcrtccatgctatatttaattagagctgtctcaacatcccttgtagcctgtactacatatgcagaatctgatataatattgataggttggtcaaaatcttgtagcactgtaatgactgcaaccaactctgctctctgagctgattgatatggagttttgattactcgttctttcggccctgtgtaagctgcttttccattgctggaaccatcagtacatactgttagagcattttctaaaggttcacgtctggtaattt

SEQ ID NO: 569108 - DNA, 531 bp, Homo sapiens
agacttgacactgggtgcaatgttgtacaatatcttttgcctgtttccatgtgacatcaaatttgttttttaatcctgctgcatttacatgagtcaaagcatgaagttcttgtgcttttatgagtgcagatgataccagtaagtcagcttcttcatttgctttagtcaaaggccctggtaaattagtgtgtgctcgaatatgagtaatataaaatgggaaatttctttttcttacagtttgttgtaataaatggaatagctggtttaactgatcatccatgctatatttaattagagctgtctcaacatcccttgtagcctgtactacatatgcagaatctgatataatattgataggttggtcaaaatcttgtagcactgtaatgactgcaaccaactctgctctctgagctgattgatatggagttttgattactcgttctttyggccctgtgtaagctgcttttccattgctggaaccatcagtacatactgttagagcattttctaaaggttcacgtctggtaattt

SEQ ID NO: 569109 - DNA, 416 bp, Homo sapiens
ttaccggctctgctacatattcgcaatgtaaaccttccgtttctttctgggattttttccttgtgttttcattacaatctattatacagcttccaagggcatcagaaactgaaacactatcttcttctgtttgaaatggttctaaagctgctttaataatggcccaatcattccatactgtaagtggaatgayattacccttcctacctgcttgttttagttccttaccaattcttttccaatcttttagatctaaagttccttgttctggaaaccatgggcaaaattgttctattatttgaaatagcttgattagattttttgtagatactttaactccccctctttttaaaagaattttaataaagctgagataagaggcatatttacttttaattttacttttagtttgcccc

SEQ ID NO: 569110 - DNA, 422 bp, Homo sapiens
caccacgtcagtcttcccaaagtgctaggattacaggygtgagccaccgcatctggactgaagttgagttatatctttaaccctcactgtctaactttgagaaagcaatttagtctttctgtgccttggttttattatctataaaatgagggtataagcatcaacttactggggtaatttatgagaattagatgagttaatatatgaaatatatttagattaatccctggcatataatattttctcaataactgttaacaattgctattcattaaagtcttaataaaacaatacctacttcaaaaagaaaacagactagatagatgaatggagggtggctgagggtagttgcccattgtctatgcgtccaaagttggtgtatgtgtgaccaggaactcatcaggcagtattgtaatattcgt

SEQ ID NO: 569111 - DNA, 492 bp, Homo sapiens
cctttatttctcccccttcagaagctttccatccagtgggggcactatctgatcattcattaaagcrcacatgagtcacccacaatgaaagatattgtgggataaatgctttgggaatggtaccgaagacaggtgctataagaacccagaggagtatgtgttcacttcgggcttaaaagacatcaaagaagatcagtggaggagggagtggtgtgctagaaatcatacagcaaatatccagtggcaagaaaaggcacagcatattgggagtttcaagaagactggtttacctggagaggattctcatggtaaggtgaattgaaataaaattggaagctaagagtcagattgtatagggccttgaatgccaagttcagttgacttacacacatatagatgaggaagtgggagggaggtagctcccaaggtctcagaaatccaggtgataggactgaaattgtaacataaaatggctctttactttcagaattg

SEQ ID NO: 569112 - DNA, 492 bp, Homo sapiens
cctttatttctcccccttcagaagctttccatccagtgggggcactatctgatcattcattaaagcacacaygagtcacccacaatgaaagatattgtgggataaatgctttgggaatggtaccgaagacaggtgctataagaacccagaggagtatgtgttcacttcgggcttaaaagacatcaaagaagatcagtggaggagggagtggtgtgctagaaatcatacagcaaatatccagtggcaagaaaaggcacagcatattgggagtttcaagaagactggtttacctggagaggattctcatggtaaggtgaattgaaataaaattggaagctaagagtcagattgtatagggccttgaatgccaagttcagttgacttacacacatatagatgaggaagtgggagggaggtagctcccaaggtctcagaaatccaggtgataggactgaaattgtaacataaaatggctctttactttcagaattg

SEQ ID NO: 569113 - DNA, 492 bp, Homo sapiens
cctttatttctcccccttcagaagctttccatccagtgggggcactatctgatcattcattaaagcacacatgagtcacccacaatgaaagatattgtgggataaatgctttgggaatggtaccgaagacaggtgctataagaacccagaggagtatgtgttcacttcggrcttaaaagacatcaaagaagatcagtggaggagggagtggtgtgctagaaatcatacagcaaatatccagtggcaagaaaaggcacagcatattgggagtttcaagaagactggtttacctggagaggattctcatggtaaggtgaattgaaataaaattggaagctaagagtcagattgtatagggccttgaatgccaagttcagttgacttacacacatatagatgaggaagtgggagggaggtagctcccaaggtctcagaaatccaggtgataggactgaaattgtaacataaaatggctctttactttcagaattg

SEQ ID NO: 569114 - DNA, 492 bp, Homo sapiens
cctttatttctcccccttcagaagctttccatccagtgggggcactatctgatcattcattaaagcacacatgagtcacccacaatgaaagatattgtgggataaatgctttgggaatggtaccgaagacaggtgctataagaacccagaggagtatgtgttcacttcgggcttaaaagacatcaaagaagatcagtggaggagggagtggtgtgctagaaatcatacagcaaatatccagtggcaagaaaaggcacagcatattgggagtttcaagaagactggtttacctggagaggattctcatggtaaggtgaattgaaataaaattggaagctaagagtcagattgtatagggccttgaatgccaagttcagttgacttacacacatatagatgaggaagtgggagggaggtagctcccaaggtctcagaaatccaggtgataggactgaaattrtaacataaaatggctctttactttcagaattg

SEQ ID NO: 569115 - DNA, 533 bp, Homo sapiens
ttaacctcatgtccatggactgttggacttttaagttatctgtggaacccaagttgttgtaagaaaaaaatatgtttttatgcacatattcattttcaggaatgagaaggcaacagtttcattagattctcaagagagctgataaaacaaataatagcattaaataacatgctatgccagataaacaggaaaacatgtatcatctttstaaaatttattttccttaacctgcagacagctgggtgcggtggctcatgcctgtaatcccagcactttgggagaccaaggctggcggatcacctgaggttgggagttccagactagcctgaccaacatggagaaaccccatctctactaaaaatacaaacaattagccgggcatggtggcgcatgcctgtagtcccagctacacaggaagctgaggcaggagaattgcttgaacccgagaggcagaggttttggtgagccaagatcgcaccactgcactccagcctgggtaacaagtgtgaaactccatttaaaaaaaaaaaaaa

SEQ ID NO: 569116 - DNA, 533 bp, Homo sapiens
ttaacctcatgtccatggactgttggacttttaagttatctgtggaacccaagttgttgtaagaaaaaaatatgtttttatgcacatattcattttcaggaatgagaaggcaacagtttcattagattctcaagagagctgataaaacaaataatagcattaaataacatgctatgccagataaacaggaaaacatgtatcatctttctaaaatttattttccttaacctgcagacagctgggtgcggtggctcatgcctgtaatcccagcactttgggagaccaaggctggcggatcacctgaggttgggagttccagactagcctgaccaacatggagaaaccccatctctactaaaaatacaaacaattagccgggcrtggtggcgcatgcctgtagtcccagctacacaggaagctgaggcaggagaattgcttgaacccgagaggcagaggttttggtgagccaagatcgcaccactgcactccagcctgggtaacaagtgtgaaactccatttaaaaaaaaaaaaaa

SEQ ID NO: 569117 - DNA, 536 bp, Homo sapiens
atattcttcagcatatgctttttcatgttgtgacataagaagaatatattaggtctttgtccccattcctggcactgagctcctaaaacccttcaaaatcgctgggtaattggaatgtattttgttattcataacacgtcccttttgatcattcttgagtttatgctgatgaggtgacttaggaaggagcctctagagagcctcaggaygaggctgctcacaggaaaaaccaaatgattctaaggttggaatgttcagctccacccacagacctcagggaaggaaggtgctgctagagattaggcagaactctatgaaaactcttttttttttcccccagcacttgggaggccaaggtgggaggattgtttaaactcagttttttgagaccagcctgagcaacatagcaagatctcttctctgcaaaaagtaaaaattagaaaatagctgggcaagatagcatgcaccattagtcccagctactggtatggctaaggtgggaggattgcttgagcccaggagcttgaggctgcaga

SEQ ID NO: 569118 - DNA, 584 bp, Homo sapiens
agatctggagatgtttgctcatttggtcaatcattttttcaaatgacaaatttgaaaaattcatacttcatccaggtataacttagttgtaaaaatcacaacactgccaaacaattcaaacacctttagttgagtcattatgtttaagcttctttgatccttccttctctagagttacactaacatagtaacaaagggcagatttacagtccaaactgaaaagtcataattcaacacataattcctcagttgtcagccccaagtacaagattgatgatgaagttttgaactgacacaattattttaaaaatacttacttccaaatctacacaggaagtttatgtctataatgacttaggacatccaaaatgaacctatttcctaaggaggcacatcattcacagtatcagaaacccttgcaagtgttgcataatgatgacatcaatataacttatgcaaagtaaaagcgttaaaacattcctaaatacttagcctttatatgtccccttattttcacaaagcactttcagacaaattaktgttattattcatcacaatatcctaagatagacagccattatcat

SEQ ID NO: 569119 - DNA, 421 bp, Homo sapiens
ccattctggggtctggaggacagtggccctcttctcacagctcctctggcgatgccccagtagggactctgtgtgggggctatgaccccacatttctcttctacattgccctagcaaaggttccccatgatagccccacccctgctgcaaacttctgcctgggcatccaggtgtttccgtacatcttctaaaatataggcagaggttcccaaacctcatttcttgacttctgtgtacctgcaggctcaacaccacgtggaagctgccaaggcttggggcttgcaccacagactgtctatatttgaattccaagctccacattggcccctttcagccacggctggagcagctgggacacagggcacsaagtccctaggctgcacacggctcagcttggggaccctgggcccagcccatgaaa

SEQ ID NO: 569120 - DNA, 554 bp, Homo sapiens
gacctcatgactaatgctgaatgygttgcaagcttgctttcagttctccctctcccttcttctctgattaactttataaagtttatagggacagttttaccatctatctctaaagttttggttagctgtaatagcctatattcttttttcttctgatgtaagttatggtaatgagacatctttcaaactgtttgaaattaactgtggattgaaaagtaaatcaaacatatcataaaaataaacattgtcagaagatattaccagcatttttcaagcagtaacggtttctgaagtaatatgattataaatcccttttatgccagtcagcctgaatatctccctccctctcctccctccctctccactctttctctgctttcctctctccctctctcgcttatctcactctgtctcgctcatgtccatatgcctcatacagtgtattgtagggctcacaattattttcaaggctatttccatcattttaatgatctgaatatttagaaacacctagaagtatgacatattacttaaatttgcagtagcgttttagt

SEQ ID NO: 569121 - DNA, 523 bp, Homo sapiens
taatttacccatccgtaaaataggaatgatgatgactatttgyaaggttgttatgaatattaaataagatagtaaattataaataaaagtcactgaaacttaataggtggtcagtaaatggcactagctattgttagttgcaaggcatgcaaggtcctttaggccagcttgttctgtcttgctccttcctctctcccacaccctaattctataactcaattctgtacccctctcttattaccccatcctcagacccctactccttcgcccaagctgttccatctctccagtgggctttttatctttctattgcctgctttaaaactacaacccatccttcaagacttgactcaaatagtcacctttctctagggtattaaaggaattttggagacagaagagaaatggaacatttctcactcaaaattgggagactgagtttaaaagggtgggattatcagtctctgacattttgcttagtgaggtttgcaggtaccaactttaaaataattcattcccactt

SEQ ID NO: 569122 - DNA, 431 bp, Homo sapiens
gcagcataaggaaagattataaaccccatccccttaaattgcctttaaataaaagtttaatttaaaaaaactatataaattatatgcttcttgcccaaatgccccatcaaggaaacaaactcattcatgtcagaacaaactttgggattagaccaatttctaagaaaaaaatgcaagagggaaatgtgcagctaatgagacttaatggggaaaaagagctaatatttattaagcactgtattggtcagcatacactggattatatcactgtaacaaataagctccaaatctcagtgacttgtacaagaaaagctcatgtcttgctttggctacaggtcaaagttaggttggtatctgtgtgggggttggtgtgtcttcactcactgaagttatgcagagacacagataartgaagcttcatctcaacatgt

SEQ ID NO: 569123 - DNA, 362 bp, Homo sapiens
agatatatggatctcaagaattgttcagagtactgaatcataagagtgacgctgtcttgtggtgcttgaaatatatatatagaaataaaatatacccataacacaaatggtaaaggggttaaatgaagttaaagtgttctagggtaattgaattgtctgggaagtggtaaaagtgctaattagattagacagaggcactgtagtgacacaagaatacatgttataatttctagtttacctattaaaataacagcaaaaggatgtataacaaggtaaaaaggggagaatataaaatcatgaaaacattgatycatataaaagaaagcaaggaagggaagaacaggtaacagagaaaacaaata

SEQ ID NO: 569124 - DNA, 589 bp, Homo sapiens
cagttccacagggctagggaggtctcacaatcatggtggaaggcaagggggagcaagtcatttcttaagtggatggcaacaggcaaagagagacaatttgtgcaggggaactcctcttcataaaatcatcagatcttgtgagacttattcactatcgtgagaacagcatgggaaagacttgcccctatgattcaattacctcccactgkgtccctcccacaacacatgggaattcaagatgagatttggatgtggatacagacccaaaccatatcattctgccccggcccctgccaaatctcaagtcctcacatttcaaaagcaatcatgccttcctaaccatccccaaaagtcttaactcattccagtattaactcaaaagcccacagtccaacgtctcatctgagacaaatgccttccacctatgagcctgtaaaatcaaaagcaacttagttacttcctagatacagtaggagtacatgcattgggtaaatacaaccattccaaatgggaaaaactggcaaaacaaaggggctacaatccccatgcaagtctgaaatccagtggggcagtcaaatctttaagttcc

SEQ ID NO: 569125 - DNA, 622 bp, Homo sapiens
taagttgggtgtattcagtcrgtttcatttctggtcaatttcaggggcctaaggctcagctcagaatttctgaactgcatgatcttaccctgagtggctgggatcaggcccacagattcattctctggcccctaaagttaagcacctgctatgctagaggagccaaggtggtcctggtttgctggcaacaacacttcaatgggggagtgccagcaaaacctttttgtcagggctgtggccatggggtctgcacatatacacacacacgggccagtagtggtagggtggcagcacactgggatctacgtacacccatgctttggcagcaggtaggacatggggtctgtatgtatgtgctgacaagagcagggcagtggtaggttcctgtgcatgcatgtgagcaagttagaaaggggaggctgtgggcaagtatgtgctggaaggtacccatctgctgaagctgtctgatggttaagcagagtctcttggcaaaggagctatggtggtgaccactgaaaagtgccctggttgggcatgcaaggatgtgctacaagtgggtgcatccaggcagggaccccaggagaggccagcagacaggggagtgctcagatttgactgacct

SEQ ID NO: 569126 - DNA, 444 bp, Homo sapiens
attcttatatttaaaaagtagtattacattaaaaagaagaaaattacagttaataaagcttcaggagacagtaatagaaaatgttagttgggtgcagtggctcacacctataatcctagcactttgggaggctgaggctggaggatcacttgaggccaggagtttgagaccagtgtgggcaacatagtgagaccccttctctacaaaaaaaaaatatatacacacatatatatatatatatatatatatactttttttaatgagttgggtgtggtggcatcttcccatctcagcctccttagtasctggtgatacgaatgccagtaggtccacttcaatcaccagctccctgaaatctgttgtttgtttgttttatctaagttcaaaatactgactatgagggttatttagggtttattctctctagggaaaatttattggact

SEQ ID NO: 569127 - DNA, 577 bp, Homo sapiens
ttttctgaaatgccaaattaaaaatttcagaaagaattatatctgtggctttgctacatgctcatagaagttctgggtttctagcttatttttgttaatcattcaaagcagggctgtgtgtaaacatgtgtaatgtaaacatacgctgtcctyggtggattgtttagactctatttagagtagactgagaggtgtgtcacattccaatacaccagtaggaagctatggaaggctctgtgtgaacagcctgttctctgtccactctggcatgcttctgtcttcctgagttcctcatgtgccctctttggtacacctaaagatccagctggcttacaactttctgatttattcatagagtgtgtttgagtcttggttgcaccccttagtgtcagtatcttaacttctctcagccatcatttccttatatataaataactcccatggctataaatttatcttaacagggaattacaaagacatagaggttttgacaaagactcctttgcatctgtctatccctggtgtacaataattacatctgaatcatcttttaatcagctagctcaggcccaaagca

SEQ ID NO: 569128 - DNA, 577 bp, Homo sapiens
ttttctgaaatgccaaattaaaaatttcagaaagaattatatctgtggctttgctacatgctcatagaagttctgggtttctagcttatttttgttaatcattcaaagcagggctgtgtgtaaacatgtgtaatgtaaacatacgctgtcctcggtggattgtttagactctatttagagtagactgagaggtgtgtcacattccaatacaccagtaggaagctatggaaggctctgtgtgaacagcctgttctctgtccactctggcatgcttctgtcttcctgagttcctcatgtsccctctttggtacacctaaagatccagctggcttacaactttctgatttattcatagagtgtgtttgagtcttggttgcaccccttagtgtcagtatcttaacttctctcagccatcatttccttatatataaataactcccatggctataaatttatcttaacagggaattacaaagacatagaggttttgacaaagactcctttgcatctgtctatccctggtgtacaataattacatctgaatcatcttttaatcagctagctcaggcccaaagca

SEQ ID NO: 569129 - DNA, 447 bp, Homo sapiens
gcacaggagccaccagtcctaggggctgcagcccaaggggtcaggggccstgggggaacagtgttctggttaacgaggggcttcctagaaagagggcacagtgcccaggaggtggcaatctttgagtctataatcacctcactttttgcagaaaaaggaaaaaaactcaaaagtcctaagtaaaccaggaaaataaaatttgaagctccctctcaaccctgcttttcttttttttttaaaaaaaaaaaaaacagatcatgcccttccccttctcaatcgccatcccactcatgtgcaatgattcctctagcataggattagagagtgagggttatttacgtggaggggaaatcctgaccctgaggagtcatcagatgctgcaaatgtggccctgtgaagttaaacactctcccttgaccccgggcccttggagtggagggggagagg

SEQ ID NO: 569130 - DNA, 477 bp, Homo sapiens
gtggtggtgttccttttagaacacaatttgaatttacagttaaacttgtaattataatttaaattgccaatcctcccaatttctgcaagcatcacagcactagtcctcacagtgtctccatgtggtgagcacagtcaagactgttctgccaaacactgaaggagaaccaggacaccaactgtataccacacctagcctagtgcccagcacgaagcaagggcacggtcagcagttcacaaatgaatctcatgcamgtcctttgactgcatagggaacagagactcaaaagaggagaagcaagccacccaagtgactttttaacacttccttaacccagcaccctcccccaaactccatgccacacatgcagtattccatcccactgtagcatgcctggctgcagttctacagttacaagcattgccacccttgcccacctctgcctgggcctactgcctggtttgtttttgacccact

SEQ ID NO: 569131 - DNA, 477 bp, Homo sapiens
gtggtggtgttccttttagaacacaatttgaatttacagttaaacttgtaattataatttaaattgccaatcctcccaatttctgcaagcatcacagcactagtcctcacagtgtctccatgtggtgagcacagtcaagactgttctgccaaacactgaaggagaaccaggacaccaactgtataccacacctagcctagtgcccagcacgaagcaagggcacggtcagcagttcacaaatgaatctcatgcacgtcctttgactgcatagggaacagagactcaaaagasgagaagcaagccacccaagtgactttttaacacttccttaacccagcaccctcccccaaactccatgccacacatgcagtattccatcccactgtagcatgcctggctgcagttctacagttacaagcattgccacccttgcccacctctgcctgggcctactgcctggtttgtttttgacccact

SEQ ID NO: 569132 - DNA, 613 bp, Homo sapiens
ttctaacagacatttgggatattctacattcatgtttctggaatatgagccattttacaaaacattgaaagattaatttccttaaggttcaacagcaattatataatgctcaggcttgaaagaaaattcaaaggttttctattgctatccaaattaagtgcaatgtcctcacttgcatggtcatcctgaacagctgctcatgatgctccrttcaacattgtgcaatagccagctgtgaatgacaaatccttgagtcgtgcagaatacaacctgttcaaccacatgtggcagtctagcaacccaggactttagaacatggccccaaattatcatttctgtcacatttcccactactcacctagagttacatttgacctcaatgttacccatttttataagtcctctgtgttaatgcaaaaaagaaaaaatctcatgcctttctggagatttcaataaaaaccttctcttgtagtgaatcctttccttctccttaaaaagcactgaactgcagattcatatattcctatgggccaagacgattgattttagctttactctctgtaatatctatttattattaaaacaatagttgttatgctttccaatgattata

SEQ ID NO: 569133 - DNA, 443 bp, Homo sapiens
ttaattattttgcatgtgatataattkttttacatagaaaaaatgaagaaaattgttatgattaaaaagagagtttagcaggttttctttataggacaactgaatagtattccactacaccagcaataggaaatattttaattttaaaacatatttttatgttaacattgaccaaacacttgaccattatcttaatttgttcaggctgctataacaaaatgccttaaattagataattagtaaacaacagacatttatttcttataattctggaggctgggaagttcaagatcaaagtggctgtggtatctggtaagggcctgctccctcatggatggtgctttttagctgtgtcttcacatgatggaaagataatataatataatcacctcccaaagaccccaacacttaatactatcaccttgggggttaggatttcaaca

SEQ ID NO: 569134 - DNA, 366 bp, Homo sapiens
caggtctggtgctggagtccacagcaaagttaggtgctcactttaatcttcttttcccacacaaagggtatctctctctctctgtctccatgctatactgcctgggcttaggggagaggtgacatacataatgtgatactatctttcctaatctcttaatgcgtcttatttctgtgctccatccaggtgctgtaatagctcacctggatttcttagttcatgtgaaggtatttttgtgcacagatagttattcaaatttatgtttctatgagggggcgagtgctggaagttctatccaccatcttgctgacgtctcctatgaggtgatttttttttttwaaaaaaaaaagctctcaaacaaaccag

SEQ ID NO: 569135 - DNA, 606 bp, Homo sapiens
ccacatgacccaacaatcacaatccttgctatatgctgaagataaatgaaaatagtccacacgaaacgytataaatgaatattcatggcagaattcttcataataattgaaaaatgggaagaagccaaatgccccatcaaatgttgaacaggtaaataaaatgggtacatcaacacaatggaatattatttggcaataaaaagaaacaaagtactgattcatagtacaatgtggaaaaaccttgaaaacattatgctatgtgaaagaatgatgtcataaaagcctacatatttcttgattccatgtatataaatgtctacaacaggcaaagctacagagacagaaagtggattagtggttgctaaggaaggactagggtagttgggagtaatccaactgactgttaaaaggttagtactaaagattttcttttgggggtggataaagttgttttaaaattgattgagtgtgctggacatggtgactcgtgcctttaattgcagctagtcagaaggctgagaccagagactggcctaagcaacagcagagtgagaccctatctccacacacacacacacaaaaaaattgactgaggtcatagttgtg

SEQ ID NO: 569136 - DNA, 606 bp, Homo sapiens
ccacatgacccaacaatcacaatccttgctatatgctgaagataaatgaaaatagtccacacgaaacgttataaatgaatattcatggcagaattcttcataataattgaaaaatgggaagaagccaaatgccccatcaaatgttgaacaggtaaataaaatgggtacatcaacacaatggaatattatttggcaataaaaagaaacaaagtactgattcatagtacaatgtggaaaaaccttgaaaacattatgctatgtgaaagaatgatgtcataaaagcctacatatttcttgattccatgtatataaatgtctacaacaggcaaagctacagagacagaaagtggattagtggttgctaaggaaggactagggtagttgggagtaatccaactgactgttaaaaggttagtactaaagattttcttttgggggtggataaagttgttttaaaattgattgagtgtgctggacatggtgactcgtgcctttaattgcagctagtcagaaggctgagaccagagactggcctaagcaacagcagagtgagaccctatctccacacacacacacamaaaaaaattgactgaggtcatagttgtg

SEQ ID NO: 569137 - DNA, 596 bp, Homo sapiens
cacacatttacctatgtaacaaacctgcacatcctacacatgtacccctgtacttaaaatgaaagttgtttttttttaaagagacaaccaatgcaaaaggaaaagagattgatgcaatatttggaaagggtaacacattagttagctaatgtttcagctgggatttttttttatgaacacattataaaacaacatrgtctgacaagaggcaacaaaattatgagagatatggaacatgggtatgttacactgggaatggggtggtagccagtgaattgaacaatgagggaaaatgcaaagcatcaactattgtctcaaaataatgaatcctgtagcaacaggccttatgaaggcaggagcacccatgaaaccttcgctgcagagatagagcaaggagaagcaatcaacagaaaaaaatctaaaactatctgccaacttcacagttttgcttgtgagtagtcttaagaaacagaaatgtagaatgaattttttttaattcattccaaaagctaggagcagccacttttgctcacactccttatttcatttttctggatatacacaattatttcccgtaagcacagaaattcagaaag

SEQ ID NO: 569138 - DNA, 421 bp, Homo sapiens
ccttcatgtattaatttttatatgtggtgaaaagtagggatccagtttcattgttctgcatatggcaagccagctattccagcaccatttattgaatagtcggtcctttccccattgcttttttgttgttgactttgtcgaagatcagatagctataggtgygtggctttatttctgggtattctattctcttccactggtctatgtgtctgcttttgtaccggtactatattggttactgcagactttattgtatagtttgaagttgggtaatgtgatgcctccagctttgttctttttgcttaggattgctttggctattcaagcttttttgttttttttggtttcatatacattttcgaatagttttctgtagttctgtgaaaaatgacagtggtagcttaataggaatagcgtttag

SEQ ID NO: 569139 - DNA, 614 bp, Homo sapiens
tttcttattctcccatctcactttgcacataccaccaaaaaaaaaatgataatcttgttgctttattatttttgcatgtttgttttactttctgcactttgatttctttgagaatagaaattaccttttcttctctagattcctagtgactatcatagggactagttcataaaatatattctataaatgctattgaagtcatattggattttaataagtatttattgagcctttaaaagagctttacagcgctctcatttcattcatacagaaattgagacttaacttgagccttaagtcaacagcttgataagattttgtgcaaaggcacaaaatcattaatagaaaaattacacctcattaatagaaaaatcatatgtagaaagagaaagagaaaataagtagaaagagaaaataatgatgagcattttttcatgtgtctcttggctgcataaatgtcttcttttgagaagtgtctgttcatatcctttgcccacttgttgatggggttgtttgtttttttcttgtarattttttcgagttctttgtagattctggatattagccctttgtcagatgagtagattgcaaaaattttctcccagagaaatgca

SEQ ID NO: 569140 - DNA, 595 bp, Homo sapiens
ggccatccaaagtacatagacatgaaaggctgacagttaaggaatggaaaaagagagatcaacagacatggaaatgagtctctgatatactaacatcatttgtrgtatttgaaaaaaattcactttttccaagctacactggacagtacattcaaatataatccccatctttaagtgtgtaactgaccatttcttgatgtgactatgaaccctctcctagcttagttgggattactttccctgatgtgccacaggccatcttgagcaaaatgttgcgtaggtgcagccctatcctgttagtgtcatttataaatagtgtgtcatttataaatagtggtatggatttggattttcacaagggccttcccttaaggagtttaatgtgacattttcatgcaggctgttaggaaaaaaaatttttttttttttgaggtggagtcttgctctgtcgcccaagctgaagtgcagtggcgctatctcggctcactgcaagctccaccacccaggttcatgccattctcctgcctcagcttcccgagtagctgggattacaggcgcccactaccacacctggctaattttttgtatttttagt

SEQ ID NO: 569141 - DNA, 414 bp, Homo sapiens
gcaaggaatggattatttcctggagcctctaaaaggaaccagtcctggcaacaccttaattttagtcccataagactcctcacagacttttgacttccagaactagaagagaataaatgtgtgttagttcaagccactaagtttatggtaatattggctggcaataggaaactaatacaccacgtggtttacatattttaaaatactttaatcctgtaaagtagacattatttttaccattttaaggctgaataacttgaagttccaatacatgaaatgattggcccaaggccatataggtgacaagtatcagagttagcattcaaatgcaggtcaaacttcaatattaatgccgttgccattgaaacactattttagcttctgttttctgcyagtgagtaaattaaggaatga

SEQ ID NO: 569142 - DNA, 615 bp, Homo sapiens
ggtagccagggagtggttacagcaggcattggrtgagacccagcactgtgctggcttcccgtgtgacccactgcagtcatagtggtagtggccacaggctgtgcctgagtcactccgccctcactttaggtgactcagaacagagagagagagagactctgtatgttttggagaaagtaagggaagataacaagaatctatgcctggtaatccagagaattctcccacatcttatccaagacaatcaaggtggtacctctataagtctgcaagaactgcggtgttactgggcttgttgtgctccctaaatcagaaacagcttagatcacaacacccaagtcctttcaaaatatttgaaaagtcttcccaagaaagatggctacaaataagcccagacactggagacaacaataaatacctaactcttcaatgcacaccaccaaagaacatttactagcttcaataccaccaagggaaacatgccctcaccaagtgaagtaaatagggcaccagagaccaatcctggagaaatagagatatgtgacctttcagacagggcattcaaaatagctgtgttgaggaaactcaaagaaattcaagataacacagagaagg

SEQ ID NO: 569143 - DNA, 484 bp, Homo sapiens
agtattatttcccagtggtaatcataactttgaaacgctaagaaaggaacaaatccagcgtctagcaaaaagacttgcatgctgagttgaaccatactcattcatacattcactcattcattcaacgaatatttatagggtgctaggattttgccaggtactaagaatacaatgctgagaaaaaaaaatacatagcccctgtcttcatggagtttacagtctagtagtaaattcaaattccatcagatcaatgtatatttcctagtcatgttctgagaatgcttytgattcaggatttttgctcttcagttcagctaagtccaggttcttttcttacgaccaggaaaaaattaggcacgcagacacgtggaaggatgaggagggcagaatttattaagcaaaaggaaagttctcagcaaacagaggggtcctgcatgcagacttccacctcacaaattgaacaccaggtccagcacacctgagc

SEQ ID NO: 569144 - DNA, 589 bp, Homo sapiens
accaccacgcccagctaatttttttgtatttttagtagagacagsgtttcaccatgttggccaggatggtctcgagctcttgacctcatgatccacctgcctcagcctcccaaagtgctgggattagaggcgtgagccaccatgcctggcctatcacctgtatttttctaataaaaattaagagactctaagaaattacgttactgcacctaatttaatattgattcttctaattttgaatccaatgttcttttcagagccttttcatgtactctcacactttgctcagtgtctgttacaaaaaagattcacagcaatggtgcaataaatgaataaatgaatggacacatgtcctaagaaaagaagacactctattgaacatattttgtactgatatgctaggtacaaaatatattttgcatcgatatgctaggtactcaccttttatccaacgaataaaatgacttgtgcaaagattggatctttctaggttgcattataagaacaaaacagcaataggaacaactgatttgaaacaataaagattaaagtacactctctctgaagaatttggaattcatttaaacag

SEQ ID NO: 569145 - DNA, 569 bp, Homo sapiens
taaatagttgtgatcaaaatggtgacagtaatatggacagtgaaggctgggttgaggaggtctcagatggaaagaggaacttactggaacctggagcaatagtcacatatgttatgtcctagcaaaaagcttggtgcattctgttcatgtcctagggatctgtggaagtttgaacatcagagtgacaacctagggcatctggtggaagaagagcccataaaagtttggaaaatttgcagccttgccatgtggcaaagaaagaaaaagtgcttgcccatgcatatgtcctgaatggtattgcctaggttatcttgtagggtttgtatggtattaggtctaacatwtaagtctttaatccatcttgaattaatttttgtataaggtgtaaggaagggatccagtttcagctttctacatatggatagccagttttgccagcaccatttgttaaatagagaatcctttccccatttcttgtttattgtcaggtttgtcaaagatcagatagttgtagatgtttggtattatttcagagggctctgttctgttccattggtctataaattttt

SEQ ID NO: 569146 - DNA, 573 bp, Homo sapiens
tatgggagattcatgctttggtgaacctgtatcctgcagctgctgcaggcttcctacatagcwgttgcactgaaaccagtcggaatttaaagtaattgctacttgcagtgcagtttaagaggaaagaataaccaaacggacagccaggatggttgtactaatacgctacaggttaagaatattatttcacgcttctgtaacttttgatgaactgcagagtcaggaggaaacatggaggtcattctgccagatgttttcatttcagatatacggtgaatgaagtcacagaagggacagggaactacccatgatcaagttcagaaataataaaaatctgccctgaactctgatattatttttgtggaaaaggtgtagagcaaggaaactagctatagacagctgtggtgaaaattagacaggagtgaaatgcttttcagctgtttaagtgtttcattctccaaagaacctgcaacaattaggcttctttgtggcatgcacaatgtttacaaatgtggactttgggccaggcgcggtggttcacgcctgtaattcccagcactttgggaagcccag

SEQ ID NO: 569147 - DNA, 573 bp, Homo sapiens
tatgggagattcatgctttggtgaacctgtatcctgcagctgctgcaggcttcctacatagctgttgcactgaaaccagtcggaatttaaagtaattgctacttgcagtgcagtttaagaggaaagaataaccaaacggacagccaggatggttgtactaatacgctacaggttaagaatattatttcacgcttctgtaacttttgatgaactgcagagtcaggaggaaacatggaggtcattctgccagatgttttcatttcagatatacggtgaatgaagtcacagaagggacagggaactaccyatgatcaagttcagaaataataaaaatctgccctgaactctgatattatttttgtggaaaaggtgtagagcaaggaaactagctatagacagctgtggtgaaaattagacaggagtgaaatgcttttcagctgtttaagtgtttcattctccaaagaacctgcaacaattaggcttctttgtggcatgcacaatgtttacaaatgtggactttgggccaggcgcggtggttcacgcctgtaattcccagcactttgggaagcccag

SEQ ID NO: 569148 - DNA, 592 bp, Homo sapiens
aagaatatgggcaacaaaattgaaataaatcacattgcagatgaaaataagaacacagacatcacccacccattcattcagtcactcatgtattcagtaaatatctgatgagtatgtctcagtatttagggctattaccacagaataccttagactgggtggcttaaacaacaatttatttctcacagttctgaaagctgagaagcccaagatcaatgtgcagctcttgtctagtgtttatggagggcacacttcctggtttgcaggcagccatcttctcattgtatcctcacttggttgaaagagaatctctctctctctctctctstgtgtgtgtgtgtgtgtgtgtttactataaggatactaatcctattaatgaagggctctacctttccgacctaatgccttctcacaggtcctaatactgtctcccaataccattacattgggtgttaggatttcaacatataaagtttgggttgaggcaggcacaaacattaagtagaaaacagaagacctattatatttcgtgtactgtgccatcaaggaaagcaaatataatgtcaatgattgtcatcccacagtataagct

SEQ ID NO: 569149 - DNA, 502 bp, Homo sapiens
acaacattgcttattgatttgaagcaatgggggtggagtcaaaacacctgaatttagcttatgtctccatcagagggtatatacatgtcctcgggtcagattgtatgatatcatcaagcctcctatataaatgagtataaaatatccaacttcattgaatggtataaaacaaaattaggtaagtccactaaaaatagatttttgtgtgtatgcttstgtatgtatatttatgtacatatatgcatatgtacatatatgtatacatacatatttagcatagtttagtcaacaaatattaatatttattgatattaatgatctagattttgatgattccttcaattctatattccttttaggtaaaatatgcatctaatcaataatcatcagacaattttgatctgcattgttcacattttgggatggataatttttttgctgggggttgttctatgagttgtaggatgtttagcagcatttctagcttctactttctagatac

SEQ ID NO: 569150 - DNA, 550 bp, Homo sapiens
ttggagtgcagtggcacaatctcagctcactgcaacctctgcctcccaggttcaagtgattctcctgcctcagcctgttgagtagctgggactacagacacctccaccatatccagctaatttttgtatttttagtacaggcggagtttcaccattctgaccaggctggtatcgaactcctgacctcttgatctgcscacctcggcctcccaaagtgctgggattacaggcgtgacaccgcacctggcctcattttttcaaaaacaacacataccatggcttcatttaagatttttctgagaatctctggaatgtggccagatatttgaattattaaaaaacccaaagaagcagacagaatcaaagcaaatctattcctccataacatcttgaattgagattcactgataagtggtgttattgtatctccatgaaaatttttggtggctatttatcaaagtgtgctttgcttctgagaagagttaaaatcataatggggaactttcaactgcatttccaggaacaaagccaaccttagtcaaccaaataa

SEQ ID NO: 569151 - DNA, 532 bp, Homo sapiens
agaaatatctgcactcctgtgtttattgcagcactgttcacaatagccaagattttgaatcaacctaagttgtccatcaaccgataaatggataagaaaaatgtggtacatatacacggtggagtactattcagccatataaagaaagagattctgtcatttgcaacaacatggatggaactggagatcattatgttaagtgaaataacccaggcaccgaaagacaaacttcacatgttcccacttatctgtgggagctaaaaattaaaacaattcaacttatgaagatagrgagtaggaggatggttatcaaaggctgtgaagggtagtggggggtgggggagtcggggggaggtggaaatggtaaatgggtagaaaaaacagaaagaatgaataagacctactatttggtggcacaacagggtgaatatagtcaataataatataattgtgcagttaaaaataactaaaagagtataattggattgtttgtaacacaaaggataaatgctgaggtgatggaaacctcatt

SEQ ID NO: 569152 - DNA, 531 bp, Homo sapiens
tgaatcctatgaaacaactgtctttggctactataaattgctctctttcttacattatgtattttacatgtacctatttccccatagaaaatagattttaaaaacacacacacagaatatagtgaatattaagtatattaatttataattacttgggtaagaaccacacaggagagagagaaagaggaagaagagatctaatcaatgatacatctataaatmtcatatatatatatggtctgattttttaaaaagtatacggatggcaaatacagacagcctggcaaataaaatagcagattttcacttatacttcccaactgtactgctaccattgagtaattcaaaatctcttagactaacaggagttcttaaccttttttacaccatgaaccccatcaacaatctggggatgtcaacgaaccctttttttccaataataatttaacatttgtaaataaaatgcatataataaaggatatcaattaatttttaaaatcagcaaaatcttaaaatcacaatatgaaaata

SEQ ID NO: 569153 - DNA, 531 bp, Homo sapiens
tgaatcctatgaaacaactgtctttggctactataaattgctctctttcttacattatgtattttacatgtacctatttccccatagaaaatagattttaaaaacacacacacagaatatagtgaatattaagtatattaatttataattacttgggtaagaaccacacaggagagagagaaagaggaagaagagatctaatcaatgatacatctataaatctcatatatatatatggtctgattttttaaaaagtatacggatggcaaatacagacagcctggcaaataaaatagcagattttcacttatacttcccaactgtactgctaccattgagtaattcaaaatctcttagactaacaggagttcttaaccttttttacaccatgaaccccatcaacaatctggggatgtcaacgaaccctttttttccaataataatttaacatttgyaaataaaatgcatataataaaggatatcaattaatttttaaaatcagcaaaatcttaaaatcacaatatgaaaata

SEQ ID NO: 569154 - DNA, 607 bp, Homo sapiens
gaggtttaactgactcacatttccacgtggctggggaggcctcaggaaacttacaatcctggcggaagtcacctcttcrtagggttgcaggagagagaatgagtgcggagcaaagggggaagccccttatgaaaccatcagatctcgcgagaccttactatcacgagaacagcatgggggaaaccatcctcatgattcaattacctcccactgggtccctcccaccacatgtggggattatgggaactgcaagatgagatttgggtggggatgaagccaaaccatattagcccagaaagctgatatgatttttagattgctttagtatagattagaacacagagtcctgtgaaatccttattctccttagggtatcagtactcctactttctttgttaccactttcttatgttaagaggaataatgaatttcagaatgggggagtgagaaggtgtggttgatagagactaccttttctattagagactgagctatgccccccacttttttagactggatatgtaaattaccagctgaatgtttcagtaattggacttccttggagaaactcttcttgatctcctcccagcagggttaagtgcagcct

SEQ ID NO: 569155 - DNA, 533 bp, Homo sapiens
agtggtgatagtgggcatccttgtcatgttccagatcttagaggaaaggctttcagtttttcccagttctgtatgattctagctgtggatctgtcatatatagtttttattatattgagatatgttccttctatctstagttttttgaaggtttttatcatgaagagatgttgaatttaacaaatgcgttctcagcatcaattgaaatgatgtacatttgaaaactgtacatttttaaataacttaaagagtataattggattgtttgcaactcaatggataaacatttgaggaggtggattaaaaaatcttaataaatgaatgttaagaataatgctatactcatgattctaataatttatatgaaatttaccaattgcttgaaagttacaaagttacaaaacaaagataagtttttttatccttcattctgttgatatgtgtatcacattgattgatttgcatatgttgaaacatcccagggataaattccacttggtcatgaggaatgatctttctaatatattgttgaa

SEQ ID NO: 569156 - DNA, 591 bp, Homo sapiens
ttctgtccacttgaggcacaacttcctttttaaatttttgactctttgagaacttttaaagtgggaatcagaaagaaatttatactgtcttgatagataccttaagactgtctgtccaccagatgtcaccctgacttcttaagagccatagaaaacaaaagagctagacttccttgtttgttatttttgacagtgcatatataaactgatgatagattaagtcttaaataggggccgggacaggtgggattggaaaaaaaaaaaccaaggtttatttccttatatatgtgagacggagtttctcttttgttgcccaggctggagtgcaatgatctcggctcactgcaacctctgcctcctgggttcaagcgattcttctgcctcagcctctggagtagctgggattacaggtgagtgccaccatgcccggctgattttttgtgtttttagtagagacacagtttcaccatgttggccaggctggtctcgaagtcctgccctcaggtgatacasccacctcggcctcctaaagtgctgggattacaggcgtgagctaccacacccggcctttattttttttttttattaatt

SEQ ID NO: 569157 - DNA, 523 bp, Homo sapiens
aagctcaactactgatagtctcttatgggctgcttgctctaaaagttcaatttaatctcctgttgcagcatggagatttgagaggtagagaagtaattactcctgtccctggaagatcaggctcttgtccattaaggaatttaagccagttttagagatgatttaaaaagctattttgacatatacagtacataaatttgaataaccgtatcagcatggtttccaataggttttatgtttgtttttgattttttgagacaggatcttgttctgtctcccaggctgaagtgaagtggtgcaatcatggctcactgcagccttgactttctggatttaarctctcctcttgcctgttcactcagcctcctgagtagctaggatcacgggtgcacactgccacacccagctaattttttttcttttttttgtagagaggaggtttctctatgtttcccaggctggtcttgaactcctgggcttaagtaatcctcccacctcggcctcccaaagtgctgagattaca

SEQ ID NO: 569158 - DNA, 519 bp, Homo sapiens
tagtcccacctactcgggaggctgacgcaggggaatcgcttgaacctgggaggtggaggttgcagtgagccaagattacgccactgcactccagcctggtgacagagcaagwctccatctcaaaaataaaataaaatttaaaaatgctaacaatcatctgaacttttagcaagtcataatctttttgctggtgaagactcttgcttcattgttgatggctacggactgatcagggtggggttgctgaaggttgtcggggtagctgtggccatttctgaaaaaacaacaatgaagtttgctgcattgattgattcttcctttcataaaagatttctctgtagcatgcaatgctgtttgatagcattttaccttgtgtagaactgctttcaaaattggagtcaatcctctcaagccctgccactgctttgtcaactaaggttatgtaatattctaaatcgtttgtggtcatttctacaaagctcacagcatcttcactgtgagatttcatctcaagaaact

SEQ ID NO: 569159 - DNA, 519 bp, Homo sapiens
tagtcccacctactcgggaggctgacgcaggggaatcgcttgaacctgggaggtggaggttgcagtgagccaagattacgccactgcactccagcctggtgacagagcaagtctccatctcaaaaataaaataaaatttaaaaatgctaacaatcatctgaacttttagcaagtcataatctttttgctggtgaagactcttgcttcattgttgatggctacggactgatcagggtggggttgctgaaggttgtcggggtagctgtggccatttctgaaaaaacaacaatgaagtttgctgcattgattgattcttcctttcayaaaagatttctctgtagcatgcaatgctgtttgatagcattttaccttgtgtagaactgctttcaaaattggagtcaatcctctcaagccctgccactgctttgtcaactaaggttatgtaatattctaaatcgtttgtggtcatttctacaaagctcacagcatcttcactgtgagatttcatctcaagaaact

SEQ ID NO: 569160 - DNA, 366 bp, Homo sapiens
attcacaataaccacaaaaagaatcagatacctaggaatacagctaaccagggaggtgaaagatcaatgcaacaagaattacaaaacaccactgaaagaaatcagagatgacacaagcaaatggaaraacattccatgctcacggattggaagaatcaatattgttaaaatggccatactgccccaaacaattaactgatttgatgctattcttatcaaaatgcctatgtcatttttcaaaaaattaaaaaaaaattctcaaatttatatggaaccataaagaagcccaaatagccaaagcaagccatgtgtataagattgaaactggacccctacctttcactacttacaaaaatcaactcaaaa

SEQ ID NO: 569161 - DNA, 578 bp, Homo sapiens
tccatggcagctatagccttacaaaatgtatttctgaaataataagacttgaaagtcaaaattaccctttgatccatggcttcaggggtattttgttagcaggaatgaaaacaacattaatctccytatacatctccgtcagagcttttgggtgactaggtgcattgtcaataagcagaaatattttgaaggaaatctttttttctaagcagtaggccccaacagtggcttaaaatatttaattaaattattaaatattttaatctggtttaacatatttaattaaattatgctataaacagatgtgctatcatccaggctttgttatttcatttacagagcgcaggaagagtagatttagcataattcttaagggccctagggttttcagaatggtaaatgaacattaacttccacttaaaatcactagctgcattagcccctaaaaaaaaagggaatcagcctgtttttttgaagccagtcattgatttctcctctctagctatgaaagtactagatggtgtcttcttctaatagaaggcagttcatctagatagcaaatctgttgtttagtgtga

SEQ ID NO: 569162 - DNA, 578 bp, Homo sapiens
tccatggcagctatagccttacaaaatgtatttctgaaataataagacttgaaagtcaaaattaccctttgatccatggcttcaggggtattttgttagcaggaatgaaaacaacattaatctccctatacatctccgtcagagcttttgggtgactaggtgcattgtcaataagcagaaatattttgaaggaaatctttttttctaagcagtaggccccaacagtggcttaaaatatttaattaaattattaaatattttartctggtttaacatatttaattaaattatgctataaacagatgtgctatcatccaggctttgttatttcatttacagagcgcaggaagagtagatttagcataattcttaagggccctagggttttcagaatggtaaatgaacattaacttccacttaaaatcactagctgcattagcccctaaaaaaaaagggaatcagcctgtttttttgaagccagtcattgatttctcctctctagctatgaaagtactagatggtgtcttcttctaatagaaggcagttcatctagatagcaaatctgttgtttagtgtga

SEQ ID NO: 569163 - DNA, 578 bp, Homo sapiens
tccatggcagctatagccttacaaaatgtatttctgaaataataagacttgaaagtcaaaattaccctttgatccatggcttcaggggtattttgttagcaggaatgaaaacaacattaatctccctatacatctccgtcagagcttttgggtgactaggtgcattgtcaataagcagaaatattttgaaggaaatctttttttctaagcagtaggccccaacagtggcttaaaatatttaattaaattattaaatattttaatctggtttaacatatttaattaaattatgctataaacagatgtgctatcatccaggctttgttatttcattyacagagcgcaggaagagtagatttagcataattcttaagggccctagggttttcagaatggtaaatgaacattaacttccacttaaaatcactagctgcattagcccctaaaaaaaaagggaatcagcctgtttttttgaagccagtcattgatttctcctctctagctatgaaagtactagatggtgtcttcttctaatagaaggcagttcatctagatagcaaatctgttgtttagtgtga

SEQ ID NO: 569164 - DNA, 578 bp, Homo sapiens
tccatggcagctatagccttacaaaatgtatttctgaaataataagacttgaaagtcaaaattaccctttgatccatggcttcaggggtattttgttagcaggaatgaaaacaacattaatctccctatacatctccgtcagagcttttgggtgactaggtgcattgtcaataagcagaaatattttgaaggaaatctttttttctaagcagtaggccccaacagtggcttaaaatatttaattaaattattaaatattttaatctggtttaacatatttaattaaattatgctataaacagatgtgctatcatccaggctttgttatttcatttacagagygcaggaagagtagatttagcataattcttaagggccctagggttttcagaatggtaaatgaacattaacttccacttaaaatcactagctgcattagcccctaaaaaaaaagggaatcagcctgtttttttgaagccagtcattgatttctcctctctagctatgaaagtactagatggtgtcttcttctaatagaaggcagttcatctagatagcaaatctgttgtttagtgtga

SEQ ID NO: 569165 - DNA, 520 bp, Homo sapiens
gaattctgttaaaatttttatcctaagtctctttttgtgtcattgtataaaatcagcaagtgtatttgggaataggtacaataargactctttcttatcctcaaaagcttcttgataataacattttcttctttccaacttatgttgtgaggaacagtatgtctatatagacatttaaaatgttggatgtattccattcacatattatatatcctttggacatcaagcagatttttaattctcttgtagtgtgagcatcacatctttttttttgtcaaagtgctattcagcttttgttcctttagcattaaaaaaagatatcaaaatctattaatgctttctatgaccttttatagatgaagacaaggcaaaaacatttttcccaaaaaatcaatttaaattattactataaaatttctgaatgatctgctgtgcaataggggcatatattttcctaaaattaagacttaaataataggtttatattgactatcgattagtagcaaaactttagagatgt

SEQ ID NO: 569166 - DNA, 520 bp, Homo sapiens
gaattctgttaaaatttttatcctaagtctctttttgtgtcattgtataaaatcagcaagtgtatttgggaataggtacaataaagactctttcttatcctcaaaagcttcttgataataacattttcttctttccaacttatgttgtgaggaacagtatgtctatatagacatttaaaatgttggatgtattccattcacatattatatatcctttggacatcaagcagattttkaattctcttgtagtgtgagcatcacatctttttttttgtcaaagtgctattcagcttttgttcctttagcattaaaaaaagatatcaaaatctattaatgctttctatgaccttttatagatgaagacaaggcaaaaacatttttcccaaaaaatcaatttaaattattactataaaatttctgaatgatctgctgtgcaataggggcatatattttcctaaaattaagacttaaataataggtttatattgactatcgattagtagcaaaactttagagatgt

SEQ ID NO: 569167 - DNA, 520 bp, Homo sapiens
gaattctgttaaaatttttatcctaagtctctttttgtgtcattgtataaaatcagcaagtgtatttgggaataggtacaataaagactctttcttatcctcaaaagcttcttgataataacattttcttctttccaacttatgttgtgaggaacagtatgtctatatagacatttaaaatgttggatgtattccattcacatattatatatcctttggacatcaagcagatttttaattctcttgtagtgtgagcatcacatctttttttttgtcaaagtgctattcrgcttttgttcctttagcattaaaaaaagatatcaaaatctattaatgctttctatgaccttttatagatgaagacaaggcaaaaacatttttcccaaaaaatcaatttaaattattactataaaatttctgaatgatctgctgtgcaataggggcatatattttcctaaaattaagacttaaataataggtttatattgactatcgattagtagcaaaactttagagatgt

SEQ ID NO: 569168 - DNA, 520 bp, Homo sapiens
gaattctgttaaaatttttatcctaagtctctttttgtgtcattgtataaaatcagcaagtgtatttgggaataggtacaataaagactctttcttatcctcaaaagcttcttgataataacattttcttctttccaacttatgttgtgaggaacagtatgtctatatagacatttaaaatgttggatgtattccattcacatattatatatcctttggacatcaagcagatttttaattctcttgtagtgtgagcatcacatctttttttttgtcaaagtgctattcagcttttgttcstttagcattaaaaaaagatatcaaaatctattaatgctttctatgaccttttatagatgaagacaaggcaaaaacatttttcccaaaaaatcaatttaaattattactataaaatttctgaatgatctgctgtgcaataggggcatatattttcctaaaattaagacttaaataataggtttatattgactatcgattagtagcaaaactttagagatgt

SEQ ID NO: 569169 - DNA, 277 bp, Homo sapiens
aagggttagatactatagaagggatagcagttcagctgtggtagatatgaccacaaaataaagygtggaatttcttaggccacacatagagataattttccttattgaatgatcacactttgcatatgttaatgacttttccttacatctttaggttgagcgatcactcttaatgagttattattattattattttttacaaaaaaccccagccaggcatggtggctcatgcctataatcccagaactttgggaagctgaggcaggcaaatcaccag

SEQ ID NO: 569170 - DNA, 277 bp, Homo sapiens
aagggttagatactatagaagggatagcagttcagctgtggtagatatgaccacaaaataaagcgtggaatttcttaggccacacatagagataattttccttattgaatgatcacactttgcatatgttaatgacttttccttacatctttaggttgagcgatcactcttaatgagttattattattattattttttacaaaaaacsccagccaggcatggtggctcatgcctataatcccagaactttgggaagctgaggcaggcaaatcaccag

SEQ ID NO: 569171 - DNA, 614 bp, Homo sapiens
tgtaattaaacctacttgataagagagaaataattctacatgtaagtgtattttaaaagttggatgtgtttttggtaaaataaaaagttaaaagaagacataagaatgtagtttttgttaaaagaaaaataattttatctaattaaaaamtgttttaatcgttttaaattaaataaaaatagaaaaataaaactaagtatatattaaaagttcaggaaattaaaagtgagaaaaattacaagaggttataaaaggcttataaaaatcttattttatgtggtcaaagctgattgggattagatggatttgtttataagattttgttaaaattagcttaacaataatacgctgatacaaaggtaaactttttcttttttgaacgagattttttggtagtattaataagaggtattaaaagatatttgtttaccttttgagtaaactacaaaaaaaggggcaagaaagagagatagattcagtgtttgcctcatggtatctttattaggtcttgtgattgttaggaaactgagtcttctatcaaagattaaagattgttgttttttgaaatctttgagttagtgctttggctaaacgaatgccttattttacagagt

SEQ ID NO: 569172 - DNA, 614 bp, Homo sapiens
tgtaattaaacctacttgataagagagaaataattctacatgtaagtgtattttaaaagttggatgtgtttttggtaaaataaaaagttaaaagaagacataagaatgtagtttttgttaaaagaaaaataattttatctaattaaaaaatgttttaatcrttttaaattaaataaaaatagaaaaataaaactaagtatatattaaaagttcaggaaattaaaagtgagaaaaattacaagaggttataaaaggcttataaaaatcttattttatgtggtcaaagctgattgggattagatggatttgtttataagattttgttaaaattagcttaacaataatacgctgatacaaaggtaaactttttcttttttgaacgagattttttggtagtattaataagaggtattaaaagatatttgtttaccttttgagtaaactacaaaaaaaggggcaagaaagagagatagattcagtgtttgcctcatggtatctttattaggtcttgtgattgttaggaaactgagtcttctatcaaagattaaagattgttgttttttgaaatctttgagttagtgctttggctaaacgaatgccttattttacagagt

SEQ ID NO: 569173 - DNA, 596 bp, Homo sapiens
agaataaatagaaactaaagtatcagcaaaaagagaaccagcctgtgtccagaatacagagtctaccttgtctataatggttcattgttaagaaaaatccttgtcatatgatcaaggaactcaacagcaagcccaaacctaatctcagccaacctttttaaccaattatcaggaacaattaaaaaaaaaagcctaaaacatgaatatggcaaagtgagtattttgacttctcttgcaggtgtatgcgtaaaaaaacaagtaaagctactacatcagtgtcctttgtttaatgaccccaactggccacattccataatatagggaagataatggatctcaaaaggtacaactaaaggtagcttaaaccatcaaattcactactcaaagtgtagaaacctgtcccagatcatccagttcaaggtaggagattacaggcwtctagagtcttatatactagatgatgttacttgtgagagagacaaattacgaagattatcagaaactctcaccatgaaagtctagaagaaacttaaaagattcaaaatatactaagaataaaatacaataaaaaggcaaaattaatttttaaaaactaa

SEQ ID NO: 569174 - DNA, 596 bp, Homo sapiens
agaataaatagaaactaaagtatcagcaaaaagagaaccagcctgtgtccagaatacagagtctaccttgtctataatggttcattgttaagaaaaatccttgtcatatgatcaaggaactcaacagcaagcccaaacctaatctcagccaacctttttaaccaattatcaggaacaattaaaaaaaaaagcctaaaacatgaatatggcaaagtgagtattttgacttctcttgcaggtgtatgcgtaaaaaaacaagtaaagctactacatcagtgtcctttgtttaatgaccccaactggccacattccataatatagggaagataatggatctcaaaaggtacaactaaaggtagcttaaaccatcaaattcactactcaaagtgtagaaacctgtcccagatcatccagttcaaggtaggagattacaggcatctagagtcttatatactagatgatgttacttgtgagagagacaaattacgaagattatcagaawctctcaccatgaaagtctagaagaaacttaaaagattcaaaatatactaagaataaaatacaataaaaaggcaaaattaatttttaaaaactaa

SEQ ID NO: 569175 - DNA, 548 bp, Homo sapiens
tgtctgtctttacacattcttaacaaaagtatttttaacattaagaaatatattttgtgtaacatagtggcttcctaaaaaaaatatataatttgagatgtacagcaaaaagaagatatactaagtacagtaactataacatcaggatcttgatttatgaatgtaaaaggtgaacaagagaaaaaacatgggagcaaaaattccaaaagaaaatatataytacttttagaaatttttgcttctttttttgtatatatttttctcacatacatttctcctaaaaaagtcaaaaatataacttgagtgaaagggagatatactaagtgcagtaactgtaagatgggcatgttgatttatgaatgtaaaagggtaaacataagagaaaacatggaagcaaaaaatttcaaaagaaaatatatatatatttgtttccatattttctcatatatatatttctcatatcattatatatgagtttagtgggggaaaacatataaaaagaacctggctgtaaatcacttatatggtcatgccaagaaaagcaaaaa

SEQ ID NO: 569176 - DNA, 548 bp, Homo sapiens
tgtctgtctttacacattcttaacaaaagtatttttaacattaagaaatatattttgtgtaacatagtggcttcctaaaaaaaatatataatttgagatgtacagcaaaaagaagatatactaagtacagtaactataacatcaggatcttgatttatgaatgtaaaaggtgaacaagagaaaaaacatgggagcaaaaattccaaaagaaaatatatactacttttagaaatttttgcttctktttttgtatatatttttctcacatacatttctcctaaaaaagtcaaaaatataacttgagtgaaagggagatatactaagtgcagtaactgtaagatgggcatgttgatttatgaatgtaaaagggtaaacataagagaaaacatggaagcaaaaaatttcaaaagaaaatatatatatatttgtttccatattttctcatatatatatttctcatatcattatatatgagtttagtgggggaaaacatataaaaagaacctggctgtaaatcacttatatggtcatgccaagaaaagcaaaaa

SEQ ID NO: 569177 - DNA, 548 bp, Homo sapiens
tgtctgtctttacacattcttaacaaaagtatttttaacattaagaaatatattttgtgtaacatagtggcttcctaaaaaaaatatataatttgagatgtacagcaaaaagaagatatactaagtacagtaactataacatcaggatcttgatttatgaatgtaaaaggtgaacaagagaaaaaacatgggagcaaaaattccaaaagaaaatatatactacttttagaaatttttgcttctttttttgtatatatttttctcacatacatttctcctaaaaaagtcaaaaatataacttgagtgaaagggagatatactaagtgcagtaactgtaagatgggcatgttgatttatgaatgtaaaagggtaaacataagagaaaacatggaagcaaaaaatttcaaaagaaaatatatatatatttgtttccatattttctcatatatatatttctcatatcattatatatgagtttagtgrgggaaaacatataaaaagaacctggctgtaaatcacttatatggtcatgccaagaaaagcaaaaa

SEQ ID NO: 569178 - DNA, 615 bp, Homo sapiens
taacagatctccaattttcagtatagcacactataataaaatgtgctttaatgtgtgttctagcactagttaaataaaaatagaattgtaatcctaacttttctaccaaataagttatctgataatttaatatgtaattcttaaattctgaaactgagaatataatctttctgaataaacagatacaacttacagattttcatacagtttggatctgtrtctccaccaaaccacatgttgaattgtaatacccaatgttagaggtgaggcgtggcaggaggtgactggatcatgggggcagtttctcatgaatggtttagcaccatcctcttggtgctactctcatgatagtggatgagtgagttctcatgaaatttggtcatttaaaagtgtgtggcacctcccccatctctctcttcatcctactctggccatgtaaagtgcttcattccccctttgtcttccaccactattagaagctttctgaggcctccccagaagcagaaaacattatgcttcctgtacagccagaagaaccatgagccaattaaacctcttttatttataaataacccagtctcaggtatttcttcatagcaatgcaagaatagacta

SEQ ID NO: 569179 - DNA, 615 bp, Homo sapiens
taacagatctccaattttcagtatagcacactataataaaatgtgctttaatgtgtgttctagcactagttaaataaaaatagaattgtaatcctaacttttctaccaaataagttatctgataatttaatatgtaattcttaaattctgaaactgagaatataatctttctgaataaacagatacaacttacagattttcatacagtttggatctgtatctccaccaaaccacatgttgaattgtaatacccaatgttagaggtgaggcgtggcaggaggtgactggatcatgggggcagtttctcatgaatggtttagcaccatcctcttggtgctactctcatgatagtggatgagtgagttctcaygaaatttggtcatttaaaagtgtgtggcacctcccccatctctctcttcatcctactctggccatgtaaagtgcttcattccccctttgtcttccaccactattagaagctttctgaggcctccccagaagcagaaaacattatgcttcctgtacagccagaagaaccatgagccaattaaacctcttttatttataaataacccagtctcaggtatttcttcatagcaatgcaagaatagacta

SEQ ID NO: 569180 - DNA, 371 bp, Homo sapiens
ctatgaggcaaattataaaattactgaagtgagttagagtgtaattattcatatatgcatgtggagaaaccaccaccatgtaaatgcctaaaatataaatttgtcaaaaaataytgactgtttcctacatataagtggacatacatgtgtgtgtagatagtagatatacacaggcatatgtgtacacattcatgcaaacgcaataagaatttttttctaacacttacttgattttattcaaacttgcgcacacgttttggaaacagagtttaggttctagttctgtcttagcctatttgtgttactataaaggaataacctgaggctgagtaacttataaagaaaagaggtttatttggctcatggttctg

SEQ ID NO: 569181 - DNA, 371 bp, Homo sapiens
ctatgaggcaaattataaaattactgaagtgagttagagtgtaattattcatatatgcatgtggagaaaccaccaccatgtaaatgcctaaaatataaatttgtcaaaaaatactgacygtttcctacatataagtggacatacatgtgtgtgtagatagtagatatacacaggcatatgtgtacacattcatgcaaacgcaataagaatttttttctaacacttacttgattttattcaaacttgcgcacacgttttggaaacagagtttaggttctagttctgtcttagcctatttgtgttactataaaggaataacctgaggctgagtaacttataaagaaaagaggtttatttggctcatggttctg

SEQ ID NO: 569182 - DNA, 371 bp, Homo sapiens
ctatgaggcaaattataaaattactgaagtgagttagagtgtaattattcatatatgcatgtggagaaaccaccaccatgtaaatgcctaaaatataaatttgtcaaaaaatactgactgtttcctacatataagtggacayacatgtgtgtgtagatagtagatatacacaggcatatgtgtacacattcatgcaaacgcaataagaatttttttctaacacttacttgattttattcaaacttgcgcacacgttttggaaacagagtttaggttctagttctgtcttagcctatttgtgttactataaaggaataacctgaggctgagtaacttataaagaaaagaggtttatttggctcatggttctg

SEQ ID NO: 569183 - DNA, 371 bp, Homo sapiens
ctatgaggcaaattataaaattactgaagtgagttagagtgtaattattcatatatgcatgtggagaaaccaccaccatgtaaatgcctaaaatataaatttgtcaaaaaatactgactgtttcctacatataagtggacatacatgtgtgtgtagatagtagatatacacaggcatatgtgtacacattcatgcaaacgcaataagaatytttttctaacacttacttgattttattcaaacttgcgcacacgttttggaaacagagtttaggttctagttctgtcttagcctatttgtgttactataaaggaataacctgaggctgagtaacttataaagaaaagaggtttatttggctcatggttctg

SEQ ID NO: 569184 - DNA, 485 bp, Homo sapiens
catctccttacgtggtcgatgacgtatgaaatcaaggtagggaagagaggtatggagtctttcttgtgataattcaaattaatgtgcacgtgcttggtttactgaggctgattcaaagtcaagcaggmaaatagcatctatcacaggaatcagagacttacctaccctactagggtagggtgtaggggaatgcatgccacaagaaagcctaagtatgcctaaaaggaagaagtgcctctactaaagggggaaggaaattcagaaaatgagttattggagagctgtaacaatctttacaggattcataactcagtctaggaaactccatacctggaatttctctagagaaaaagaagctgtgtcaagatgtttctgttatgttcagctagaaatgcatccaactttatttgaatgatttataaagatttgtgttgttatttttaaacatagactttgttataaagattttttaaaagaatttgtta

SEQ ID NO: 569185 - DNA, 485 bp, Homo sapiens
catctccttacgtggtcgatgacgtatgaaatcaaggtagggaagagaggtatggagtctttcttgtgataattcaaattaatgtgcacgtgcttggtttactgaggctgattcaaagtcaagcaggcaaatagcatctatcacaggaatcagagacttacctaccctactagggtagggtgtaggggaatgyatgccacaagaaagcctaagtatgcctaaaaggaagaagtgcctctactaaagggggaaggaaattcagaaaatgagttattggagagctgtaacaatctttacaggattcataactcagtctaggaaactccatacctggaatttctctagagaaaaagaagctgtgtcaagatgtttctgttatgttcagctagaaatgcatccaactttatttgaatgatttataaagatttgtgttgttatttttaaacatagactttgttataaagattttttaaaagaatttgtta

SEQ ID NO: 569186 - DNA, 485 bp, Homo sapiens
catctccttacgtggtcgatgacgtatgaaatcaaggtagggaagagaggtatggagtctttcttgtgataattcaaattaatgtgcacgtgcttggtttactgaggctgattcaaagtcaagcaggcaaatagcatctatcacaggaatcagagacttacctaccctactagggtagggtgtaggggaatgcatgccacaagaaagcctaagtatgcctaaaaggaagaagtgcctctactaaagggggaaggaaattcagaaaatgagttattggagagctgtaacaatctttacaggattcataactcagtctaggaaactccatacctggaatttctctagagaaaaagaagctgtgtcaagatgtttctgttatgttcagctagaaatgcatscaactttatttgaatgatttataaagatttgtgttgttatttttaaacatagactttgttataaagattttttaaaagaatttgtta

SEQ ID NO: 569187 - DNA, 481 bp, Homo sapiens
ggcctgggagattatttaaagactcaaagcaattgtatggtgccaattttaaatagttttatttaagrcattgcattttccacttacaatacagtgtttataaagtgcaatgttatttccttcccctgtgcatatgttccatattcaagtattgagaatgcccagtaacttactatagcagcttaactttttaaaactgccacagaatttgctacgaatttaggtccttcaaatgttttaaatgtgtggaacaatgctacatctacacttggttggcttaatcaacctcttcaatggtgggccctgaggaagcaccaccagagggaggagctccaccaccaggaaatcccccaggcattcctcctggcatgcctcctgcactctggtacagcttggtgatgatggggttgcaaactttctccagctctttctgttgatgttcaaattcttccttctcagcagtctgaggaagagaaaaagg

SEQ ID NO: 569188 - DNA, 530 bp, Homo sapiens
aattatcagtgatgttgagcattttttcatgtttgttggccacttgtatgttttcttctttccagaagcatctgttcaagtcctctgcccaattttttttttttttttttttttgcccaggctgaaatgcagtggcatgatctccgcccactgcaagctccgcctyccgagttcacgccattcttctgcctcagcctcccgagtagctgggactacaggcacccgccaccacgcccggctaattttttgcattttttagtagagacggggtttcaccgtgttagccaggatggtctcaatctcctgacctcgtgatctgcccacttcggtctcccaactctgcccaatttttaatggggttgttttttgcttattggtttaagttctttattctttctgaaaagtcctacttttgcttaaataatgtttccattattataggatactgtagtatatgttgaggttattgtttctaaaacaaaaactgaatgcttaatgttctgttcttaataaattatataatatatttt

SEQ ID NO: 569189 - DNA, 571 bp, Homo sapiens
catgcaatctgttaccaaattctgctgcctccatgcttcaaactgttcccagaatttatccttttctatctccaccactatctatttgtactaacatattttgactgacttaaattagtcaatttaagtcatttaaatttaaggtgtgttctgtgctcccacttttggcatcccatgctttattctccacccagtaccagaatcatgcttttataatgtaagttgtatcatgtcattcctttgctcaaaaccttctaatggcttcagacctaatttaggataaaatccaacatttgtggccagagtttatatggtcttgtccctggctactctctaaattagccagattcccactgcaatactgcataacaaacaatcccccaaatctctatagctcaacatcacacatttgttttttcattcacaggtttgcaggtcagccaaggaagctctgctccctgctgtagtgtggcttcgtctccattctacatccctcattctgggactrttgtctccctagaaaaaaaataattttttttaatagcgagggcagtaggggcaaagccaaatc

SEQ ID NO: 569190 - DNA, 439 bp, Homo sapiens
ggcatgcacctgtaatcccagctacttggcaggctgaggcaggagaatcacttgaacccaggaggcagaggttgcagtgagccaagattgcaccattacactccagcctggtgacagagcgagaccccatctcaaaaaaaaaaagaaagaaagaaagaaagaaagaaagaaaaaagaaaagaaaattattgtgagaattaaaagttgtaatgctgctaaaagtttctaggctggtgctaaacacatttcctctgatatgtcaaygttagtaatagtagtagctaatgttccttgggcatctactatgttccaagatctgcattaagcatgttacattcgttattggatttaatcctcacatcagccccttgaggtaggttctactattactcccactttaaagtcaaagagactgagactataacttgactaaagtctc

SEQ ID NO: 569191 - DNA, 604 bp, Homo sapiens
ttttggttcttataaaggtgctcttgtgtgtgtgtgtgtgtgtgtgtgtgtgtgtttgtgtgtgtagatagttgctaaattggtgtttttgcagagggaataattggtgtagccttctattcaggcatcttgctgtgtcctgcttttcaagatacagatatttgggtggtataagtaatatatgagtgaaaaatcagtagccatcaaggatattattatacagtagggctcaactaaaaattaaacagctgatatcttttgcaatgtgagatctcacaataataagtatagactaatgatgttaacaataataatagcttatggtttgattttcactttattccagactgtgatctaagagttctatatctataaacctatttaatcatcatcaggtatactgatagtagcccctgtttacagtgaatgcacagacatgtcacaaggtcacatagcaatgtcagagaatggccaagaagggaytcagacccaggctttacagcccatgcttccaaacatttcagtgtgtcaataaacatggaatttgaaatctgattattataccaatgactaccaagactgaagtatatccaattctcaaatg

SEQ ID NO: 569192 - DNA, 604 bp, Homo sapiens
ttttggttcttataaaggtgctcttgtgtgtgtgtgtgtgtgtgtgtgtgtgtgtttgtgtgtgtagatagttgctaaattggtgtttttgcagagggaataattggtgtagccttctattcaggcatcttgctgtgtcctgcttttcaagatacagatatttgggtggtataagtaatatatgagtgaaaaatcagtagccatcaaggatattattatacagtagggctcaactaaaaattaaacagctgatatcttttgcaatgtgagatctcacartaataagtatagactaatgatgttaacaataataatagcttatggtttgattttcactttattccagactgtgatctaagagttctatatctataaacctatttaatcatcatcaggtatactgatagtagcccctgtttacagtgaatgcacagacatgtcacaaggtcacatagcaatgtcagagaatggccaagaagggattcagacccaggctttacagcccatgcttccaaacatttcagtgtgtcaataaacatggaatttgaaatctgattattataccaatgactaccaagactgaagtatatccaattctcaaatg

SEQ ID NO: 569193 - DNA, 509 bp, Homo sapiens
agttttctctccgaagattacaaaactctgaaaattaagaaatacgtcatattcgctacaaagaactcaagctaatcagcaagaaaaaaaaatcctataaaaaagtgggctaaggacatcaatagacacattctcaaaagatatacaaatggccaaaaagcatatggaaagatgttcaacatcactaattatcagggaaatgcaaayaaaaaccacaacgcaatatcacctcactcctgcaagaatggctataataaaaaaaaatttaaaaataatagatgttggcatggatgtggtgaaaagggaacacttttacactgctggtgggaatgtaaactagtacagccactatggaaaacagtgtggagattccttaaagaaataaaagtaggtcgggcatggtggctcacacctgtaatatcagcactttgggaggccgaggtgggcggatcacctgaggtcaggagttcgagaccagcctgaccaacatggggaaaccccatctctac

SEQ ID NO: 569194 - DNA, 509 bp, Homo sapiens
agttttctctccgaagattacaaaactctgaaaattaagaaatacgtcatattcgctacaaagaactcaagctaatcagcaagaaaaaaaaatcctataaaaaagtgggctaaggacatcaatagacacattctcaaaagatatacaaatggccaaaaagcatatggaaagatgttcaacatcactaattatcagggaaatgcaaacaaaaaccacaacgcaatatcacctcactcctgcaagaatggctataataaaaaaaaatttaaaaataatagatgttggcatggatgtggtgaaaagggaacacttttacactgctggtgggaatgtaaactagtacagccactatggaaaacagtgtggagattccttaaagaaataaaagtaggtcgggcatggtggctcacacctgtaatatcagcactttgggaggccgaggtgggcrgatcacctgaggtcaggagttcgagaccagcctgaccaacatggggaaaccccatctctac

SEQ ID NO: 569195 - DNA, 608 bp, Homo sapiens
tttgtggtgatgaaaatattctaaaattgattgtggttatggttgcacaattctgtgaatatattaaaaacattgaattgtatactttaaatgagtaaattgtgtggtacgtggcttatatctctataaggctgttatttaaaagaagattctcacatgattttctatatttttcatgtttcaaaacataggaatgtgaaattagcaattccctagttatattgaccactgaaataacaataatgatagctaattatgttatgtatctgctatgttttctaacagctttatatttgttaactcatttgatcctcacaggaaactatgacacaggtcctgctcttatgattcccagtttgactataggtaaagtgcaaattattggctccaaaatgaaattttcagcaaacatgatacatccaaagaggaatttttgtcataarttagtcctaaacttaacaaaaattaattcaacaaacgtttcttcaacaaactgtcctcaatgaactcacaagacagaaatagacataacactaacctaattttactttatttatttattttttttattatactttaagttctaaggtgcatgtgcacaaagtgcg

SEQ ID NO: 569196 - DNA, 535 bp, Homo sapiens
gggtatatatccaaaggaaatgaaatcagtaagtcaaagagatactaatatctgcattcccatgttggttgtagcactattcacaataaccaagacatggaaacaacaaagtgctgatagatgagtggataaagaaattgacatgcacactctcacacacatacacacacacagacacacacagagacacatacatacacactgggatattatttagccttaaaaaaaaaaaggaaatcttgcctcttgcaacaacatgaatcaagctgggggacattatgctaagtgaaataagccctaccsagaaagaaaaatagtgcatgctttcacttataggtgaaatctaaaaaattcaatttcatagaagcaaagagtagaatggtgcttaccagaggtgaaagatgaggggaaatgggaagatattagtcaaaaagtacaaagttagtatgtaggatgcataagttctagagagctaatgtattgcatagggagtatagttagtattgtattctagaaatttgcaaagaaagtagat

SEQ ID NO: 569197 - DNA, 561 bp, Homo sapiens
gaattcactggatttcaaagcaaagattcttgctattaaagtatggaaagaaacatacatgtgcatcttgtgggacatacccaaggtctaaatgcagatgtactcagagcatgtgcttagtgggctgtcacctgagccaagatttagttgccagcttctgggaatgtcaaatactcatcagcttttattcttttctgcagaaagtgacacatgcctatcttgatcactggagcacaaaattagctgagtgcttcagggaaagagcaacaagggaagaaatgaacaaggggtcagagaccctgacccccgtggggaacagtagaaacgactaggactcatctgtcatggagatcacgctgtccgtggtgccaaatcactccatgaaggtctcagaagtttcccctgtcctagacaccaatatggkgcatggcagaactgaaacttaaccttgacaaggcagagctctttatttcaaaagatcaggaactggactgtgactcatgtcttgtccacattcgtgaccaatgttttcttttttttttttttttttcattcttgaat

SEQ ID NO: 569198 - DNA, 569 bp, Homo sapiens
agaatctcccaatattgaatagtgagcatttaatctacttcagagttgtagtattttttgctgacggtgtactcttctctggaagtaccacgtaacagtgaaattccaagttgccacgatcttgggagaaggggacttcctccagaaagcatggagcatggcagatggaatggactttagtgtaagccaattccagatcaaaattcaaccccaccctgagctgtagctaattcacttctctctgagctttgcttctgtcatctagaaaatggagcaacagtatcttaaagtgttcttataagcatcacttcagatctaacatttaattaataatcatcttttaaaattctgctttgtgtctttccataaatgatttgcagtgccttacaaaagtgcacgtaatgcaaagtggaaagtaagcgttgataacaaagagatttttttaaatgttatacatattgatayacagattctctcagtacctggcaaaataaatgttttgtcttcccttaacttgtcaggtcttttggagaactatcatttaatccttaatacaaaaaccatgtttg

SEQ ID NO: 569199 - DNA, 557 bp, Homo sapiens
gggtgccaggaaggtgtgaggggttggtattaaggcgctaacaaaacatacagaaggtggagaactttaaaagatgggagagggccaacgagtcctacttgggtctccagcaatggctctaggacacaccctgtgctcaccacaccagggagtagaagctgaagatgcctagagttcagtcagagacacccagagttcagtcagagatgctgagggttcagtcagaaatgaccagagttcagacagagctgcccagaattcagtcagagatgcccagaattcagtcagaggcaaccagagttcagtctgagagtatcagagttcagtcaaaaacaactagaattcagtcagaaataaccagagttcaatcacagctgcccagagtttagtcagagacacccagagttcagccagagacaaccagagttcagtcagagatgcccagagttgtcagagatgcccagrgttcagtgagcgatgaccagggttcagtgagagatgaccaaagttcagttaaaaaaaaaatcagaatttagtcaaaaatgacccaagttcag

SEQ ID NO: 569200 - DNA, 557 bp, Homo sapiens
gggtgccaggaaggtgtgaggggttggtattaaggcgctaacaaaacatacagaaggtggagaactttaaaagatgggagagggccaacgagtcctacttgggtctccagcaatggctctaggacacaccctgtgctcaccacaccagggagtagaagctgaagatgcctagagttcagtcagagacacccagagttcagtcagagatgctgagggttcagtcagaaatgaccagagttcagacagagctgcccagaattcagtcagagatgcccagaattcagtcagaggcaaccagagttcagtctgagagtatcagagttcagtcaaaaacaactagaattcagtcagaaataaccagagttcaatcacagctgcccagagtttagtcagagacacccagagttcagccagagacaaccagagttcagtcagagatgcccagagttgtcagagatgcccagagttcagtgagmgatgaccagggttcagtgagagatgaccaaagttcagttaaaaaaaaaatcagaatttagtcaaaaatgacccaagttcag

SEQ ID NO: 569201 - DNA, 557 bp, Homo sapiens
gggtgccaggaaggtgtgaggggttggtattaaggcgctaacaaaacatacagaaggtggagaactttaaaagatgggagagggccaacgagtcctacttgggtctccagcaatggctctaggacacaccctgtgctcaccacaccagggagtagaagctgaagatgcctagagttcagtcagagacacccagagttcagtcagagatgctgagggttcagtcagaaatgaccagagttcagacagagctgcccagaattcagtcagagatgcccagaattcagtcagaggcaaccagagttcagtctgagagtatcagagttcagtcaaaaacaactagaattcagtcagaaataaccagagttcaatcacagctgcccagagtttagtcagagacacccagagttcagccagagacaaccagagttcagtcagagatgcccagagttgtcagagatgcccagagttcagtgagcgatgaccarggttcagtgagagatgaccaaagttcagttaaaaaaaaaatcagaatttagtcaaaaatgacccaagttcag

SEQ ID NO: 569202 - DNA, 557 bp, Homo sapiens
gggtgccaggaaggtgtgaggggttggtattaaggcgctaacaaaacatacagaaggtggagaactttaaaagatgggagagggccaacgagtcctacttgggtctccagcaatggctctaggacacaccctgtgctcaccacaccagggagtagaagctgaagatgcctagagttcagtcagagacacccagagttcagtcagagatgctgagggttcagtcagaaatgaccagagttcagacagagctgcccagaattcagtcagagatgcccagaattcagtcagaggcaaccagagttcagtctgagagtatcagagttcagtcaaaaacaactagaattcagtcagaaataaccagagttcaatcacagctgcccagagtttagtcagagacacccagagttcagccagagacaaccagagttcagtcagagatgcccagagttgtcagagatgcccagagttcagtgagcgatgaccagrgttcagtgagagatgaccaaagttcagttaaaaaaaaaatcagaatttagtcaaaaatgacccaagttcag

SEQ ID NO: 569203 - DNA, 599 bp, Homo sapiens
atccctaagtcccagtagatggggttagatgatccacttagtgaaatgttccaacaacaaagaatgctaacgtgggaggtaagaaaacaaaggcatttttcctactctcatttaagaatttaccaggtccaaaagaacaatattgaaaaaaggtaggaaatgggcttggctccattttgggtactttttttttttttttttaatataagttgtcaactttctaacaatcaagtcttgttctgtatttacttttaaaaagcccccttcttggggtccaccatttaaatgactataatacataaccctggtcaagtcacttcctccttccgtgtctcattttccactcctctaagctaggacaagcatggagtagtttgcttctcaacccctttattctaaggctgcactcttcaacacagttgtcatggaagccacatgtggctgttgagcatttgaagtgtggctagtctgaattgagatatgattrcaagtataaaaatatacactaaatttcaatcatgcagtatgaaaaataatgtaaaatatcccataaataatttttattagcccagtgtggtggtgcacacctgtagtcctag

SEQ ID NO: 569204 - DNA, 302 bp, Homo sapiens
tctatacctctctccctccctccctccctccctttctttttggaactcctcagtgcatatgttggtctgcatgatagtatccacaggtcccttgtgcwctgatcacttttcttcaatctttttccttctgttcctcatactcaataatttcaatggtcctgtcttcacattcatgcatcctttcttttagctgctcatgtctttggatacctcttatgcgtttttcatttttgtcattgtacttttcagctccagattttctctttggttactttttaagtttttatctccttattgatatt

SEQ ID NO: 569205 - DNA, 603 bp, Homo sapiens
tttaatatatgtatataaacataaatatatacttttaattatatttaaggtgtgtatatatgtatgtatacaaaacattttaaatattttttaaagcaaagccaattagatactaatacagtcatcacattacctaaacatttatttattcattcattcagtcattcatcaaagatatgatgaatatctttgatattgtagacttatcatgtattgagaatggctttagggatctgaatataagagataagttcctatactcatggaacttataaaatattttatattttaaatgttatatatttacctgtatttctggatagatgttatgaaaaatgtctttaaatttgtttatatggtgtgtggcttattcaacctgcccatttattttttcgttatgcaagtacgcactgatgatctaatatgarctaaggacttctggtagttattaaggctgttcccaagggcacttgagagaattacacttctccatctgccgccatatgactactttctttagccagtgaaatgtgagtaggagtcttaacttgtgtcacttctgatagatttaaatatcaaagtgattgtggaaggcatggccat

SEQ ID NO: 569206 - DNA, 581 bp, Homo sapiens
gggtggggggaggggggagggatagcattaggagatatacctaatgttaaatgacgagttaatgggtgtagcacaccaacatggcacatgtatacatatgtaactaacctgcacattgtgcacgtgtaccctaaaacataaagtataataaaaaaaaagtttcaatataaactgattttgagaatattcacaattacaaggtttagaaaaatttaatcatttgaaatataccatacctatatatgttgtatttcagtctatatatttgtttatgcatatagatatgtacacatattaactgaaactgaattaataattcatcttaattcttttttaaaaaaagtgtgctttgctttcaagtttcccttttagaatgttgtcactgttcctgccagttgtgatgctgtatgattaattcgtggttamtggtttacaggaaatttactgtacatcatttgttcctatgtcttttacagtttctgggacatagtagatggtcaatacataagtgttgagtaactgaatggttcagcctaagttaatggaaaatcataaaatatttctattgaaaaagacacaaa

SEQ ID NO: 569207 - DNA, 540 bp, Homo sapiens
acacatattaactgaaactgaattaataattcatcttaattcttttttaaaaaaagtgtgctttgctttcaagtttcccttttagaatgttgtcactgttcctgccagttgtgatgctgtatgattaattcgtggttaatggtttacaggaaatttactgtacatcatttgttcctatgtcttttacagtttctgggacatagtagatggtcaatacataagtgttgagtaactgaatggttcagcctaagttaatggaaaatcataaaatatttytattgaaaaagacacaaaacaatgtttttgaataaaaattgaaaaataattatactttgactcatcttgttttataaaaatatatgcactgaagattagattgcaaatttacactttgtcattgcaaattaaaaaaactatttttaaatcaaagttgatatctaaagatcagtttgaaatatttatggtttaaataaatcatctaaagtcagtgtctgtattttttacaaagtctgtcatttctaattttttttgcataaaaac

SEQ ID NO: 569208 - DNA, 540 bp, Homo sapiens
acacatattaactgaaactgaattaataattcatcttaattcttttttaaaaaaagtgtgctttgctttcaagtttcccttttagaatgttgtcactgttcctgccagttgtgatgctgtatgattaattcgtggttaatggtttacaggaaatttactgtacatcatttgttcctatgtcttttacagtttctgggacatagtagatggtcaatacataagtgttgagtaactgaatggttcagcctaagttaatggaaaatcataaaatatttctattgaaaaagacacaaaacaatgtttttgaataaaaattgaaaaataattatactttgactcatcttgttttataaaaatatatgcactgaagattagattgcaaatttacactttgtcattgcaaattaaaaaaactatttttmaatcaaagttgatatctaaagatcagtttgaaatatttatggtttaaataaatcatctaaagtcagtgtctgtattttttacaaagtctgtcatttctaattttttttgcataaaaac

SEQ ID NO: 569209 - DNA, 547 bp, Homo sapiens
gcaaattgaaaccacattgagatattacctcacaccagtaagaatggctattattaaaaagctaaaaaacaacagatgttgatgaggctgtggagaaaagagaatgcttatacactgttggtgggaatgtaaattaattcagccactttggaaaacaatttggagatttctcaaagamcttaaaatagaactaccattcaacccaacactcccattactggatgtatatccaaaagtaaacaaatagttctaccgtaaagggacagcactcacatgttcatcgcaatactattcacaatagcaaagatatggaatcaacttagatgtccaacaacgatggcctggataaagaaaatatgatacatatacaccatggaatactatggagccatgaaaaatgaaatcatgtcctttgcagcaacatggattcagctggaaaacattattctaaataaattaatacaggaacataaaactacatactgcatgtcctcacttataagtgggagctagacactgggtactcatggacataaagacagcaaca

SEQ ID NO: 569210 - DNA, 547 bp, Homo sapiens
gcaaattgaaaccacattgagatattacctcacaccagtaagaatggctattattaaaaagctaaaaaacaacagatgttgatgaggctgtggagaaaagagaatgcttatacactgttggtgggaatgtaaattaattcagccactttggaaaacaatttggagatttctcaaagaccttaaaatagaactaccattcaacccaacactcccattactggatgtatatccaaaagtaaacaaatagttctaccgtaaagggacagcactcacatgttcatcgcaatactattcacaatagcaaagatatggaatcaacttagatgtccaacaacgatggcctggataaagaaaatatgatacatatacaccatggaatactatggagccatgaaaaatgaaatcatgtcctttgcagcaacatggattcagctggaaaacattattctaaataaattaatacaggaacataaaactacatactgcatgtcctcacttataagtgggagctaracactgggtactcatggacataaagacagcaaca

SEQ ID NO: 569211 - DNA, 680 bp, Homo sapiens
acatacatacacatatatatttataatgagtatatgtatgtatagatctaaaatgtgtatatatatgagtatctttctgtaaaaaattttttaatgtagaattatatatgtatatataatatccacgtatgtgatatatatacacacacacacatacacgtaacatatttgagcaattgtatctataaggacagttattaaaggtggaactactatgctgaagagtatgcatacttcaaaatttggaaaatatttacatattcaatttagtcacctctgtttgttgtcatgtgtagaaaggcctgctttactcccaaaattcaaagaaataaacaaaaaactctattctaatatttaatgactccaatttatatgtttgattctttgaagcaggttgaatttattagagacaaagcaataagggagtaatacagatttacagtgagaaaatcaaggcttaaatagctacatamtactttctcatggtcatgagtctccagataccttttaaggtaacataaatgctgtgtctgagaatatcttaagcacaaatgacatatttttaaaaataatagccttaatattttccatgaaatttctatgttctagatattttggttgttcatttatcctggccctttaatttaaaaatgtgaaataattcataaaagaaactttat

SEQ ID NO: 569212 - DNA, 509 bp, Homo sapiens
acgtaactacaggtgctatatagcaactacacactctagactacacagcaactatttaacactacaccaggaaaaaatctctcatatcaatattaatcttaaatataaattatcaaaatgctccacttaaaggcagagagtggcaaatctcatgaaacacaaggagcatccctctgctgtctttaagaacaccttatttatgtaatgactctcataggctcaaagtaatgagaaagactatcacacaaatgaaaaatgaaaaagagcaggtgtcactattcttgtatcagataaaacaggcttaaatgaacaacagtaaaggacagaagggaatttcataataataaaaagtctaattcaacaataggcttaactattctaaatatgcttgcaaccaacaatrgaacaaccaaatttataaaacaactatttgtggacctaaaaaagacttatacttacacacaataatagtgacatcttcaacaccccactgacagcattagatagct

SEQ ID NO: 569213 - DNA, 523 bp, Homo sapiens
actgggtcactcccacaacatgtgggaattatgggagctacaattcaagatgagatttgggtggagacacagcaaaaccatatcacttagtttttttttttttttaactttcacttatcactttattcagcctacaaaagcttactaagctccttgtgctggagctaggaacatgaaaataaagtgtagcctctgctctgagatttcaccagacaggtaataaatcaaatatggtagggagaataatgacccctaaagatgtccacatcmtatgccccagaacctatggatattttactttccatggcaaaaagggactttgtgaatgtgattaagataaggattttttaaaatatgtttttgggaaacaggtggtgtttgattacatgtataagttctttagtgctgatttctgagattttggtgcacttctcacctaagcagtgtacactgcacccactgtgtagtcttttatccctcacacccttcacaccctttcttgtgagtctccaaagtccaccat

SEQ ID NO: 569214 - DNA, 556 bp, Homo sapiens
attggctagttaatcatggtgttcctagaagtgaaattgacaggaagcctacttaatttatataagcagaaaacttctaggttgaatggataaaagattaatttgaattacaaaaaaagagaatcatggcccctcaaccaatgtccagacttgagccagtttacagacccagaaccccttgaatgaaggggaggccasgtgcccttgaggaagaaccccactacactaccaacaatttatgctattaatcattctcccatccttcctcaaggagacctctggcattttaccaggtaactgtgcactggggaaagggaaatgatcagacatttctgggactactggacactggctgtgagctgactttgatttcaggggacccaaaacatcattgtggtcctccagttaaagtaggggcttatggaggtcaggtaattaatggtgttttagctcaggtctgacttacagtggatatagtgggtccccaaactcatcctgtagtcatttccccagtgtcagaattcataattggcatagacatacttagcagctggca

SEQ ID NO: 569215 - DNA, 566 bp, Homo sapiens
atggctgaataatatttattttggaccgaataagatttcattgcatakatactccacaggtggtgtatctattaatattttaaagggaatattgggtgcttccactttttgacagttataaataaagctgatatacatatttatatacacgtatttatgtgaacaagttttcaaatcaggtggatgagtacctatgagcataattgctggattctatgggaatactatgtttagctctgtaagaaactaccaaactgtgctccaaagtggctataccatgtgtcatccctaacagaaatgaatcagagttcttgttctccacatcttcaacaccaattagtattctcagggcttttttaaatctatttggcaacaaaattaaattaaacaaatctattgaggcaataaaaatctataacaaaatttaccatcttaatcatttttaagtgtacagattactagtattatgtataaccacagtatgcaaccaatctccagaacttttttaatcttgcaaaaatgaaacattgcgccagacgcagtggctcacacctgtaatcccagca

SEQ ID NO: 569216 - DNA, 589 bp, Homo sapiens
agtttcaatgtttctgctttcctactaatataacagtgtttgtattttacttcacatgcagggttttgttaagttttatgttagatgctaatgttagtggactttagttaaaacattagrgaagtcagaattaatgaaataactatcctatggaaacaataccatcttcttttccagataaggttcagggaagctaggcaacttatgtagatcacatagctaataatttgcaccaacattaactttttccaaaattttcaaacacttttaaaactagatagcagtataatgaacatacatgtgccattgccaagcttacaataattaacccttgaccagtcttatttaatgaacacttcttcctactttccctctccttctgttttatgttgaagcaaatattcatattacttacatcttgtattagtccgttttcatactgcgatgaagaaatacccaagactgggtgatttataaagaaaaagtttaatggactcacagttccacatggctggggaggcctcacaatcatggcagaaggtgaaggaggagcaaaggcatgtcttacatggtggcaggtaaaagagag

SEQ ID NO: 569217 - DNA, 589 bp, Homo sapiens
agtttcaatgtttctgctttcctactaatataacagtgtttgtattttacttcacatgcagggttttgttaagttttatgttagatgctaatgttagtggactttagttaaaacattagagaagtcagaattaatgaaataactatcctatggaaacaataccatcttcttttccagataaggttcagggaagctaggcaacttatgtagatcacatagctaataatttgcaccaacattaactttttccaaaattttcaaacacttttaaaactagatagcagtataatgaacayacatgtgccattgccaagcttacaataattaacccttgaccagtcttatttaatgaacacttcttcctactttccctctccttctgttttatgttgaagcaaatattcatattacttacatcttgtattagtccgttttcatactgcgatgaagaaatacccaagactgggtgatttataaagaaaaagtttaatggactcacagttccacatggctggggaggcctcacaatcatggcagaaggtgaaggaggagcaaaggcatgtcttacatggtggcaggtaaaagagag

SEQ ID NO: 569218 - DNA, 589 bp, Homo sapiens
agtttcaatgtttctgctttcctactaatataacagtgtttgtattttacttcacatgcagggttttgttaagttttatgttagatgctaatgttagtggactttagttaaaacattagagaagtcagaattaatgaaataactatcctatggaaacaataccatcttcttttccagataaggttcagggaagctaggcaacttatgtagatcacatagctaataatttgcaccaacattaactttttccaaaattttcaaacacttttaaaactagatagcagtataatgaacatacatgtgccattgccaagcttacaataattaacccttgaccagtcttatttaatgaacacttcttcctactttccctctccttctgttttatgttgaagcaaatattcatattacttacatcttgtattagtccgttttcatactgcgatgragaaatacccaagactgggtgatttataaagaaaaagtttaatggactcacagttccacatggctggggaggcctcacaatcatggcagaaggtgaaggaggagcaaaggcatgtcttacatggtggcaggtaaaagagag

SEQ ID NO: 569219 - DNA, 589 bp, Homo sapiens
agtttcaatgtttctgctttcctactaatataacagtgtttgtattttacttcacatgcagggttttgttaagttttatgttagatgctaatgttagtggactttagttaaaacattagagaagtcagaattaatgaaataactatcctatggaaacaataccatcttcttttccagataaggttcagggaagctaggcaacttatgtagatcacatagctaataatttgcaccaacattaactttttccaaaattttcaaacacttttaaaactagatagcagtataatgaacatacatgtgccattgccaagcttacaataattaacccttgaccagtcttatttaatgaacacttcttcctactttccctctccttctgttttatgttgaagcaaatattcatattacttacatcttgtattagtccgttttcatactgcgatgaagaaatacccaagactgggtratttataaagaaaaagtttaatggactcacagttccacatggctggggaggcctcacaatcatggcagaaggtgaaggaggagcaaaggcatgtcttacatggtggcaggtaaaagagag

SEQ ID NO: 569220 - DNA, 599 bp, Homo sapiens
cttgcgatagtttgctgagaatgatggtttccagtttcatccatgtctctacaaaggacatgaactcatcattttttatggctgcatagtattccrtggtgtatatgtgccacattttcttaatccagtctatcattgatggacatttaggttggttccaagtctttgctattatgaatagtgccactataaacatacgtatgcatgtgtctttatagcagcatgatttataatcctttgggtatatacccagtaatgggatggctgggtcaaatggtatttctagttctagatccctgaggaattgccacactgacttccacaatggttgaactagtttgcagtcccaccaacagtgtaaaagtgtatccaggagctggttttttgaaaagatcaacagaattcatagaccgctagcaagactaataaagaagaaaagagagaagaaccaaatagatgcaataaaaaatgataaaggggatatcaccacaaatcccacagaaatacaaactaccatcagagaatactataaacacctctaccaaataaaccagaaaatgtagaagaaatggataaattccttgacacatacatcctcc

SEQ ID NO: 569221 - DNA, 599 bp, Homo sapiens
cttgcgatagtttgctgagaatgatggtttccagtttcatccatgtctctacaaaggacatgaactcatcattttttatggctgcatagtattccatggtgtatatgtgycacattttcttaatccagtctatcattgatggacatttaggttggttccaagtctttgctattatgaatagtgccactataaacatacgtatgcatgtgtctttatagcagcatgatttataatcctttgggtatatacccagtaatgggatggctgggtcaaatggtatttctagttctagatccctgaggaattgccacactgacttccacaatggttgaactagtttgcagtcccaccaacagtgtaaaagtgtatccaggagctggttttttgaaaagatcaacagaattcatagaccgctagcaagactaataaagaagaaaagagagaagaaccaaatagatgcaataaaaaatgataaaggggatatcaccacaaatcccacagaaatacaaactaccatcagagaatactataaacacctctaccaaataaaccagaaaatgtagaagaaatggataaattccttgacacatacatcctcc

SEQ ID NO: 569222 - DNA, 599 bp, Homo sapiens
cttgcgatagtttgctgagaatgatggtttccagtttcatccatgtctctacaaaggacatgaactcatcattttttatggctgcatagtattccatggtgtatatgtgccacattttcttaatccagtctatcattgatggacatttaggttggttccaagtctttgctattatgaatagtgccactataaacatacgtatgcatgtgtctttatagcagcatgatttataatcctttgggtatatacccagtaatgggatggctgggtcaaatggtatttctagttctagatccctgaggaattgccacactgacttccacaatggttgaactagtttgcagtcccaccaacagtgtaaaagtgtatccaggagctggttttttgaaaagatcaacagaattcatagaccgctagcaagactaataaagaagaaaagagagaagaaccaaatagatgcaataaaaaatgataaaggggatatcaccacaaatcccacagaaatacaaactaccatcagagaatactataaacacctctaccaaataarccagaaaatgtagaagaaatggataaattccttgacacatacatcctcc

SEQ ID NO: 569223 - DNA, 359 bp, Homo sapiens
atttgcatataacctacacacatccccctttatgctttaaatcatctctagatcatttataatatctcatacaatgtaaatgctgtgtaaatatttgtcatgctatatattttaaaaatttatatatatttttattgttgtattgttatgttttaccattttttccagaatatctttgatccacatttggttgaatctgtgttacagaatctggggatatggagaaccaaatctatatagttttatatcgagacaaacaaktattttccagctgcagaggtgggagggaggagtggtttggggatggggagatggaaaggaagaagagtctctaatacactaggagttaggaaacccag

SEQ ID NO: 569224 - DNA, 479 bp, Homo sapiens
atgtagtatcttaatggggttctctgyattttctgaatttccatgttggcctgtcttgctaggatggggaagttctcctgcataatatcctgaagtgtgttttccagcttgtttccattctccccatctaattctggtactccaatcaatcataggtttggtctttttacgaagtcccagatttcttgaaagctttgttcattccttttcattcttttttctctattcttgtctgaatatcttatttcagtaaggtggacttcaaactctgatatcctttcttccacttggtcgattcagctgttgatacttgtgtatggttcacgatgttcttgtactgtttttcagctccttcagatcattcatgttcctctctaaactgattattctagttagcaattcctctaaccttttatcaaggttcttagcttctttgcattgggttagaacatgctcctttagctcattgcagtttttta

SEQ ID NO: 569225 - DNA, 479 bp, Homo sapiens
atgtagtatcttaatggggttctctgcattttctgaatttccatgttggcctgtcttgctaggatggggaagttctcctgcataatatcctgaagtgtgttttccagcttgtttccattctccccatctaattctggtactccaatcaatcataggtttggtctttttacraagtcccagatttcttgaaagctttgttcattccttttcattcttttttctctattcttgtctgaatatcttatttcagtaaggtggacttcaaactctgatatcctttcttccacttggtcgattcagctgttgatacttgtgtatggttcacgatgttcttgtactgtttttcagctccttcagatcattcatgttcctctctaaactgattattctagttagcaattcctctaaccttttatcaaggttcttagcttctttgcattgggttagaacatgctcctttagctcattgcagtttttta

SEQ ID NO: 569226 - DNA, 536 bp, Homo sapiens
ccgccccatttgttttcaagggaagtgatttgggtgactactgcagcagaacagctgtctctgggttggcatggatgctcggtaaagcaagggggacttggagatatttcctgggaggagggcaggtggaaaggagagacctgcagtcttcacttgtcagaggagaacgagcagagatatgtttgggtagatgaggacccagcyttaagtgaattatgcatttaaaggcacttgctcttgtgaactaaattataagctgattgccctgcagagattatccttttttaatgtaatttttattagcgattataccacaaccaactctcaaattttatgggaggattaatataaaaaagcagtggtgcctttctcctgcatcaatgagaacatgcttaggaaaaacgattgacttatcataatcatctgcctaaacaagcagattggggcagatgtgggggaacagaaggggaggcatggtggaaaacacccgaaataaatttcaagatgcaaatgtctgagtattgttttctgttgcc

SEQ ID NO: 569227 - DNA, 536 bp, Homo sapiens
ccgccccatttgttttcaagggaagtgatttgggtgactactgcagcagaacagctgtctctgggttggcatggatgctcggtaaagcaagggggacttggagatatttcctgggaggagggcaggtggaaaggagagacctgcagtcttcacttgtcagaggagaacgagcagagatatgtttgggtagatgaggacccagccttaagtgaattatgcatttaaaggcacttgctcttgtgaactaaattataagctgattgccctgcagagattatccttttttaatgtaatttttattagcgattataccacaaccaactctcaaattttatgggaggattaatataaaaaagcagtggtgcctttctcytgcatcaatgagaacatgcttaggaaaaacgattgacttatcataatcatctgcctaaacaagcagattggggcagatgtgggggaacagaaggggaggcatggtggaaaacacccgaaataaatttcaagatgcaaatgtctgagtattgttttctgttgcc

SEQ ID NO: 569228 - DNA, 624 bp, Homo sapiens
tgaacttttaaagatgtgtttttcttctttccttttattttgaatcagtgcttatgtgactggaattataaccctcgtgttgtgagtccacataggagaactctagagtggctcagcaaggcctttaaaagcaatctacaaccctttctatggcaaccttgacagctcagtcattttcctcaaccggaaatacttcaatggtagtgggaggatgctctaacttttggggcagaatttcagagcagttctgatgttcaatagaaatctgcttctttgacttgttcaacagtagatgcaagttatgatcttcctgtcaactgactttggatttttgaaagtcactatgcagtttcccctccattttttctttctccaagactaaacatctccaagatctttactaatgtctcatrtggtataaaattcctttctctcctttgtcatcatgatcaaaatttctctatttgtcagtatctcttaaaataaactctgtctatagtcctctcccagataagcacttgccaaggttctttaagattcaaggagcttagtctgatatggaggggagtctagactgatcacagggtggcaatgtttacagtcaagagaaagcaaaaggcaggg

SEQ ID NO: 569229 - DNA, 604 bp, Homo sapiens
tataattttccttaaaaagtgttttttgtttttttccaaagcaactatcctcaaaagagctgggcatagttctcctaggggcagcaccagtgttgaagtgtggggggaaactgttctaaatccttcaaacaatgtcacctttggagcagtaaaactgctccctttttcccatgagagatgacaagcatgccccagcaatcatttcttgaaagcggatgcccggtgagagaaggatttgatttgctgaagggtcagccaagttaagccagtttcttcctcatttcttccctggctggaggttttgatggtggtgatggtggttgaactgaacccacttagaaaactgtcaaaggtttctggactctcaggtgtgccgtctcacatttggtctgctacagcaggtgcttcaaggctttcttcygccaagatttctttgttttattttatgatgttttctttatgtgtgtgtgtgtgtgtgtgtgtgtgtgtgtgtgtgtgtgttttacttttatttctaacaaacctgtggaccttggggtttaagactgagtgaagctagaaggattagagtcaaaagaattttgccatttggccaatagcattc

SEQ ID NO: 569230 - DNA, 573 bp, Homo sapiens
ccacaaatgaggaaaacataccrataacagtgtatgaaatatttccacacagtcccagcatttaagagcttccagggtcctcccaagtccattttctgcccatgattattctgctttcagtacgtttagaagctaatttctcaattccattgtgtgggtgcatagtaatgcaggagtttggttatgaaatatataaagaaagggctaaaatttgactgtaaaaatattttttatccatatctacctgtttgatagcatttcccattattccaagctataaatcagaatatggttacaagatattggcaggggtgggggaagctaggaagaagaggaatgaattccaagataacaaaactgaacatttattgagggttagtacatgccagctacttagttgagcgatttgtctacacattctcagataatcctataattattttctaaagtggaagtcatcccaaatttatgatggcaaaaagaggctcagagggtctgtgtcagttctccaaagccatatagcatttaaatggaaaagcaggtatataaaacctaaacctttcactccaaatc

SEQ ID NO: 569231 - DNA, 578 bp, Homo sapiens
ctctgcctcctgcctctatcaatattargcagataagacagagttttcttttcatagggctaattggttgtatgttaagtcctgagtgttagaagacaatttcttgctttcatggactgtatcaattttcttttattcttgtatctttgactgatattcctcctttttcagattcaggtagtagcccattaaagattattactcagtattgttcaatattctgattaagttaaatattttattcttggaggttattatctttaaatgccatatgatatccctgtaatgagttctgaaggtctaaaattaggaaaccaaaagaattaaccagactgggtgcagtggctcatgcctgtaatcccagcactttgggaagccgaggtgggtggatcacctgaggttgggagttcaagaccagcctgagcaacgtggagaaaccccgtctctactaaaaatacaaaattagccgggcgtagtggtgcatgcctagaatcccagctactctggaggctgaggcaggagaatcgcttgaacctgggaggcagaggttgaagtgagccaagattgcactgttgcac

SEQ ID NO: 569232 - DNA, 574 bp, Homo sapiens
cctgcacaagttctctctttgcctgctggcatccacgtaagacatgacttgctcctccttgcctaccaccatgattgcaaggtttccccagccatgtggaactgtatgtccatgaaacctctttcttttttaaattgcccagtctggggtatgtctttawcagcaacgtgaaaacagactaatacacacagtttatgtaaccagccctctaatgatggatacttggactgtttctcacaggttaacattacaaataatgctaaaatggataactcttcccacatgccatttaaaatatgtgcaggtgtgtgtaaagaataaattccagatatgggtttactaagttaaaggttaaatgagtgtataattttttttttcttaagatggagtttcgctcttgtctcccaggctggagtgcaatggtgtgatctcagctcactgcaacctctgcctcccaggttcaagcaattctcctgcctcagcctctcaagtagctatgattacaggcatctgccacgacgcccagctaatttttgtatttttagtagagacagggtttcaccatgttggccag

SEQ ID NO: 569233 - DNA, 574 bp, Homo sapiens
cctgcacaagttctctctttgcctgctggcatccacgtaagacatgacttgctcctccttgcctaccaccatgattgcaaggtttccccagccatgtggaactgtatgtccatgaaacctctttcttttttaaattgcccagtctggggtatgtctttatcagcaacgtgaaaacagactaatacacacagtttatgtaaccagccctctaatgatggatacttggactgtttctcacaggttaacattacaaataatgctaaaatggataactcttcccacatgccatttaaaatatgtgcaggtgtgtgtaaagaataaattccagatatgggtttactaagttaaaggttaaatgagtgtataattttttttttcttaagatggagtttcgctcttgtctcccaggctggagtgcaatggtgtgatctcagctcactgcaacctctgcctcccaggttcaagcaattctcctgcctcagcctctcaagtagctatgattacaggcawctgccacgacgcccagctaatttttgtatttttagtagagacagggtttcaccatgttggccag

SEQ ID NO: 569234 - DNA, 520 bp, Homo sapiens
tttcagcccttgcctctctccctccctcccctctctagtagtcaccagtgtctattgttcctatatgtgctcagtgtttagctcccacttataagtgagaacatgtagtattaggttttctgttcctgcattaatgcacttaggataatggcccccagctgcatccacattccagcagaggatataatttcattctttttcatgactgcatagtattccacagtgtgtatatatattttctgtatccaatccaccactgatgggcacctaggctgattccataactttgctatacaagtttttaagaggctgcttgctttgcaaactcagctttaagacagacccctggcccatcccccaagtcaatgctatatagaaatcctagaactgagacaagatgaaaaacrtgaagaacagaaagctttgcttggtgtcttaagaatatggggcagccaggagtggtgggtcacacctgtaatcccagcaatttgggatgctgaggcagatggatcaagagatc

SEQ ID NO: 569235 - DNA, 597 bp, Homo sapiens
attatttgcagcagtggtggggatgtcagcagctgcagctgtggtcccacctacagtagtgaygtcgtcctcattttcatcactctcttggtcattcctgttcatggcagtggatggcttcctaactggtatttctgcctcaaactcttttaattcatccccatttttttctcaaggctatcatgaaaagcttaaaagtgtagcccactactctccagctttgaaaaatgtctttttgaaatccaggtacaatatgtttatagatttcctcaattggtgcaaactgcaactgcttccccccaaaaatgccccctgctcacttgctaaaaggtagtgctggggagggctgcattctgcagtgtcattgaaattcattctaggtgtctttctttccttttcagtttctgcagtaattgaggatgggacatgcatgagaactgttttaagttctgttttttttattttcttttatttaaactgacatgtaaaacacagctgggcatattatttcaccactctgagcctaagttttctcagctttaagatgagtaaattggacaggataatttctttttttattattgtttattttattga

SEQ ID NO: 569236 - DNA, 597 bp, Homo sapiens
attatttgcagcagtggtggggatgtcagcagctgcagctgtggtcccacctacagtagtgacgtcgtcctcattttcatcactctcttggtcattcctgttcatggcagtggatggcttcctaactggtatttctgcctcaaactcttttaattcatccccatttttttctcaaggctatcatgaaaagcttaaaagtgtagcccactactctccagctttgaaaaatgtctttttgaaatccaggtacaatatgtttrtagatttcctcaattggtgcaaactgcaactgcttccccccaaaaatgccccctgctcacttgctaaaaggtagtgctggggagggctgcattctgcagtgtcattgaaattcattctaggtgtctttctttccttttcagtttctgcagtaattgaggatgggacatgcatgagaactgttttaagttctgttttttttattttcttttatttaaactgacatgtaaaacacagctgggcatattatttcaccactctgagcctaagttttctcagctttaagatgagtaaattggacaggataatttctttttttattattgtttattttattga

SEQ ID NO: 569237 - DNA, 597 bp, Homo sapiens
attatttgcagcagtggtggggatgtcagcagctgcagctgtggtcccacctacagtagtgacgtcgtcctcattttcatcactctcttggtcattcctgttcatggcagtggatggcttcctaactggtatttctgcctcaaactcttttaattcatccccatttttttctcaaggctatcatgaaaagcttaaaagtgtagcccactactctccagctttgaaaaatgtctttttgaaatccaggtacaatatgtttatagatttcctcaattggtgcaaactgcaactgcttccccccaaaaatgccccctgctcacttgctaaaaggtagtgctggggagggctgcattctgcagtgkcattgaaattcattctaggtgtctttctttccttttcagtttctgcagtaattgaggatgggacatgcatgagaactgttttaagttctgttttttttattttcttttatttaaactgacatgtaaaacacagctgggcatattatttcaccactctgagcctaagttttctcagctttaagatgagtaaattggacaggataatttctttttttattattgtttattttattga

SEQ ID NO: 569238 - DNA, 553 bp, Homo sapiens
aaacttacagattacactggagaagtgtaccaaattgtctgagagtacaagagaaggaggaggctctacatcttcctggaggaatggggttacaggtagggagcagaaaagaataaaatatttgaatggaaagccagaaartagtgtggtttttttggcggggagcgggaaacggagtctcgctcttgtcacccaggctgcaggctggagtgcagtggtgtgatctctgctagctgcaacctctgcctcccgggtccaagtgtttctctgcctcagtctcccgagtagctgggattacaggtgtgcaccaccacgctcggctaatttttgtatttttagtagagatggggttttaccttgttggccaggctggtcttgaactcctgacctgaactgatccgcctgcctcggcctcccaaagtgctgggattatgggcatgagccactgtgcccggccgggatagtagtattctggcaggaagactcgcagtgccgggtgctcagatgaggagatgaacgtgaatcctgcctaacactgaaagatgaagttgag

SEQ ID NO: 569239 - DNA, 608 bp, Homo sapiens
caacaacaacaacaaaaaaagagagataaaaatagcagagaaagagaaagcctaatgtgaaactaacaaraatgcttattaagaatgtaggtgaaaattgagcagaaggtagttctgatttaacatctgctaatgatgcccgtgttcaaaaattaattatttaaaatgtaaactaaagttaaaaggagattaaatactttaaaaacagaaaaatacctaactctatgtcaaactgataacctaactacaaatacagggagttaatgtaggtaacttaaaaacacagcactacaattactcacccttagtaggatatgtaaaaataattgcaaaaaaatcttgagatgtatttaatatacgtgttgtgaatggtggtatgggtatagcaatttaaaacgttcttttttgttgtggggtagatcaaagagcaaatacatgaatatttctgggaactatgactaccactgtaggaatttggtaaatagagcagaaataaaatatgactctataaataaagctatttatgaatattttgtgaataataaattcagtaagtacttcaaattagtgaaaaagatgaaatattcagtgaatcgttatgggacatg

SEQ ID NO: 569240 - DNA, 608 bp, Homo sapiens
caacaacaacaacaaaaaaagagagataaaaatagcagagaaagagaaagcctaatgtgaaactaacaagaatgcttattaagaatgtaggtgaaaattgagcagaaggtagttctgatttaacatctgctaatgatgcccgtgttcaaaaattaattatttaaaatgtaaactaaagttaaaaggagattaaatactttaaaaacagaaaaatacctaactctatgtcaaactgataacctaactacaaatacagggagttaatgtaggtaacttaaaaacacagcactacaattactcacccttagtaggatatgtaaaaataattgcaaaaaaatcttgagatgtatttaatatacgtgttgtgaatggtggtatgggtatagcaatttaaaacgytcttttttgttgtggggtagatcaaagagcaaatacatgaatatttctgggaactatgactaccactgtaggaatttggtaaatagagcagaaataaaatatgactctataaataaagctatttatgaatattttgtgaataataaattcagtaagtacttcaaattagtgaaaaagatgaaatattcagtgaatcgttatgggacatg

SEQ ID NO: 569241 - DNA, 608 bp, Homo sapiens
caacaacaacaacaaaaaaagagagataaaaatagcagagaaagagaaagcctaatgtgaaactaacaagaatgcttattaagaatgtaggtgaaaattgagcagaaggtagttctgatttaacatctgctaatgatgcccgtgttcaaaaattaattatttaaaatgtaaactaaagttaaaaggagattaaatactttaaaaacagaaaaatacctaactctatgtcaaactgataacctaactacaaatacagggagttaatgtaggtaacttaaaaacacagcactacaattactcacccttagtaggatatgtaaaaataattgcaaaaaaatcttgagatgtatttaatatacgtgttgtgaatggtggtatgggtatagcaatttaaaacgttcwtttttgttgtggggtagatcaaagagcaaatacatgaatatttctgggaactatgactaccactgtaggaatttggtaaatagagcagaaataaaatatgactctataaataaagctatttatgaatattttgtgaataataaattcagtaagtacttcaaattagtgaaaaagatgaaatattcagtgaatcgttatgggacatg

SEQ ID NO: 569242 - DNA, 556 bp, Homo sapiens
ataagactctgtgaccatcacaaccagagcatttacctcacagggcaatactaattcacctcaatatccacacttactacccttttctgtcttcaggaaaataacaggttcaattctctgcacagccagagcttggcagtacaaagtctgctttggaaagaaatagtttaaggaccaaataattgaagaaagtaagaaaacattttggggaatagttcttgagagtgttagatgataggracagaaaataaggcagataggggagaattccttgataagctggcactaacttaggacatggtatcaatgttctggtgggaaactctggaattgagcagctggtcatattttgctgctttttgagaccaggtacaaagaattaaccttcatttaatgtatgtggagattctaaaacttttatgagcgcagtacatcaagttgagaacagggatcctaacactcatagaattggcaaccccagaatcgaatgctgaatattcaccacttgatatgttctctaggagaatacaatgagcagtctcttcactaaagcact

SEQ ID NO: 569243 - DNA, 556 bp, Homo sapiens
ataagactctgtgaccatcacaaccagagcatttacctcacagggcaatactaattcacctcaatatccacacttactacccttttctgtcttcaggaaaataacaggttcaattctctgcacagccagagcttggcagtacaaagtctgctttggaaagaaatagtttaaggaccaaataattgaagaaagtaagaaaacattttggggaatagttcttgagagtgttagatgatagggacagaaaataaggcagataggggagaattccttgataagctggcactaacttaggacatggtatcaatgttctggtgggaaactctggaattgagcagctggtcatattttgctgctttttgagaccaggtacaaagaattaaccttcatttaatgtatgtggagattctaaaacttttatgagcgcagtacatcaagttgagaacagggatcctaacactcakagaattggcaaccccagaatcgaatgctgaatattcaccacttgatatgttctctaggagaatacaatgagcagtctcttcactaaagcact

SEQ ID NO: 569244 - DNA, 379 bp, Homo sapiens
ctcaaaaaaggaaaaagacgtctgaactacaaaataatacaaatgtgttttgttaatayattataaaataagaattcaggtgttcgtttatagaatattttcactttaaagagtctttaccctcaggatcttctattgagagtactttatgaataatcatgagaataaaactttaccataaaactaattataaataatgaagagtttgtgtaagcgtaggtgtgacattatatacatagctactttcaaaccatttgaaaatcatatttaaatgatttaacatttaatataattcaggagtggtcatcattttggaaatctattctcttcatttaaaagaaattatgaagttctagaacctgctgagagaattataaca

SEQ ID NO: 569245 - DNA, 609 bp, Homo sapiens
tgacttaacaaaggaaggggccacacagcaaagaacaagggcagcctcttggagctgaggccagcccttggctgacagccagcaagacatgggacttcagccctatttggcgggaaatggatgtatccaatatccacagtgagctgggaaggaggtttttctcttgagcttcctgacaagaactcagctsagcctacacctttattctagcctagttataacctgagcagaaaacctaatcatgctgtgatggattttggcctatcatctatgagctgataaatgaatgttgttttaatttgctacatttttgtcaatttgttacatagcaatagcaatctaatacaccgggccttactcccagagtttcttgttcagtatgtctgaagcagggcctgagaatttatactcataacaagtttcctggtgatacctctcttgcttgcctgcaatttaaggacagctacactagtgtaaaagctgggctttgggccatgaatgacataagaaaggctaggaacttgataggtcattgagttctgccgtgtagcaattcctgttgattccactcagtggacaatgtggccaagtatgaataaagcagaaatt

SEQ ID NO: 569246 - DNA, 547 bp, Homo sapiens
ttggcctatcatctatgagctgataaatgaatgttgttttaatttgctacatttttgtcaatttgttacatagcaatagcaatctaatacaccgggccttactcccagagtttcttgttcagtatgtctgaagcagggcctgagaatttatactcataacaagtttcctggtgatacctctcttgcttgcctgcaatttaaggacagctacactagtgtaaaagctgggctttgggccatgaatgacataagaaaggctaggaacttgataggtcattgagttctgccgtgtagcaattcctgttgattccactcagtggacaatgtggccaagtatgaataaagcagaaattactagygcgaggttgtttcagaccttgatattcctactggagatactggacagttgtccaataagaactaagacaacatcgttgcttggttctactttcattgttactgttattattgtaaccagcaaggaaacacccagtttttgatgacactgacacagatgggagtgtgaattgactgttattttatttag

SEQ ID NO: 569247 - DNA, 597 bp, Homo sapiens
aaggaacaatttggtgatggcttgggaaaatataaaggaatccatttgatccagagcatttaaagtggttgaaacaaaatctttagagtattttacattgtcagggagatttacctgatggtaaaccgattgcaaagagcctctggagattctttacaattatctctcagttttcttctgcctggtgatatgtataagtgtatatacatatctgcctgagtgataggatatgaatgatatgaagatgaaaacttgcattgatcataaaccagctgtcayttcatcactctggctctggttaaccagaggttctcatattgttcctgagaatttgaccagtttgtgtttcacaagtttgagagcaagagctgagaagatagaaaatgttccacataatcaacaaaaaacataggcggcatatcaaaaaacatggaggaagtaagtgagacaatatttgaacagagagatgagttagcaccacatagttgaatagaagcctacataaatttcagtatgtctcccacccatgatgttcagatattcaactgtttctggatcataggtagaaaatgctgtgattgcacctgttgaggaaat

SEQ ID NO: 569248 - DNA, 577 bp, Homo sapiens
aaacaggtacaacacacgaattgaaagaatctgtacaaaggaaagcattgccatcccacattacctttagtcttagaggatttttaaattttcctatcaaaacytgagtttactttgaatgataacaatatactaattgtcctatatttgtttgtaaataaataatgttttgcttttatttcattcttatgccaaacttatatttggagccctgagtagtatttgtcacccaaatctctgagtttcatattctacttgatgttttcacaaagcgatgtgctgcagggcagagcatatgagtagttaaaagaggatattatgaagtctctgaaaaagaaaaattcttctacattatgggcaaatgtcacatttttaaactcactctttctgtatcaccagagattgcatttgttgaaaatttcaggttgctggatattaatggtaatggaagaaacctaagtcagcagggactgcctaattattcaacacacagaagggtgagtcattataaatgccagtaaaaccataagtctctgagatagtcttaaaatgtcacaaaatcttctcccttagaact

SEQ ID NO: 569249 - DNA, 594 bp, Homo sapiens
tctttcagtctgcaccacctttaagagctgtaatattcaccacgaaggtccgcagcttcattcctgaagtcagccagaccatgaacccaccggaaggaacaaactcgggacacaccaacccactctggattggattttacctgagcaataaagagacttttactatggtaactcactaagatttaaggatttccctattacagcaaccactgtagtatcatttttaactaacagtaaccttcagttaatcccaaatgtaatgtgttacttttatagaacaacttaataaaaatatataatttccaaatagcaggcagtgtcctcctaacaaagattttacttgtatgcatttcagttctttgtatacttaaaatgcatatacatttctcaaactacaaaatactgctatctttcttgctagtctgatctgggatcaaacttctagccgattctcctagctgcctacatcaatatatttatcctaaggcaacactcctgtaaactgtgtttttggttccaaagaagttcatttccctgctttgaaaatgatagccccaattaactagttkcagtttctcatattccccatgagtc

SEQ ID NO: 569250 - DNA, 682 bp, Homo sapiens
tctttgtgttctggtttagttcaattgaccaggatgatttaaagtatctgccatgactgccctttccckagaaaagtggctggagtggtttcatacacacaatcaccatgcgtttaccaaccaaatcataagggaatggaccacacagtttgaagaatacagaattatgcgtggaggtgaagcagccatttttctcaaaatggacggtgaccagtaagcattttaggagttttatggctgcctagtgaagttagtctgcttttaaaaaatacactttttcatatcacaaatgtatatcaacatctctgttttattttcacataaaaattgtcctttttttcctgctacaatcaactagaggaccagttttaacaaactgcagaaccagcagttttgctaagaatcgtctgcaggctgctctgagcacactctggcctatgggttagccctaccccacaaggagcagtcaaaaaaaaaaaaaaaagtgaccatgaaatgaaaaacttaaaatagatctatttaccttagttacccatctttcattgtgcttgtcggaagcaaccccctttcctattttcctccaatacatcagaagtggcaactttgctctttctacttttacttcttcctaatttctgctccgcacaatggggaactaattattacatgtgtatttaaaaaa

SEQ ID NO: 569251 - DNA, 577 bp, Homo sapiens
gaagtcatacacaagacagtgaaataccataacatttacaaggtaagtcacttcaaagtgatgggataagaacagggacacatccctggcagcgcacacaaggaagagagcccgggaggtataccagatgttacaaagaattttatgcaagttttcagcttatgctaaaagctgagagtggactagcaagacagtttagaatccccagcagtcacagacaggagtggagtctgtacccacccacaggctctgcttcacaaatcactggaattcatgacaataaaatatgcacgatgatacttaaaagttagattgatttctttattattatgaaagggctttagcattgataattttcacatcattttatgggcattgctgcctgaaatgtrgacttaacaatttataatccacttagtttctaagggcaattcatttgttctccgtgccaaatatataattaagaaatgctactgtagacgcaaggacagttttaggagatccattgtttgttgactgctggagtgtaactctgcaaattatgttccatcctaggcattccaaagctaacaagctt

SEQ ID NO: 569252 - DNA, 536 bp, Homo sapiens
cagaactagagtctcatatttctgatgctagttcctttcaaagtgaaaagtatgcatttccctagacatctttttataatttccagcattttttgtaacaatttataaaatattacaacctttatggtacatcatttccaattctctttctcgtccttatttgctactgaattcatatttaggaatctaaggatatttatttacatgtcaatatacatattattcgtcactttttaaaatatcttgattatacagtcactgacagacgtttaaattttcattgaagaaatcttaaaatattgaattcgttttgttccctagagataaaaaaatcatttccttatataastttaaaaaggttttataaattcaaaattaatactgacagtaaagtagtttaaattttccaaaagtatttccaatgaaacacgcagttttggaagttaataataatgatgataataggtgctttctatgactcagctgagttatatgcagtgagagatgttataaaatttagtagaacaggcatttag

SEQ ID NO: 569253 - DNA, 575 bp, Homo sapiens
tactctaggtgttttagcaattttaaaataattaattacaaaagctctgatgtgttctcattgtctttcacttaataattagacttctttttcttgtaagatttttttttccttttctgttgtatatatttaaatgagatgtgttttcttgtatgtggagatggaagtttctgtgtacacagtggggtgaaaacagggtagcttccctagcttcctggattaaggacaacatttgcccttgtaataatgaatattggaaattatggcctctctgtgtagccacctgcacaattttgggatctttttcctctggatgccttttaccactatcaaagctgctttcatctttactcctagtgctctgttcctattctgctaagtttagagattaccaacagttacctgccccckttcccacccccagtagtttcctctctccttctgaatgattttttttctgatatttctgaagtccctgaaaattagaggacgacagaatatgctgaccttttaataaacgctttgaggaccccaggttgtttgtttgtttatactaagtcacatattgaagacag

SEQ ID NO: 569254 - DNA, 601 bp, Homo sapiens
cttcttttactcagagtaattattttcagattaatctaggtttttggtatattaatagcttattttttattgctaactagcattacattgtatgcaatatccatttacctgatggattccagtttttcttccagtatttggcttttacaataaagctgctattaacattcatacacaagtctttcgtgtgaacatgttttcatttcttttgtttctttcctgtctttcaagggtcattctcatgccctgtcccatgtctgaaaataacagtttcatatagtttgttcagcttttaattggttgaggtggaagggcaaattcaatttcagttattttaccttggctcaaagtgggtccttatcccatattattttcstgagagacccttcattgatttttagttatagtttttcttccaataacaggttaaattccatgaaggcagcaatatttttctctgctttttaaactattatttcagttccatatgaaaagtttctaccactagttgaaactccatcaatattggttgaattaagcaaaattaaatgaactcaactaataggggctaaaaacacagggaaacatattctttctgcac

SEQ ID NO: 569255 - DNA, 601 bp, Homo sapiens
cttcttttactcagagtaattattttcagattaatctaggtttttggtatattaatagcttattttttattgctaactagcattacattgtatgcaatatccatttacctgatggattccagtttttcttccagtatttggcttttacaataaagctgctattaacattcatacacaagtctttcgtgtgaacatgttttcatttcttttgtttctttcctgtctttcaagggtcattctcatgccctgtcccatgtctgaaaataacagtttcatatagtttgttcagcttttaattggttgaggtggaagggcaaattcaatttcagttattttaccttggctcaaagtgggtccttatcccatattattttcgtgagagacccttcattgatttttagttatagtttttcttccaataacaggttaaattccatgaaggcagcaatatttttctctgctttttaaactattatttcagttccatatgaaamgtttctaccactagttgaaactccatcaatattggttgaattaagcaaaattaaatgaactcaactaataggggctaaaaacacagggaaacatattctttctgcac

SEQ ID NO: 569256 - DNA, 620 bp, Homo sapiens
actatttgggattctttttaccaaagaaagtaatcttcatagcagaactctaagcttaaaagttattttgctttgagattcatctctgaatgttgctatgctaaaagaaacttttacagaacaagaataaagcttttaaacttcacacrtagccacagggataccttcctcatgcatagccatggggatatccagggcttcaatgctaaggaaaaaaggcagcaaatccctctacccaccgtaccatctggaggacatttactagactgtcacacatgcacacacacctggataagagcctgtgaacagtgtcggctgagtaacaacgtggagatatttttttttcttgacagtgtaattgaaattatagctataatatgcttttaaaaacactggattttttcttatatttttttaaattttaggtatttattcacttaatatatttttgaaataaggaatcacacaaaaaatgaaacttatgggaagtcttcaggcttaatttcctaattgtttgatcactaaaaatcaaggaacctcaggcagttaccaagtaaagtcacgtacgtatttaaaccacctacttattatctatctataaattaaacttagaatattta

SEQ ID NO: 569257 - DNA, 620 bp, Homo sapiens
actatttgggattctttttaccaaagaaagtaatcttcatagcagaactctaagcttaaaagttattttgctttgagattcatctctgaatgttgctatgctaaaagaaacttttacagaacaagaataaagcttttaaacttcacacgtagccacagggataccttcctcatgcatagccatggggatatccagggcttyaatgctaaggaaaaaaggcagcaaatccctctacccaccgtaccatctggaggacatttactagactgtcacacatgcacacacacctggataagagcctgtgaacagtgtcggctgagtaacaacgtggagatatttttttttcttgacagtgtaattgaaattatagctataatatgcttttaaaaacactggattttttcttatatttttttaaattttaggtatttattcacttaatatatttttgaaataaggaatcacacaaaaaatgaaacttatgggaagtcttcaggcttaatttcctaattgtttgatcactaaaaatcaaggaacctcaggcagttaccaagtaaagtcacgtacgtatttaaaccacctacttattatctatctataaattaaacttagaatattta

SEQ ID NO: 569258 - DNA, 620 bp, Homo sapiens
actatttgggattctttttaccaaagaaagtaatcttcatagcagaactctaagcttaaaagttattttgctttgagattcatctctgaatgttgctatgctaaaagaaacttttacagaacaagaataaagcttttaaacttcacacgtagccacagggataccttcctcatgcatagccatggggatatccagggcttcaatgctaaggaaaaaaggcagcaaatccctctacccaccgtaccatctggaggacatttactagactgtcacacatgcacacacacctggataagagccygtgaacagtgtcggctgagtaacaacgtggagatatttttttttcttgacagtgtaattgaaattatagctataatatgcttttaaaaacactggattttttcttatatttttttaaattttaggtatttattcacttaatatatttttgaaataaggaatcacacaaaaaatgaaacttatgggaagtcttcaggcttaatttcctaattgtttgatcactaaaaatcaaggaacctcaggcagttaccaagtaaagtcacgtacgtatttaaaccacctacttattatctatctataaattaaacttagaatattta

SEQ ID NO: 569259 - DNA, 620 bp, Homo sapiens
actatttgggattctttttaccaaagaaagtaatcttcatagcagaactctaagcttaaaagttattttgctttgagattcatctctgaatgttgctatgctaaaagaaacttttacagaacaagaataaagcttttaaacttcacacgtagccacagggataccttcctcatgcatagccatggggatatccagggcttcaatgctaaggaaaaaaggcagcaaatccctctacccaccgtaccatctggaggacatttactagactgtcacacatgcacacacacctggataagagcctgtgaacagtgtcggctgagtaacaaygtggagatatttttttttcttgacagtgtaattgaaattatagctataatatgcttttaaaaacactggattttttcttatatttttttaaattttaggtatttattcacttaatatatttttgaaataaggaatcacacaaaaaatgaaacttatgggaagtcttcaggcttaatttcctaattgtttgatcactaaaaatcaaggaacctcaggcagttaccaagtaaagtcacgtacgtatttaaaccacctacttattatctatctataaattaaacttagaatattta

SEQ ID NO: 569260 - DNA, 547 bp, Homo sapiens
tggaggcttgatgagctacacagtctgatggcagaagctgttagactcaggaaagagttgtacttccagtccaaaggcagcctgctgtggaaccaggaagatccagtggtgcagatgaagtctgaaggtagtccactgagaattctctcttgctagaggtgtggggtggtcctgagggagggacaggaccgcttttcattctgttcagcctttcaattgattggatgagtcccacacacattgtggatcgcaatctgctttgctgaaaatctacctgtttaaatgtcaatcccaaccaaaaacgccctcacggaaacatctaaataatgctttaccaaatacctgggcactgtggtttagacaagttgacacattaataatcacagggtcaaaaattccattctgatattgcaagcgtaaccaataatcccagcactttgggaggcygaggcgggtggatcacctgaggtcaggagtttaagaacagcctggccaacatgatgaaacccctctctactaaaaatacaaaaattagcctggcatggtg

SEQ ID NO: 569261 - DNA, 547 bp, Homo sapiens
tggaggcttgatgagctacacagtctgatggcagaagctgttagactcaggaaagagttgtacttccagtccaaaggcagcctgctgtggaaccaggaagatccagtggtgcagatgaagtctgaaggtagtccactgagaattctctcttgctagaggtgtggggtggtcctgagggagggacaggaccgcttttcattctgttcagcctttcaattgattggatgagtcccacacacattgtggatcgcaatctgctttgctgaaaatctacctgtttaaatgtcaatcccaaccaaaaacgccctcacggaaacatctaaataatgctttaccaaatacctgggcactgtggtttagacaagttgacacattaataatcacagggtcaaaaattccattctgatattgcaagcgtaaccaataatcccagcactttgggaggctgaggcgggtggatcacctgaggtcaggagtttaagaacagcctggccaacatgatgaaacccctctctactaaaaawacaaaaattagcctggcatggtg

SEQ ID NO: 569262 - DNA, 516 bp, Homo sapiens
atcccaaccaaaaacgccctcacggaaacatctaaataatgctttaccaaatacctgggcactgtggtttagacaagttgacacattaataatcacagggtcaaaaattccattctgatattgcaagcgtaaccaataatcccagcactttgggaggctgaggcgggtggatcacctgaggtcaggagtttaagaacagcctggccaacatgatgaaacccctctctactaaaaatacaaaaattagcctggcatggtggtgggcccctgtaatcccagctacttgggaggccgaagcaggagaatygcttgaacccaggaggcagagattgcaatgagctaacatcgcactactgcactccagcctgggtgacagagtgagagtccatctcaaaaaaaaaaaaaaaaagatattatgatagtataatctctgaattataaagattatctgagaaaagagaaaataggagaattttgagtgagaaagtgtactggaaaaattccatctcactgttt

SEQ ID NO: 569263 - DNA, 578 bp, Homo sapiens
ccgtaagtaaaaaatatgtaaaaatgagagaaatgatattatataatgataaagatatcacctcagcaagagaatataacaattataaatatatatgcactcaatattggagcacytaaatatattgaacaaatattaatagagctaaaaaaagagatggactgtaatgcaaaaagagcaggggacttcaacatcccgctttcaacaatagagagatcaccttgacagaatatcaatacagaaacatggtatttaagttacactctatattgaatagacctaaaaaatatttacagaccattctttcaaacagttatagaatgtacattcttctcaaataaagatgaaagattttccaggatagatcatatgttaggccacaatacaagtcttaaaaaatttaagatcaaaatcatatattctcagaccacagtgttataaaactagaaataaataaccagacaaaacatgaaactttacaaatacatgtaaatcaaacacatgctcctgaacaatccacgggtcaatgaataaattaacagtgaaattaaaaaattccttgaggcaaatgaaaatgg

SEQ ID NO: 569264 - DNA, 578 bp, Homo sapiens
ccgtaagtaaaaaatatgtaaaaatgagagaaatgatattatataatgataaagatatcacctcagcaagagaatataacaattataaatatatatgcactcaatattggagcacctaaatatattgaacaaatattaatagagctaaaaaaagagatggactgtaatgcaaaaagagcaggggacttcaacatcccgctttcaacaatagagagatcaccttgacagaatatcaatacagaaacatggtatttaagttacactctatattgaatagacctaaaaaatatttacagaccattctttcaaacagttatagaatgtacattcttctcaaataaagatgaaagattttccaggatagatcatatgttaggccacaatacaagtcttaaaaaatttaagatcaaaatcatatattctcagaccacagtgttataaaactagaaataaataaccagacaaaacatgaaactttacaaatacatgtmaatcaaacacatgctcctgaacaatccacgggtcaatgaataaattaacagtgaaattaaaaaattccttgaggcaaatgaaaatgg

SEQ ID NO: 569265 - DNA, 607 bp, Homo sapiens
ccccgataatccctttctttatgatttctgtgtttcagtgcatgcaaaaaaraattattcctgttgaactaacaaactagtaagaaagtctgttttatcatcctataattcaaggagtcacacatcagagaaatgcagcacgatgccaccagctcagagaacataaaacatgtacccaaatacattgggggaatcagagtctgagcccagcaaatttgaatgaattgcaatatgggccactatgagacattttgaagaaactcagtgtctgataccagcccagaaccatcttattcagatgtgtgatgcatctctctttgacttaattcctgccactggcatgtatgcaattccataaatagattcttacaggggatcccttggttgggccatgcttctttccaggacaataatgacaagaacagtaagggatacctaagatgaaatttctgaaatgacttattattagtttatatatcctgagcagatcatttaatcaaaagtctcaaaattctctgccatgagtcagattaaattctctgccaggagtcagattcaaagtcaaaaattaaattgatttccagaaatatagtttcaagatggcata

SEQ ID NO: 569266 - DNA, 515 bp, Homo sapiens
ccaaagtgatttacaaattcagtgtaatttctaacaaaataccagtgacattttttgctacaatagagaaagcaactctaaaatttgtatggaaccacaaaagaccctaaatggcaaaatagattttgagaaaaaacaaacaaacaaacaaacaaacaaacaaaaaacaaagcctgtggcatcacactatctgaattcgtaaaacactacaaaacagtagcaaccaaaaatgattcttgtgtaaaaacagacacatagaccaatggaacagagtagtgaacacagacttacagccaactgatcrtcaacaaaggtgccaagaacacatattgagggaaaatacagcctcttgaataatgatgctgagaatattgaatatacaggagaataaagccagacctcatctctcaccatatacaaaaatcaagtcaaaaattcatcaaagacttaaacgtacaacctgaaactactagaagaaaacattgaagaaacagagcattggtctaggcaaaaat

SEQ ID NO: 569267 - DNA, 468 bp, Homo sapiens
agtagtttcagaattgctaacttgtacccctttgagaaacaaatttacccactagacagtagtgattttaytcccttattctagtttttgactttttaaatccaagcaaacttgatttaacaaagttactttaagccagtttcttttctcttagtctccagttgaggttatatcatgtgtttgtaatacagttagatttgtttgttgcagtctgcattccatcctgggatcactataacttctatcaattagaaaaaatgcatacttgaaggttcactttgtataaatctacaggagatacatggctatgcatataatatgtaatttaaaagtaaatttgaatcaagtggattttaaaaagcaaaacatacaacttactataaaaaagtacaaaattaacctaactatagatgaaataaaaacaaagttatacatgcacccacaagcagaaatgaattaatttatgga

SEQ ID NO: 569268 - DNA, 548 bp, Homo sapiens
aaaagttagattaataaagttagattaatagagcaatgtatataaacatggaaaacatagagaagaagaaactatagcagataatwattccattcgcttaatacttattaattgagatttactgtgtgcaggcagtactccaggcacttggaatacatcaattaaaaaaaaagatctctacctccttggggcatatttggaagacaggcaataaataattcacctttacaaaaactaaattatatagtgcattagaaaaggcagtaatggaaatgaaaaagtaaataagcaaagagaatcagttgagctatcataatcgtagaggtcagagtagacaatatcgaaaaaatgaaatgtgtcacagttggggaatatagccataggaattaatggtagaagagtattattctagacagaaggaacaactacaacaaagactctatgttatgtgtgttcctactgtgtttcagtagcaacaagcaggcaaatgtagcagagcagagtgaatagggaaaaatgttagaaaaggatatcagaagagtaagatc

SEQ ID NO: 569269 - DNA, 574 bp, Homo sapiens
tcattgccttgacctgtggatgtagtggtcctgctctcagtttcctgcatatagaatcctagaagtctgatagcttttcttaattttattctgtctaccctcttcaatctaagatggcagtgtttttgctgatacaatgttctcaaaactcttgtcagtcttctgtggaagtcaaggagatccatgacatgacaaaagaaggttttccacagatccttcttgaataacccatcgctattattggcttctgcctagataattcactggactcataaatcacacattcaatctactcagcaaaagtattttccaactatactygtggccctgtttacaagcacacctttaggataggctgataattttctaaatcaactagtgctgcttcctttgtgcttagcagttccttcaccaatttatcttttttttttcttttttttacattttaccataagtggcaaggaaacccggatcacaccttttgcattttgcttagaaatcttctcgctaaatattcaagtttgtcacttacaacttctactttccatctaataacagaatataatccagcctg

SEQ ID NO: 569270 - DNA, 536 bp, Homo sapiens
ctgaaacctgcacatttaaaatctgtcaaatatctgtctagagtcaacaccccttttatttgatgctactaaatctaacatggtattagaaaataggcagaaaaataagagagaaaaaattcccagtcaggtgtcatatagaattttgaaatttgtgagataggatgataacagtgtgttgtgtgtagagtactcttgggttgagtaattgagggaattagcagacaccatggaaaagaggagataaccaaatacacatttcacctatttaatgaagtgttgcaatgtcaattctggttgttgttatgaggactgtcattattcaaatttctaccagtgttttccaagcctcaagatagatgatgatatatgtgaaatcattataatatcctgtgttaaagaaaggtatttcaggrtgccacaaacatagctttaaaatatacgactttctttctttctctttcagttggatttatattttcacctattttcctacacttctgtgtaggaaaacccaaaggaaatacacttatttt

SEQ ID NO: 569271 - DNA, 540 bp, Homo sapiens
taaattaacattacaaatagggatgaacatatttgattaccacatgttaactcccatggtgttctttattttcttcctataaaatgcacttaaatggtacaagaacacatttttcttttcaccataaaattttaaaaaatatcaagtgcctcctttggaaataagtatggcatataattatcaatgaaagccaaaatcrtataattttataattttcacttattttattctacatgtatttattggatatttaatctgtaaatttacaaattgtttctaagtaagatttttaacatacagtattatcctaacttatagaaagctgtaggaggtagttttcataaatgcttaatcagacataatttgttatgtattagattgctatatgatataatctgtgctaagtattacttttactagacttaaaaacatagatttttttctgggtatacagaaatgtgagttgttttatttaagtttcctcatggcagtaagatttatatctattccctgaagctaacatgaataagatctatagat

SEQ ID NO: 569272 - DNA, 574 bp, Homo sapiens
ctttggtaacatgaaatcgaccaggtgagtattagtatttcttacggcccaaccatatgggttattgatttgttctactctatccccatttcctgggtgagctcatgtactctaattattcaaagtggatgactcacactaattaattgcaaaaattattattagactacagtaatcaaaacaatacagaattagcatgatgtgacagacaagtcaattgaacaaaatactgaatctagaaacagatacggtcaattgaatttcaacaaagggatgaaggcaatgaaatggagaaataatgaccttaggaaaaaatgagactttaatctttgaatagtcatgcaaaaacaatttgagacttaaatgtaaaatatraaactatagagaatgttgaataatatatacatgatcttgggttaggcagaaaaattttcagtcaaaaaagcacacataataaaataaatttaatttataagttgtacttttatcaaaattaaaaatatctgctgttcaaaggacattttaaataaatcaaaattatgtgccatgaattagatgaaaatatgggcaaaaa

SEQ ID NO: 569273 - DNA, 540 bp, Homo sapiens
aatttctgttatgggaactctgaatcctcactaacagatacaatgacaggttggatattgggataattaatgctgagcatattgatagtgctgtaaatcttaggatattaaaccttgataacaggccaggcgcagtggctcacgcttgtaatcctagcactttgggaggctgaggtgggtggatcacttgaggtcaggagttcgagactaacttgtccaacatggtgaaacaccatctgtactaaaaatacaaaaattagccaggcatcatggcgcatgcttgtaatcccagctactcgggaggctgaggcaggagaatcgcttgaacccgggaggcagaggttgcagtgagccaagactgtkccactgcactctagcctgggcaacagagggagactctgtttaaaaagaaaaaaaaaaaagaataacaaatcatgtggataaaaacaaagaaacaaaacagcagaaatctctcttctctctcggtgactctgttgttattggagagaaaatggaaagtactgtagaattggagcctac

SEQ ID NO: 569274 - DNA, 552 bp, Homo sapiens
aataattttttttaaaggtacaggaaagttactgaaacaacaaggaaatgctggactgagatcagaagaaaaaagaagtgcagataaataagctcattgttttgtctaaatttaccacttyccttattgcaaaaattaactaaagctttgcttgagagcctaaaaaactgaacagagctaccttcctcccgtcccccttaatcctagcgcacccattctccaaggtctgaaaagcgtgctgctcagcgcctcagccattgccccagcatctagaaaccactttgagcaaaaaagcaggtccccaaagtaggcactgtccttcttttaacttggtaatttctgactattttgctagctctttaatgcaaatgcagatgacttttgtatttgtccagaacttctgcttttttttttttttttttttttttttttttttttgagacagggtcttgctttgtcacccaggctgtagtgcagtgctgtgatcatagttcactgtaacctaaaaatcctgggctcaagggatcctccaacctcatcttgattagctag

SEQ ID NO: 569275 - DNA, 552 bp, Homo sapiens
aataattttttttaaaggtacaggaaagttactgaaacaacaaggaaatgctggactgagatcagaagaaaaaagaagtgcagataaataagctcattgttttgtctaaatttaccactttccttattgcaaaaattaactaaagctttgcttgagagcctaaaaaactgaacagagctaccttcctcccgtcccccttaatcctagygcacccattctccaaggtctgaaaagcgtgctgctcagcgcctcagccattgccccagcatctagaaaccactttgagcaaaaaagcaggtccccaaagtaggcactgtccttcttttaacttggtaatttctgactattttgctagctctttaatgcaaatgcagatgacttttgtatttgtccagaacttctgcttttttttttttttttttttttttttttttttttgagacagggtcttgctttgtcacccaggctgtagtgcagtgctgtgatcatagttcactgtaacctaaaaatcctgggctcaagggatcctccaacctcatcttgattagctag

SEQ ID NO: 569276 - DNA, 552 bp, Homo sapiens
taaataagctcattgttttgtctaaatttaccactttccttattgcaaaaattaactaaagctttgcttgagagcctaaaaaactgaacagagctaccttcctcccgtcccccttaatcctagcgcacccattctccaaggtctgaaaagcgtgctgctcagcgcctcagccattgccccagcatctagaaaccactttgagcaaaaaagcaggtccccaaagtaggcactgtccttcttttaacttggtaatttctgactattttgctagctctttaatgcaaatgcagatgacttttgtatttgtccagaacttctgcttttttttttttttttttttttttttttttttttgagacagggtcttgctttgtcacccaggctgtagtgcagtgctgtgatcatagttcactgkaacctaaaaatcctgggctcaagggatcctccaacctcatcttgattagctaggacctcaggcaccatgcctgaccaattttcaaaattttttgtagagatgggatctcaatatgttgctctagctggtcttcaact

SEQ ID NO: 569277 - DNA, 458 bp, Homo sapiens
acttttgtatttgtccagaacttctgcttttttttttttttttttttttttttttttttttgagacagggtcttgctttgtcacccaggctgtagtgcagtgctgtgatcatagttcactgtaacctaaaaatcctgggctcaagggatcctccaacctcatcttgattagctaggacctcaggcaccatgcctgaccaattttcaaaattttttgtagagatgggatctcaatatgttgctctagctggtcttcaactgccgggctcaarcaatcctcctgccttggcctgcagagaccctctcaccttggcctcccaaagcgatgggattacaggcatgagccaccatgctttgcctactgcttgtttttaataggggagtaagtctgggctatttagttcagttaatagaggtctcaaaaatggacttttctctctcgacttatttgctgaagta

SEQ ID NO: 569278 - DNA, 552 bp, Homo sapiens
ttaaaatgtcactatttcttacgatgagatggagatcttgttggattgtagaactctgtagtatatatcatcatcaaacagtatgtagatgaaggtatgatttcaagcaggaattttagaccagaaatatcttttctsagtaacaaggattactttacagatttgttgtatgttagtaataacagacatataagcctatttcatgctatatgtacataatttgtgagattgaaattggcatttgtgtttaaatgtggataaatcacaaacatcaaaatttagaaaagaccttaaaagtattgtgttctagcttttctcattattaaattacaagcccattggcatttggggagcccagtggataattacactgtgttttccctgatcacggataagctggattaaaaatacaggtatgggattcaggtaaatggagattattactaggtttttttttttgtttttttttttcttttgagacaaaatttcacggttattgcccaggctggagtccagtggcacaatctcagctcactgcaaccttcacctcct

SEQ ID NO: 569279 - DNA, 552 bp, Homo sapiens
ttaaaatgtcactatttcttacgatgagatggagatcttgttggattgtagaactctgtagtatatatcatcatcaaacagtatgtagatgaaggtatgatttcaagcaggaattttagaccagaaatatcttttctcagtaacaaggattactttacagatttgttgtatgttagtaataacagacatataagcctatttcatgctatatgtacataatttgtgagattgaaattggcatttgtgtttaaatgtggataaatcacaaacatcaaaatttagaaaagaccttaaaagtattgtgttctagcttttctcattattaaattacaagcccattggcatttggggagcccagtggataattacactgtgttttccctgatcacggataagctggattaaaaatacaggtatgggattcaggtaaatggagattattactaggtttttttttttktttttttttttcttttgagacaaaatttcacggttattgcccaggctggagtccagtggcacaatctcagctcactgcaaccttcacctcct

SEQ ID NO: 569280 - DNA, 615 bp, Homo sapiens
tagtgcattgttattaaactctaacgtggctcagcaaaaatatttattgaaatttcagaaaaatacatttaaaatatcttgtaaagaagtgatcctgggagaaaattataagcaaattgcatcataataatttaatgtgttgggttttgaaggggaatatttattataggtgaacagagaatttattattttttcacagttgagttatatttttaagaaatgtaattactccatacacaagaattcagaatacaacaacagaggaaaaaaaaaaaaaaagaaaaacgaacttatcctacactataacaagcttaccgaggctttaaatgaatatatatttataaaattgcctttgacaattcacacgatctgattatgtggcaggatgctctgacaaaggatttgattacatggtacattgagctgtggctagtaaataataaccttccctgttcatgattctacttgttattgtcaggaaagagacaaaatactgagaattagtttgtatcataaacaaatcaattactgatgcaagacctaaggtggcatgacayttatgttataccactgaattttatgaatggataataaacttttctaatgtgagtgtta

SEQ ID NO: 569281 - DNA, 566 bp, Homo sapiens
atgtgtactattcaataagcttggaatatgcatgcacccgtgataccctcactgcaaccaaggtaatcgacatatgcaacacctcccaagatttccttgtatacctttgggggttctttttgcttttgtttcgtgagaacacttaacacaagatccaaactcttagcaaataaagtgcaagataccatattgttgactgtaagctctacattgcacagcagagctctagaatttattcatctagcacagttgaaacttatgcccattgaacaacaactctctagtgcccctggcaaccattgttgtattctttgctaccaagagtttgaatggcttagaccgctgatataaatggaattatgcaatgtttgtcattcttatgttattgacagctaggattccaaacagcatgttctggagccaagtgatctggaatctrcttcctaattcccagactgaagcatgtgtgtttctgaagacaaaatttatgaaagttgattttatctacagaatgtggacaaaatggtgcagtcatgtatctggcaattggaacaagtacctagtag

SEQ ID NO: 569282 - DNA, 558 bp, Homo sapiens
ttgctactctctaaaataccactgtatattaagggaaagagataaagacataaattaatatacaattcaataatgcaatagcaaaaaaagtatgagattataaaacagtgtttattggcatattgggcacacatatctacagaatagagacrtgtagacagccaggcaaatcctgggataacaagaagagggatccagcaaggcttctggctatgtgacacattgtgctattgtcctgcaacaataaaccattttgtattgctagatcataaaacactaagggttgagaagctgagtagaagcttaccagtcagaccaattacattgtgaatgactttgtgtgctttgataggcatcttggacacagctaatagaaaagtagtaaacattggcatgatttaaaccagaagacaacatgaccatatgttaactcaaataatgatgttttttcaacatttttagggaagataggtcaaggatatgagatctcaactaaataattatagaaatagtgtaggcaagaaaaagtcagagatgttgtgaaggtaatttcaaaat

SEQ ID NO: 569283 - DNA, 586 bp, Homo sapiens
ttagcagaaaattatatgaagttgctactctctaaaataccactgtatattaagggaaagagataaagacataaattaatatacaattcaataatgcaatagcaaaaaaagtatgagattataaaacagtgtttattggcatattgggcacacatatctacagaatagagacgtgtagmcagccaggcaaatcctgggataacaagaagagggatccagcaaggcttctggctatgtgacacattgtgctattgtcctgcaacaataaaccattttgtattgctagatcataaaacactaagggttgagaagctgagtagaagcttaccagtcagaccaattacattgtgaatgactttgtgtgctttgataggcatcttggacacagctaatagaaaagtagtaaacattggcatgatttaaaccagaagacaacatgaccatatgttaactcaaataatgatgttttttcaacatttttagggaagataggtcaaggatatgagatctcaactaaataattatagaaatagtgtaggcaagaaaaagtcagagatgttgtgaaggtaatttcaaaatatatgtt

SEQ ID NO: 569284 - DNA, 613 bp, Homo sapiens
tgaatgactttgtgtgctttgataggcatcttggacacagctaatagaaaagtagtwaacattggcatgatttaaaccagaagacaacatgaccatatgttaactcaaataatgatgttttttcaacatttttagggaagataggtcaaggatatgagatctcaactaaataattatagaaatagtgtaggcaagaaaaagtcagagatgttgtgaaggtaatttcaaaatatatgttggcttttacaggtgtttaaaaattaatattgtggctaaaatgattataaagctctggcctgaacaaatagaaacatgttgacagcatagattaggattaaaatcaaaggacagaaaatataggtgtgcagcagattgggattaaaacatggaaattatagtaaattttgtgttggtccaaattcaagttccaatgggtattcatgttatgtcagtagatacactatgaattcaacagagctggaagctagagacattgttatgtgttaggacacattcatccctggacagtgttttagataggcactaccagtgattacctctagaaatacttcttatgtaattactttagttattcatgtcatctgattaatgt

SEQ ID NO: 569285 - DNA, 613 bp, Homo sapiens
tgaatgactttgtgtgctttgataggcatcttggacacagctaatagaaaagtagtaaacattggcatgatttaaaccagaagacaacatgaccatatgttaactcaaataatgatgttttttcaacatttttagggaagataggtcaaggatatgagatctcaactaaataattatagaaatagtgtaggcaagaaaaagtcagagatgttgtgaaggtaatttcaaaatatatgttggcttttacaggtgtttaaaaattaatattgtggctaaaatgattataaagctctggcctgaacaaatagaaacatgttgacagcatagattaggattaaaatcaaaggacagaaaatataggtgtgcagcagaytgggattaaaacatggaaattatagtaaattttgtgttggtccaaattcaagttccaatgggtattcatgttatgtcagtagatacactatgaattcaacagagctggaagctagagacattgttatgtgttaggacacattcatccctggacagtgttttagataggcactaccagtgattacctctagaaatacttcttatgtaattactttagttattcatgtcatctgattaatgt

SEQ ID NO: 569286 - DNA, 627 bp, Homo sapiens
gtaggatgaaaaagtatttctataaaagatgtttattgcatcactatatgtaatatgaaaattagtagctacataaagattcatcaaaagaaaatgatttaaaaagtgtaaacatttatataatagaatattacacaatttaaaaagataaggttaagaagaatagttagaaatacataatgcttctgacatgaataatatgacaataaaaataagtatcatagaaaatcaatgttaaaataaaataactttggaayttttggctaataaagttataggtaatttttacttccaaatattttcaaaataaaaatacagtcatgtcataaaaacaaagtggaattctggaaattgttcttgaatccattaactattgtgcgagactcctatttctttaattttattttattataattaaaaacaaacaagcaaaaactaatactagcaaaacttacttgctccaccctttacttgataatgtcaatgccgaatcaaaatacatacccaaaaagctttgtttttttttcatagcttactgtagcctgaaattcttgggctcaagggatcctcctgcttcagcctctcaagtagctgggactacaggtgtgcaccaccacattcataaaa

SEQ ID NO: 569287 - DNA, 561 bp, Homo sapiens
actcacaatttgacaggaatatttgggtgatgtaaaaacacagtaatgtctcagaagcactgccttacaatattgaggacattcactcaaaagcctagccagacaaaagatggttcttggttacatgggtattgtcatgacattgcaagaaatctggcttccctggttgctcactagagggccataccccattatcctaacaatcaaaaacaccctcagaacacctcaccagaggccagatatcccactgtccttataaacaaaaacacgcctctagggtgttgcacttcctttttgagaaccatattgagtctgtgtgcagagatttctcacaatcctaatttctgttcatgcattacccaatactttatttttctttacaggackctataatactacatatcccttaataccatttagaacagaatgttagttataaaatataaaagaaatgaaacgaaaatctcaaaaaaatatttgggccaggcatagtggctcacgcccgtaatcccagcacgttgggaggccaggacaagtggatcacctgaggtcaggagtttg

SEQ ID NO: 569288 - DNA, 561 bp, Homo sapiens
actcacaatttgacaggaatatttgggtgatgtaaaaacacagtaatgtctcagaagcactgccttacaatattgaggacattcactcaaaagcctagccagacaaaagatggttcttggttacatgggtattgtcatgacattgcaagaaatctggcttccctggttgctcactagagggccataccccattatcctaacaatcaaaaacaccctcagaacacctcaccagaggccagatatcccactgtccttataaacaaaaacacgcctctagggtgttgcacttcctttttgagaaccatattgagtctgtgtgcagagatttctcacaatcctaatttctgttcatgcattacccaatactttatttttctttacaggactctataatactacatatcccttaataccatttagaacagaatgttagttataaaatataaaagaaatgaaaygaaaatctcaaaaaaatatttgggccaggcatagtggctcacgcccgtaatcccagcacgttgggaggccaggacaagtggatcacctgaggtcaggagtttg

SEQ ID NO: 569289 - DNA, 606 bp, Homo sapiens
ttgtttgttcatttgtttttttaactgagtctcactctgtcgcccaggctggagtgcagtggtgtgatctcggctcactgcaacctccaccttctggttcaagtgattctcttgcctcagcctcccgagtagctgagattayaggcaaatgccaccgcgcctgactaatttttgtatttttagtagagacagggtttcaccatgttggccaggctggtctcaaacacatgacttcaagtgatatgcccacctgagcctcccaaagtgctgggattacaggtgtgagccaccacatctggccttctctctgccttgttttgaatgacatttatgtaagaagtcatgtgtatgtgtgagtatgtaccacttaaaacttaaaacattaagacaaaatatctggacactttgaaataaggtacactgagttttacatacaaaaaaatgtgaggaacacatgacaatataaagcctaagatcggttaattggaaaatgttaagaatcaagaatcaacgagaacagtatccttttctagagagaaaactgctaatgtgattgttctaatatggtccatgtttccttggtaggatctgttatcatttaataag

SEQ ID NO: 569290 - DNA, 590 bp, Homo sapiens
gatcggttaattggaaaatgttaagaatcaagaatcaacgagaacagtatccttttctagagagaaaactgctaatgtgattgttctaatatggtccatgtttccttggtaggawctgttatcatttaataagaaactgagcatactggtactgagaaattacagatgaaccctgatgaggcagggtttgttattgttgttgtttttcctctttccctgctgtgtcactgaattaattttgtaaactcagtaggtcattgcttcttgcttaaatgcctaataggaatcatggaaccacttacacatgaatgtctcggggagtgtataacttaagccaaagaaaatcacacattttatagtataatttctattaaatcaagtaaactcctgtgatcccctccactgagcatacattaatacacataagttgctaattcattatattccttacaaaaataaaatgattgttattatgaaaatgttacttacaaatattattaattatatggaacatgtaatttattagtttggctaccatttgaaaatatcattatggagaaaaagaaactctggtaattacacagaaagat

SEQ ID NO: 569291 - DNA, 590 bp, Homo sapiens
gatcggttaattggaaaatgttaagaatcaagaatcaacgagaacagtatccttttctagagagaaaactgctaatgtgattgttctaatatggtccatgtttccttggtaggatctgttatcatttaataagaaactgagcatactggtactgagaaattacagatgaaccctgatgaggcagggtttgttattgttgttgtttttcctctttccctgctgtgtcactgaattaatttygtaaactcagtaggtcattgcttcttgcttaaatgcctaataggaatcatggaaccacttacacatgaatgtctcggggagtgtataacttaagccaaagaaaatcacacattttatagtataatttctattaaatcaagtaaactcctgtgatcccctccactgagcatacattaatacacataagttgctaattcattatattccttacaaaaataaaatgattgttattatgaaaatgttacttacaaatattattaattatatggaacatgtaatttattagtttggctaccatttgaaaatatcattatggagaaaaagaaactctggtaattacacagaaagat

SEQ ID NO: 569292 - DNA, 590 bp, Homo sapiens
gatcggttaattggaaaatgttaagaatcaagaatcaacgagaacagtatccttttctagagagaaaactgctaatgtgattgttctaatatggtccatgtttccttggtaggatctgttatcatttaataagaaactgagcatactggtactgagaaattacagatgaaccctgatgaggcagggtttgttattgttgttgtttttcctctttccctgctgtgtcactgaattaattttgtaaactcagtaggtcattgcttcttgcttaaatgcctaataggaatcatggaaccacttacacatgaatgtctcggggagtgtataacttaagccaaagaaaatcacacattttatagtataatttctattaaatcaagtaaactcctgtgatcccctccactgagcatacattaatacacataagttgctaattcattatattccttacaaaaataaaatgattgttattatgaaaatgttacttacaaatattattaattatatggaacatgtaatttattagtttggytaccatttgaaaatatcattatggagaaaaagaaactctggtaattacacagaaagat

SEQ ID NO: 569293 - DNA, 590 bp, Homo sapiens
gatcggttaattggaaaatgttaagaatcaagaatcaacgagaacagtatccttttctagagagaaaactgctaatgtgattgttctaatatggtccatgtttccttggtaggatctgttatcatttaataagaaactgagcatactggtactgagaaattacagatgaaccctgatgaggcagggtttgttattgttgttgtttttcctctttccctgctgtgtcactgaattaattttgtaaactcagtaggtcattgcttcttgcttaaatgcctaataggaatcatggaaccacttacacatgaatgtctcggggagtgtataacttaagccaaagaaaatcacacattttatagtataatttctattaaatcaagtaaactcctgtgatcccctccactgagcatacattaatacacataagttgctaattcattatattccttacaaaaataaaatgattgttattatgaaaatgttacttacaaatattattaattatatggaacatgtaatttattagtttggctaccrtttgaaaatatcattatggagaaaaagaaactctggtaattacacagaaagat

SEQ ID NO: 569294 - DNA, 572 bp, Homo sapiens
ttcagcttccccgtgcaatccaatacttaatttctataacgttactcattttatccactagattcaatgagggtgctctgtgcttcccgccacctgatattaattgtgtaagctggtattctattggccagatctgacaaatgtgagaaaatcaataaattacaattttggcacatattttcacatgttaatattctcgatctagaaacaaaaagagaaaagaaaatagtaaagtggagargaaaacaggctcttcttcatatatgatgcctgttatgtctcctgctgaaagagaacaacgacaagaaagaaaacatggtttccaaattagctgagaaatattttttgtcatagtgatattctttgtcttaattgtaaaacttcttgtttgaagaaaaaacatattaaggaatgtagtgtgacaaaacccatttcacaattaataatcttaaaatgtcaatgatataaacccaaaataaacttttgccgaaagtttagatgtttcaaaggcccaggagtaaaattaaacactgctgtgcgtgccaataattcattttctgaaatttaagaca

SEQ ID NO: 569295 - DNA, 572 bp, Homo sapiens
ttcagcttccccgtgcaatccaatacttaatttctataacgttactcattttatccactagattcaatgagggtgctctgtgcttcccgccacctgatattaattgtgtaagctggtattctattggccagatctgacaaatgtgagaaaatcaataaattacaattttggcacatattttcacatgttaatattctcgatctagaaacaaaaagagaaaagaaaatagtaaagtggagaagaaaacaggctcttcttcatatatgatgcctgttatgtctcctgctgaaagagaacaacgrcaagaaagaaaacatggtttccaaattagctgagaaatattttttgtcatagtgatattctttgtcttaattgtaaaacttcttgtttgaagaaaaaacatattaaggaatgtagtgtgacaaaacccatttcacaattaataatcttaaaatgtcaatgatataaacccaaaataaacttttgccgaaagtttagatgtttcaaaggcccaggagtaaaattaaacactgctgtgcgtgccaataattcattttctgaaatttaagaca

SEQ ID NO: 569296 - DNA, 572 bp, Homo sapiens
ttcagcttccccgtgcaatccaatacttaatttctataacgttactcattttatccactagattcaatgagggtgctctgtgcttcccgccacctgatattaattgtgtaagctggtattctattggccagatctgacaaatgtgagaaaatcaataaattacaattttggcacatattttcacatgttaatattctcgatctagaaacaaaaagagaaaagaaaatagtaaagtggagaagaaaacaggctcttcttcatatatgatgcctgttatgtctcctgctgaaagagaacaacgacaagaaagaaaacatggtttccaaattagctgagaaatattttttgtcatagtgatattctttgtcttaattgtaaaacttcttgtttgaagaaaaaacatattaaggaatgtagtgtgacaaaacccatttcacaattaataatcttaaaatgtcaatgatataaacccaaaataaacttttgccraaagtttagatgtttcaaaggcccaggagtaaaattaaacactgctgtgcgtgccaataattcattttctgaaatttaagaca

SEQ ID NO: 569297 - DNA, 572 bp, Homo sapiens
ttcagcttccccgtgcaatccaatacttaatttctataacgttactcattttatccactagattcaatgagggtgctctgtgcttcccgccacctgatattaattgtgtaagctggtattctattggccagatctgacaaatgtgagaaaatcaataaattacaattttggcacatattttcacatgttaatattctcgatctagaaacaaaaagagaaaagaaaatagtaaagtggagaagaaaacaggctcttcttcatatatgatgcctgttatgtctcctgctgaaagagaacaacgacaagaaagaaaacatggtttccaaattagctgagaaatattttttgtcatagtgatattctttgtcttaattgtaaaacttcttgtttgaagaaaaaacatattaaggaatgtagtgtgacaaaacccatttcacaattaataatcttaaaatgtcaatgatataaacccaaaataaacttttgccgaaagtttagatgtttcaaaggcccaggagtaaaattaaacactgctgtgygtgccaataattcattttctgaaatttaagaca

SEQ ID NO: 569298 - DNA, 491 bp, Homo sapiens
tgctctaggaatgtttcattggaagtggcttagtattccaaattagtattccaatgacagatccaytgttaggtaatcaagaaaagttttaagcgactttccaatcactatagttcacaggaaatacagaaaatattaattccacaagggaaaaaaatgcagccactagcaacaatttcaacaaaaaacaagcgagcgagagagagagagacagttgtaccgtcctacagatttcctcaggctaacagttgcatattcagaattgaatactaaacaagtacttatgtaggatctgagaacattttgtgattcaaaataaaatattcaaagaaagaaacagacatcctagcttagacagagtggagaaagaatatcatacaacaaacataagggtacccagaaactggaaggaaaacctaaaagagaccctatttgctttgtttgtagaaaaaccacatactggcattggaatcctatgtatatatttccta

SEQ ID NO: 569299 - DNA, 397 bp, Homo sapiens
aaatttacaaagaagaataagggaataaataacttgtacatttacaaagtcaaacaatttaaatgtattctgagggacaacagcaatttcagtcgaggctaaatattgtatctttccgtacataatgaataagcaaacaatcaaaagtgaatggaaaagtatatgaagacaccaataatgatatcatatcaaacgctttgaacatagttaaaaatcattaactacttaataattaagtaactaaaatattactttttaggatttatcaaaattagaacctgaagatttatttaatttatatgtatttttataaagagagaggaattcattttattgctttctcacttyagccacatcatacatctgtcctctaaagtatcacttatttttgttaacc

SEQ ID NO: 569300 - DNA, 553 bp, Homo sapiens
gtcatccccaactcatgcctagctctgtcatctggaaggaatgagtgagaaagggcaaagrcattttattaaatccaacacagacccgatgtaccgcccattttggttcatgtggactattccaggaggacctagtgagcaacataaccaatctagaagcatgtcagtctaacaaaagaatccagttggatgaactagaattaagttttgagtccccattttggctgagatactactcagagggtagataaaccaggccaaagtgaggctgccaaactaagatccttttctgttgacagctgcacttcatggccaatcttctttctaggtttattgaccaggaggaagtgaagggagtagagtgagaattatttttgagttgattatttaggagcccattccaaagctcaaaaacaacagataatcgtggatggtagggagtgtggaagttccactggatatactttaactatcagcccattaattattggggtttttttggtaataaaagaagcactaatatcagactgcaaaagtctgaaaattaaagtac

SEQ ID NO: 569301 - DNA, 549 bp, Homo sapiens
taaagtattttttactctaacctatagccacataatgaattcatttaatatatttaaaattaaatgaatgatgattccagaaggcctatctgtttgtgctactttcctgcttaaaaccaatcgcttaaaaaaagtcaatcgctcctgacttcctacccaaaccctcattatataatagtgactctccctggcctagctcttctctatctcctacccctttctatcatagcatctcacctttattctaactctcctgccttactgaaatactttgtgcattatcgcaattatacatgaatttctcttggtctaaattgctgttctcttggtttctcttgagctcaccaaggtaatggttgtgttaagaatacaaaacagaaagaaggccaagaaggtgatcgcatactgaagtattacctaaaaggctttcccaaagattactacattcaatagattatataattgtttgattttgctatttactgtaagagctctgactcagtgaagttaaaargtaacttgcaaatttgtatccaatgatgatacaaa

SEQ ID NO: 569302 - DNA, 544 bp, Homo sapiens
atgagtgttagtgccatgtaagagaaaaaatgatgagaaactatttcagattaaaggagagaaaagagacataacaactaaacataacacgtggttctggattggagcctagattttgttttaattgaaacaactaggaaaaactgaatatagatttatattaaataaaatactgtggcaaggttaaatttgcagattttgatacttactttstgatgtaagagaatatccttcttcttagaaaatacatgctaaagtatataggagtaaagaatcatgatgtctacaaccaacactcacatgattcacaaaaataatatagataatatatgtttgttttatcacagagacagaaggagagagaaagaaagacaatgtgataaaaatcaccaatttgtaaatctatctaaaggtcctatgagagttctttacttaatccatctaacttccttgtaactatgaaattattgttaaataaaaatagccgggtatggtggctcatgcctgtaaatacagcactttggagggccaaggcaggtggatc

SEQ ID NO: 569303 - DNA, 588 bp, Homo sapiens
gcatgtgactattaatgagtctataacacggaagaaattcttaaaatattttagattactagaatgactcatcttatggatgtaagtctatttctgctcagtcatctatttctgttcagtgctgattcagtgaacagagcaaccctggaaacaaaggcagaaaacgtatatgaatccaccaygattagttctctttaaactcagatccctgatgagttaatcacacctccgaatgaccaactttgtgccctagagactaatgctgaacaatttatatagcatcattcctaaatacacaatcatttctttggtggcaattaaatcatattggaccatttcttagagggaacaggtgatatttgaattacctcttaccatggatatgggcttgtctttcctgtccacagtgcaactgctagcattactaacagcacaaataatcatgaatttacatcatagctggtctattaaaatgatattccacacaatattcctgcaaaggattatgcacatttataaaaaatgaggagccataatgggtgtacagccatgggatacaccaatcttatcatacaacctattaatcag

SEQ ID NO: 569304 - DNA, 588 bp, Homo sapiens
gcatgtgactattaatgagtctataacacggaagaaattcttaaaatattttagattactagaatgactcatcttatggatgtaagtctatttctgctcagtcatctatttctgttcagtgctgattcagtgaacagagcaaccctggaaacaaaggcagaaaacgtatatgaatccaccacgattagttctctttaaactcagatccctgatgagttaatcacacctccgaatgaccaactttgtgccctagagactaatgctgaacaatttatatagcatcattcctaaatacacaatcatttctttggtggcaattaaatcatattggaccatttcttagagggaacaggtgatatttgaattacctcttaccatggatatgggcttgtytttcctgtccacagtgcaactgctagcattactaacagcacaaataatcatgaatttacatcatagctggtctattaaaatgatattccacacaatattcctgcaaaggattatgcacatttataaaaaatgaggagccataatgggtgtacagccatgggatacaccaatcttatcatacaacctattaatcag

SEQ ID NO: 569305 - DNA, 659 bp, Homo sapiens
ccatttcaaggatgcataattttcaactctttagaaaatctctagccaaaattcacaggaaatggaacaggtggattccttttgtaattaaagacattttgtatgtataaccagtctcctagaacagcggtccccaacctttttggcaccagggactggtttcatggaagaaaattttttcactgtaaagtgggggacaggcaggagggggtaccaggggaatggtttgatgatgaaactgttccacctcagatcaccaggagttagtagattctcataaggagtgtggcaacctagatcccttgcatgcgccattcacagtagggttcrcgctcctatgagaatctaatgctgctgctgatctgacaggaggcagaggtcaggcagtaatgcccactcccctgctgctcacctcctactgtacagcccagttcctaacaggccacaaacgggtactggtctttggcctgaggattggggacccctgtcctagaatagaaaattgtataattactttcctcatactagaggaaaagctagcaagcctattctttttttttttttttttttttttttgagagagtctcgctctgtcgcccaggctggagtgcagtggcgccatctaggctcactgaaagctctgccccccaggttcacgc

SEQ ID NO: 569306 - DNA, 549 bp, Homo sapiens
ccagcactgtgggaggccaaggtgggtggatcacttgaggtcaggaggttgagaccagcctggccaacatggtgaaaacccatctctactaaaaataaaaaaattagccaggcttggttgccagcacctgtagtcctagctactcgggaggctgaggcacgagaatcacttgaacctgggaggcagaggttgcagtgagccaagttcaagccactgcactccagcctgggcaaaatgagaygctagctgaaaaataaataaataaataaaaactccctggacaggttttatattttatttccccatggaaaatcagacagacttgcttcagcctcaaagagtgtgtttatgtaaaattcagtgagtgctggcagtgagctgcacttttttttctaaacaggaaaagtgtttaacacatgcatgtataggcctaaaatagctctgtagagatacccaagcaattgaaccaatgtccagttgcttctgagtaggggaacgtagtggctggaggtcaagagtgagtaggagaaagacttatgttttacaata

SEQ ID NO: 569307 - DNA, 440 bp, Homo sapiens
ttttagataacacaaataagtaagmacatgcaaagtttgtctttctgtgcctggcttatttcacttaacagcataatctctagttccatccatgttgttgcaaatgagtggatctcattctttttaatggctgaatagtagtataccattgtgtttatgtaccacattttctttatccattaatctattgatggacacttaggttgcttccaaatcttagctgttgtagacagtgctgctgcaacaaacataggagtgcagatatctctttgatatactaacttcctttgttttgagtatatacatacaacctaccaaaattgaaccaggaagaaaaccaaaagctgaatagatcaataacaagtactgagatctaagccataataaaaagtcttccagtaaagaaaagcccaggacctgatggctacactgctgaattc

SEQ ID NO: 569308 - DNA, 561 bp, Homo sapiens
cagaaataactttgcaataagacagaagagtttatattccaggatttgagaaaagattgaggatttttaaaattgtcttagcacatcaagaaccaattctgtgttcaggtcataggacatacctgagaagaagcctcctctgcttattactcagccatgaggctggcacactaaatggcaacatgaaagagcaaaggattggaatctcataccagagagaatgatgtgtgcatcttaagtggagggaacattgaaggcagggagtttttctccttatctaacaaagaactctgacagataatatcattacatcaaggaggctagtggtgttagtcatcttttaacataaactcatggtccagcattgttaagtcaaaaaagaaactgattttagcttgcccccattcctatataacgtggatgcatctaytttcttccagacgtgtgatgtggtttgtctgtgtctccatcccaatctcatgtagtaggagggatctagtgggaggtaattgaatcattgggggcaggttttttctgtgctgttctcatgatagtgaataa

SEQ ID NO: 569309 - DNA, 581 bp, Homo sapiens
ttagctactccacacaatattcaatattcccacaaaaatgtcccagtacaacaaaggtttgcracagatagcatcttggagtctcctgtaatgggatttgacaagagccaggcactctaggcaagttcaatcaatgttaattgaagcagaagtgattcaaaggcaaataggagtccttgagaggtgagagaggggctttgggattgtgactctctccttttcccattacccccttatatttaattacttgttctagcctgtgaattgtaatttgatttgccatcaggtgattcttgcctggtattaatatcatgttagttcagtctttcatttaaagaaaaagtatctcataacttttttttattatttatttatttttttgagacggaatctcattctgttgcccaggctggagtgcagtggcacgatctcggctgactgtaagctctgcctcccgggttcatcccattctcctgcctcagcctccagagtagctgggactacaggcgccactaccatgcccagctaatttttggtatttttagtagagacggggtttcactgtgttagccaggatggtc

SEQ ID NO: 569310 - DNA, 581 bp, Homo sapiens
ttagctactccacacaatattcaatattcccacaaaaatgtcccagtacaacaaaggtttgcgacagatagcatcttggagtctcctgtaatgggatttgacaagagccaggcactctaggcaagttcaatcaatgttaattgaagcagaagtgattcaaaggcaaataggagtccttgagaggtgagagaggggctttgggattgtgactctctccttttcccattacccccttatatttaattacttgttctagcctgtgaattgtaatttgatttgccatcaggtgattcttgcctggtattaatatcatgttagttcagtctttcatttaaagaaaaagtatctcataacttttttttattatttatttatttttttgagacggaatctcattctgttgcccaggctggagtgcagtggcacgatctcggctgactgyaagctctgcctcccgggttcatcccattctcctgcctcagcctccagagtagctgggactacaggcgccactaccatgcccagctaatttttggtatttttagtagagacggggtttcactgtgttagccaggatggtc

SEQ ID NO: 569311 - DNA, 467 bp, Homo sapiens
acttccaccttttggctttacaaataatgctgctataagcrtgggtgtacaatcagttctctgtcttttgtggacttaaaatttagtatcctttctgcatatatgcatttaaactttctcattcagcaccaaaggcctacttccaatttcaaaacccgtctgagtgacgtagcttctgcccccgtttatcaggaatgctggttacaggtaagcaggttatatcctacataaagaaacctgggcaaggtggtgcatgggggtaatatcaagcttgaactccaaattgaactcaccaattcctgaaaccatgagagtgaatttgttcagggagtaggtctatttttgattcatgcaaaggcacggtttggctgccttgccactcattcacttaacatctttttatggcttttagtttctgcttcacttttggcatctagagatttacctttcttgtttttgaattcatc

SEQ ID NO: 569312 - DNA, 467 bp, Homo sapiens
acttccaccttttggctttacaaataatgctgctataagcatgggtgtacaatcagttctctgtcttttgtggacttaaaatttagtatcctttctgcatatatgcatttaaactttctcattcagcaccaaaggcctacttccaatttcaaaacccgtctgagtgacgtagcttctgcccccgtttatcaggaatgctggttacaggtaagcaggttatatcctacataaagaaacctgggcaaggtggtgcatgggggtaatatcaagcttgaactscaaattgaactcaccaattcctgaaaccatgagagtgaatttgttcagggagtaggtctatttttgattcatgcaaaggcacggtttggctgccttgccactcattcacttaacatctttttatggcttttagtttctgcttcacttttggcatctagagatttacctttcttgtttttgaattcatc

SEQ ID NO: 569313 - DNA, 549 bp, Homo sapiens
atgtcccattcttaagcaccttttaaaaaaagaattgtaatcccagcactttgggaggccaaggcaggcggaccacgagttcaagagataagaccatcctggtcaacatggtgaaacctctgtctctactaaaaatacaaaaattagctgggcatggtggtatgcatctgtagtcccagctacttgggaggctgaggcaggagaatcacttgaacccgggaggcagaggttgcagtgagccgagatcacaycactgcactccagcttggcaacagagtgagactctatcaaaaaaagaaaaaaaaaaaaaaaaagaagtgtaatgccaagatttgctcaaagcattcctgaattccatggggacctagagtccattgaccctgacaccttccactacccctcatggccattgtgtcctgaatgcccctccttagccagcttccatttgcagtccttgcatacaccaacttatttgcctctctctcctttcagagtacagtatgtgcctggcaatatcctaggtatggttaaaaccaactctctgcctag

SEQ ID NO: 569314 - DNA, 580 bp, Homo sapiens
agccatgtgaatgaaaaagccgtttggaatgtccggcccattcaattattcagataaccctggcccgatttgccatatgacygcaactgtttaaagaccccagggaacctacaagatcatacatttttttcttaaagtttttttttttttttttttaattttagagacagggtctcactctgtcacgcaggctggagtgcagtggcacagtcatagctcactgtaaactcaaagtcctgggctcaagcaatcttcctgcctcagccttctgactagctgagactataggtgcatgccaccacaccaagctaatattttttaaccaataggatttagggtgttttgttgtgtggcaatggatatctgaaacagaaatcaatatgttacaccccttcccacaaatataatgacactccgtatcctccttaacttgctgtatttttctcttgttgcatttaccacctggcttactgtgtatctacctatttgttattgtctccctatccccgctggaacacaaactctgggaaggcagagactttgtcttattcattactgtatctgagcgcctggaatagtg

SEQ ID NO: 569315 - DNA, 580 bp, Homo sapiens
agccatgtgaatgaaaaagccgtttggaatgtccggcccattcaattattcagataaccctggcccgatttgccatatgaccgcaactgtttaaagaccccagggaacctacaagatcatacatttttttcttaaagtttttttttttttttttttaattttagagacagggtctcactctgtcacgcaggctggagtgcagtggcacagtcatagctcactgtaaactcaaagtcctgggctcaagcaatcttcctgcctcagccttctgactagctgagactataggtgcatgccaccacaccaagctaatattttttaaccaataggatttagggtgttttgttgtgtggcaatggatatctgaaacagaaatcaatatgttacaccccttcccacaaatataatgacactccrtatcctccttaacttgctgtatttttctcttgttgcatttaccacctggcttactgtgtatctacctatttgttattgtctccctatccccgctggaacacaaactctgggaaggcagagactttgtcttattcattactgtatctgagcgcctggaatagtg

SEQ ID NO: 569316 - DNA, 654 bp, Homo sapiens
ggctctttgtaaccagcagacctcccataactaatggagtgataactcactcattactgccagaaaggcaagaaggcattcatgagggatctgtacctacaacgcaaagtcctcccactccttctattgtgggctacctaaaaatggaacatattaacttccaagatatttgggtgcacagatattaaaaataaaataagctgccacacactaatggaagatataaatgtcttccattaatatcttaggttacaatattctttatttgtggttaaggttaaatattctcagtcttcttgttaagaggaccgaagtttagcataataattagcacrtagactctaagaccagattgggttgttacttaccagctttggacaatttgcataaatgttcttagcttcagtatcctttcagtaaacaataatgttaataatagctcctatttcataagtttgttgtgaggataaaagtgttatgaagacatgacatcaatttctgatacatgctaagcacattaaggccttaataagtataaattattttttatctgtgcaagaatatatgattaagagacctatgatcttttattttttcactgagttctcaaatttgtgtttccatttttcttggacaataaaggatttattttac

SEQ ID NO: 569317 - DNA, 569 bp, Homo sapiens
ctgcaaagaatacaaaaattagcagggtgtggttgtatgttcctgtagtcccaggtacccaggaggctcgggtaggaggattgcttgagcccaggaggttgaggctgcggtgagctgtggttgtgccactgcactcaagcatgggtgacagagtgtgaccctgtctcaaaaacacaaaaaaaaaaaagaaagaaagaaaaaaaagaaaagaaaagaaaaagcaaagaaagattgggaggccaaggcaggcagatcacttgaggtcaggagttcaagaacagcctggccaacatggtgaaactccatctctacgaaaaatacaaaaattagcctggtgtgggggtgggcgcctgtaatcccagataaaataatcccagtaagatgtccatcctctgttgcmtgagccatgcgtgagttgagggttgcattcagaggcacagcaaaatttaaaccttcatctggctgtaaattttgacctgaccagactttctgggatctcctttgtactttcttacctcagcggtaagccaggggtgtggggtaggttagtataacagtgtttctattat

SEQ ID NO: 569318 - DNA, 500 bp, Homo sapiens
agctttactggaaggtttactctaaccagcttctgctgctgaaaagtaaatatattcttgcaattgaaatttttttttcagattctggggctcaaattaatttcttctctatcatctggatacrtctgtgatttttagtgccttactttgatcacacaagcatacctcaatctctaggtcttcataaaatgccattctggtatttccacagtattttcaatagttctttaactaaaacaactacatggaaagatttaaaatgtactgattgctaaagaaaaatgattttctattttgaaaccattaaatcaactacttttacatttgtttgacaaaattagctgttttaatttatgttttatatgtagaattttaattgtgatatcctattaaattaaggcttgtttcatgggtcctagtaaattcttacttaaggacccaaatagctatcaaacttatttaatctcttgcttccttacatatgataacattaattacat

SEQ ID NO: 569319 - DNA, 500 bp, Homo sapiens
agctttactggaaggtttactctaaccagcttctgctgctgaaaagtaaatatattcttgcaattgaaatttttttttcagattctggggctcaaattaatttcttctctatcatctggatacatctgtgatttttagtgccttactttgatcacacaagcatacctcaatctctaggtcttcataaaatgccattctggtatttccacagtattttcaatasttctttaactaaaacaactacatggaaagatttaaaatgtactgattgctaaagaaaaatgattttctattttgaaaccattaaatcaactacttttacatttgtttgacaaaattagctgttttaatttatgttttatatgtagaattttaattgtgatatcctattaaattaaggcttgtttcatgggtcctagtaaattcttacttaaggacccaaatagctatcaaacttatttaatctcttgcttccttacatatgataacattaattacat

SEQ ID NO: 569320 - DNA, 500 bp, Homo sapiens
agctttactggaaggtttactctaaccagcttctgctgctgaaaagtaaatatattcttgcaattgaaatttttttttcagattctggggctcaaattaatttcttctctatcatctggatacatctgtgatttttagtgccttactttgatcacacaagcatacctcaatctctaggtcttcataaaatgccattctggtatttccacagtattttcaatagttctttaactaaaacaactacatggaaagatttaaaatgtactgattgctaaagwaaaatgattttctattttgaaaccattaaatcaactacttttacatttgtttgacaaaattagctgttttaatttatgttttatatgtagaattttaattgtgatatcctattaaattaaggcttgtttcatgggtcctagtaaattcttacttaaggacccaaatagctatcaaacttatttaatctcttgcttccttacatatgataacattaattacat

SEQ ID NO: 569321 - DNA, 500 bp, Homo sapiens
agctttactggaaggtttactctaaccagcttctgctgctgaaaagtaaatatattcttgcaattgaaatttttttttcagattctggggctcaaattaatttcttctctatcatctggatacatctgtgatttttagtgccttactttgatcacacaagcatacctcaatctctaggtcttcataaaatgccattctggtatttccacagtattttcaatagttctttaactaaaacaactacatggaaagatttaaaatgtactgattgctaaagaaaaatgattttctattttgaaaccattaaatcaactacttttacatttgtttgacaaaattagctgttttaatytatgttttatatgtagaattttaattgtgatatcctattaaattaaggcttgtttcatgggtcctagtaaattcttacttaaggacccaaatagctatcaaacttatttaatctcttgcttccttacatatgataacattaattacat

SEQ ID NO: 569322 - DNA, 582 bp, Homo sapiens
attaaattatatgttaagtaatataaaatatatgtactatacaattatcattgtaatgttcattgactcaatcctactgtagataaaatgttgagaatttttttttccataggttttygggaaacaggtgatatttggttacatgagtaagttctttagtggtgatttgtgagatttttatgcatccatcacctcagcagtctataatgaacccaatttgtagccttttctcgttcactcacttctcaccatttccccctgagtgcccaaagtccattgtgtcattcttattcctttgtatcctcacagcttagctcccacttatgagtgagaacatggaatgtttggttttccattcctaagttacttttacttcacttagaataatagtctccaatcccatccaggttgctgcaaatgccattaattccttcctttttatggctgagtagtattccactgtacatatatataccacagcttattgactgatgggcatttgggctggttccatatttttgtaattgtgaattgtgctgctataaacatgaaagtgaagtattttttttgtataatgacttc

SEQ ID NO: 569323 - DNA, 488 bp, Homo sapiens
gtatttctcagttggtgattackcaattggtctttagatacatttcttgttattatgcacatctttctatgccctgaagagctatttgcatgcctgaccctctcccactgtcaatgtttaaagtaattttggggcaccacaaatcgtcccactgcctttccataccctgcaagtgagcactgacacccagtgaaaactgctctccagttaatatacaatttcttgtatattgataaatttaattgataaatgccttcattatcctaaatatcgtgtgaatgttttaggacagtggtttctgaatttaggcttttgagttttcaatcatggatgaataactcttttagcttggacagttttcattcccttttatttgcttaacttttaaattgtcaaaatgtgtagtaaaaagtacctcatatttttgtttattattttgaaataattttatatttacagaaaagttgcaaagttagcaaagagaattc

SEQ ID NO: 569324 - DNA, 613 bp, Homo sapiens
aatttggggttctctgatgttttcttttgattatattgcgtttatgttccttgcttttatttatttacttatggttggggtgaggatgtgagaataccatagtagtgttmccttttcagtgtatcatattaggacttacaaaatatacatgttttattactagtgttgttaagcatcattacttccttacagttttgttggctacatttctctactataaagttactgtttttgtccttgtataattaataaatgtcttgagatagatactttcagactactcaaatatcttgcttctcctcaaacttctgtttactcacattagcatctatcaatagatcttgcctgcattaacgatacttgattttcgtatctcccttctgccttctatatgtattagaacactttttcttctttttttattttttattttattttttattatactttaaggtttagggtacatgtgcacaatgtgcaggtttgttacatatgtatacatgtgccatgttggtgtgctgcacccattaactcgtcatttaacattaggtatatctcctaatactatccctcccccatccccctaccccacaacaggccccggtgtgtggtg

SEQ ID NO: 569325 - DNA, 550 bp, Homo sapiens
taggccattagcaagattaaccaagaaaagaatagcgaagctccaaataagcacaattagaaatgaaatgggagacaatacayctgacatcacagaaatacagaagatcatttaaggctactatgaacattttaagtgcatagactacaaaacctagaggacatggctcaattcccaaaaagatacaaccttcctagtttaattcaggaagcattagaaacactgaacagaccaataacaagcagtgagattgaaactgtaataaaaaattaccaacaaaaagagtccaggaccagttggattcacagctgaattctaccagatattcaaagaagaattggtatcaatcctgttgacactattccaaaagatagagtaagagggagctgggcacagtggttcacacctgtaatctcagtacttttggaagccaaggcaggtggatcacttgaggtcaggagtttaagaccagcctggccaacatgggaaaatcccatctctaccaaaaatataaaaattagctgggtgtggtggtgggtgcctataatct

SEQ ID NO: 569326 - DNA, 605 bp, Homo sapiens
tactgtgttcagctttaaaattcagcagaatcggttacgtgcatccraccaactgatttatttggaaatgcatggatggtcatgttctttaagaaggctctggtagttcatacatagaggaagcttgttgaggaggtcagaagccacactttcacttattgatttcctgcacatggatataagttcacatgtagatataagttcacattaagatttcaagattctacatgttcatctaaaatgtttacaaagctcacaacatgctttcatagtttcaataaattatttgtgaattagtatagaaatatggcccttattttagtgcattttggtaaatcagattacggaagaggtattttacttctaaaacagctgatttatttcattactggcaaaggtgttgtgaagaacctagcacgttatacaaacttggcactgaagaaacttgctgtcttagaatagatcacagaacattatagtcagatctctgtccctttgcagtctacatccttgtgggctgatacatacagtaaaacataaacataacaaataatagtattttagaaggcaataggtttatggaagataaaaatgtagcataggtt

SEQ ID NO: 569327 - DNA, 605 bp, Homo sapiens
tactgtgttcagctttaaaattcagcagaatcggttacgtgcatccaaccaactgatttatwtggaaatgcatggatggtcatgttctttaagaaggctctggtagttcatacatagaggaagcttgttgaggaggtcagaagccacactttcacttattgatttcctgcacatggatataagttcacatgtagatataagttcacattaagatttcaagattctacatgttcatctaaaatgtttacaaagctcacaacatgctttcatagtttcaataaattatttgtgaattagtatagaaatatggcccttattttagtgcattttggtaaatcagattacggaagaggtattttacttctaaaacagctgatttatttcattactggcaaaggtgttgtgaagaacctagcacgttatacaaacttggcactgaagaaacttgctgtcttagaatagatcacagaacattatagtcagatctctgtccctttgcagtctacatccttgtgggctgatacatacagtaaaacataaacataacaaataatagtattttagaaggcaataggtttatggaagataaaaatgtagcataggtt

SEQ ID NO: 569328 - DNA, 605 bp, Homo sapiens
tactgtgttcagctttaaaattcagcagaatcggttacgtgcatccaaccaactgatttatttggaaatgcatggatggtcatgttctttaagaaggctctggtagttcatacatagaggaagcttgttgaggaggtcagaagccacactttcacttattgatttcctgcacatggatataagttcacatgtagatataagttcacattaagatttcaagattctacatgttcatctaaaatgtttacaaagctcacarcatgctttcatagtttcaataaattatttgtgaattagtatagaaatatggcccttattttagtgcattttggtaaatcagattacggaagaggtattttacttctaaaacagctgatttatttcattactggcaaaggtgttgtgaagaacctagcacgttatacaaacttggcactgaagaaacttgctgtcttagaatagatcacagaacattatagtcagatctctgtccctttgcagtctacatccttgtgggctgatacatacagtaaaacataaacataacaaataatagtattttagaaggcaataggtttatggaagataaaaatgtagcataggtt

SEQ ID NO: 569329 - DNA, 605 bp, Homo sapiens
tactgtgttcagctttaaaattcagcagaatcggttacgtgcatccaaccaactgatttatttggaaatgcatggatggtcatgttctttaagaaggctctggtagttcatacatagaggaagcttgttgaggaggtcagaagccacactttcacttattgatttcctgcacatggatataagttcacatgtagatataagttcacattaagatttcaagattctacatgttcatctaaaatgtttacaaagctcacaacatgctttcatagtttcaataaattatttgtgaattagtatagaaatatggcccttattttagtgcattttggtaaatcagattacggaagaggtattttacttctaaaacagctgatttatttcattactggcaaaggtgttgtgaagracctagcacgttatacaaacttggcactgaagaaacttgctgtcttagaatagatcacagaacattatagtcagatctctgtccctttgcagtctacatccttgtgggctgatacatacagtaaaacataaacataacaaataatagtattttagaaggcaataggtttatggaagataaaaatgtagcataggtt

SEQ ID NO: 569330 - DNA, 558 bp, Homo sapiens
atattaaatttatccaatttttatgtgtcaattatacctcaataaatctaaaacaagaaattctaacaaaaatgtcttaaagtagaaatttttcttatttaataatttaacaatttttttttacttcaaaggcaatttttgcttaatrcaaaaccttgagaatcagggataagtatggaaaaagaatagcatcataatttatcacaaacaaagcacatctaaactataaccatatttagagatacaaagataaatatagttggtcctttatatttatgggttctgcattccatggattctttactatagataaaacatatttggaaaaaataaagtattgttccatctgtactgaacatgtacagacctttatttcttgccattattccgttgaccatacagcagaacaactgtttacatagcacttacatttcatttggtattttggtgctgtcatacatactaattttcatccaaggtttcataactccccatagcccttgttacatcttttgttataatgttgggtgagttaggcctcaggagcaggcctctgac

SEQ ID NO: 569331 - DNA, 574 bp, Homo sapiens
cataaaataagcaatttttaaagtatattaaagttaaatagtgcatagcaataattggggaatgtgagaaaataattattagttctcagatgaagaagatggctttactctgagtttacactgaaaaaggtaaaaataatcaggtttttacattaaatcctagagcaaaagaaaggtttttagataaattcaaaagcagagattgatttttcagaaaaaaagtaaaatagagcaacatttatcaggagaaatgagacaactcaatggacaatttcatattgaatactttaagtagaagttggattacatacagttgcttaaaagatagtgtgcaacgttaattaagcatgactgattagaaactgttataaacctcaaggaaaaagaaaatcacagataaagttgagacacaagtgtactagttaactgaaataaatgcaatcactactttgtratgtacacattatatttaatattttaaaaatctgagtccaaatgataattatttattgaatgttgagtagaaagtttaataatgacagtttagggtcttgcacttcctcttaataatatt

SEQ ID NO: 569332 - DNA, 358 bp, Homo sapiens
aatatccaacccaaagggatatggtgaggagttcctggtaagtaaagtttagaggttgacccaaatggctgtcatctgataaatcaggyatgtctatccattctgtgtttgatgtgtcatcctagtggcatataagccaggttcagggtggctttctaataatatgtacatgtgctgcaaattggaacttcattagttggcttgatatatttgatgtaaaaatttccatgaaatttgaaatcaatttacattatcacaagaaccttccactttttacatgtcatgaaaaaaaagcagagctgttagatcctttaaaaataatttctaatgatctaaatttttcagtgggtataaaaag

SEQ ID NO: 569333 - DNA, 358 bp, Homo sapiens
aatatccaacccaaagggatatggtgaggagttcctggtaagtaaagtttagaggttgacccaaatggctgtcatctgataaatcaggtatgtctatccattctgtgtttgatgtgtcatcctagtggcatataagccaggttcagggtggctttctaataatatgtacatgtgctgcaaattggaacttcattarttggcttgatatatttgatgtaaaaatttccatgaaatttgaaatcaatttacattatcacaagaaccttccactttttacatgtcatgaaaaaaaagcagagctgttagatcctttaaaaataatttctaatgatctaaatttttcagtgggtataaaaag

SEQ ID NO: 569334 - DNA, 514 bp, Homo sapiens
aacactgtcttgagtggccccaatcagaactgtctcccagtgagagagctaaggaagccagaaccatcctctgaccccttgtcccatcaatgagaataaattaccccattgaatggggaagaatatttttcattcattgattctcacagccatccaatagtctggattgcctcttgcactcaatctttcacttcagaaggagaaattgtcctcacaaatggacacccactgtgcatctcacaaactttgyatttgatttatctgtggcaagccaaggagaaaaaccagatttttcatcaaacatgcccttaaattgtctgaattctcatcaacagcatcattcacacaagaaaaaaaaaaaagcagtgatttgatataagacttcactctggctgcttagtaacatagtcttaatgtcctttttggcttgactaggtggatcaaaaagtttgattcgcttttcttgctgcaaaagtcctagattattgggctagaaatgaaaaccatttttctt

SEQ ID NO: 569335 - DNA, 451 bp, Homo sapiens
ttaacatcctcttaataagtgataaatgaagcagccaaaatattttttttaattgtagaatatttggacagcatattcaataagcttgatctaagggacctaaatagatgaatgaatcctcaaatttaaaacagtacactaaatgacactcactaaaaatttttgaaaactggccatgcattgtttttctttttgctagtattaacagtttttaaaagcttacatcatastgtcatgtgaatcacataatcaacaactgatcaacaataatagttaacatgcattaacacttaattgtaactcataaatatatacaatttaaaaaggaagtgaaaagacaacccacagaatggaatatatactttgcaaatcgtgtgtcttatatcttataaggaacttctatctagagtataaagaaagcttgcaactcaaaaatgaaagacaaataacc

SEQ ID NO: 569336 - DNA, 583 bp, Homo sapiens
gtttcccacccttccccatgataagacctcagtgtgtttcactaagagctcccccagtcacctgtgtcaaggctaggacctctgcccaccattgagtattgcattcactcacctactttagccacaacaggtttctacccaggaacacctcccctactggtctgaagcctgaactattcaacccagtaaataaaaacagtaagtaaaatactgggaaaaaaacataaatacgtgcccaccacagagggataagataagcttcaagagacctctgccattccaaccacacaggagacaatgaacttgctcacacaccgagcacattgctactacaaccggcatctgagaaagccagcctacrtctataatcaaggaatgcgtacaaagtcttcaccaatgaaagcacgaaaagccaaattaggctacaataaactataaacattaaagtcgcatccttaagagggaaaaaaggaaatttaaaaaaaagtaaaatcaaaaataaatttataataattagaagaaatagtctacccaaatgagaaggaactagaacaatgattctgttacgatgacaaaacagtgt

SEQ ID NO: 569337 - DNA, 582 bp, Homo sapiens
ttctctcacatttggcataagcatacttataaaaatcctgctttgcaacggtcaaaagaaggctcatttgaagtagacaaattgatgtatttacaggaattctcagaaaaaccccactcaaarggattattggtatctctggatctcaggaaataaaagaaggaatgaagtgggcagccacaaagaatgaattaagaaactggaggaagagataaagtaactgaaagctcctttctcttcctccaggttcttgacctctttctgctgttgctccttctgctttttctgcttcttgttgcccttctttgcctctatctaggtcctagaagagtggggcaatgaccttctggatggatggatgattcccaatggctacaggttctggagataacttccctttggaagggggaaaattgctagccttattagaatattctaatgtggattccattctccaaaacttccctaaacagaacatgcaaaacacagctacggaggcagaaatgatgaagaagaaggaacaaggagtctgagaacctggataacagactgtcctagaattaaggtattaggttggcaaat

SEQ ID NO: 569338 - DNA, 582 bp, Homo sapiens
ttctctcacatttggcataagcatacttataaaaatcctgctttgcaacggtcaaaagaaggctcatttgaagtagacaaattgatgtatttacaggaattctcagaaaaaccccactcaaaaggattattggtatctctggatctcaggaaataaaagaaggaatgaagtgggcagccacaaagaatgaattaagaaactggaggaagagataaagtaactgaaagctcctttctcttcytccaggttcttgacctctttctgctgttgctccttctgctttttctgcttcttgttgcccttctttgcctctatctaggtcctagaagagtggggcaatgaccttctggatggatggatgattcccaatggctacaggttctggagataacttccctttggaagggggaaaattgctagccttattagaatattctaatgtggattccattctccaaaacttccctaaacagaacatgcaaaacacagctacggaggcagaaatgatgaagaagaaggaacaaggagtctgagaacctggataacagactgtcctagaattaaggtattaggttggcaaat

SEQ ID NO: 569339 - DNA, 506 bp, Homo sapiens
ctctctctacagttcttttggtcagtttgtctatttttagaccaatctcacactgtcttaattaccatakctctataaatagatctttatacctggtagtgtaagccctttagctttgtggttctcacaaattgacttggctattcttggcctttgcattttcatattaattttttgaatcagcatgccaatttctgcaaataagtgttaggattttgattgggattgcattgaaggtagagaacaagttggagggaagtgacacctttgcacttttgatatgcaaatggcatcatttattgatatatgcctttctgtataggtcatctgtgatttctcttggtaatactttgtagttttggccgggcacggtggctcacacctgtaatcccagcactttggaaggctgaggcaggtgaatcacctgaggtcaggagctcaagaccagcctcgccaacatggtgaaaccctatccctactacaaatacaaaaattagcctggtgtg

SEQ ID NO: 569340 - DNA, 484 bp, Homo sapiens
aacaatgttatttaacatagtaccagaggtcctgcccaatatgatgaataatgatataatgataatgatgatgatgatgtaaaccttataagggaagatttttaaatgttgctaacagataatatcaccatcaacctagagaaaaacaactaaattagcaaacattaagaattagtaggacagtttcacaagattaccggaratagaatcaatatatttatctggataaatggagatatattctgtggatgcgtccacttaacattataaagatataagttctccccaatttaatctataaacaaactcaattgaatccaataaacattgcacttagaatttttaaagaaaaaacctccaaacatattctgaaatgcacataaagagaaatatacaaataactgtcagcctacaaaaatggtttaaatggataatcatctcatatgatgctgaaaaagcaaataatttttatcttgcttaattc

SEQ ID NO: 569341 - DNA, 423 bp, Homo sapiens
acatctgctgacaatttgtgatggtgataatatggcagccctgaagtatttcacacttattcaggcaacacggtgcttttatctctctaagtaaccagtgtgtgtcctgttgagcagttactttgaaagtagtctctgttctcctgatagctttgtgttctcctttatttcagtgtaattaatacgctcaatataaatagctgaatcttcaaaaagatttgcctgccttgcaagcgctacatttccaattacacactaaattaggcacatgattgaacacgaacactaacattttccaacaggtggtgaataagcaatttctatccatcaactcaacaacagctctctggccaaatagtcccctgtttwagagttcttctaatataacaagtgtttttagccaatttaaaaaattattccctt

SEQ ID NO: 569342 - DNA, 436 bp, Homo sapiens
aatgaaagcaaggacacaaattggtagaaaactataacaagcaataagatattaaagccktgctgtccaatatgatggcctgtgtgactgggaaactgattttaaaattatatttaatttaaattaatttatatttaaatttaaaaattgaaaattcagtttttgggaaagttttcagtgtattggagcaacttgggtatgcaggtctattttttcaattgtaaatgttatgaaatctgaagacagatcaagcatttcagaaaaaaaagcgtctgtattgagatgtgctgtcaagggaaaatacaccccagatttaaaggatttagtagcacatatattataaaatagctcattaatagtttttatattgattatctgttaaaataataatactttgaggccaggcgcggtggctcaagcctgtaatcctagcact

SEQ ID NO: 569343 - DNA, 436 bp, Homo sapiens
aatgaaagcaaggacacaaattggtagaaaactataacaagcaataagatattaaagccttgctgtccaatatgatggcctgtgtgactgggaaactgattttaaaattatatttaatttaaattaatttatatttaaatttaaaaattgaaaattcagtttttgggaaagttttcagtgtattggagcaacttgrgtatgcaggtctattttttcaattgtaaatgttatgaaatctgaagacagatcaagcatttcagaaaaaaaagcgtctgtattgagatgtgctgtcaagggaaaatacaccccagatttaaaggatttagtagcacatatattataaaatagctcattaatagtttttatattgattatctgttaaaataataatactttgaggccaggcgcggtggctcaagcctgtaatcctagcact

SEQ ID NO: 569344 - DNA, 435 bp, Homo sapiens
atgaaagcaaggacacaaattggtagaaaactataacaagcaataagatattaaagccttgctgtccaatatgatggcctgtgtgactgggaaactgattttaaaattatatttaatttaaattaatttatatttaaatttaaaaattgaaaattcagtttttgggaaagttttcagtgtattggagcaacttgggtatgcaggtctattttttcaattgtaaatgttatgaaatctgaagacagatcaagcatttyagaaaaaaaagcgtctgtattgagatgtgctgtcaagggaaaatacaccccagatttaaaggatttagtagcacatatattataaaatagctcattaatagtttttatattgattatctgttaaaataataatactttgaggccaggcgcggtggctcaagcctgtaatcctagcact

SEQ ID NO: 569345 - DNA, 435 bp, Homo sapiens
atgaaagcaaggacacaaattggtagaaaactataacaagcaataagatattaaagccttgctgtccaatatgatggcctgtgtgactgggaaactgattttaaaattatatttaatttaaattaatttatatttaaatttaaaaattgaaaattcagtttttgggaaagttttcagtgtattggagcaacttgggtatgcaggtctattttttcaattgtaaatgttatgaaatctgaagacagatcaagcatttcagaaaaaaaagcgtctgtattgagatgtgctgtcaagggaaaatacaccccagatttaaaggatttagtagcacatatattataaaatagctcattaatagtttttatattgattatctgttaaaataataatactttgaggccaggcgyggtggctcaagcctgtaatcctagcact

SEQ ID NO: 569346 - DNA, 595 bp, Homo sapiens
aaccacaatgtgataccaccttactcctgcaagaatggccataataaaaaaaaatcaaaaaacagtagatgttggcatggatgcagtgatcagggaacatgtctacatgctggtaggaatgcaaactagtacagccactatggaaaacagtgtggagatgccttaaagaagtaaaagtagaacttccatttgatccagcaatccccctactgggtatctacacagaggaaaagaagtcattatacaaaaaagatacttgcacatgcatgtttatagcaacacaatttgcagttgcaaaattgtggaaagaacccaaatgcccatcaatcaaagagtggataaagaaactgtgagatatatatctacatctatatagatatataaaaatagatatataaatatatgtatatatgatggamtactagttggccataaaaaggaatgaattaatggcatttgcagatacctaggtgagattggagactattattctaagtaaagtaattcaggaatggaaaatcaaacatcatatgctctcgctgatatgtgggagctaagctatgaggacacaaaggtataagaatggtacaatgga

SEQ ID NO: 569347 - DNA, 595 bp, Homo sapiens
aaccacaatgtgataccaccttactcctgcaagaatggccataataaaaaaaaatcaaaaaacagtagatgttggcatggatgcagtgatcagggaacatgtctacatgctggtaggaatgcaaactagtacagccactatggaaaacagtgtggagatgccttaaagaagtaaaagtagaacttccatttgatccagcaatccccctactgggtatctacacagaggaaaagaagtcattatacaaaaaagatacttgcacatgcatgtttatagcaacacaatttgcagttgcaaaattgtggaaagaacccaaatgcccatcaatcaaagagtggataaagaaactgtgagatatatatctacatctatatagatatataaaaatagatatataaatatatgtatatatgatggaatactasttggccataaaaaggaatgaattaatggcatttgcagatacctaggtgagattggagactattattctaagtaaagtaattcaggaatggaaaatcaaacatcatatgctctcgctgatatgtgggagctaagctatgaggacacaaaggtataagaatggtacaatgga

SEQ ID NO: 569348 - DNA, 474 bp, Homo sapiens
agacagggtttcactatgttggccaggctggtctcaatctcctgacctcgtgatccacctgccttggcctcccaaagtgctgggactacaggagtaagacaccgtgcccrgccagtattgttcttctttatacctaattactcatcattggaattctctttaaaaaaaaaatgtgcttccctaattggttgccaacagagaggctacatcatagtggttaagaatataggctcttttcccttgactgaagcagtgattaaaacaaaaaaataagaaagaatataggctctggtgtcatactgcctgggttggagacccagctcttcaatttacatctgtatgacttcagttcatttttttttttttttcatttctacatggcttggtttccccatctgtaaattgtggatacttacactagctatctcataggttattgtgagaaataagtgagtctgtatgtatgaagcccat

SEQ ID NO: 569349 - DNA, 382 bp, Homo sapiens
accgcacctggccaataaagtatttttaagcctctcagattttagaastttgttacagcagcattatgaaattgatacacgcgggcatgttttcctgaaatcagagcctgagaggagaaccaggtacaggtagttttctttgggaggtgatccaggaagcaggagtaaggaaggatgagaaggcaggaaaggagagagaaccaatatattaaggaatccttgagctcactgctgtagacagccaggggccagtgcacagggacctcgagaggcacagggaatgactctcagacgtgtctgtctgcaagaaggcaggtgggagcattcagccagctgtcatttccaatgcactgagggctgtccataggagcattaactcccc

SEQ ID NO: 569350 - DNA, 382 bp, Homo sapiens
accgcacctggccaataaagtatttttaagcctctcagattttagaactttgttacagcagcattatgaaattgatacacgsgggcatgttttcctgaaatcagagcctgagaggagaaccaggtacaggtagttttctttgggaggtgatccaggaagcaggagtaaggaaggatgagaaggcaggaaaggagagagaaccaatatattaaggaatccttgagctcactgctgtagacagccaggggccagtgcacagggacctcgagaggcacagggaatgactctcagacgtgtctgtctgcaagaaggcaggtgggagcattcagccagctgtcatttccaatgcactgagggctgtccataggagcattaactcccc

SEQ ID NO: 569351 - DNA, 570 bp, Homo sapiens
tctccttctaccccagggttcttctccgtgtggatcacattaagggagcgtataacctttcataccgcctgactaggatgatggatrtggaaatacacagtttgggagccctgtctgcttgcctgttaagccattgactgttatatactcttgggcttgaaacaccttccaggctggaggggccagtattgcatttacttttatcccatttctgttttcacggctacccaagaggaaataatttgatttggggctgcagggggtagggtggaaaagtgcagtcggaagacagagaaaatcagcaagaagattactgaaagggaaagagggggaaaccaaccagctatatatttcctgcaacatgagttaatgaaattccgttccttcttacacagctgtattcggtttgttttacattgtttggtatgtgaaaggatttggctttgcgttacagaactaattgcttactagatattacatggatatcaaaatactttataaatattaattaatcttcacctaattccctggcaagcacaaataaccagtggcatatttattgaatgtgta

SEQ ID NO: 569352 - DNA, 570 bp, Homo sapiens
tctccttctaccccagggttcttctccgtgtggatcacattaagggagcgtataacctttcataccgcctgactaggatgatggatgtggaaatacacastttgggagccctgtctgcttgcctgttaagccattgactgttatatactcttgggcttgaaacaccttccaggctggaggggccagtattgcatttacttttatcccatttctgttttcacggctacccaagaggaaataatttgatttggggctgcagggggtagggtggaaaagtgcagtcggaagacagagaaaatcagcaagaagattactgaaagggaaagagggggaaaccaaccagctatatatttcctgcaacatgagttaatgaaattccgttccttcttacacagctgtattcggtttgttttacattgtttggtatgtgaaaggatttggctttgcgttacagaactaattgcttactagatattacatggatatcaaaatactttataaatattaattaatcttcacctaattccctggcaagcacaaataaccagtggcatatttattgaatgtgta

SEQ ID NO: 569353 - DNA, 570 bp, Homo sapiens
tctccttctaccccagggttcttctccgtgtggatcacattaagggagcgtataacctttcataccgcctgactaggatgatggatgtggaaatacacagtttgggagccctgtctgcttgcctgttaagccattgactgttatatactcttgggcttgaaacaccttccaggctggaggggccagtattgcatttacttttatcccatttctgttttcacggctacccaagaggaaataatttgatttggggctgcagggggtagggtggaaaagtgcagtcggaagacagagaaaatcagcaagaagattactgaaagggaaagaggggraaaccaaccagctatatatttcctgcaacatgagttaatgaaattccgttccttcttacacagctgtattcggtttgttttacattgtttggtatgtgaaaggatttggctttgcgttacagaactaattgcttactagatattacatggatatcaaaatactttataaatattaattaatcttcacctaattccctggcaagcacaaataaccagtggcatatttattgaatgtgta

SEQ ID NO: 569354 - DNA, 570 bp, Homo sapiens
tctccttctaccccagggttcttctccgtgtggatcacattaagggagcgtataacctttcataccgcctgactaggatgatggatgtggaaatacacagtttgggagccctgtctgcttgcctgttaagccattgactgttatatactcttgggcttgaaacaccttccaggctggaggggccagtattgcatttacttttatcccatttctgttttcacggctacccaagaggaaataatttgatttggggctgcagggggtagggtggaaaagtgcagtcggaagacagagaaaatcagcaagaagattactgaaagggaaagagggggaaaccaaccagctatatatttcctgcaacatgagttaatgaaattccgttccttcttacacagctgtattcggtttgttttacattgtttggtatgtraaaggatttggctttgcgttacagaactaattgcttactagatattacatggatatcaaaatactttataaatattaattaatcttcacctaattccctggcaagcacaaataaccagtggcatatttattgaatgtgta

SEQ ID NO: 569355 - DNA, 520 bp, Homo sapiens
gcctgggcgtcagtgcatgtgtgcctgggcgtcagtgcgtgtgcacgcctgggcgtcagtgygtgtgtgcgcctgggcgtccgtgtgtgtgtgggcctgggcgtcagtgtgtgtttgcctgggcatcagtgtgtatgcgcgcccgggcgtcagcgtgtgtgtaggcctgggtgtcagcgtgtgtgcgggcctgggcgtctgtgtgtgtgtgtgtgcctgggtgtcagtgtgtatgtgcgcctggtgtatatcagctttcctttgtttttccctgagccttagctgagtacatattcccatttaaatacaaaatcctggattccatagtgactacatatgtgtgcaagctcaggcatttaaacactttgattttcactgtacacccaagttaatttacaccactgttgtgagaattaaaagtcacacaagaaaaaactgtgaaaagttaaaagtggtatacaacatcttatttgtatcaccactattttttttctgttcaggacaggtatgagttactctc

SEQ ID NO: 569356 - DNA, 565 bp, Homo sapiens
gaatgaatctccatgctttaactgctgtaactttgtaaaagaatagaataagggacacaaaaagagaaagggcaaggaagttgtggttgcgaagacaaaataagaagtgagctacttgaaaatatcaagaaagtttaactcaattatttccgttcaatctggagtttattagcaattatacttgctaagtaaagtaacattttgagtattcactaaatgacaaacatttgtcactggtgattaggaagttttctcaaaatctatataaactgaacaatattattctcatgtgattaatgaagacatgaatctctgagaggttacagaactaataattagaagagttaagatttgaatccaggctgggcacagtgcctcatgcstgtaatcccagtactttgggaggccgaggcgggtggatcacctgaggtcaggagtttgagaccagcctgaccaagatggcaaaacctcatctctattaaaagtacaaacattagccaggtgatggtgggtgcctgtagtcccagctactcaggagcctgaggcaggagaatcgcttgaaccc

SEQ ID NO: 569357 - DNA, 607 bp, Homo sapiens
taagaggggatttattatgggaattagttcatgcaattatggaggccaagaaatcccacagcatactgtcttcaagctggagatcaggaaagtgaaatttagtttgagtctaaaggctaaactcagasagccaggagcagccatgtctaagggcgggagagacagttgacccagatccagatgagagagtgaatttgctcttcctcctttttttcactctatccaggccctcaataaatgggctgatgcccagccatgttgatgaaagtggatctcctttactcagtctctcaaactgattgcttatgtcttccagaaacatcctcaaagacacacccagaaatactatttttccagttatctgggtatcctataaccgtatcatgttgacatttaaaattaaccatcacaatgtaccaggaaaggtagacctctgttctactctctagttggatgatgctggagggaatattaggacctgttgtagagtataaagaaagaacattttatttgcaaatatgcataattgtagttgacaccctgctacccataggttaaatacacaatttattctgggaaagaagagtaaaactatattaaaagtttt

SEQ ID NO: 569358 - DNA, 607 bp, Homo sapiens
taagaggggatttattatgggaattagttcatgcaattatggaggccaagaaatcccacagcatactgtcttcaagctggagatcaggaaagtgaaatttagtttgagtctaaaggctaaactcagacagccaggagcagccatgtctaagggcgggagagacagttgacccagatccagatgagagagtgaatttgctcttcctcctttttttcactctatccaggccctcaataaatgggctgatgcccagccatgttgatgaargtggatctcctttactcagtctctcaaactgattgcttatgtcttccagaaacatcctcaaagacacacccagaaatactatttttccagttatctgggtatcctataaccgtatcatgttgacatttaaaattaaccatcacaatgtaccaggaaaggtagacctctgttctactctctagttggatgatgctggagggaatattaggacctgttgtagagtataaagaaagaacattttatttgcaaatatgcataattgtagttgacaccctgctacccataggttaaatacacaatttattctgggaaagaagagtaaaactatattaaaagtttt

SEQ ID NO: 569359 - DNA, 607 bp, Homo sapiens
taagaggggatttattatgggaattagttcatgcaattatggaggccaagaaatcccacagcatactgtcttcaagctggagatcaggaaagtgaaatttagtttgagtctaaaggctaaactcagacagccaggagcagccatgtctaagggcgggagagacagttgacccagatccagatgagagagtgaatttgctcttcctcctttttttcactctatccaggccctcaataaatgggctgatgcccagccatgttgatgaaagtggatctcctttactcagtctctcaaactgattgcttatgtcttccagaaacatcctcaaagacacacccagaaatactatttttccagttatctgggtatcctataaccgtatcaygttgacatttaaaattaaccatcacaatgtaccaggaaaggtagacctctgttctactctctagttggatgatgctggagggaatattaggacctgttgtagagtataaagaaagaacattttatttgcaaatatgcataattgtagttgacaccctgctacccataggttaaatacacaatttattctgggaaagaagagtaaaactatattaaaagtttt

SEQ ID NO: 569360 - DNA, 583 bp, Homo sapiens
tggcatattatttcccttatggtttttcccattatgatttttaaatattctgagaaataaaaattgctttactatatgcatgctaccacatatttctatgtcactcttcattgagtgtgttaggtcctatattaagcattttgcattaagttctatttaattcttacgagaaccaagtatactgtgtattaacaggtcaatattacaaataaagaaacaaagtctcacaggtgcatttcagttacctgcatggccacaaaaccaggagtagtaatggagycagcatttattctacattggtctgacttcagcaactgcattcttccaaataaagcagttaataataaaataatacaaataactggtaaaatatacttaaataattatctccatctatttaaataaaataatttacataaagtgcttggtacggtgtctaatataatcatataattaaaacaaaaagtggtcacaacttctatttgaacagttacaaaaactgggttttacagttgtatttaccagaaaaggtcaattgctataacaacacatccacaatctcaattatttaacaaaataaagg

SEQ ID NO: 569361 - DNA, 583 bp, Homo sapiens
tggcatattatttcccttatggtttttcccattatgatttttaaatattctgagaaataaaaattgctttactatatgcatgctaccacatatttctatgtcactcttcattgagtgtgttaggtcctatattaagcattttgcattaagttctatttaattcttacgagaaccaagtatactgtgtattaacaggtcaatattacaaataaagaaacaaagtctcacaggtgcatttcagttacctgcatggccacaaaaccaggagtagtaatggagtcagcatttattctacattggtctgacttcagcaactgcattcttccaaataaagcagttaataataaaataatacaaataactggtaaaakatacttaaataattatctccatctatttaaataaaataatttacataaagtgcttggtacggtgtctaatataatcatataattaaaacaaaaagtggtcacaacttctatttgaacagttacaaaaactgggttttacagttgtatttaccagaaaaggtcaattgctataacaacacatccacaatctcaattatttaacaaaataaagg

SEQ ID NO: 569362 - DNA, 583 bp, Homo sapiens
tggcatattatttcccttatggtttttcccattatgatttttaaatattctgagaaataaaaattgctttactatatgcatgctaccacatatttctatgtcactcttcattgagtgtgttaggtcctatattaagcattttgcattaagttctatttaattcttacgagaaccaagtatactgtgtattaacaggtcaatattacaaataaagaaacaaagtctcacaggtgcatttcagttacctgcatggccacaaaaccaggagtagtaatggagtcagcatttattctacattggtctgacttcagcaactgcattcttccaaataaagcagttaataataaaataatacaaataactggtaaaatatacttaaataattatctccatctatttaaataaaataatttacataaagtgcttggtacggtgtctaatataatcatataattaaaacaaaaagtrgtcacaacttctatttgaacagttacaaaaactgggttttacagttgtatttaccagaaaaggtcaattgctataacaacacatccacaatctcaattatttaacaaaataaagg

SEQ ID NO: 569363 - DNA, 591 bp, Homo sapiens
aatatacttaaataattatctccatctatttaaataaaataatttacataaagtgcttggtacggtgtctaatataatcatataattaaaacaaaaagtggtcacaacttctatttgaacagttacaaaaactgggttttacagttgtatttaccagaaaaggtcaattgctataacaacacatccacaatctcaattatttaacaaaataaaggtttgattcttgcagccgttagagtccaatggctatcaacaaggtcagaatgaaggggggaggcttgccaagcagttactcagggacttaggttccttccacagagaggacctgaaatccttgaaaccctccactgaaagattctatcttttcccagcagatatggaatcacaggacatcttgcgagacattgtaggggtcaggcctgaaagtagyatatatcactcccactcatatcacattggatggaattcagttgtatggcctgccctagctgaaagcaaagctcagataccttgtgtaaacatagagctttgtgtctgccccagtaagcaaaatacatcatcctccaaatgagtggcgattggagttttggc

SEQ ID NO: 569364 - DNA, 574 bp, Homo sapiens
ctccaattaactggtaaataatattacagtctgggctgttctgagcccagctaagatggttttagagtgctgtttctcagagaggatacagaaagctaatcagaattgtcagcataattcctccctgcttagtgtcaggaaaggagccttgtttatttcaaattactgtgctcaataaatattattttgccatgggtcaccagaaacaaaggtgaacctacaacgagtagtaagaaaatctcaagacattgttaacagtgttaaataaagttcagttcttctaaattagattaattgagcacctactactgtatataaaaagcaccagcttggaatctgaagatagcaagaagaataagataatgtccattttgcaagataggtgaagggattggtgacattaggcaagacacaacctttctttgggccttagctgcctcacctgtgaaaggtgaggatttgaccacttgctttctaaggttcctttcrggttagaaagcattttgaaaagcaaacaaggctgggcatggtggctcacgcttgtaatctcagaactttgggaggctgaagcagg

SEQ ID NO: 569365 - DNA, 658 bp, Homo sapiens
acatccttaaccacccaggctcagacaatcctcccacctcagcctccgaagtagctgggatcacagggacacaccaccactcccagctattatttgtattttttgtagagacgggatctcccctactccccaggaaggtctcgaactcctgggctcaagcaatctgcctgcctcggcctcccaaaggatgggattacatgagtgagacactacatccagcctcgaaattttctacatgtcgaaaatkacaaaacaggaaaactcaatgcacaagaaaccgtaagcacaagaagcttcaggaaacgacaccaaagcacaccaattacatttctgaaaactggagatagaagaaaatctgaaaactgaccagataaaagattttcacaaataaaaagacaagaatgaccattgatctctattaaaactaacaagtaagattttgggtaagtaagatgggttagatcaggtaacagttaaagaagacataatcaccaaggaaattcatggaaactccgaagaggtttccatgagaaccatgtaagtatcccaggattaaagagaccttcagaaaaattaccaaggcttcagaagatttttgccaaaatgctataatttggttagaaaatttgtggcacaaatacccagtcaacactggatt

SEQ ID NO: 569366 - DNA, 315 bp, Homo sapiens
taaagggacatgtagcagagcayaaaggtgtatgtactggaaggccagcatagtagcattggtttgagaaggcagttagcttagtgacaaagaagaacatggatcctggagtcaggctaccagggtttggagcttggctttggcatagaaaagttgtttagctttgataactctcagattcgttgtctatacaatgaggataaatgtagtatcaaccttacagattagtcatgcagattaaatcatgtaatccatgtaaagtccacaaaatgccaggcacatgacaaacactccttaaaatactggctattgcta

SEQ ID NO: 569367 - DNA, 315 bp, Homo sapiens
taaagggacatgtagcagagcataaagktgtatgtactggaaggccagcatagtagcattggtttgagaaggcagttagcttagtgacaaagaagaacatggatcctggagtcaggctaccagggtttggagcttggctttggcatagaaaagttgtttagctttgataactctcagattcgttgtctatacaatgaggataaatgtagtatcaaccttacagattagtcatgcagattaaatcatgtaatccatgtaaagtccacaaaatgccaggcacatgacaaacactccttaaaatactggctattgcta

SEQ ID NO: 569368 - DNA, 315 bp, Homo sapiens
taaagggacatgtagcagagcataaaggtgtatgtactggaaggccagcatagtagcattggtttgagaaggcagttagcttagtgacaaagaagaayatggatcctggagtcaggctaccagggtttggagcttggctttggcatagaaaagttgtttagctttgataactctcagattcgttgtctatacaatgaggataaatgtagtatcaaccttacagattagtcatgcagattaaatcatgtaatccatgtaaagtccacaaaatgccaggcacatgacaaacactccttaaaatactggctattgcta

SEQ ID NO: 569369 - DNA, 315 bp, Homo sapiens
taaagggacatgtagcagagcataaaggtgtatgtactggaaggccagcatagtagcattggtttgagaaggcagttagcttagtgacaaagaagaacatggatcctggagtcaggctaccagggtttggagcttggctttggcatagaaaagttgtttagctttgataactctcagattcgttgtctatacaatgaggataaatgtagtatcaaccttacagattagtcatgcagattaaatcatrtaatccatgtaaagtccacaaaatgccaggcacatgacaaacactccttaaaatactggctattgcta

SEQ ID NO: 569370 - DNA, 562 bp, Homo sapiens
actaaaaacatgcagaaatgggaaatgaagataatcaaaatagtacactacaaaaaatcaactaaacacaaaaaggctgaaatgaatgaactgaagaacaaataacatacgagacatagagaaaacaaatagataartagcagaagtgtatccttccttctcagtaattactttaaatttaaatgtattagaatcatccagttataaagcaggggttggcagagaagataaagaacatgatccatctatatactgtctaccagaggcttattctagatctataaacaaaaaagattgaaagtaaaatgatggaataagatattctatgcaagtcataaccagaaaagagccagaatggctagatattatcaaaacaaaaagattttcagaaaaaatgggttaaggagataaagaagtgcattatatattgataaagggtttaacccaccaggaatatataacaattataaacatatgcatatataatattagactccaaaacatatgaagcaaaattgacaaaattgaagagagaaatagacagttttacaataatagttag

SEQ ID NO: 569371 - DNA, 347 bp, Homo sapiens
cagttgctaaaaattcttcaatgttaaaggcacatgaagaaaagatagcaaaggttctggcatcgaatggtctggattccaatttgagtcctgttgtgtgacatgtggcgagttacttaacttctctgaattttattttctgtctgtcaagtggagttaacaaaagtatccaatgaggactgctgtgtgtgttaaatgcacgtttytgacacagcaccatgtattaaaatattgtagtaagttattttttctctaaaaagctacaaatcataattatgtcttttagccaggtggggtggctcacgcctgtaattccaacactatgggaggccgaggcaggtggatca

SEQ ID NO: 569372 - DNA, 543 bp, Homo sapiens
gtcgtgtctgtagaaggtaagaaggggcacaaccgccatggcaggggagtcacaaaggagaagcaytcagcctgccgagaggtcccaggactttcctggaggatcagtccccaaactgactgtgacagggagcaatacccagataacagcagaggcccagaataagaaagagtctgtgagtgggcagaattccctccagggtcatgaggggagctgacttctgattagggcatttcatccttctctgaaatgcagctgagaactggtcaagcctcactcccttgctgagaccaatagcaatccctgatgatctcgccacaggtccagcaggtgccccatccacactttgtccccagcccctacctggaagctccaaacacctacctgaggggccaactctgattcccaaggaggtgacacctcctgccccttgttgatagaacattgataaggaaataggactgagttttaagcttctttccatgtcaaatatttaaaggcaatataatgttcaagtttaaataatatttcatgtgtaattaa

SEQ ID NO: 569373 - DNA, 511 bp, Homo sapiens
cacagtggcttatgcctgtaatcctagcactttgagaggccaaggcgggcagatcatctgagcttgggaattcgtgacccgcctggccaacatggtgaaaccccgtctctactaaaaatacaaaaattagccaggcatggtggtgcacatctgtaattccagctacctggaaggctgaggcacgagaatcgtttgtacctgggagacagaagttgcagtgagccgagatcttaccattgcactccagcctgggcaacagagtgagactctgtctcaagaaaaaaaaaaaaaaaaaaaaaaaattttttttatatatatatatttcaacacccaaaaaaraacttaatcacaaaataaaaacagctcgttataaaataggacacttcatttatttgtttattctaaaaaacatgtgttgaatgcttgctgtgtgccatgctgtttctgggggtggaaatgctgtggcaaaaaaccaaacaagtctcaggggggatcccatcaaggaaatcaa

SEQ ID NO: 569374 - DNA, 511 bp, Homo sapiens
cacagtggcttatgcctgtaatcctagcactttgagaggccaaggcgggcagatcatctgagcttgggaattcgtgacccgcctggccaacatggtgaaaccccgtctctactaaaaatacaaaaattagccaggcatggtggtgcacatctgtaattccagctacctggaaggctgaggcacgagaatcgtttgtacctgggagacagaagttgcagtgagccgagatcttaccattgcactccagcctgggcaacagagtgagactctgtctcaagaaaaaaaaaaaaaaaaaaaaaaaattttttttatatatatatatttcaacacccaaaaaaaaacttaatcacaaaataraaacagctcgttataaaataggacacttcatttatttgtttattctaaaaaacatgtgttgaatgcttgctgtgtgccatgctgtttctgggggtggaaatgctgtggcaaaaaaccaaacaagtctcaggggggatcccatcaaggaaatcaa

SEQ ID NO: 569375 - DNA, 511 bp, Homo sapiens
cacagtggcttatgcctgtaatcctagcactttgagaggccaaggcgggcagatcatctgagcttgggaattcgtgacccgcctggccaacatggtgaaaccccgtctctactaaaaatacaaaaattagccaggcatggtggtgcacatctgtaattccagctacctggaaggctgaggcacgagaatcgtttgtacctgggagacagaagttgcagtgagccgagatcttaccattgcactccagcctgggcaacagagtgagactctgtctcaagaaaaaaaaaaaaaaaaaaaaaaaattttttttatatatatatatttcaacacccaaaaaaaaacttaatcacaaaataaaaacagctcgttataaaataggacacttcatttatttgtttattctaaaaaacatgtgttgaatgcttgctgtgtgccatgctgtttctgggggtggaaatgctgtggcraaaaaccaaacaagtctcaggggggatcccatcaaggaaatcaa

SEQ ID NO: 569376 - DNA, 562 bp, Homo sapiens
gtacatttaaaaaataataatgaagaaaaatgaaacttgaactccaagtctctgctgcgccccaagcccagcttcctgaaagcctgctccctctcagaggaactcattgagttcctacagttggtctgaagccttctttacacttgggtctaagaaatgtcccagtccttcagttttytaaatcaagctcacctgtatccccatgccttccatcataccctctttacaagggccaatttctttcttcttcttggtttttttttttttttttttttttttttggagacaagtctcactctgtcgcccaggctggagtacagtggcatgatcttggctcactgcaacctccacctcccagtttcaagtgattctcctgcctcagcctcccaagtagctgggattacaggcgtccaccaccatacctggctaatttttgtgtttttagtagagacggggtttcaccatgttggccaggctgatctcgaactcctgacctcaagtgatctgcccgcctcagcctcccaaagtgctagggttacaggcgtgagccaccgcgcccggc

SEQ ID NO: 569377 - DNA, 562 bp, Homo sapiens
gtacatttaaaaaataataatgaagaaaaatgaaacttgaactccaagtctctgctgcgccccaagcccagcttcctgaaagcctgctccctctcagaggaactcattgagttcctacagttggtctgaagccttctttacacttgggtctaagaaatgtcccagtccttcagttttctaaatcaagctcacctgtatccccatgccttccatcataccctctttacaagggccaatttctttcttcttcttggtttttttttttttttttttttttttttggagacaagtctcactctgtcgcccaggctggagtacagtggcatgatcttggctcactgcaacctccacctcccagtttcaagtgattctcctgcctcagcctcccaagtagctgggattacaggcrtccaccaccatacctggctaatttttgtgtttttagtagagacggggtttcaccatgttggccaggctgatctcgaactcctgacctcaagtgatctgcccgcctcagcctcccaaagtgctagggttacaggcgtgagccaccgcgcccggc

SEQ ID NO: 569378 - DNA, 407 bp, Homo sapiens
aaacctaaacgtaaaagccaaaatgataaaagttctagaagaacttataggagacaatctttatgaacttggagtagacaatagtttcttagataggacacaagaagtacgaatcataaaattatgaaagaggagaaattagacttcctcaagattaagaacatttattctttgaaagaaatcattaaagaaatgaaagccatgacacagattggaagaaatgattctcaatacacacatataaaaaatgtacttgtatcaagaatatgtaaagaactgtcacaactcaaagacaagayaaacaactcaatagtaaatgagcaaaatattcgaaaagatacttagccaaaaaagatataccaatggccaataagcacataaaaagatgttcagaattattggccatc

SEQ ID NO: 569379 - DNA, 504 bp, Homo sapiens
cagaataactgggactacaggtgcatgccaccacgcccagctattttttgtatttttagtagagacagrgtttctctactaagagatgttggccaggctggtctcaaactcctgggctcaagtgatccacccacctcagccttccaaagtgctggggttacaggtgtgagccaccatgcctgtccctgaattggtcatttttttttttaatggaataactttttcacttgaaacaattaaagacaaattatttagagttaggcttttgaaagatactttctcaaaaatgaacaaagtgagcttgtcgagaaaaacatctgataaaacctgtggctgattataaaatttgagctgttaagtgaaaattaaaattttcaaaaatttgtatctgccaccgtgaacttgtcagcttttcaaaacttcaagacttctgactagataagtggtgataccagtgaatgtgatttaaaaaaatattttataatgaaatgcatcaacatttgg

SEQ ID NO: 569380 - DNA, 504 bp, Homo sapiens
cagaataactgggactacaggtgcatgccaccacgcccagctattttttgtatttttagtagagacagagtttctctactaagagatgttggccaggctggtctcaaacwcctgggctcaagtgatccacccacctcagccttccaaagtgctggggttacaggtgtgagccaccatgcctgtccctgaattggtcatttttttttttaatggaataactttttcacttgaaacaattaaagacaaattatttagagttaggcttttgaaagatactttctcaaaaatgaacaaagtgagcttgtcgagaaaaacatctgataaaacctgtggctgattataaaatttgagctgttaagtgaaaattaaaattttcaaaaatttgtatctgccaccgtgaacttgtcagcttttcaaaacttcaagacttctgactagataagtggtgataccagtgaatgtgatttaaaaaaatattttataatgaaatgcatcaacatttgg

SEQ ID NO: 569381 - DNA, 558 bp, Homo sapiens
taaaaatatatgtatatatgcactatatacaatatacatatatagtgcctatatatttttatataatacatcatattatattgtatatatgtatatgcatgtatattgtatatatacactatatatgtatatacatcatatatgtaatatatcacatatagttaacatatgtatatgtctatatatgtatatagtatatatgyataaattatgttatgtatatatgtgttatatattaagtaaatatctccatatagtatacataatacataaatatacacatatgtatatatttaatctcttttttttcaattttttaaattttactttaagttctgggatacatgtgcagaacgtacaggcttgttacatagttatacatgtgccatggtggtttgctgcacctgtcaacctgtcatctaggttttaagccccgcatgcattaggtatttttcctaatgctctccctcctgttgcactccgccctgcaacaggccccggtgtgtgatgttcccctccctgtctccatgtgttctcactgttcaactcactgcggtg

SEQ ID NO: 569382 - DNA, 593 bp, Homo sapiens
  misc_feature 564, 565, 566, 567, 568, 569, 570, 571, 572, 573, 574, 575,576, 577, 578, 579, 580, 581, 582, 583, 584, 585, 586, 587,588, 589, 590, 591, 592, 593: n = A,T,C or G
gtctctaaaatgaataaataaatagataaataatcaaactgttagtccaatttcatcttatctagaatggtaaaattaggatcttgctcattgaaattgcttgaccgtatgttaaaatttgctaaaattaatatttattcacttcctaatagaaaatcacatcaaaatatttccataggtgatatataaagcccttttatttcttcttatactaatgggcccaaaattatttgctttggggaaaaaaaaacagaaaaacaaataaataaaataatgtataatgagaagctgaactaatgatatcaaagctctctaccagtttgatctttaaatgtccatctttttcactcaaagggtatctaatactacacaaatagacgccaatagcaagagacaaatgcatttcactatattccatgtaatcaattatactgaaggctagaaaattctaaattattttgaaaccacacatgctacacatccwtgcatcacacacacacacacacacacacacacacacacacacactcttctttttaacttgtaatatttttccaacactgnnnnnnnnnnnnnnnnnnnnnnnnnnnnnn

SEQ ID NO: 569383 - DNA, 609 bp, Homo sapiens
gggaagtgtggggagaggagagatcagagtgttactgtgtctatgtagaaagaagtagacataggagactccattttgttctgtactaagaaaaactcttctgccttgggatgctgttaatctataaccttacccccaacccggtgctctcggaaacatgtgctgtgtcaactcagggttaaatggattaagggcggtgcaagatgtgctttgttaaacagatgcttgaaggcagcatgctagttaagagtcatcaccactccctaatctcaagtacccagggacacaaacactgcagaaggccgcagggtcctctgcctaggaaaaccagagacctttgttcacatgtttatctgctgaccttctctccactattgtcctatgaccctgccaaatccccctctccgagaaacacccaagaatgatcaataaatactaaaaaaatttaaaaaaaaagaaaaacttaacattaagtattgtttattgaatcctattaaaattaaatatacacaaaattatcatcttgggacttagaatcatttaaaataaagatcgaccctgtragttaacctaacttcttagaaaagtcatctttccctcttaatgtcc

SEQ ID NO: 569384 - DNA, 645 bp, Homo sapiens
ggatagtttatcttgaacaagtaacatttcaacaatacatttttgttagttatgtgagcacagatcaggagaatgctgaccttaagaggtcaacttgtgaaatctcctaaacaacacaggaatcccttcttcagtgttgcaggaagatgttcactcaggttctgtgtgagcctctccagcaacaggaactcactaccactccgatatgtggattccattgttgaaccattcacaatgttagaaagttgttacctagagtgaaactaaaggaatctaacacttctctcaggttcaaagacaactgcaagagggggaaattgtttcacccaaaaggaatgagwttcaagtggtaaaaatctcctacagacaattaagttagagaaaaattggggtgcaagaagtcaacctataccttctcgtctcatggcccacctgaaccaacacagcaccggtagccagttacacacaggttggaacttgattctaagtttttagtcacattacccttttgtggtttcacgaatgtgcctcaaaatgggcctataagctgcttaatagcatctcccatgacatccagccttgagctggctacacaggaggagctcttaaagcccttgtgacttaaccaattaagctgaacttatg

SEQ ID NO: 569385 - DNA, 645 bp, Homo sapiens
ggatagtttatcttgaacaagtaacatttcaacaatacatttttgttagttatgtgagcacagatcaggagaatgctgaccttaagaggtcaacttgtgaaatctcctaaacaacacaggaatcccttcttcagtgttgcaggaagatgttcactcaggttctgtgtgagcctctccagcaacaggaactcactaccactccgatatgtggattccattgttgaaccattcacaatgttagaaagttgttacctagagtgaaactaaaggaatctaacacttctctcaggttcaaagacaactgcaagagggggaaattgtttcacccaaaaggaatgagattcaagtggtaaaaatctcctacagacaattaagttagagaaaaattggggtgcaagaagtcaacctataccttctcgtctcayggcccacctgaaccaacacagcaccggtagccagttacacacaggttggaacttgattctaagtttttagtcacattacccttttgtggtttcacgaatgtgcctcaaaatgggcctataagctgcttaatagcatctcccatgacatccagccttgagctggctacacaggaggagctcttaaagcccttgtgacttaaccaattaagctgaacttatg

SEQ ID NO: 569386 - DNA, 585 bp, Homo sapiens
caaaaggagcctttaaaaacatgcaaatacatggaaattaaatatcctgctcctgaatgatcattgtgtcaaaaatgaaatcaacatggaaatcaaaaattcttcgaactgaacgacagtagtgacacaacctatcaacacctctgtgacgcagcaaaggcagtgctaagaggaaagttcatagccctaaacgcctacatccaaagtctgaaagagcasaaacagacaatctaaggtcatacctcaaggaactagagaaacaagaacaaaccaaacccaaaaccagcagaagaaaggaaataaccaagatcagagcagaactaaatgaaattgaaacaaacaaaaaaatacaaaagataaatgaaacagaaagctggttctttgaaaagataaataaaattgatagaccattagcaagattaaccaagaaaagaagggagaaaatccaaataatctcaatgaaaaacaaaatgggagatattacaatggacacaatagaaatacaaaaaaatcattcaagtctactatgaacacctttacatgcataaactagaaaatctagaagagatgaataaattcctggaa

SEQ ID NO: 569387 - DNA, 554 bp, Homo sapiens
gttctcttaatagtgagtgagttctcacaagaactaatggttttataaggggtttccccctttgcctggctttcattctctctcctgccaccctgtgaagagatgccttctgccatgattataagtttcctgaggtctccttggccatgcagaactgcgagtcaattaaacctgttttctttataaattacccagtctcaggtatttcttcatagcagcataatggactaatacagtttttatttaacaaatatttattgtgtacctactatgtgctgacactatttaagcactgagaatacatcagtgaacaaagcagacaaaaattcctgtcctcataatgcttacattattatactgattactaatgtaaaaraaattgttagaagttagacagttataaacagaacacctaaaaaattaaagacaaccagcacaaaacaaggttgccctctcttaccactcctattcaacatagtattggaagttctggccagggcaatcagcaagagaaagaaataagggtattcaaatgggaagagaggaagtcaaac

SEQ ID NO: 569388 - DNA, 613 bp, Homo sapiens
gttttatataaatagcatttaaaagcttaacagtcatgaaaatgggaatgagacttatgagaaaaatcatttaaaaaaatcttacatttcatatttgtgaaattattggaaaattatgaatctagtatgtaaataaaattgtatataatgtaatacatgtacataaatatgtatgtaatataatgtatataatgtaatacatgtacatacatatgtgtatacacatatatacatatacatatgaggtctgtaatagtaaagtagtctgcaagttatttggtatgtatgtcaacaaaaagagtcaaactctgtgaaatatttaaagagatttgttctgagccaaatatgagtgaccatggcccatgacacagtcctcaagaggtcctgagaacatgtgtccaaggtggtcggggtgaagctttgttttatgtattttaaggaggcatgaaacgtcaatcaaatacatttaagaaatacattggtttggtccagaaagacggggcaactcaaagcgggaggcagggaagaagggggccttcaggctataggtaaatttaaacattttctggttgasgattggttgagtttgtctaaagacctgggcattatagaa

SEQ ID NO: 569389 - DNA, 356 bp, Homo sapiens
ctactaaacacacatttagttttagtcctctttctaatttgaaacaatgctgaagcacaaaaagaatgcccaatctacaatagtaagacccagcaaaacaaaaaccagctttagagtaaaatgccccggagggttggtttggtattcctgactgtttgatctttggtaaattggccttctccgagctgcaccttcctaagtaggaatgatgataacaatacaataaatagacattgtgaggattacacgaattaaatggcatagtgtacactgaaagcgaatccccaawcttgcccctgaacctccataaaagccgctaccatgtgaccagttgcacaaggcaaaattgttaaact

SEQ ID NO: 569390 - DNA, 503 bp, Homo sapiens
cagccttctaaggccaactaacttgattccttccttggagctgttgcagctctagattgacttttcacacgatctggtactgtgattatttgtttctgggtggtttcctccatcagcctgtggactctgtgagaacaggggccatgtctgatggattcctcttagcctattgccaacacagtgcctggcatactgtaggcacaaaatgaaaagatattgaaaaatgtatgayaaagcaaatatctaatcacagccctttgcatatatgtagtcacatgttcttatgtattaatcatgcctttttattttttgtgttttctgatgttctaacatttgaggccttgctgatcctagagaggctaccctttcagggctagcaaattcctagaaatagtcaaggacttgcctataagcatgactttcatatgcaaaccagccaatccaaaggtcaaaccccagtcaccttctttatcaggttctcccaggactcttaacactcacac

SEQ ID NO: 569391 - DNA, 615 bp, Homo sapiens
tatctttaaatgaaggaatcaataattataatatcaaaactgcaactggattggtaactagattccataagttatcatacatacagtgagctggtcttgccatatatagctgtaagtgtaaaaattaactggatgctttaaaacattagtctccaacctttcggcttcccttggccacattggaagaagaagacttgtcctgggcsacacataaaatacactaacgtaacgatagctgatgagttaaaaaaaaaaaagtccatgcatcattttcatgatatccaccaccacaaataagcaaaaaaagtcctcaagtttaaagggctggaaacagctgctttaaaagttactgagatacgaaaaagtatcagcaaaacaattaaatagtaataactaagctgctcctttgaacttgatttgagagggttaaaggataatcatataaatgatttcaacactttcgcttttaagggcatttatattttttccactggtcagttctccgtcctctccttgcagggtttactgtctgatatttctttctgtattattattcctcttcatttataatgcaagcttccatagactcacaaaaactaaaatctaatgggcaca

SEQ ID NO: 569392 - DNA, 615 bp, Homo sapiens
tatctttaaatgaaggaatcaataattataatatcaaaactgcaactggattggtaactagattccataagttatcatacatacagtgagctggtcttgccatatatagctgtaagtgtaaaaattaactggatgctttaaaacattagtctccaacctttcggcttcccttggccacattggaagaagaagacttgtcctgggccacacataaaatacactaacgtaacgatagctgatgagttaaaaaaaaaaaagtccatgcatcattttcatgatatccaccaccacaaataagcaaaaaaagtcctcaagtttaaagggctggaaacagctgctttaaaagttactgagatacgaaaaagtatcagcaaaacaattaaatagtaataactaagctgctcctttgaacttgatttgagagggttaaaggataatcatataaatgatttcaacactttcgcttttaagggcatttatattttttccactggtcagttctccgtcctctccttgcagggtttactgtctgatatttctttctgtattrttattcctcttcatttataatgcaagcttccatagactcacaaaaactaaaatctaatgggcaca

SEQ ID NO: 569393 - DNA, 546 bp, Homo sapiens
tctagttgttcagaaactgcaaacttaaacgagtctttaccatgaaacaaaacctgagatgaaaggacttaaatcttattaattgccaaaagaggtcatgaactactcacctgttcccaccaatgccaatgtagacggccagggaaagytatatgctagcctattgagagagaaggaccttaaattgactcagcttaccccaaaaggtctaaatgtaaggctgaaatatctacctcaaatcttctgtcatcaggaagaatagaagctagagttagaagtgaaagtctattataaagaaacaaagaaagccacaactatttcatacttgagttcatatgaatgtaaaatttatattcgctacatttagtaaaatgccaattatgaaaaatatgcatattaagatataggataaattacaattaaaatcaagaagttgtatttattttccaaaatttctaatgcaaatgtattagtttcgttatcagaaaaaaagactttataaagaactttcaatgtgattttattatctttctctgaaatgttaaa

SEQ ID NO: 569394 - DNA, 552 bp, Homo sapiens
aaatttactaagcaaggccatggaagtccccattagcatgatggattttataatgatataatccttaatgaattatacttccatttaacaaagttttaataagcaatttcttgtgcctgcattgttattaattctctcatctgaattgccttgggcatgtctgccataaaattgttcaacataatatttctttctgtgtcaatcttatagtacatgcaaatctcccarccatgactaagacaaacttcattttctttaaaacacatacccagcttacagaaaatatttaggttcaaaattaagatgtgctgaaagaaagctatgactcatgtttaatggaataatagagctctaaccacaggtgagttatcatgctgaaccacacagtcagttacacatccttaattacacatgtgttgtgatttacttacactgttatcttttttctaaagtgttctctttttccttctctgcccagctaacttcttgataacccaaatgttcattccacaaatactttcgtgcttattaagggtattcttctagcacctt

SEQ ID NO: 569395 - DNA, 639 bp, Homo sapiens
ccatttttttgtattgcattttaggtcatttcttttgctatgtggtcaagttcaccaatcttttctgctatgtctaatcagctgttaatttcagtagactttttaaaattttagatattatattttttacctctagatattctgattctattacataaattaccttttgtattagtcaattttcatggcaataaaracatacctgagactgggtaatttaaaagacagggggtttaattgactcaaagttctgcatggctggggaaacctctggaaacttacaatcatggtggaagaggaagaggcacaacttacataatggcagttgagagagagtgagcaagaacaggaatctgatttataaaaccatcagatcttgtgagaactcactcactaaaatgagaaccgcatgtaggaatctgcccccatgatccaatcacctcctaccaggctcctccctcaacaaatggggatatggtaattacagttcagtataaggcttgggtgaagacacagccaaaccttattattccacttctaccaccttccaaatcttatctcctcacacttcaaaacacagtcatgccttcccaaaggtccttcaaaatttcaactcatttcagcattaacccaaaagtc

SEQ ID NO: 569396 - DNA, 679 bp, Homo sapiens
attactttttaatagagcatgttttctttccaaactaatttttggtgaaaaaaactgagctatttccatgtacaaatatttaattaaatctaagrtgtattcgatcaaatattattatgtggatttttctataatacaactaactgctcaatctcatcaccaaaaagtatgatatggtattcttagtatgagaagaaataaataacaatttaattaatcattatacaattaaaataatttaatataagaatcagggtacctggaccattatttcatgtcttataccagctattctaatagtttgcaggggtatccaatcttttggcttccctgggccacattggaagaggaattgtcttggaccacacctaaaatacactaacgatagctgatgagctaaaaaaatcacaaaaaaaacacaatgttttaagaaagtttacaaatttgtgttgggctacatttaaagccattctggggcacttgcggcccatggggcacgggttggacaagatttgtttaaagtaaagcatttaagaagggaaaggaagaaaataacatgtttaagaaacaaatataatgggtattttcactcacagagtgtctcacatgccacatgatgggtccattaacctcatttggtgaattacggtaatttatggcctgtctctacagccccacg

SEQ ID NO: 569397 - DNA, 599 bp, Homo sapiens
tgtaaattcataaattctttctacaaaaaaatttagcaacatttaatgataggaatacatacatagagagagacagagagagagagaaagagagagagaagagagagacagagaaagaataaacctcacaacttattataaggagttgtttcacacaattatgggggttgagaatttctgctatctatcatctgcaaattggagtcccaggaaagccagtggtttaaattccagtctgagtctgaatgcttgtgaagcaggatcactgatagtgtaagtcttagtccaagggcagaaggagactgatgtctcaggttatgcattccagcagagagacagaattctgccttcttccacttttttgttctatccctggccttcaaaagattaaaagatgcccacttaccttagggagggcaatctattttacttactccatcaattaaaatgttgatatctcctaaaaacaccctcacaggcacattcagaaataatatttaaaacagatatctgggcatctgtagcccaatgaagatgggcttaaccatcacaytcccctataaaatgggccaacattttcctataagatttctttatat

SEQ ID NO: 569398 - DNA, 553 bp, Homo sapiens
tttcttcctatgtcaagaaggtacatagtctatattttcaaaatgtatacagacatttttatccttgaatgggttaattatgaagttcgtttcaagtaatcatctgaaaggtactattaatcaaaatcttcataattttttgatgctatgctttggacaaatttttttattyatatagaaatattctccaaaatataattgtaaattttaaaatgaatgtatctgtgtacatattatatatagtatataacacattatatatatatatagtatatactgtaatacattatatacatggtaaataatgttttagtgtttgtcaaacctgaactttttggattatattaaatctgaaattaaaagacaccatgaaataaacagtagtcaatagatttcaaaaatacttctaccttattcaatgcagggtctagcagtatccggtctatggtattttgttatggtagcccaaacagactcagacaggcatacagtttgatctttttgcactttgtttttttcatatttaacatgttggtaatatccctaactcaca

SEQ ID NO: 569399 - DNA, 377 bp, Homo sapiens
gaccagaagccacagcaaacaaacaaacctaataaaagaatattggtttagaatactaaacaatgagattaatgaagtaatgtattgtattggagaaaacaacattaaaatactttaaataacagaattggttattttaaatataaaactaaagaaaaatattttttaaaagttttcttctttagtgtttacatattgtcagaagaaaatgccattttaaagactgaacttgagctggtatctttaaaaagggattatctattagttactttattgamtaggattaacagtgaccttcttcagttaaatacagttacttgtttttttgaactgaggtctcagatattgtcctgtaattgatgttgatcagtatgagt

SEQ ID NO: 569400 - DNA, 622 bp, Homo sapiens
gctgcactccagcttgggcaacagagcaagactccatcttaaaaaaaaaaaaaaggatctacggcaaagaggcatggttaggtacatccctataatataagtaaaggtacttctcataaaggggactggacagcagtccttatgtttcactaaagcaaactgctattaagataatccattttcaaactgttaaatacaaatataaaaggtacagttctagtgggccatgaggagggctagggatgatacacagaaagcttgagaatacaggttctaaaaaaaagaaattctttcatccctggacaaagaggcagagcaagataggtaaatagaagcctccagtgatcatccctccccagagtaacrccaaattgaacaaaagtccacaaaaacatacctttatgagaaggaaaaatcaggtgaggactgagaagagtaggcactgaagagagtaggaaagacagtttttaatcacctatactatccctctcccacaccccagcagtggtcacatggcatggagataaaatctgtatgtatgaggtagagacagcacagtgattatgaaatcttgcattggaactcagtactgccatgtcacagtggaaagcaacacagggca

SEQ ID NO: 569401 - DNA, 591 bp, Homo sapiens
aaagataaaacataccagaatctctgggaaacagctaagacagtgttaagaagaaaattgatagcactaagtacccgcatcaaaaagttggaaagatctcaatttgacaatggaacatcacatctgaaaaaaataaaaaggtagcaaaagagaagaaataatgaaaatcagaggttaactgaaatagagtgcagcatgaaaaaccattcaaaacattaacaaatgcaggatttttttaactaataggtagactgctaactagattaataaaggagaaaggagagaagataaaaataaacacaattagaaatgayaaagggaataataccactgatcagacagaaatactaataactatcagagaatatgagcacctctacacacatgaaataggacatctagaagaaatgaagaagttcgtggatacacacactctcccaatactgaaccaggaaaaacttgagtccgggaacagaccaataatgaggtccaaaatggaatcagtaataaacagcctaccaactccacaaagcccagaaccagacagattcagagctcaattctaccagatgtacaaagaagagcatgtac

SEQ ID NO: 569402 - DNA, 591 bp, Homo sapiens
aaagataaaacataccagaatctctgggaaacagctaagacagtgttaagaagaaaattgatagcactaagtacccgcatcaaaaagttggaaagatctcaatttgacaatggaacatcacatctgaaaaaaataaaaaggtagcaaaagagaagaaataatgaaaatcagaggttaactgaaatagagtgcagcatgaaaaaccattcaaaacattaacaaatgcaggatttttttaactaataggtagactgctaactagattaataaaggagaaaggagagaagataaaaataaacacaattagaaatgacaaagggaataataccactgaycagacagaaatactaataactatcagagaatatgagcacctctacacacatgaaataggacatctagaagaaatgaagaagttcgtggatacacacactctcccaatactgaaccaggaaaaacttgagtccgggaacagaccaataatgaggtccaaaatggaatcagtaataaacagcctaccaactccacaaagcccagaaccagacagattcagagctcaattctaccagatgtacaaagaagagcatgtac

SEQ ID NO: 569403 - DNA, 591 bp, Homo sapiens
aaagataaaacataccagaatctctgggaaacagctaagacagtgttaagaagaaaattgatagcactaagtacccgcatcaaaaagttggaaagatctcaatttgacaatggaacatcacatctgaaaaaaataaaaaggtagcaaaagagaagaaataatgaaaatcagaggttaactgaaatagagtgcagcatgaaaaaccattcaaaacattaacaaatgcaggatttttttaactaataggtagactgctaactagattaataaaggagaaaggagagaagataaaaataaacacaattagaaatgacaaagggaataataccactgatcagacagaaatactaataactatcagagaatatgagcacctctacacacatgaaataggacatctagaagaaatgaagaagttmgtggatacacacactctcccaatactgaaccaggaaaaacttgagtccgggaacagaccaataatgaggtccaaaatggaatcagtaataaacagcctaccaactccacaaagcccagaaccagacagattcagagctcaattctaccagatgtacaaagaagagcatgtac

SEQ ID NO: 569404 - DNA, 591 bp, Homo sapiens
aaagataaaacataccagaatctctgggaaacagctaagacagtgttaagaagaaaattgatagcactaagtacccgcatcaaaaagttggaaagatctcaatttgacaatggaacatcacatctgaaaaaaataaaaaggtagcaaaagagaagaaataatgaaaatcagaggttaactgaaatagagtgcagcatgaaaaaccattcaaaacattaacaaatgcaggatttttttaactaataggtagactgctaactagattaataaaggagaaaggagagaagataaaaataaacacaattagaaatgacaaagggaataataccactgatcagacagaaatactaataactatcagagaatatgagcacctctacacacatgaaataggacatctagaagaaatgaagaagttcgtggatacacacactctcccaatactgaaccaggaaaaamttgagtccgggaacagaccaataatgaggtccaaaatggaatcagtaataaacagcctaccaactccacaaagcccagaaccagacagattcagagctcaattctaccagatgtacaaagaagagcatgtac

SEQ ID NO: 569405 - DNA, 471 bp, Homo sapiens
gacctttactcctgatcccaataagtttctcatctccatctgaggccacctcagcctggacttcactgtcaatatgattatcagcattttcatcagaaccattcaacaagtctmtaagcagttccaaactttcccacatcttcctgtcgtcttctgatccctccaaactgttttaacctctgcccattatcaagtttaaaagtagttttaaggtattcttgcagcaatgcccccacttctgtggtgccaattttatctattagtctgttctcatactgctataaagaactacctgagactgggtaatttatgaagaaacatggcttagttgattcacagttccacaagctgcacaggaagcatggctgggaggcctcaggaaacttacaatcatggtggaaggtgaagggggaacaagcatgtcttagcatgatgtagtaggagagagagagcaaagaggaaagtgccaca

SEQ ID NO: 569406 - DNA, 577 bp, Homo sapiens
tggttaacagcttttcaacaaatatatcaaagcaattacatgaaaaaagcaaagtattttcagtgaactaggtattcttctgggaacaaaatgaacctcaacctttatctgacaccatacacaaaattcaagtttaatttaaataaaagctaaaactataaagmttttagaaaaaaataaggtaatttgcatgacttgggggtaaaattttcttgaacaagacacagaaaacaataaccacaaaagaaaaaataatgttagaatttcctaaatgtatttaaaaacctgcttatccaaaaacacattcaagaaaataattgagaaagtctcaaactgggagaaatatgtgtaaaatatatatctaactaaagacttttattcagagtatataacaaattcttacacctcaatctaaaaaagaaaaaaaaaaagcaagataatttgaaaaataagcaaaatagggccaaggccaagatggctgactagaaacagcagcaatcagaggctcccatcaaaaaagaaccataattagcatgctaatccttcactggcaaccaaggtatccaggttctgtcat

SEQ ID NO: 569407 - DNA, 595 bp, Homo sapiens
ggaggacattattctaaatgaaataagacagacattggaaaaaaaaaaaaacagaagaagaatgcatgatctcacttatatgtgaaatctaaaaaaaaaaaaatcaaagatacagagacrgagaacaaaacagtggttaccaggagtgggggtgggaggggatgatggaccagaaatggagagatgtagatcagaagatacaaagtagcagatgtgtaagatgaacatatgtagatatctaatgtacaacataaggactacaggtaataaaattgtgcttttttgcgaattcatgctaaattagtagattttaactgcttttgccactaaaacaaaagaaaatggtaatggtgagatgatggatatattaacttgtttcactatagtaacctttttactatccatgtgtattctataacatcatgttgtataccttaaatacacacaataaaatttattttaaaataagtttttaaaaaaagatttcatggagctttacttactaggttttagatttctttgaaacccaccactttttttttttttctatttttcccttttggaatgaaaatgtctgtctacacctgtttaccat

SEQ ID NO: 569408 - DNA, 611 bp, Homo sapiens
tttattgtggtactactcacaatagcaaagacttggaaccaacccaaatgtccaataatgatagactggattaagaaactgtggcacatatacaccatggaatactattttcagccttcttaaaagtatatctctcttaaaatacaggcatacttgaagacattgtgtattcagttccagatcactgcaataacatgaatatcatgttaaagccagtcacccaaggtttttggcctcccagtgcctgtaaaagttawgtttactctatgctgtagtctattaaatgtgtactagcattatgtctaacaagtatacataccttaattaaaaattactttgttgctaaacaagtgccaaggatcatctgagccttcagaaaatcacaatctttttgctggtggagagtctggccttcatgttgatgggtgctgactaattaaggtgttggttgctgaaggatggggtggctgtggcaactacttaaaataacacaaaaatgtaatttgccacattgatcaagtcttccttttataaaagattttactgtaacatgagatgctgtttgacagcatttcacccacagtagaacttctttcaaaatcaaagttaat

SEQ ID NO: 569409 - DNA, 607 bp, Homo sapiens
ttttcaacaaagttaaataggttactcagtggagacagaaaatatgaacttttcaacaaatataggagagcagrtgggtatccagagacacacatgcaaaactactttctttcacacaatatgcaaaaattaactcaacattgatcacaaacttaaatgtaaaatgaacaactataaaatgtcaagaaagaaggagaaaaatttttgtgacatcgagttaagctaagttttttaaaaacaataccaaaacaagctgtaaaggaaaaaactgatacattgaacttcaaaattaagaacttctgttctttggaatatatggtttcaaaatccaaaaagcaatcgcagattaggagagtgtttgtaaatcatataagacaaagaactcaataaaaataaaacaaaaaaatttaaagtggcaaaaatgtgaactttaagaagaaacatggatgtgaactttaagaagaaacatgaaaatgtgcttgatgtcattagtctttagggcaaggcaaatcagaaccaccatgacataccactatgcacctatcagagtgtctaacattacaagactgtccatatttaatgttgacaaggatgtggagcaactggt

SEQ ID NO: 569410 - DNA, 607 bp, Homo sapiens
ttttcaacaaagttaaataggttactcagtggagacagaaaatatgaacttttcaacaaatataggagagcaggtgggtatccagagacacacatgcaaaactactttctttcacacaatatgcaaaaattaactcaacattgatcacaaacttaaatgtaaaatgaacaactataaaatgtcaagaaagaaggagaaaaatttttgtgacatygagttaagctaagttttttaaaaacaataccaaaacaagctgtaaaggaaaaaactgatacattgaacttcaaaattaagaacttctgttctttggaatatatggtttcaaaatccaaaaagcaatcgcagattaggagagtgtttgtaaatcatataagacaaagaactcaataaaaataaaacaaaaaaatttaaagtggcaaaaatgtgaactttaagaagaaacatggatgtgaactttaagaagaaacatgaaaatgtgcttgatgtcattagtctttagggcaaggcaaatcagaaccaccatgacataccactatgcacctatcagagtgtctaacattacaagactgtccatatttaatgttgacaaggatgtggagcaactggt

SEQ ID NO: 569411 - DNA, 607 bp, Homo sapiens
ttttcaacaaagttaaataggttactcagtggagacagaaaatatgaacttttcaacaaatataggagagcaggtgggtatccagagacacacatgcaaaactactttctttcacacaatatgcaaaaattaactcaacattgatcacaaacttaaatgtaaaatgaacaactataaaatgtcaagaaagaaggagaaaaatttttgtgacatcgagttaagctaagttttttaaaaacaataccaaaacaagctgtaaaggaaaaaactgatacattgaacttcaaaattaagaacttctgttctttggaatatatggtttcaaaatccaaaaagcaatcgcagattaggagagtgtttgtaaatcatataagacaaagaactcaataraaataaaacaaaaaaatttaaagtggcaaaaatgtgaactttaagaagaaacatggatgtgaactttaagaagaaacatgaaaatgtgcttgatgtcattagtctttagggcaaggcaaatcagaaccaccatgacataccactatgcacctatcagagtgtctaacattacaagactgtccatatttaatgttgacaaggatgtggagcaactggt

SEQ ID NO: 569412 - DNA, 572 bp, Homo sapiens
tgagaaactcacttttaatataaaggcatacataagttaaaagaatgaagactgatataccataaaaatactaataaaaacaaaataggagctttgttatatattaatatccaacaaagtagacttcagaacaagcaggatttatcagagaagaagatgtatattatgtaataataaaaaggtaaattctacaggaaaacaaactaaccccaaatatmgttgtaccaaataacctaacttgaaaacacatgaggccaaaactggtagttttaagaggagacagagaaatccacaattataattggaagattcaacattcttctctgaatatttgatatgacacataatcaaaaattattaagggtgtaaataacctaaacaacattatcagccaacttctcctaatggatattaatagaatgttttactcaataagagcagaatacacattatgttcaagtgcacatggaacatttaccaaaatagtattgggttacaaaacagccctcaacaaatttaaaataatagaaattatataaatagaataaaattaaactgaaatcaataataac

SEQ ID NO: 569413 - DNA, 501 bp, Homo sapiens
cattcaaaaagtgacttgggtgctgttaaaagcattccattttaaaagggaaacagagcataaaagttcagaaaatttgcagcctaacaatgcagtagaraagaaaaacccattctttgattagaaattcaagctggctacagaaatttgcatagtagcaaggaacctaatgttaatccccaagaccatgggggaaatgtctccaggccatgttagaggccttcatggcagactctcccatcacaggccctgatgcccaggaggaaaaagtggttttgtgggcagggcccagggtctccatgctgtgtgcagcctaggaacttggtgccctgtgtcccagccattacagccatggctgaaaggggccaacatagagctcagtctgaggcttcagagggtggaagccccaagccttggcagcttccatgtggttttgagcttgcaggtgcacagaagtcaagaattgaggtttgggaacctctgtctagatttcagaagatg

SEQ ID NO: 569414 - DNA, 501 bp, Homo sapiens
cattcaaaaagtgacttgggtgctgttaaaagcattccattttaaaagggaaacagagcataaaagttcagaaaatttgcagcctaacaatgcagtagaaaagaaaaacccattytttgattagaaattcaagctggctacagaaatttgcatagtagcaaggaacctaatgttaatccccaagaccatgggggaaatgtctccaggccatgttagaggccttcatggcagactctcccatcacaggccctgatgcccaggaggaaaaagtggttttgtgggcagggcccagggtctccatgctgtgtgcagcctaggaacttggtgccctgtgtcccagccattacagccatggctgaaaggggccaacatagagctcagtctgaggcttcagagggtggaagccccaagccttggcagcttccatgtggttttgagcttgcaggtgcacagaagtcaagaattgaggtttgggaacctctgtctagatttcagaagatg

SEQ ID NO: 569415 - DNA, 501 bp, Homo sapiens
cattcaaaaagtgacttgggtgctgttaaaagcattccattttaaaagggaaacagagcataaaagttcagaaaatttgcagcctaacaatgcagtagaaaagaaaaacccattctttgaktagaaattcaagctggctacagaaatttgcatagtagcaaggaacctaatgttaatccccaagaccatgggggaaatgtctccaggccatgttagaggccttcatggcagactctcccatcacaggccctgatgcccaggaggaaaaagtggttttgtgggcagggcccagggtctccatgctgtgtgcagcctaggaacttggtgccctgtgtcccagccattacagccatggctgaaaggggccaacatagagctcagtctgaggcttcagagggtggaagccccaagccttggcagcttccatgtggttttgagcttgcaggtgcacagaagtcaagaattgaggtttgggaacctctgtctagatttcagaagatg

SEQ ID NO: 569416 - DNA, 652 bp, Homo sapiens
aattttaagcaaagttagaaaataaagttttccagatttttctactagcatggtagattgtgttgactatccatatgggaaactccttaaaatcttgtgcctgtgctttctcaggttgcagtatttgtcaggaatgctaactgtgtgatgcaaaagakcttgcattctgccagggtctatttaattaattatcattgaccagcattaaaagtattaatttagatttgaaaagtctcaagttagtttgggatgtagttttttttccaaccttgagaatatcctatttgaatagtttctgaattttaaaatttatttttcttatttttcctgagctcattttattttctaaggtgagatctacattttcttcctgtctttagtatccagaaacctaaataagtcctgtaaaataaaacacccatgtttggagaatgttataaagtgtggttatatagtaatgtggtcctagggccattttgaaacaagtatcccagttggcaatgcacagctcatgttactattttacttctgccacctttcttttcattgtagagttaaaaaatacttcaggaaattttactttaaaaaaaaaaaacctttttatcgcaattttaatattttatagctacattttaacttttatttcataaag

SEQ ID NO: 569417 - DNA, 547 bp, Homo sapiens
tatatattactttcatgcagtattttcagtatctgcatggatattctgctactataaattaattaggaatggtgatcccttcttaatgtaaatgctaatggccaacatgatgctatctctcctagttacttcttcaaggaatgaacagtaagaactataaatattattttttaaaaaacaagatagaagtattttcatatgatggtgtgattcctttgtcaagcgtgcctccattttgttacatattttatataatttgttagatcacatttctgcaatgacgccaacaagactatcatagtaaggaagatatttggtaccatgtttccaaattkattcagctatagtttatcatttatttatatacatgtattatcttcaagtattttctactacttcccttaagctcagtcacaggacaaaatatctgggaggaaaatatgtttcactctaaattgaagttaattgcatttctcatactttatacctgcaaaaacccacaaagcaactggactcttaccctactgattatcataactatggggat

SEQ ID NO: 569418 - DNA, 486 bp, Homo sapiens
taatcttatttttatttattcagggtatctctttgtctccttcaagtactgtctacagagggctagcaaattcaagcctgccattcttaatgcgaatacagtaaacaacaatgtcatctgatgagaaggaggaaggcgagggtgaattcaggggctggagtaaattgagtatgttttgaaatagcttctctagggaattaaataggaattcaaccattagggaataaaaggattacaaagaaaaaytgagtagagaaagaaggcattttcaatggatccagatagccagcttacatgactttctctaacagctcagcaattcctggttagacataaagagataatttgagcttaaaaggatgctaacagatggagatttgagagaacctagagtaaagtttatcttatttgtgctgtttggaggctgggcaggtcattgggctatttctttttcattatatataacatttttttgtgtgtttcatg

SEQ ID NO: 569419 - DNA, 557 bp, Homo sapiens
agtgcctcacacacagaaaaaaatgttagctattttcattattttatatattttttcttctttgacattccatgtgtcttaaaataatatgtctagataaattaaaaataatttacccagaaaaataaaaatggaagcatccaaataataagattgctctaaagtgatgcttcctttttaatgaaaaatcaaatactaaaaatgccattacaaaaattaaagaataaaaacccacaattttcaatccagccttttcagaccaaaatagttgatgactattttcctttattaattcatttaacaaatgtttgttaggaaatgtatctactcagcccttagggtacaaaggtgatcgaggcaattttacaaaattcctacttgcaaacagcttacattcctatggggagctaggcaatacagcaaatgaacagatatacaaacaaaatagygaaagagaaatgttcacatggtagcatatagacttgctgagggatgacctcttccaaaataaaaagatgtgacggtatctacccgtggcaatagaattaccatccatt

SEQ ID NO: 569420 - DNA, 612 bp, Homo sapiens
acatagtgattacatgaaaarcaaataaattggtgttgcagagcaaaaatgtcataagcacacactcaagaattagtcactttcaagctgcacttaagatctgaatagctaaggacaagctacttagcatatctaattctcagcaaactcatttcaaaattgaggataatcataacaactttctcaatatggaatggtttaatttaagcatttggcacatttcttgtcatgctaagtgtttaacaaatattagcacatcttcttccctttttttgctttttaatttgtcttctctttcttcttctgaaagtgttactagagttgaagcttgaagtaccggaagagttgaaggtgaagcacaatattatctgtgccaaggagattcaccaagagtgtaggtaattgttctagagctttaattctttgaactttgcacaaaagtaatttttttctatgttgctagaaaattttaaggatggattttctatttataaatggggaaaaacaactagccaaggggaaagatcaagctcacagttttcctaatattactgaaaaatcaagtcacagattaattgtataagaatcaataataacacaaagatcacttaa

SEQ ID NO: 569421 - DNA, 405 bp, Homo sapiens
cacatttttttttttaattttactttaagttctgggatacatatgcagaacgtgcaggtttgttacataggtatacatgtgccatggtggtttgctgcacctatcaacccatcatctaggttttaagccccgcatgcattaggtatttgtcataatgctctccctccccttgctccccacccctgacaggccccagtgtccctgcatgtcccatccatgtccctacaaaggaaatgaactcattcttttttatggctgctcttatgatgagtttgcatattgccctgcttccattctctatttgattctctttttggctgcttggtaagcacagggtaagaccaagaagtccactcttttaaaaacatatccagttkaggaatagactattatattctcattctt

SEQ ID NO: 569422 - DNA, 190 bp, Homo sapiens
gtgcaagtatctttttcatatagtgacttcttttactctgggtagatactcagtagtgggattgctggatcaaatggtggtkctacttttagttctttaaagaatctccatactgttttccatagtggttgtactagtttacattcccaccagtagtgtaaaagcattcccttttcaccaccatgataac

SEQ ID NO: 569423 - DNA, 437 bp, Homo sapiens
caaaaaattaaatacttccaaacatgcttaaaatacaacaattttgagttagactgtaaacttcttgagagaagagaccatttatgaactcctgtgtttcaatactccttttgcacaattgttcccttcatcactaccaatatttaggacagtatgggccaacagtaagagataaataatacttcttgtttaaattcttggttggtgattttatctatctcttttggggaggtgcattccagctagaataacttaatttttttatcccccagaaggatgggtgtattctttcttgttctactgctagtttaaagaacaggygacttccctgctcagattccaaattccttaggaaaacaagaagcgacaacaaaaccacaccagtaacttccactcacatgtcagttttaaaacaacttgggaaaggtcagtctatt

SEQ ID NO: 569424 - DNA, 594 bp, Homo sapiens
gaggtagatgtaactttagggtaatttttcttctttctgctcataaacaaccacattctgaggaaacctgtttgtgatttgcatcaagaaactttcaatggcctcatgttttagcagagaggaaaccagactgatgcctgtttggcagcatcattcctggtgtgcttgccaaaattttggtgaggattttgctgtcaagattaagaggtgatgcaggcttaaatgaagaacatgacccggagtccttgtgttgaaggattaggacatttccctcatgggatcatagcattctctgtgccaaaggtttgagtatacttttgaggtgattttaaattaaaggcattttatgactcaatactacgtkgcattctggtaagatgttgtcattccctaggtactcattgaagactagatattagataatattctgcacatctgaacagacttcatcttctaatgctaagagctgctattttatcttgaggcaaaataaatctaaattttctgatttattatgcatatgcttctaatgagatttatgtaatgtaaaatttgaagttattgttaaaggttgtgatttacttgttttttcta

SEQ ID NO: 569425 - DNA, 563 bp, Homo sapiens
caaacaggtagaaaagataacattgcaatgttcatctgtcacacacaagaagagagtcaactattgtgttaaatatgacaatattaatcatttaaatgaacatgaataaaacactaatgttactattgggaaaatgattgttttgatgaaaaattatgcattttttctagcacaatatttagctttatgtaatttgtgttcattgaagctgctttacaaatgtatgaattgtaagttactgatggcaaagcaaaaaagttcttctttttagacatacaaactctgccttgtcagggagtagctcaactgacttctctccctcactgtagaagaagttagttttacctccatttatgaattcaatttaatgtccctctcctataattatggctgttctttagatcctcttttgaagccattataaaattttcctagtttactcattattaaataaaatgtctagcacgcattcatatctgtatgatagtcataattttacctttcttgaaaattatctcrtaacactagtgtctgtattcaccgtgcaaagccaccattactat

SEQ ID NO: 569426 - DNA, 537 bp, Homo sapiens
aataagtggaacatattttatctaatagtacatctgtattaagaaagtatactatttacctttcacacagctactccatatttacatgaataatggattaatttgtggttggtaataatgagccttactgcattactcagactactttttgttgtaagactctttaggggcattattataatttgcaaagagtaagcttaactagkaattctatacataatttctaattccttcttatatattaacatctgatcaatatagtaattattattctcaaagttcaaaatattatgcttatttaaatataatacattttttgataaacagttgatatttaaaaggtttcattccagaagtgatttttcctttcttccacccttagttgattggcctgtgattagactggattgaatatgaaacttccaaatttgctagagtactgagttactgaccatctcaaatatatgtgtatgtaaaaaatgtatacacacatatgtgtatgtatgtgtgtgtgtatgtgtgagtgggggaagagag

SEQ ID NO: 569427 - DNA, 483 bp, Homo sapiens
tgagagcatgcatctttttaatgaatttttcaggtcactgatcaagattattgataaagattttgaaaactactcatggcagtcaacctgctactaacaccttgatctgaagacaagtgagcttgcgcttggataacttctttatttcatgtataccaagtcctccttggaatgtcaaatcctgaatgctcacaattttatgacaagtatatagatatttctgcccaagttatttcttatcttcttcatctaaaactgctctggattatctttgttgaaattgaatagttttgtcaccccattccatttaatagttttgagcaacaaatggaaaaaacaatttggggaaaataactaaccttttgctacaaaccactttcaggctgatgatattcaatgttaagttctgtcrgaacccaacaaacaatctaactgactttttcatcttctgaaattcttctgaaggattgtatgtggcctact

SEQ ID NO: 569428 - DNA, 555 bp, Homo sapiens
caaggggcatgttgatagacaacaagtaaagcggtatttggggattgaggagaatctaccagtcttatatatggaaataccattacaaaaggtgtcacagtgatttgtagatgtcatgcttttatgagcaaaacatgatcatgccagtccctgtgacagacaacaagaacaaagaaccaggattggatgggtgaagataaagggtttagttttatacttattgagttggacatgtcatttgtagttctaaaagataagggaagtcagcctgrccaacacagcaagacctcctttttactaaaaaaaaaaaaaaaaaaattatccggctgtggtggcatgaacctgtagtcccagctactcaggaggctgaggcaggaggatcacttgagccctggaggtttaggttgcagtgagcaattattacaccacttcactccggcctgggtgacagagtgagatcctggctcaaaacaaacaaacaaacaaaagaagataaggtaaggcaagaagttatgtatacagctctagaggtcagaaaataggagataaaaattt

SEQ ID NO: 569429 - DNA, 555 bp, Homo sapiens
caaggggcatgttgatagacaacaagtaaagcggtatttggggattgaggagaatctaccagtcttatatatggaaataccattacaaaaggtgtcacagtgatttgtagatgtcatgcttttatgagcaaaacatgatcatgccagtccctgtgacagacaacaagaacaaagaaccaggattggatgggtgaagataaagggtttagttttatacttattgagttggacatgtcatttgtagttctaaaagataagggaagtcagcctgaccaacacagcaagacctcctttttactaaaaaaaaaaaaaaaaaaattatccggctgtggtggcatgaacctgtagtcccagctactcaggaggctgaggcaggaggatcacttgagccctggaggtttaggttgcagtgagcaattattacaccacttcactccggcctgggtgacagagtgagatcctggctcaaaacaaacaaacaaacaaaagaagataargtaaggcaagaagttatgtatacagctctagaggtcagaaaataggagataaaaattt

SEQ ID NO: 569430 - DNA, 539 bp, Homo sapiens
tgggagatagtgcagagaagtgggggtcagaagacctggccctagctcagctcatccctccatgtttttgtgactttgagcaakccattgaactggctggacctcagttgcctaatgtataaaagaggtagtagaagaggccagctaaatcatctctaaaatttctttcattttgcaattcaaaacattgtgattaaatgtgtgtgttttaaagaaattagcaaatttaaagtgatgggaatatccaaatcactgttagtaggaacaaaaattagtacaactcatttggaaagcaatttggcaatctatgttaagagccattctatgttcatagccattgactcaataatttctttcctagaaaactattccaaaaagttttctgaaattcagaaagaaaacaatgtgctttgtattataatttttttttttttttgagatggagtctcgctctgttgcccatgctggggtgcagtggtgtgatcccgctcacttcaacctctgcctcccaggttcaagcaattcttctgcctcagcct

SEQ ID NO: 569431 - DNA, 539 bp, Homo sapiens
tgggagatagtgcagagaagtgggggtcagaagacctggccctagctcagctcatccctccatgtttttgtgactttgagcaatccattgaactggctggacctcagttgcctaatgtataaaagaggtagtagaagaggccagctaaatcatctctaaaatttctttcattttgcaattcaaaacattgtgattaaatgtgtgtgtttyaaagaaattagcaaatttaaagtgatgggaatatccaaatcactgttagtaggaacaaaaattagtacaactcatttggaaagcaatttggcaatctatgttaagagccattctatgttcatagccattgactcaataatttctttcctagaaaactattccaaaaagttttctgaaattcagaaagaaaacaatgtgctttgtattataatttttttttttttttgagatggagtctcgctctgttgcccatgctggggtgcagtggtgtgatcccgctcacttcaacctctgcctcccaggttcaagcaattcttctgcctcagcct

SEQ ID NO: 569432 - DNA, 539 bp, Homo sapiens
tgggagatagtgcagagaagtgggggtcagaagacctggccctagctcagctcatccctccatgtttttgtgactttgagcaatccattgaactggctggacctcagttgcctaatgtataaaagaggtagtagaagaggccagctaaatcatctctaaaatttctttcattttgcaattcaaaacattgtgattaaatgtgtgtgttttaaagaaattagcaaatttaaagtgatgggaatatccaaatcactgttagtaggaacaaaaattagtacaactcatttggaaagcaatttggcaatctatgttaagagccattctatgttcatagccattgactcaataatttctttcctagaaaactattccaaaaagttttctgaaattcagaaagaaaacaatgtgcttkgtattataatttttttttttttttgagatggagtctcgctctgttgcccatgctggggtgcagtggtgtgatcccgctcacttcaacctctgcctcccaggttcaagcaattcttctgcctcagcct

SEQ ID NO: 569433 - DNA, 539 bp, Homo sapiens
tgggagatagtgcagagaagtgggggtcagaagacctggccctagctcagctcatccctccatgtttttgtgactttgagcaatccattgaactggctggacctcagttgcctaatgtataaaagaggtagtagaagaggccagctaaatcatctctaaaatttctttcattttgcaattcaaaacattgtgattaaatgtgtgtgttttaaagaaattagcaaatttaaagtgatgggaatatccaaatcactgttagtaggaacaaaaattagtacaactcatttggaaagcaatttggcaatctatgttaagagccattctatgttcatagccattgactcaataatttctttcctagaaaactattccaaaaagttttctgaaattcagaaagaaaacaatgtgctttgtattataatttttttttttttttgagatggagtctcrctctgttgcccatgctggggtgcagtggtgtgatcccgctcacttcaacctctgcctcccaggttcaagcaattcttctgcctcagcct

SEQ ID NO: 569434 - DNA, 579 bp, Homo sapiens
ctcaatcccccaagtagctaggactacaggcatgcaccaccatgcccagctaatttttgtattttttagtagagatggggttttgccatgctgctcaggctgatctcaaactgctgggctcatgccatccacccaccttggcctcccaaaatgctgggattacaggcatgagccaycgcacctggcaaaaagattgattttttttttttaagttggttcttagacaagtaattaatcccctggatatactgcctcttttcctagtgtctggttagcttatacatcatcgtgatctttttaaagaaaaattttctaagtctctttatagattcccttaggaaactgaatggacctctcccttcagtgggtgttaatactcagttcagtaaatagcagaattctgaaatctcagccagggcctcccttccaggaagtatggcaaagagccctcaaaagcttggcttgctcaaaacgttagtgaaggctaaagacagatattcaaataaaatgaggcctaaaaggagatgccaccagaaacagcacctctgattacccaagtagaagccactactaccccca

SEQ ID NO: 569435 - DNA, 579 bp, Homo sapiens
ctcaatcccccaagtagctaggactacaggcatgcaccaccatgcccagctaatttttgtattttttagtagagatggggttttgccatgctgctcaggctgatctcaaactgctgggctcatgccatccacccaccttggcctcccaaaatgctgggattacaggcatgagccaccgcacctggcaaraagattgattttttttttttaagttggttcttagacaagtaattaatcccctggatatactgcctcttttcctagtgtctggttagcttatacatcatcgtgatctttttaaagaaaaattttctaagtctctttatagattcccttaggaaactgaatggacctctcccttcagtgggtgttaatactcagttcagtaaatagcagaattctgaaatctcagccagggcctcccttccaggaagtatggcaaagagccctcaaaagcttggcttgctcaaaacgttagtgaaggctaaagacagatattcaaataaaatgaggcctaaaaggagatgccaccagaaacagcacctctgattacccaagtagaagccactactaccccca

SEQ ID NO: 569436 - DNA, 529 bp, Homo sapiens
ttaatctcctttggcaactccctcacagacacacccaggaaccgtactttgsgtccttcaatccagtcaagttgatgctcaatattaaccatcacactgtctctcagaacaatcattctccttaacctggaaccctttcctcattgctgtttacttaccttatcaggactccacaataaggttggttagagatttgggagcaagatcactcaagttcaaatcccagctttctcacttactaagtcagctggctcttccttaagtggtttaacccctaactccatgcttcagttttctcacctgtaaaatggtcattaaaaatacttgccccttaaggactgtcaagagaattatgttattacatgtggaaatgtgataatgatataggagttaaaaagaaattatttagacagatagggtaagaaagtcctcagtaaggttttcccttgaatgaaaagcagccccaaatcatttcttttataacaaaaaaggagcctaaaaaaccaagccacagcatagataagcaagc

SEQ ID NO: 569437 - DNA, 529 bp, Homo sapiens
ttttagatacaggagtcaaagccttgtaactcaatgtcacaaaaactttaaaagcatacacagaaagatatacaaatgtagtaaccttaatttaaaagaaaaaaagtgttttggctgggtgtggtggctcacacctgtaatctcagcactttgagaggcctaggcaagcagatcacacgaggtcaggagtttgataccagcgtggccaacatggtgaaaccctgtctatactaaaaatacaaaaattagccagtgtggtggtgtgtacctgtaatcccagttactgtggaggctaaggcaggagaatcacttgaatccaggaggcagaggtttcagtgagccaagatcttgccattgcactccagcctgggtgacagaatgagattccatctcaaaaaataaataaataaaaataaaatttttaatctcagtttttttataagtaaactaaaactgaataataatggcacagaaatgatttcaataaaatgcaaaatctgttaggccrgttaaaaaaggcaaaagaaaa

SEQ ID NO: 569438 - DNA, 426 bp, Homo sapiens
ttcccatcaaaataccaacatcagttttcacagaattagaaaaaacaatcctaaaatccatatggaatcaaaaaagagcccaaatagtcaacacaaacctgagctaaaagaaaaaatctggaggcatcacattaccagatttcaaattatgctataaggctatagttaccaaaacagaatcatactggtataaaagtaggcacatagaccaatggaacataatagagaatccagaaaagaggccaaatatgtatagccaactgatcttcaacaaagcatacaaaaacgtaaattggggaatgggcaccctatttaataaatggtcctgggaaaactagtaagccacatgtagaagaatgaaactgtatcccaatctctcactatayacaaaaatcaactcaagatggatcaaagacttaaatctaa

SEQ ID NO: 569439 - DNA, 694 bp, Homo sapiens
acatttctcagaagaagatatacaaatggccaagaaacatataaaaatatgctcaacatcactaatcatcagggaaatgcatttttttgtttttgtttttgagacagagtctctgtcacccaggctggagtgtagtggcatgatcttggctcactgcaacctccgcatcccgggttcaagtgattctcctgcctcagcctcccaagtagtttggattacaggcatgtgccaccacacctggctaatttttgtatttttagtagagatggagtttcacgatgttggcctggctggtctcgaactcctgacctcaagtgatctgcccgcctcccaaagtgttgggattacgggcgtgagccactgcgcctggcagggaaatgtaatttaaaaccacaatgagataccactttattccttcagaatggcyattattaaaaagtcaaaaaataatagatgttggcatggatatcgggaaaagggcacttgtacattgctggtgggaatgtaaatgaatacaccctctgtataaaacagtatagagattccttaaagagctaaaagtagatctacaattagatccaggaatcccactgttgggtatccacccaaaggaaaaagagtcattatatgaaaaagatacttgcacacatatgtttatagcaggcaattcacaattgtaaagatgtgaaccaac

SEQ ID NO: 569440 - DNA, 417 bp, Homo sapiens
tttggggacctggtgtggaaactcacaccygtaatcccagcactttgggaggcgggggtaggtgcatcacttgaagtcaagagtttgagatcagcctggccaacatgatgaaactgagtctctacaaaaattagccaggtgtggtgggtcacacttgtaatcccagctagttgggaggctgatgtgggaggatcacttgaacccaggagacagaggttgcagtgagctaagttcatgccactgcacttcagcctgggcaacagaatgaaactccatctgaaaaaaaaaaaaaaaaaaagagagagaagctgttgggctgagataatggggttttctagatatagggtcatgtcatcttgtagacaaggatagtttgacttcctctcttcctatttaaacacactttctttctttctt

SEQ ID NO: 569441 - DNA, 474 bp, Homo sapiens
tcataatgttcttaacttcctttaggatgattctatattttttattattaacttgctttgctttgtcatttgtaaactataagtgactttattattattttagtgctaattcacattacatgtccttggttaattaaaatctaacgttcattgccaatactttcctcttttcagccaacactaaaaccttataatattttagttttatttactacttttatgatttttaatttatttttaataatacttatgtatactctgttattaatatgctattataaatattattattttatctggtcagtatttatttatgtttatcacacatttaccttttggtttctttttattctttcctgagtctttaaccttccataatatttatgatttgtttcagatgaaaaatrtctttattataatatttctttcagtgcaatgtctgcagtataatattttgtttttgagtttttgaac

SEQ ID NO: 569442 - DNA, 537 bp, Homo sapiens
aaaaaataatattccaagaaaaggaagaaagaacattccaaaaaagggacctaagcaaaaatgccatggtaggtaacagaaggtaaatgcctcttaatgcactaattcacttggcagtattagagggatcagacaggcaatgcaagagtgtcmccatagtagctttaatttacaaagtatgagagagcctaacattaaaacaatctacatatattcctatttctaaattaattgaatagataagaaacattctttatttaaaatagtgaaatatttaatttcctttggaatgtgctttgtattgaaattcaaatagaatttgtttgatgtgacattgtgcagattggattatggaagggctatggagcattctctgactgttggttcatctccatctaaaagatgaacaatacttcctagctatgaatattgcaaaatccaaatcacattgtttctcttaaaatttctagagtagacattcttctgaagctagagtaaattaggcatgttccaagatggcgatgtctaaaaacaagt

SEQ ID NO: 569443 - DNA, 622 bp, Homo sapiens
caccaacagtgtacaaggttttccttttctccacatccctgagattaatccctcttggccgggatgaattatctttttaatgtgttgttgaacttggttttctagtattttgttgaggattttcataaawgtttatcggggatattggcctctagttttctttttctttttttttttttttttgatatgtctttggttttggtatgagggcaatattgacctctagaatgggtttgtattctctcttcctctatttttcaaagtggtttgagtaggattggtattagtctataactgtttggtaaaatttagcaatgaagccatcgggtcctggacttttctttggtgggagaattttttacaggttattacttgctattggtccattcaggttttgaatttcttcatggctcaatcttcacaggttatatttgtctaggaatttatccatttcttgtaggttttccaatttattggcatatgatttcttatagtagcctctaataatcctttgaatttttatggtatacgttgtaatgtctcctttttcaactctaattttatttatttgggccttttttcctgttagtctggctaaaggtttgtcaattttgttgatttt

SEQ ID NO: 569444 - DNA, 622 bp, Homo sapiens
caccaacagtgtacaaggttttccttttctccacatccctgagattaatccctcttggccgggatgaattatctttttaatgtgttgttgaacttggttttctagtattttgttgaggattttcataaatgtttatcggggatattggcctctagttttctttttctttttttttttttttttgatatgtctttggttttggtatgagggcaatattgacctctagaatgggtttgtattctctcttcctctatttttcaaartggtttgagtaggattggtattagtctataactgtttggtaaaatttagcaatgaagccatcgggtcctggacttttctttggtgggagaattttttacaggttattacttgctattggtccattcaggttttgaatttcttcatggctcaatcttcacaggttatatttgtctaggaatttatccatttcttgtaggttttccaatttattggcatatgatttcttatagtagcctctaataatcctttgaatttttatggtatacgttgtaatgtctcctttttcaactctaattttatttatttgggccttttttcctgttagtctggctaaaggtttgtcaattttgttgatttt

SEQ ID NO: 569445 - DNA, 611 bp, Homo sapiens
attgcccaccttctgaagcctacttckgtcaattcgtcaaactcattctctgtccagttttgttccctttctggtgaggagttgtggtcctttggaggagaagaggcaatctggtttttggaattttcagcctttttgtgctggtttctcgccatctttgtggaagtatctacttttggtctttgatattggtgaccttcggatggggtctttgagtggatgtgctattcctttctgtttgttagttttccttctgacagccccctctgctgaaggtctgctggaatgtgctgtaggtccactcctgaccctgtttgcctgggtatcaccagcagaggctgcagaacagcaaagattgctgcctgatctttcctctggaagcttcgtcccagaggggcacctgccagatgccagccagagctctcctgtatgagatgtctgtcggcccctactgggagatgtctcccagtcaggatacacgggggtcagggacccacttgagcaagcagtctgaactttagcagagctcatacgctgtgctgggaggtccactgctctcttcagagctgtcaggcagggatgtttaagtctgctgaagctgtgcccacagc

SEQ ID NO: 569446 - DNA, 611 bp, Homo sapiens
attgcccaccttctgaagcctacttctgtcaattcgtcaaactcattctctgtccagttttgttycctttctggtgaggagttgtggtcctttggaggagaagaggcaatctggtttttggaattttcagcctttttgtgctggtttctcgccatctttgtggaagtatctacttttggtctttgatattggtgaccttcggatggggtctttgagtggatgtgctattcctttctgtttgttagttttccttctgacagccccctctgctgaaggtctgctggaatgtgctgtaggtccactcctgaccctgtttgcctgggtatcaccagcagaggctgcagaacagcaaagattgctgcctgatctttcctctggaagcttcgtcccagaggggcacctgccagatgccagccagagctctcctgtatgagatgtctgtcggcccctactgggagatgtctcccagtcaggatacacgggggtcagggacccacttgagcaagcagtctgaactttagcagagctcatacgctgtgctgggaggtccactgctctcttcagagctgtcaggcagggatgtttaagtctgctgaagctgtgcccacagc

SEQ ID NO: 569447 - DNA, 611 bp, Homo sapiens
attgcccaccttctgaagcctacttctgtcaattcgtcaaactcattctctgtccagttttgttccctttctggtgaggagttgtggtcctttggaggagaagaggcaatctggtttttggaattttcagcctttttgtgctggtttctcgccatctttgtggaagtatctacttttggtctttgatattggtgaccttcggatggggtctttgagtggatgtgctattcctttctgtttgttagttttccttctgacagccccctctgctgaaggtctgctggaatgtgctgtaggtccactcctgaccctgtttgcctgggtatcaccagcagaggctgcagaacagcaaagattgctgcctgatctttcctctggaagcttcgtcccagaggggcacctgccagatgccagccagagctctcctgtatgagatgtctgtcggcccctactgggagatgtctcccagtcaggatacacggggrtcagggacccacttgagcaagcagtctgaactttagcagagctcatacgctgtgctgggaggtccactgctctcttcagagctgtcaggcagggatgtttaagtctgctgaagctgtgcccacagc

SEQ ID NO: 569448 - DNA, 654 bp, Homo sapiens
tcttttctcaacattagaccatgtgctccatcctatacagcttataagaagaccctgaatgggaagttactgagctcttacatatctatttagaaagcagcattttgtttctcatcttatctaattttctcttggggaagcatataggtacaggtggttatgacrtaagatcaggttgtttcttcattcaagactgtaagagaatcacaaatacaacgctaacctcacaaatgtgaccgtaaccgctcactgattcctaagggggcaccagctcattcagcacttctcatttcctcacacagcccctcaaccagcaggaatgagattcttcactgcacagaacactcaaggcaggtgtggttctggcctgaaagagagattgtccagttcttacaaagtgctggttggcctcagttttatgctgttagtgccaatacagtgcttttcatacaaactgaggactaaactctgattttttttttttatcttgcccaaattcctatctaaggggtctggggagtcatgccctacaaaccaaaaattctcatcagatgtgttttatttaaccctgtaaatagtggcttactttccaatctgactctggcataacaaggaagaaaatcaaaatattttaccccaaaacatgtttctcta

SEQ ID NO: 569449 - DNA, 654 bp, Homo sapiens
tcttttctcaacattagaccatgtgctccatcctatacagcttataagaagaccctgaatgggaagttactgagctcttacatatctatttagaaagcagcattttgtttctcatcttatctaattttctcttggggaagcatataggtacaggtggttatgacgtaagatcaggttgtttcttcattcaagactgtaagagaatcacaaatacaacgctaacctcacaaatgtgaccgtaaccgctcactgattcctaagggggcaccagctcattcagcacttctcatttcctcacacagcccctcaaccagcaggaatgagattcttcactgcacagaacactcaaggcaggtgtggttctggcctgaaagagagattgtccagttcttacaragtgctggttggcctcagttttatgctgttagtgccaatacagtgcttttcatacaaactgaggactaaactctgattttttttttttatcttgcccaaattcctatctaaggggtctggggagtcatgccctacaaaccaaaaattctcatcagatgtgttttatttaaccctgtaaatagtggcttactttccaatctgactctggcataacaaggaagaaaatcaaaatattttaccccaaaacatgtttctcta

SEQ ID NO: 569450 - DNA, 654 bp, Homo sapiens
tcttttctcaacattagaccatgtgctccatcctatacagcttataagaagaccctgaatgggaagttactgagctcttacatatctatttagaaagcagcattttgtttctcatcttatctaattttctcttggggaagcatataggtacaggtggttatgacgtaagatcaggttgtttcttcattcaagactgtaagagaatcacaaatacaacgctaacctcacaaatgtgaccgtaaccgctcactgattcctaagggggcaccagctcattcagcacttctcatttcctcacacagcccctcaaccagcaggaatgagattcttcactgcacagaacactcaaggcaggtgtggttctggcctgaaagagagattgtccagttcttacaaagtgctggttggcctcagttttatgctgttagtgccaatacagtgcttttcatacaaactgaggactaaactctgattttttttttttatcttgcccaaattcctatctaaggggtctggggagtcatgccctacaaaccaaaaattctcatcagatgtgttttatttaacmctgtaaatagtggcttactttccaatctgactctggcataacaaggaagaaaatcaaaatattttaccccaaaacatgtttctcta

SEQ ID NO: 569451 - DNA, 584 bp, Homo sapiens
gtttggcagttacctcttcactcttctcctctctcctgccgccatgtaagacgtgccttgctttccctttgcyttccgccatgattgtaagtttcctcaggcctctccagccatgtggagctgtaagtcaattaaacctcttttgtttatattttataaattattgtttataaattacccattctcaggtggtatctttataaccgtgtggaaatggactaatatacctgtctgctggcctaccctgcagattttggatttatcaagccaccgcaatcacatgaaccattctgtttttaaaaaactctccctatataacacaatccccaacttacaatggttccaagtacaatttttcaactttacgatggcacaaaagtgataggcattttagaaaccatacttaacgtactcacgcaaccattctgtttttcactttcagtacaatagtcaataaattatgtgagatattccacactttgtgttaggttattttgcccagttgtaggtgaatgtaagtgttctgtttaaagtagggtagagtaagctatgatgttcagtaggttaggtatattaaatgaatt

SEQ ID NO: 569452 - DNA, 598 bp, Homo sapiens
gtctcaaaacaacaaaacaaaacaaaaacaacaacaaaaaaacggaagtggctgtttcctcagtctggtgatttctgccccagggagaagcaaggcacacttggtttctcttatggcccaaaggaagtgtgtgggggagaaggggagctgsggcgggggtgctggcctaatgtcctgtgtggactagggttacagcagcccggtttgaagcctctggtcgtgggaatggcttcttgggagagctccacgtgtcaggaaattagttatccgatgtagaggtaataataggacatgcctggcaatgtttgagggcactgagaaggcaatgagacagaaggggggttttttttttttttttttttttttttgcttgtctctgccaagccaaaaatgtaggccatcatgaacagtctggtttatagagaaactaggggtcagggggtgaaaaggagacattctgtttgggggcttagttttcatttttgcattttttgtggggctacagatttgccattggaggtgcaggttcaggccagttggtctgtaaaagtcccttcctggataactttctataattattgtctttggcttaaagcac

SEQ ID NO: 569453 - DNA, 528 bp, Homo sapiens
catctttctttgcccccacttatccctctgctcttcctttctttctttttcttattttatgaaagagtctcactgtgttgcccaggctacagtgcagtgatacgatcttggctaacagcagcctccacctcccaggctcaaaggatttttgtgtcccagcttcctgagtagctgggactgtaggcgctcaccaccatgcccagctaatttttgtgtttttagtagagacagggtttcaccatgttggccagcctggtctcaaactcctgatctcaagtgatccacctgccttggcttcccaaagtgtggacctaagattacctaggtgccaaggcaagagactgaaggcacaaagtgtttcagtataataaagaaaatagttacaataagaagagtcataatacaaattagatacagagatgatcatggacaattatcaatcattattaatcattagcttttaatattactctttgttgcattattaatataacctaggaataacyggcaggtatagggtcaggtgct

SEQ ID NO: 569454 - DNA, 569 bp, Homo sapiens
tttgtttgtttgcttgtttttgtgagatggagacttgctctgccacccaggctgcagggcagtggcatgatttcggctcactgcaacctctacttcccaggttcaagtgattctcgtgcctcagcatcttgagtagctgtgactacaggtgcatgccaycacgcccagctaatttttgtatttttagtagagaccaggttgcaccatgttggccaggctggtcttaaactcctgaccttaggtgacctgctcatctcaggttcccaaagtgctgggattacaggcatgagccaccatggtttgatattcctttaaaaaattatatgtaggccaggtgtggtggctaatccctgtaatgctggtactttgagggtccaaggcaggaagatcctttgcatcaaggaatttgagaccagcctgggaaacagtgaaatcccatttctccaaacaacaacaacaacaaaactagttgggattggtggctcatgcctgtggtcctagctactcgggaggccaaggtacgaggatcacttgacccccggaggtcaaggctacagttagaggagatc

SEQ ID NO: 569455 - DNA, 577 bp, Homo sapiens
  misc_feature 388: n = A,T,C or G
aaaaaaaaaaaaaaaaagcaaacacagggttttctctacagacatgtcagatattatgttcaacatacgagctgatatttagtctctagatgagctaagatacaagtggtgtttcagagaggacaaagtcraatggctttcaaagaaaagtccgaatctaaaaactatcatgattggtcagtctcagtggctcatgcctgtaatcccagcacttgggagaccgaggtgagtggatcacgaggtcaggaattcaagaccagcctgggaacatgctgaaaccatatctctataaaaatacaaaaaacttagccaggcgtgacagcgaatgcctgtaatcccagatactccggaggttgaggcaaaagaattgcttgaagccggaaggcanaggttgcagtgagctgagatcccgccactgcaatacaacctgggcaacagagagagactccatctcaaaaaaagtgcagagtccagccgggctggctgtctcccatttggaatgccagcaatttgggaggccaagaggggaggatcactggaggccaggatatcaaggctgtagcaagctatgattgca

SEQ ID NO: 569456 - DNA, 256 bp, Homo sapiens
ctgccaacctcgctgcagtacagtggcacggttttgattcgctgyaacctctacctcccaggtttaagtgattctcatgcctcagtgtcccaagtagctggaactaaaggtgcacacccccacccctggctaacttttgtatttttagtagagatggggtttcaccatgttagccagggtgctcttgaactctgatcttagatgatccactcacttcagtcttccaaagtgctgtgggatgagacaccccgggttt

SEQ ID NO: 569457 - DNA, 514 bp, Homo sapiens
ggtttcactatgttgaccaggctggtctgaaactcaagactcatgatccacacgcctcagccttccaaagtgctggaattacaggcatgagccactgcgtccagtcagtattctgaatttgattatgtaaaactcacctttactagtgaattttactttcatatgatttaatggtcataattagtattcttttgcttccagttgaagcattttcttaagcatttcttgtaaggctggtctagtggtgatgaattctctcagcttttgcttgtctggaaaagactttatttctcttcatttctgaaggataatcttgctgagtatggtatcttgactgacagttcttttttatttttcaacacttygaatatatcatcccatcctctcctggcttgcaaggttgctgctgaaaaaacatttttgatagtctaatggggagtcccttatcacatataagggaattatgtgactggacacttttctcttgctgcttttaaaattctctgtctttgac

SEQ ID NO: 569458 - DNA, 595 bp, Homo sapiens
aggggggagggggagagagaaagaggaacagaaaagataactattgggtactgggcttaattcctgggtgatgaaataatatgtacaacaaacaccccatgacacatgtttatctacgtaacaaatcttcatatgtacccccgaaccttaaataaaagttataaaaagagaattaaaaaatagaaaaaagtaacaatgaaatggaatatggcataatcaggaactaccctggacaaatggaatacatggtcaccctacaaaagtaacacatgatactatgagtcagagtacagaccctcactggtcacactgaagacatgtttagtaagactgcacacacatttgtgatgctaaaatgtcaaaattaaatgtgacaggaatattggagaagaatcaaaacctgaaatgtgatattttatatctaactgtatatcatcatttggyatattaaaaaattctattatgtattcatcttatttgtattttaccctatcagatgagattatttttaaaaatagtatcctaaaaaaaggtgcctatttggagcttgcagtgagccaagattgcaccactgcactccagcctggggcgacag

SEQ ID NO: 569459 - DNA, 450 bp, Homo sapiens
tcttcagtggtttagttgacctggttgcttttatccactgtacctacttcatggaaaatcaaagaaagatgttctgagttgaawttcagttagatcccaagcacagtagaagcagagtataggttgaaacccaaccctatccacttagacaatatttctttttgtaagacttaatatgcatggggggtttattttgaataaaaacctaaggagggtgtctggctgtctcctcattttcttcatgcatatcatcattattttgaaccctcaactatatggacaatgagaattttcattcctggattaagactcttcactttctccttcaccattactattatagcaaataacagcttttgctataatatgaacatgtaattataccttgaagatttgttcataagcatcaaattctatagtaaaaataaatcatattttacaaattacact

SEQ ID NO: 569460 - DNA, 363 bp, Homo sapiens
tctccttaaaaatcttccagggacttcctttgacatgcagaatctaatccaaattcttcacaatagcctatatgaaagtataacttgctgttacaaatttcccttttccaattcctgttattcctttgatttctcctacttccttttcacttgtttatttcaactcagccatgctgggctcyttaatgttccttagctacactagacatgctcaggcctcagagtccttggatttaatattgtttctgtgtagactgtttccctgcagatattcatatgactctcttcttccctttattcagatttcttatcaaaatcacctcctctgagaagtattcctggcaaaagagtatgcacacattg

SEQ ID NO: 569461 - DNA, 363 bp, Homo sapiens
tctccttaaaaatcttccagggacttcctttgacatgcagaatctaatccaaattcttcacaatagcctatatgaaagtataacttgctgttacaaatttcccttttccaattcctgttattcctttgatttctcctacttccttttcacttgtttatttcaactcagccatgctgggctccttaatgttcyttagctacactagacatgctcaggcctcagagtccttggatttaatattgtttctgtgtagactgtttccctgcagatattcatatgactctcttcttccctttattcagatttcttatcaaaatcacctcctctgagaagtattcctggcaaaagagtatgcacacattg

SEQ ID NO: 569462 - DNA, 363 bp, Homo sapiens
tctccttaaaaatcttccagggacttcctttgacatgcagaatctaatccaaattcttcacaatagcctatatgaaagtataacttgctgttacaaatttcccttttccaattcctgttattcctttgatttctcctacttccttttcacttgtttatttcaactcagccatgctgggctccttaatgttccttagctacactagacatgctcaggcytcagagtccttggatttaatattgtttctgtgtagactgtttccctgcagatattcatatgactctcttcttccctttattcagatttcttatcaaaatcacctcctctgagaagtattcctggcaaaagagtatgcacacattg

SEQ ID NO: 569463 - DNA, 363 bp, Homo sapiens
tctccttaaaaatcttccagggacttcctttgacatgcagaatctaatccaaattcttcacaatagcctatatgaaagtataacttgctgttacaaatttcccttttccaattcctgttattcctttgatttctcctacttccttttcacttgtttatttcaactcagccatgctgggctccttaatgttccttagctacactagacatgctcaggcctcagagtcyttggatttaatattgtttctgtgtagactgtttccctgcagatattcatatgactctcttcttccctttattcagatttcttatcaaaatcacctcctctgagaagtattcctggcaaaagagtatgcacacattg

SEQ ID NO: 569464 - DNA, 514 bp, Homo sapiens
cttttttctatatttaaatttttttctgtatagtctggtttctatttaacaagcactgtaattagatggggcaaaatttgtttagtgtgatctggtcatagttaactggtgatattatggtgaaaagctgtatcatatttttccaattccatttctagtctctaaaaccatttcttcctcacacactgtgttttgaagacagaagttaagtgtttttgagtctggttccaggaagcctaaaataacataccaattattttgattaaagaaaaaggttgtgggtcattttcctcattagaytatgtcagttatggtattgctgaacatctattattttttctcccaaataaaaatgggctctatataattttattttagtgttgaatggaaaaagtgtggtccagaagccttgttattagttttcctttgtaaaatgtctctcagttaattagaatcgtatccatttataaatatttcattgcaaatttattaaataagctttaagccttgtcac

SEQ ID NO: 569465 - DNA, 649 bp, Homo sapiens
attgtatttgatcaatatagtgtttttaattagtttattcgttttcactggtagatgtttcataggttcatcaacttatattatttcctcagtttattagttttaatttctagaggaagatatttgctatgacaggagttggtagcattgtttcaatatctatgtaatagtcttgcccaatcaataagagctctttcaagaataattcctggcagacctgtttcaggaacaagaatgtgttactatttatggtaactactttaccatttcaaaaatggtagaatttcttcactggtttttctgtgraagtatccaactaagagcttgcttttcaattgtatatgattgtgttctaatagactcatctgggtccatttcctatgttttatcatcttttaaatctttagacaacttggcaagtcttgtattactattcagttgatattggatattatgctcactactggggtgacaggatcaatcatgccccacacctcagcatcatacaacatacccatatatcaaacctacacgtgcgctgattgaatctaaagtttaaaatttgaaattaaaataaataaagttcagttgagtttgtacttataaaacatcatgcattagcattttatacgctggtcaagctctttca

SEQ ID NO: 569466 - DNA, 424 bp, Homo sapiens
ctgtctttctttggaggtgctctttcctaaactcatgtctactttttcttttctatttttttttcttttatttttagagatgggatctctcttctgtcactcaggctggagcatagtggtgtaatcaatgatagttcactgcagccttgaactcctgggctcaagggatcctcctatctcagcttcctgagtagtcgggactaaaggtatgcacacccatgttccgtgttctgctaattgttttttttgtttttttgttttttttttttgagagccagggtctcactttatagccctggctggtctcaaactcctgccttcaggaaattctcccacctcggcctcccagagtgttagtattataggcgtgagccaccttatttttttmctgaaaaaaatatgatgtacacgttttgatatatgt

SEQ ID NO: 569467 - DNA, 610 bp, Homo sapiens
tgactatgtaaatcatcatgaataaaaatataacatcactttcctatttataaaactctttattttcagatatctgaaaaattctaaaaacaagcagcacagaagaagcagttcacatgattttctatcttccattgtccttaattgatgcaaaayagagactatccagattttctggcctatatttcagtaagcaaagtatagagtgggtgaccaccttgatttgttttcgtaatataatgtcttatacatatagaaatgattttaaaaatgatttatttggatgtaaagcactcctacttctgctcattatcattacaaaggatatagttgtacctattggaatggcaattataattttaatattctttagaaattttcactataaaaattatgtgacactttcaaaacactgaaaaagatttgtcttaagaaacttttaaagggatagagtgaaacttatttcattatttttactaataaacttcaatctcaatcaatggtaaaatatccaagttagggccaggcacggtggctcatgctgcaatcccagcactttgggaggcccaggtgggcagatcacttgaggtcaggagtttgagaccagcct

SEQ ID NO: 569468 - DNA, 610 bp, Homo sapiens
tgactatgtaaatcatcatgaataaaaatataacatcactttcctatttataaaactctttattttcagatatctgaaaaattctaaaaacaagcagcacagaagaagcagttcacatgattttctatcttccattgtccttaattgatgcaaaatagagactatccagattttctggcctatatttcagtaagcaaagtayagagtgggtgaccaccttgatttgttttcgtaatataatgtcttatacatatagaaatgattttaaaaatgatttatttggatgtaaagcactcctacttctgctcattatcattacaaaggatatagttgtacctattggaatggcaattataattttaatattctttagaaattttcactataaaaattatgtgacactttcaaaacactgaaaaagatttgtcttaagaaacttttaaagggatagagtgaaacttatttcattatttttactaataaacttcaatctcaatcaatggtaaaatatccaagttagggccaggcacggtggctcatgctgcaatcccagcactttgggaggcccaggtgggcagatcacttgaggtcaggagtttgagaccagcct

SEQ ID NO: 569469 - DNA, 610 bp, Homo sapiens
tgactatgtaaatcatcatgaataaaaatataacatcactttcctatttataaaactctttattttcagatatctgaaaaattctaaaaacaagcagcacagaagaagcagttcacatgattttctatcttccattgtccttaattgatgcaaaatagagactatccagattttctggcctatatttcagtaagcaaagtatagagtgggtgaccaccttgatttgttttcgtaatataatgtcttatacatatagaaatgattttaaaaatgatttatttggatgtaaagcactcctacttctgctcattatcattacaaaggatatagttgtacctattggaatggcaattataattttaatattctttagaaattttcactataaaaattatgtgacactttcaaaacactgaaaaagatttgtcttaagaaacttttaaagggatagagtgaaayttatttcattatttttactaataaacttcaatctcaatcaatggtaaaatatccaagttagggccaggcacggtggctcatgctgcaatcccagcactttgggaggcccaggtgggcagatcacttgaggtcaggagtttgagaccagcct

SEQ ID NO: 569470 - DNA, 582 bp, Homo sapiens
gaattccagccttggaaaaatcttaagctcaagcttctctaaccacgtaacagtactaataacataatccaaaaatgaatttaaagttayagaagggagtacattttatcatgttgacaaattgcatgttgaggctttttatttttattttcattgcaacattttcattagttaagctattcttttttttttttctttgagacagagtcgtgttctgttgcccaggctggagtgcagtggcgtgatctcatctcactgcaacctccacctcctcagttgaagccattctcatgcctcagccccctgagtagatggaattgcaggcatgcactaccatgcttaggtaatttttgtattttttagtagagacaggatttcaccatgtttaccacactggtctcgaactcctgacctcagttgatccgactgcctcagcctcccaaagtactggggttacaggtgtgagccacttcatctaaccaagaaactcattcttcccattactgggtatatacccaaaggattataaatcatgctgctataaagacacatgcacacgtatgtttatagaggcactactca

SEQ ID NO: 569471 - DNA, 582 bp, Homo sapiens
gaattccagccttggaaaaatcttaagctcaagcttctctaaccacgtaacagtactaataacataatccaaaaatgaatttaaagttacagaagggagtacattttatcatgttgacaaattgcatgttgaggctttttatttttattttcattgcaacattttcattagttaagctattcttttttttttttctttgagacagagtcgtgttctgttgcccaggctggagtgcagtggcgtgatctcatctcactgcaacctccacctcctcagttgaagccattctcatgcctcagccccctgagtagatggrattgcaggcatgcactaccatgcttaggtaatttttgtattttttagtagagacaggatttcaccatgtttaccacactggtctcgaactcctgacctcagttgatccgactgcctcagcctcccaaagtactggggttacaggtgtgagccacttcatctaaccaagaaactcattcttcccattactgggtatatacccaaaggattataaatcatgctgctataaagacacatgcacacgtatgtttatagaggcactactca

SEQ ID NO: 569472 - DNA, 582 bp, Homo sapiens
gaattccagccttggaaaaatcttaagctcaagcttctctaaccacgtaacagtactaataacataatccaaaaatgaatttaaagttacagaagggagtacattttatcatgttgacaaattgcatgttgaggctttttatttttattttcattgcaacattttcattagttaagctattcttttttttttttctttgagacagagtcgtgttctgttgcccaggctggagtgcagtggcgtgatctcatctcactgcaacctccacctcctcagttgaagccattctcatgcctcagccccctgagtagatggaattgcaggcatgcactaccatgcttaggtaatttttgtattttttagtagagacaggatttcaccatgtttaccacactggtctcgaactcctgacctcagttgatccgactgcctcagcctcccaaagtrctggggttacaggtgtgagccacttcatctaaccaagaaactcattcttcccattactgggtatatacccaaaggattataaatcatgctgctataaagacacatgcacacgtatgtttatagaggcactactca

SEQ ID NO: 569473 - DNA, 582 bp, Homo sapiens
gaattccagccttggaaaaatcttaagctcaagcttctctaaccacgtaacagtactaataacataatccaaaaatgaatttaaagttacagaagggagtacattttatcatgttgacaaattgcatgttgaggctttttatttttattttcattgcaacattttcattagttaagctattcttttttttttttctttgagacagagtcgtgttctgttgcccaggctggagtgcagtggcgtgatctcatctcactgcaacctccacctcctcagttgaagccattctcatgcctcagccccctgagtagatggaattgcaggcatgcactaccatgcttaggtaatttttgtattttttagtagagacaggatttcaccatgtttaccacactggtctcgaactcctgacctcagttgatccgactgcctcagcctcccaaagtactggggttacaggtgtgagccacttcatctaaccaagaaactcattcttcccattactgggtatatamccaaaggattataaatcatgctgctataaagacacatgcacacgtatgtttatagaggcactactca

SEQ ID NO: 569474 - DNA, 569 bp, Homo sapiens
  misc_feature 498: n = A,T,C or G
cccctttacctttgcacatgatatcaattgtaatgtgttaactcttgctttagtttgaatggattctcatctcatraatgaggaaactgaaaactctggaaaagtaaatgattttacctgctgcacacacttaatcatcagtgctgatatttgaactcagtagcagagctgatatttgaacaaaagtttgttgaaaactaaatccatgctcatgttttaaagtgtgaagctatgtatccaagaagttgttttaatttgtgttatggtttttttcagtctcacatggaaaaaaactacaacttgaacatagtattttataaatgtttctagattttatagggcattgacatttaaacctctaattagatatatgcatatctcaaaatatagtccactactggcatcaaaaaaattaagataaaataaaatcgaagtcttggaattattgttgctttgctttcttctttagtcatattataagcaagtacccccatcttncctaagagatagtttaatttttctctctcttcttttcttgttcccctagtttcccactttcaacttagtgg

SEQ ID NO: 569475 - DNA, 575 bp, Homo sapiens
ccagtccacaaggaaataagtataaccactgagtttagaaacttctatagccacataatcacagtgtctaagaaactgcctttgtcattgaactcagatgttgttgaactgacgtgatggttcacatttgatgaaagctgtgtcatagacatatgtgtggtagaaccacattacattaaatattttaagattagttcatgaactaaacccaaatgtttaaataaaatctaaagctctaaaatccatttccttcaayaaaagatcattttactataactttacagggaaatttttagaaatgattatcagtgaacacttgaagatgaattttgaaactatagaatcatttattttattttgaataaaagttaaaaataataacttcggcttgccgaaatgcttggaaatgtcttctattcctgtcaacatatttatgaagtgcatttctctcctctaaatgttactaaaacaaaacataggagagttatatgtacattacttcttgggagtagcattgtcatcaatccagcctagattatgtaaattcattagctagaagcaggctcatttgtcac

SEQ ID NO: 569476 - DNA, 435 bp, Homo sapiens
ttcagcagtttggaaactttttctatagattctccacagggacaattgggagcccattgaggcctatattggaaaactgatatcctgcgataaaaactagaaagaagctatctgtgaaaaggctttgtgatgygaggattcatcacagtgagttaaacctttaatttgattcagcaagttggaaactctgtagaatctgcacagggaaatttcaggaaatagttgagggcccattcaggccaatattgaaaaacaggtatcctgcgataaaaactagaaagaagctatctgtgaaacggttttggatatgtgcattcatctctaagaggtaaacctttcttgtgattcagcagttgaaacactctttccgtagaacctgcacagggttatttgaaagtcatttgatgcctatcatgaaaaaacaaatataccaca

SEQ ID NO: 569477 - DNA, 435 bp, Homo sapiens
ttcagcagtttggaaactttttctatagattctccacagggacaattgggagcccattgaggcctatattggaaaactgatatcctgcgataaaaactagaaagaagctatctgtgaaaaggctttgtgatgtgaggattcatcacagtgagttaaacctttaatttgattcagcaagttggaaactctgtagaatctgcacagggaaatttcaggaaatagttgagggcccattcaggccaatattgaaaaacaggtatcctgygataaaaactagaaagaagctatctgtgaaacggttttggatatgtgcattcatctctaagaggtaaacctttcttgtgattcagcagttgaaacactctttccgtagaacctgcacagggttatttgaaagtcatttgatgcctatcatgaaaaaacaaatataccaca

SEQ ID NO: 569478 - DNA, 506 bp, Homo sapiens
tgagagcctgaagctaaacttgtggaaattattttataggaaaaacactaaactcagtgccacctataaaaaccctgtctccttcccttgcagtatgaggttgaattatgaaacagaaaataataataaatggttcctccaccactcctgtaatctccacgcacgccgatgatgaaaagacgaccgcgtgaaagggcagatggatgggaccatttcctctrtaacggctttcagtctttctattgtgcttttgcatctcactgaacagcaacagcaaaaccaggctaacctcgctgctgcataactcccagcccagtgcagcatcttaaacatgcagtgctctcgccagtcctcacactgaaaacacgtcctgctttgccttattccttacatttaggaaaatcccgttgtagaactttctaaaattatgtctggtggaaaacaggctctggttttgccctaaattttctcacttggtatgggatggggatgagaactgagaattc

SEQ ID NO: 569479 - DNA, 567 bp, Homo sapiens
aacttctctaaatatataagctcctaacatgggagcaccaagtttcataacaactacttttagacctatgaaaagtcttagacaactacaataataatggggaacttcaacactccattaacagaatcagacagattgttgargcagaaaactaacaaagttctggacttgaccaattggacctaaaaaacatcacagaatattctacccatcaaccacagaataaacattcttcccatctgcacacagaacatacttcaagattgaccacatgctcagccataaagcaagtcacaataaattttcttagagtggaaatcataccaaccatactctcagaccacagtagaataaaaatagaaatcaatactaagaaaatctctcaaaaccacgcaatcagaaagaaagcaaacaacttgctcctggatggcttttgagtaaatgatgaaatcaaggcagaaatcaaaaaaattctctgaagtaaatgaaaacagagacataacatcaacatctctgggatacagcaaaagcagtgttaagaggaaagtttatagcactaaatgccta

SEQ ID NO: 569480 - DNA, 567 bp, Homo sapiens
aacttctctaaatatataagctcctaacatgggagcaccaagtttcataacaactacttttagacctatgaaaagtcttagacaactacaataataatggggaacttcaacactccattaacagaatcagacagattgttgaggcagaaaactaacaaagttctggacttgaccrattggacctaaaaaacatcacagaatattctacccatcaaccacagaataaacattcttcccatctgcacacagaacatacttcaagattgaccacatgctcagccataaagcaagtcacaataaattttcttagagtggaaatcataccaaccatactctcagaccacagtagaataaaaatagaaatcaatactaagaaaatctctcaaaaccacgcaatcagaaagaaagcaaacaacttgctcctggatggcttttgagtaaatgatgaaatcaaggcagaaatcaaaaaaattctctgaagtaaatgaaaacagagacataacatcaacatctctgggatacagcaaaagcagtgttaagaggaaagtttatagcactaaatgccta

SEQ ID NO: 569481 - DNA, 487 bp, Homo sapiens
attctggccctctctgggctccccgcacctcagcctccccctcccaccccacatctccaggcttcccttcaggctagcctatcctcagcaacccagcccaggcattcctggaaacctcccctcaccagggctgaacccacaagtattgatcagcccagctgggccagycagctcctccctgtgtcccagccgtgaccctagagtcatgagaaagagatcccggggctgcccaaaccagcatcccagccacaatagccaggcatcaggtgccctctggcctactgggcgcacagcaggggcagggccagctctgccttggtgcagggcagtctcccctttaaaatgtccgtccccgggaagcgagaggctcccctgtcttggtcactgctccagcccagtgtctagcatgcagtaggaacttggccagtacagagtgaacagaagaacccgccaatcccttgccttggcctcctatggctccatttcc

SEQ ID NO: 569482 - DNA, 576 bp, Homo sapiens
ctgggtgcagtggctcatgcccgtaatcccagcactttgggaggctgaggtgggtgcatcacctgaggtcaagagattgacacaatcctggtcaacatggtgaaaccccgtctctactaaaaaatacaaaaattagctgggagtggtggcaggtgcctgtagtcccagctactccggaggctgaggcaggagaatcrcttgaacctggtaggaaggaggttgcagtgagccaagattgcgccactgcactccactctggcaacagagcgagactccatctcaaaaaaaaaaaacaaaaagaagaaaatcctcagagcatgtttccagatgaaacagcagggaatagaatctaaaacacaggagaagagacagccttagacacattctggatcaaaatatttaagaaagaaagagaggggcatgtacaaagacgatgtgctttctgtttcccagattttagaaatttaagcatattacaattcattttgattactgtgttcctatcatttttttcccttatatcccttcttatatattagaaaatcctttaaaattgcaatctatgattaaaaagaa

SEQ ID NO: 569483 - DNA, 573 bp, Homo sapiens
tgtaaaacagatataacctttgatacagaaataagagttttaggactccatcttattgaaatgcaagtataagtttccaagccatagtataaagaaaagttataggatccttatttgcaaagttgaaaaactgaaaagaatctgaataacatcaataaatgaataattaaataaatgttggtacttttttgctatgaaatagtatattgatacttgaaataatgttttagagttacagttactgacttggaaggatagccatggcgtagtactaagaaagaaaatcaagtttcaaagtagcctgtaagatatgatgctgttttgtggaaagaaacagccctcctgtgtctctatacacatacctatctttttatgataaggggaggaaatgaaaataggcaggggaagattatgcattttgtttacttatagctttatgctatatcagtacttgcagcaaatagaggtttgttgttaatgttgttgctattgtttcttttttaatgtggragagaaatgtaatataataaaaatatgatcaaaaaggaaaaaagaaaatagtctaaagaaaat

SEQ ID NO: 569484 - DNA, 573 bp, Homo sapiens
tgtaaaacagatataacctttgatacagaaataagagttttaggactccatcttattgaaatgcaagtataagtttccaagccatagtataaagaaaagttataggatccttatttgcaaagttgaaaaactgaaaagaatctgaataacatcaataaatgaataattaaataaatgttggtacttttttgctatgaaatagtatattgatacttgaaataatgttttagagttacagttactgacttggaaggatagccatggcgtagtactaagaaagaaaatcaagtttcaaagtagcctgtaagatatgatgctgttttgtggaaagaaacagccctcctgtgtctctatacacatacctatctttttatgataaggggaggaaatgaaaataggcaggggaagattatgcattttgtttacttatagctttatgctatatcagtacttgcagcaaatagaggtttgttgttaatgttgttgctattgtttcttttttaatgtggargagaaatgtaatataataaaaatatgatcaaaaaggaaaaaagaaaatagtctaaagaaaat

SEQ ID NO: 569485 - DNA, 457 bp, Homo sapiens
gcaaacctcccaagaaaggtaaaaataaagagaaagaggatccygatggtatttgagtccctggtaaaaatgcttctgaggcccagcactagtcagtaaaatcaactgattatttactcttctgggtatgatggccagcacaagttaagttattatcacttgtagttaagaaaatattaacagctataaattttatgtttcatttcctttggaatatccccaagaatctaagacagagtttggttacagacattatctaaaccatactgctagcctggaataacgtagtatggacagaggaaagggcagagttcagaactatcatcagcaaaggaagctcgggcagtgtgcagagaaagttctatgtgaaaataaaagaacaggaagatgaaaaacatttttaagatgaagggaatctaagctgcacagggtaaaattatagcaaagaaacccgata

SEQ ID NO: 569486 - DNA, 604 bp, Homo sapiens
agggaggttctttgtggatggatttaaggtttcttgtcccttttggggatagagaagtacttgaagcacaaagaggttaggacaaggctacagagagtgtagggacctgaggtctgaagcagtggcagagattatyatcactattgtcatcattatttttattaacattattatcaccatcatcatcatcatttaagtgtcagcatcattgccacaagacaaggcggaacttgtcacactgcagtagataacagcacaagatgtctattaaccaagcatactccaggctgaccagatgaacaaagacacacatacaaaaccacaaactccataagtcacccttaacgaagaccatttagaaacaggtatcacctttcctaaatcaacacaatgtgaaaacttcttggtaacatcattgtttttctctgggtctatcctatatctattttaatgagagatgaaaagagagaaagaagaggagaaaggaacactgcacatctgaatatttctccaaagtggccagttataaaataacaatatttgaagttgataaaaatgaaaataaaaaagcaatcagtaaatagtcatggtgaaacaaggtaga

SEQ ID NO: 569487 - DNA, 541 bp, Homo sapiens
tggtgcccacacagattgaaggtgggtctgcctctcccagtccactgactcaaatgttaatctactttggcaacaccctcacagacacacccagtaacaatactttgcatccttcaatccaaggaagttgatactcaatattaaccatcacaggctcttttatggttccacatgaattttaaaatagttttttttctaattctataaagaatgtccttggtagtttcataggaatagcaattgaacctataaattgctttgggcagtatggacaattaatattatttattcttcctrtccatgagcatgggatatttttccattggtgtcatctctgatttctttgagcaatgttgtgcaattcccattgtcaaaatctttcacccccatgattagaggtattcctgggtgtgttattctttttgtggctattatgaatgttattgttttcttgatttggctctcagcttacctgtgtttagggtataggaatgctgctgatttttgtacattgattttgcattctgaaactttgctgaag

SEQ ID NO: 569488 - DNA, 541 bp, Homo sapiens
tggtgcccacacagattgaaggtgggtctgcctctcccagtccactgactcaaatgttaatctactttggcaacaccctcacagacacacccagtaacaatactttgcatccttcaatccaaggaagttgatactcaatattaaccatcacaggctcttttatggttccacatgaattttaaaatagttttttttctaattctataaagaatgtccttggtagtttcataggaatagcaattgaacctataaattgctttgggcagtatggacaattaatattatttattcttcctatccatgagcatgggatatttttccattggtgtcatctctgatttctttgagcaatgttgtgcaattcccattgtcaaaatctttcacccccatgattagaggtattcctgggtgtgttattctttttgtggctattatgaatgttattgttttcttgatttggctctcakcttacctgtgtttagggtataggaatgctgctgatttttgtacattgattttgcattctgaaactttgctgaag

SEQ ID NO: 569489 - DNA, 569 bp, Homo sapiens
cttggctcactgcaagttccgccttccaggttcacaccattctcctgcctcagcctcccaagtagctgggactacaggcacctacaaccatgcctggctaattttttgtacttttagtagagacggggtttcacgatgttagccaggatrgtctagatctcctgaccttgtgatccacctgcctcagcctcccaaagtgctgggattacaggtatgagccaccgcgcttggcctaaatttgactttttaaaaaaactttactgtgtaatgcaatttagcatacttatagagactttattggacaacaggtaagtaaaattatccttattttacatatgagaaaactgaatatgccagctactatttttgcattgaacacccagaaatgtggtgatgtaaagcaaccattttattaagttcacagattgttagtattggaattttggatagggtatagaaagaaaatcttgtctgtgctccacattttctagagcctcatttgggaagactcaaaggcaaggaatgactcagagggaagaatcatctggaggcatgttcatcagcatggc

SEQ ID NO: 569490 - DNA, 546 bp, Homo sapiens
tgcagagagcagacaaagagcagttttcatgtttagttccacatagacattggttggttgactcttttatggaaagaatgtgtgtattatttataaacagcaaaagataatgtttttaaatgtggtgattctattgagcctgaaatcaatcacaatatttttcttcccaaccggcatccctaaataaatcaagaagcacaatcccttcagtcagtacctagacttcaaaacaaataaagctgaaagaattgygcaaggattcatgggttccaaggaattgaatgataaacaattacagaaatacgttctagtcgatcttcttaatgtggattctggtggttaaaaaacacacaggactatgcatgaggctatgagcccaatgctgtttgcagatccacgctatctggaactgcagaaaacaaataagaaacatattaatgatcctttcctttcctacaaaaaaaactattctgagaagattgctgaaatttggccaatatatcaagtggagaatccatggcaacatgaccaaaaggctacagaagc

SEQ ID NO: 569491 - DNA, 519 bp, Homo sapiens
tcttttaaattagtcatgatacttgtatttaccccatacagttgacatgaaggttaaacatgaatgcatggaaagcctgcattacatgcaaaaacactgcatgctctactgtaagccacacaaaaacactagttgttgttttgtaactcaacttcctcattttacagatgaagaaaaaatggctctaatgctctgaaaggcattgatgactaatgtggaaagaaaaaatttagagtcaggcaaacatgaatgttgattcagctcctttatttattttctctgtggctattargctcttggacctcaaatttaaccaaatgtaaataagtgaaacaagatcatattctcagaaggtgatttgtggattgtgtctagaaaaatattttgggttctctgtatttttatttttcttgatatttttcagtcttgaataggatttttctgtgactcaaggagagagatttcagtttttatttccagatggttttatttgttgttatgaatatttgcagaatgata

SEQ ID NO: 569492 - DNA, 519 bp, Homo sapiens
tcttttaaattagtcatgatacttgtatttaccccatacagttgacatgaaggttaaacatgaatgcatggaaagcctgcattacatgcaaaaacactgcatgctctactgtaagccacacaaaaacactagttgttgttttgtaactcaacttcctcattttacagatgaagaaaaaatggctctaatgctctgaaaggcattgatgactaatgtggaaagaaaaaatttagagtcaggcaaacatgaatgttgattcagctcctttatttattttctctgtggctattaggctcttggacctcaaatttaaccaaatgtaaataagtgaaacaagatcatattctcagaaggtgatttgtggattgtgtctagaaaaatattttgggttctctgtatttttatttttcttgatatttttcagtcttgaatargatttttctgtgactcaaggagagagatttcagtttttatttccagatggttttatttgttgttatgaatatttgcagaatgata

SEQ ID NO: 569493 - DNA, 531 bp, Homo sapiens
  misc_feature 451: n = A,T,C or G
caggttggtcttgatctcctgacctcctgatctgcccacctcggcctcccaaagtgttgggattacaggcatgagccacygcgcccgacctgttttcatattttctttcattttttatggaactgtcacagctcagttttcagatctctctcaactggtttgccatatcttccctgagctcttgcctggcattcttaattaattgaagcaaatactctttttaattcatggtgaaaatatattgtcagaatatttatctgctccccagcaacatcttttctgtggggaattttgcattttccgtgtatttttccctattttttactcctttgaaaacagtcattttacatatcctattgaaatgtttttattagtcattattgaaggaacaatattttcatgaataaactattgttaaggtagaagtcaaagctatgttcaagactaaagnttttctactattaatgagtttcttgtatgtaagttcaatttttccttacttctctctaaccaataagttgagcgacttca

SEQ ID NO: 569494 - DNA, 596 bp, Homo sapiens
ttttcctttttacttttcacagatacacagactaatgtatttatctgtttctccctacgtgctctctctgctttatggttgttgatactgtagcatgatggacatatatattcatttgtgcaatgtgatttgtaacaataaaaatacccttcttcaattgtctgatgttttgtgatctaaattattctttacctataaaaattgatttcaaccctggattgccaccacatccggctaactttttgtatttttagtagagacggggtttcaccatgttagccaggttggtcttgatctcctgacctcctgatctgcccacctcggcctcccaaagtgttgggattacaggcatgagccactgygcccgacctgttttcatattttctttcattttttatggaactgtcacagctcagttttcagatctctctcaactggtttgccatatcttccctgagctcttgcctggcattcttaattaattgaagcaaatactctttttaattcatggtgaaaatatattgtcagaatatttatctgctccccagcaacatcttttctgtggggaattttgcattttccgtgtatttttccct

SEQ ID NO: 569495 - DNA, 596 bp, Homo sapiens
ttttcctttttacttttcacagatacacagactaatgtatttatctgtttctccctacgtgctctctctgctttatggttgttgatactgtagcatgatggacatatatattcatttgtgcaatgtgatttgtaacaataaaaatacccttcttcaattgtctgatgttttgtgatctaaattattctttacctataaaaattgatttcaaccctggattgccaccacatccggctaactttttgtatttttagtagagacggggtttcaccatgttagccaggttggtcttgatctcctgacctcctgatctgcccacctcggcctcccaaagtgttgggattacaggcatgagccactgcgcccgacctgttttcatattttctttcattttttatggaactktcacagctcagttttcagatctctctcaactggtttgccatatcttccctgagctcttgcctggcattcttaattaattgaagcaaatactctttttaattcatggtgaaaatatattgtcagaatatttatctgctccccagcaacatcttttctgtggggaattttgcattttccgtgtatttttccct

SEQ ID NO: 569496 - DNA, 546 bp, Homo sapiens
tgatggggtgaccttcttttgattgattgttaaatctcaaagtcatattaccagaggtggcttgcatgaacckaaaacatggctactttacggatgttatttacgtttgatccatggtgttttcacatgtgacttggactttgaaaatgtaatattttttgcttatattttataattatattctgtgaaaattattcaacccatcattaattatgtcatgtgcttaaaagaacaagtgttaataatatctgaaggaggatttggcactacttaagttaaaaattattttttcatatcacgtaaaagttaagaaaaattcactaaaaacaattttaaggaattattttttcagttgttttacctttggcaaaaacattatttttaaatgattttaatgtgtattgctattattattatgtatttatataagttgctaattttgcatacataatgcattgaaagttgctcagcaaacacagttgtaaagttaaatgttaagagttttttagttgttaaattaacatttaaaaaaattattttatttta

SEQ ID NO: 569497 - DNA, 546 bp, Homo sapiens
tgatggggtgaccttcttttgattgattgttaaatctcaaagtcatattaccagaggtggcttgcatgaacctaaaacatggctactttacggatgttatttacgtttgatccatggtgttttcacatgtgacttggactttgaaaatgtaatattttttgcttatattttataattatattctgtgaaaattattcaacccatcattaattatgtcatgtgcttaaaagaacaagtgttaataatatctgaaggaggatttggcactacttaagttaaaaattattttttcatatcacgtaaaagttaagaaaaattcactaaaaacaattttaaggaattattttttcagttgttttacctttggcaaaaacattatttttaaatgattttaatgtgtattgctattattattatgtatttayataagttgctaattttgcatacataatgcattgaaagttgctcagcaaacacagttgtaaagttaaatgttaagagttttttagttgttaaattaacatttaaaaaaattattttatttta

SEQ ID NO: 569498 - DNA, 546 bp, Homo sapiens
tgatggggtgaccttcttttgattgattgttaaatctcaaagtcatattaccagaggtggcttgcatgaacctaaaacatggctactttacggatgttatttacgtttgatccatggtgttttcacatgtgacttggactttgaaaatgtaatattttttgcttatattttataattatattctgtgaaaattattcaacccatcattaattatgtcatgtgcttaaaagaacaagtgttaataatatctgaaggaggatttggcactacttaagttaaaaattattttttcatatcacgtaaaagttaagaaaaattcactaaaaacaattttaaggaattattttttcagttgttttacctttggcaaaaacattatttttaaatgattttaatgtgtattgctattattattatgtatttatataagttgctaattttgcatacataatgcattgaaagttgctcagcaaacacagttgtaaagttaaatgttaagagtkttttagttgttaaattaacatttaaaaaaattattttatttta

SEQ ID NO: 569499 - DNA, 345 bp, Homo sapiens
agttccttccctatcatatttacgtgtctcaagtaaaacatagatgagtggcaaaaggtctactgcattctctggaacctgccaccccagagtagttactagctactagaggattaacacacagggctgagcaggtcaaagccagggctctgtcaggtaagggccagtttttactactgagcaacycacaaacaccactggtaaagcaaagaggtctgagtgtgcatatagctcaggaaaccctgagtttacccttagttaccactaaaaactaacaaatgagactctgctgaggcttaacttcatatacaaaaatcaacacctttgcctctttgacagtggtaa

SEQ ID NO: 569500 - DNA, 345 bp, Homo sapiens
agttccttccctatcatatttacgtgtctcaagtaaaacatagatgagtggcaaaaggtctactgcattctctggaacctgccaccccagagtagttactagctactagaggattaacacacagggctgagcaggtcaaagccagggctctgtcaggtaagggccagtttttactactgagcaacccacaaacaccactggtaaagcaaagaggtctgagtgtgcatatagctcaggraaccctgagtttacccttagttaccactaaaaactaacaaatgagactctgctgaggcttaacttcatatacaaaaatcaacacctttgcctctttgacagtggtaa

SEQ ID NO: 569501 - DNA, 345 bp, Homo sapiens
agttccttccctatcatatttacgtgtctcaagtaaaacatagatgagtggcaaaaggtctactgcattctctggaacctgccaccccagagtagttactagctactagaggattaacacacagggctgagcaggtcaaagccagggctctgtcaggtaagggccagtttttactactgagcaacccacaaacaccactggtaaagcaaagaggtctgagtgtgcatatagctcaggaaaccctgagtttacccttagttaccactaaaaactaacaaatgagactctrctgaggcttaacttcatatacaaaaatcaacacctttgcctctttgacagtggtaa

SEQ ID NO: 569502 - DNA, 718 bp, Homo sapiens
atgatgattaattcaaatacaaaagctagtatacaacaaccctactttttcttccaaactacttaggttcatacggttcacactaccacacaactgttctacattacaattacaccactagagtaaaatactaataaaacacttcagttagcaagctgaggttctacttgttgacaactgcattaaaactgcagcatttaagcagagctgagaagcaccgttcttaagcatggctttcttcttcctgttcttgtgttccacagtgattattaaaggaaggaatttggtctgtaaatgactgggtcatccactgctcattaggaatgccactgaaagttgattctcctcttaactccaggctctcaattagcccatttgaagagaagctgcaaggttcactgtcgcatggattttctccgtaagcaccaccatatgctgcctcataacccagatcatatttttcttccttaacagccatcttctttgcatcttcttgggcaagctgtaggtcaaatgtatattgcacctcttgaacgtccgtatttcgttcaatgcctctcaactgatctcttaagtctttcagttttatgtagtaatgaactttgtcttgggcccgaggaaactgagcacttcttgcactggatgacggcrtaacatagcagagagtttctgtgcctggaatcttatggggctgaagcccaaattccaagttcttaac

SEQ ID NO: 569503 - DNA, 637 bp, Homo sapiens
ttgattctcctcttaactccaggctctcaattagcccatttgaagagaagctgcaaggttcactgtcgcatggattttctccgtaagcaccaccatatgctgcctcataacccagatcatatttttcttccttaacagccatcttctttgcatcttcttgggcaagctgtaggtcaaatgtatattgcacctcttgaacgtccgtatttcgttcaatgcctctcaactgatctcttaagtctttcagttttatgtagtaatgaactttgtcttgggcccgaggaaactgagcacttcttgcactggatgacggcataacatagcagagagtttctgtgyctggaatcttatggggctgaagcccaaattccaagttcttaacctttacaccaaaaacttctttactaaaaatttcataaatacattttccattaaacactgctattcgtggctgatatttctataatttctgtactagaatacgtcctccttcacgaaattctttactggagagatctttgctgccaggcgtggtcctttccaccatgttggtaaatccaataccatacttccctggtagagtgtgatcatccatatggttcacctggacctcactgagccctgacataaacaaaca

SEQ ID NO: 569504 - DNA, 567 bp, Homo sapiens
ctttgtcttgggcccgaggaaactgagcacttcttgcactggatgacggcataacatagcagagagtttctgtgcctggaatcttatggggctgaagcccaaattccaagttcttaacctttacaccaaaaacttctttactaaaaatttcataaatacattttccattaaacactgctattcgtggctgatatttctataatttctgtactagaatacgtcctccttcacgaaattctttactggagagatctttgctgccaggcgtggtcctttccaccatgttggtaaatccaataccatacttccctggtagagtgtgatcatccatatggttcacctggacctcactgagccctgacataaacaaacacttccaaaaatggtttccaggtccagggtaatgatgccctttgtaagcagccattagacccgggtttatgccaataatgacaatgtccwgattgaaggtcaaaatatcggggagagtcttggtcagaagttcagcttctgaaacaccattaaaacggtctacttttcttttgactttaaatgtgtctgtaattt

SEQ ID NO: 569505 - DNA, 492 bp, Homo sapiens
aatatccttgttcaaggaaagagaaaatatgtgtcttttttttttttcatcaaaaagcagacaatctcaggggcagcattttatccaaataactgcagacattgcctgacttttttggcatgtaaagaatggcaagaaataaactctgttttggtggaaagaatctattcytattatgttttctagaaacctgaggaataatctatccaacagttcatctatttgtgtgcctggggaaatttattcaaaaaaattcttttctcttgcaaatgtgtgaggtagtattgatttaaccaccatttcttacatttgaggcataaaatcaaatgattgcctatatgcatgaagagtaacaaaagacttagaaaatgattcctgctaaattacttgaaaaaagccaaagggaccacattttagagaacaaagaaaggggaataaaaatgattaaagattttggtgatgaaaggagctatgcatgtttgatccagagga

SEQ ID NO: 569506 - DNA, 408 bp, Homo sapiens
gcttgaacccgggaggcagaggttacagtaagccaagatcgtgccactgcactccagcctgggcaacagagggaagacaaccatgtgaagagggaggcagagattggagtgatgatgctacaagccaagccaaggaatgcctggggctacaagaagctggaagagataagagaaggctcccttactagagagttcaaagagcatagccctactgacaccttgattttggacttctagcttctggaagtgtgagaggatacattcctgtcattttaagccacttggtttgtggtactttgttacaggagccctaggaaacgaatacacctgcaaaggcttcactggktctgaaactcctttacttgctgactggtgcttctttagcttaggttttgatccctattaaaa

SEQ ID NO: 569507 - DNA, 510 bp, Homo sapiens
tcaagtactttttcagccttgccatccttcttttctccttctagaattctcatgatacaaatgttagctcttttgttatagacccaaggtccctgatactctttatctttttgaggtttcttttattctctgtgttcaaatggggtgatgactgggttatttctattgttctattttcaagtttactgattatttcctctggcctctctattctgctattgagcacatccattgagggttttgttgttgttgtttttgttgttattgtacttgtcagttctaacatttccactttgttcttctttatatcttctattactttactgatattttctatttcttagctgatgcttcctattttttttttatttgtttcaagtgtgtctgtcgcttgttgaagcatttttatgatggttgctttaaagtctttgtcagctagtactaacatctgtcatcttggtattggcaactattgaytgtctttttctattcagttttaaatcttcttgg

SEQ ID NO: 569508 - DNA, 469 bp, Homo sapiens
ataaacagtgtagtgtgtgattatatatgtctgtttaagtaaactataatctattccttagcattgaaggactcaaatcaggacactacctttcagggtggctacatgagctattcaaataytattagtgaaattacaccagaaagcttgccaattagctcaaaagatattagaaatctatatggtaaaatgacaagtgtttaaaatttgtcaatggctagaaaggttgtattgatttcactgctctttcttaaatgaggcactagaatataaaatctcaacaggttcatactttcagaaaagtgttcacagtctggatgcctatttggtaccatgtgtctcatttcatggcctgcagctcaaacactggctggcttcaccttgtttcatctgccttggatataacagaaaaggaatttccattcatagttgttattcttcaagaagtctgaggacagaaggtgtgtgt

SEQ ID NO: 569509 - DNA, 532 bp, Homo sapiens
gctcacaactgtaatcccagcactttgggagtctgagatgggtggatcacttgaggtcaggagttcaagaccagcctggccaacatggtgaaaccctgtctctactgaaaatacaaaaattagcctgacatggtggcacatgcctgtaatcccaggtactcaggacactgaagcaggagaattgcttgaacccgggaagcggaggttgcagtgagctgagatcatgccacttcactccagcctgggtgacagagtgagaccctgtctcaaaaaaargaaaaaaaaaaaaaagaaaagaaaagatgtctttcaataacacatctttgttttatttaaaagtcttgatattcctcacacataataaataactaaaaaggttaaaaaaaaaacctctccaaagtcaaacaaatttatttttatccaccattttggtttatcttcattagtacttttataatgataaaatcaggaggtgaccagaatccaaatttttacctttgtagaattatttccaaaggaaaaatatataact

SEQ ID NO: 569510 - DNA, 562 bp, Homo sapiens
atatttttttaacgatttcttttaagatcagctattttagttagctgttttttttcaagacaaagttatgcaagagggataacagacctatcagtcatgttatatctttaaacatgtatagagtaaggtatttttgtattattttaagaatagcgtgaaataaaatgagctttttaagttayataatttttattaaatttaataatttctattaaatttaataaatatttaagaacagcatgaaataaagtgagcttttgaagttatgatttttattaaatttaatcatttctattaaaaagtagagctcggattttcctaccaaacctttttaccagtaaggtcataggctataggtatggcatcaagaaagactgataattctgctttttttccaaaataagttattagccatagagaattcttttttttaaaaaaaaaagttactccattacattgatatcttgtttttgtttttttaaaggaattgtatttatttttccttgttgcatattattagtatacttattcatgaacttctaattttaagcaaataaatgtt

SEQ ID NO: 569511 - DNA, 543 bp, Homo sapiens
tttattatttttttcaagaaaaccagctcctggattcattgatctttwgaatggcttttttgtgtctcagtctccttcagttcagccctaattttgattattttgtgtcttcggctagttttgggatttctttgcacttgattctctagttcttttagtttttatattaagttgttaacttgagatctttctaactttttgatgtgaacatttcagtgctataagtttcctgcttaacactgccttagctgcatcccaaagattctgatatgttgtatctttgttgtcattactttctaagtacttcttcatttctgccttaatttcattatttacccaaaagtcattcagcagcaggttatccaatttccatgtaattgtatggttttgagtgaatttcttagtcttgatttctaatttgattgtgctgtggtctgagagattgtttgttatgatttcagttcttttgcatttgatgaggagaattttacttctgattgtgtgatctattttagaatatatgccatgtggtgatgagaagaa

SEQ ID NO: 569512 - DNA, 543 bp, Homo sapiens
tttattatttttttcaagaaaaccagctcctggattcattgatcttttgaatggcttttttgtgtctcagtctccttcagttcagccctaattttgattattttgtgtcttcggctagttttgggatttctttgcacttgattctctagttcttttagtttttatattaagttgttaacttgagatctttctaactttttgatgtgaacatttcagtgctataagtttcctgcttaacactgccttagctgcatcccaaagattctgatatgttgtatctttgttgtcattactttctaagtacttcttcatttctgccttaatttcattatttacccaaaagtcattcagcagcaggttatccaatttccatgtaattgtatggttttgagtgamtttcttagtcttgatttctaatttgattgtgctgtggtctgagagattgtttgttatgatttcagttcttttgcatttgatgaggagaattttacttctgattgtgtgatctattttagaatatatgccatgtggtgatgagaagaa

SEQ ID NO: 569513 - DNA, 423 bp, Homo sapiens
tatactcctggggacttagaaagtcaagagtatgcaaaagactgtgcacatgcctgtcgaaagacttaaggttcaaatcactcacttctatctgacctgcacaagcaggaagtgaaagccaatgcagagtgtaaactgcctgagctgagtactgaagatgtacaccaacacacacacacacatacacacatacacacacacacagcccactggcaaaaggaagactcacttgtcttatatatttaagactatatctgtccaattattagctgaccactaaggcaaatgatcagagacctcaatggacatatatgacaaagaatacacacataatagaattcatccaagaaagtcactaaacaaacagacaacaaaagcataacaaacccttgggtgcrgagtagatatggtttccagggttgt

SEQ ID NO: 569514 - DNA, 358 bp, Homo sapiens
aaggtttttattttgaaacataattgaattaaatgccaaatatttttatttaatcatttctaatggaacttgtaytaaaatagtttgtcaacagtaaccagcacaggatatggcataaagtaagtggtcagtagaggttttcctgaactaaagtgattcgtatactctcgagccttttcaaatgacacatatcttttagtttgatcttgatttagaattacaagattgttaacaactctctattacctgtaatctccttaaaaaaaaaaaaaaagagaaccaaaggcccaaagcctttgataaacaggggtgtctagaaaaattgagtaagttgtcaaaatttaatttttacaagtta

SEQ ID NO: 569515 - DNA, 596 bp, Homo sapiens
cacatagaccaatggaacagaatagagaacccaaaaataaatctgcacacctacagtgaactcatttttgacaaaggtgctgagaacatacattaagaaaagacagtctcttcaataaatttttccaggaaagggaaaactggatatccatatacaaaagaatgaaactagacccctatctctcaccttatacaaaaatcaaatccaaatggattaaaggcttacatctaagacctcaaactatgaaactgcttcaagaaaacatgggggaaactctccaggacattggtctgggcaaayatttcttgagtaataccccaaaagcataggcaagcaaagtaaaaaaggacaaatgagatcacaagttagaaatcttcttcacagcaaaggaagcagtcagcaaagtaatgagataacccacagaatgggagaaaatatttgcaaactacccgtctgatatgagattaataaccagaatatataaggagctcaaacaactctataggaaaaataatctagtaatccaaatgttaaaatgggcacaagatctgaatagacatttctctaaaggagacatacaaatggcaaagaggcat

SEQ ID NO: 569516 - DNA, 596 bp, Homo sapiens
cacatagaccaatggaacagaatagagaacccaaaaataaatctgcacacctacagtgaactcatttttgacaaaggtgctgagaacatacattaagaaaagacagtctcttcaataaatttttccaggaaagggaaaactggatatccatatacaaaagaatgaaactagacccctatctctcaccttatacaaaaatcaaatccaaatggattaaaggcttacatctaagacctcaaactatgaaactgcttcaagaaaacatgggggaaactctccaggacattggtctgggcaaacatttcttgagtaataccccaaaagcataggcaagcaaagtaaaaaaggacaaatgagatcacaagttagaaatcttcttcacagcaaaggaarcagtcagcaaagtaatgagataacccacagaatgggagaaaatatttgcaaactacccgtctgatatgagattaataaccagaatatataaggagctcaaacaactctataggaaaaataatctagtaatccaaatgttaaaatgggcacaagatctgaatagacatttctctaaaggagacatacaaatggcaaagaggcat

SEQ ID NO: 569517 - DNA, 596 bp, Homo sapiens
cacatagaccaatggaacagaatagagaacccaaaaataaatctgcacacctacagtgaactcatttttgacaaaggtgctgagaacatacattaagaaaagacagtctcttcaataaatttttccaggaaagggaaaactggatatccatatacaaaagaatgaaactagacccctatctctcaccttatacaaaaatcaaatccaaatggattaaaggcttacatctaagacctcaaactatgaaactgcttcaagaaaacatgggggaaactctccaggacattggtctgggcaaacatttcttgagtaataccccaaaagcataggcaagcaaagtaaaaaaggacaaatgagatcacaagttagaaatcttcttcacagcaaaggaagcagtcagcaaagtaatgagataacccacagaatgggagaaaatatttgcaaactacccrtctgatatgagattaataaccagaatatataaggagctcaaacaactctataggaaaaataatctagtaatccaaatgttaaaatgggcacaagatctgaatagacatttctctaaaggagacatacaaatggcaaagaggcat

SEQ ID NO: 569518 - DNA, 596 bp, Homo sapiens
cacatagaccaatggaacagaatagagaacccaaaaataaatctgcacacctacagtgaactcatttttgacaaaggtgctgagaacatacattaagaaaagacagtctcttcaataaatttttccaggaaagggaaaactggatatccatatacaaaagaatgaaactagacccctatctctcaccttatacaaaaatcaaatccaaatggattaaaggcttacatctaagacctcaaactatgaaactgcttcaagaaaacatgggggaaactctccaggacattggtctgggcaaacatttcttgagtaataccccaaaagcataggcaagcaaagtaaaaaaggacaaatgagatcacaagttagaaatcttcttcacagcaaaggaagcagtcagcaaagtaatgagataacccacagaatgggagaaaatatttgcaaactacccgtctgatatgagattaataaccagaatawataaggagctcaaacaactctataggaaaaataatctagtaatccaaatgttaaaatgggcacaagatctgaatagacatttctctaaaggagacatacaaatggcaaagaggcat

SEQ ID NO: 569519 - DNA, 538 bp, Homo sapiens
gattgtatgcaaagacatctgttttgttgaaaaaatagatagcttaacaaactaagagagacaaataacacaaatatgagtattaaaaagttatcaataacatcacataaaatcaaatgtataatttaaactgtcagtcaaaaaatatatctttgaagaggaaaaatagaaaccaaaactaaagggacatagaaaacataagatgtcagaaataaatcccaataaamcaataattacaatatacaatatagattaactcaatgatctaaaaacagcaactcccatattgcatgttaaatcaaaaataaggtccagtgatatatttatcgagagatacagattgatgatataggatgaagaagggttgaaaatgaaggatgaacttaagttcggctttagctgccacatttttttttcaaaacctgttatttgatactgggttttgtctcagactttggaaggacacatagttgactgttcacttcaatattattctgccattctttcttgatttatattcatatgagatttttcaaac

SEQ ID NO: 569520 - DNA, 551 bp, Homo sapiens
gtagggagaaaccaggggtaaggaatttgagcttgaggcagaggcaatgtgaaattattatcaattcttttttttttttttttttttgaggagtctcactgtatcacccaggctggagtacagtggcatgatcttggctctgcctcccaagttcaagcaattctcctgtcttagcctcctgagtagctgggactacaggcacaggccaccatgcctggctacttttgtttttttttttgagayggagtcttgctctgtcacccaggctggagtgcagcggcgcaatctcggctcactgcaagctccgtcttccgggttcacgccattctcctgcctcagcctcccaagtagctgggaatacaggcacccgccaccacgcccggctaatttttttgtattttttttagtagatacggggtttcaccatgttagccaggatggtcttgatctcctgacctcatgatccgcccgcctccgcctcccaaagtgctgggattacaggtgtcagccaccgcgcccagccacccagctactttttgtatttttagtag

SEQ ID NO: 569521 - DNA, 551 bp, Homo sapiens
gtagggagaaaccaggggtaaggaatttgagcttgaggcagaggcaatgtgaaattattatcaattcttttttttttttttttttttgaggagtctcactgtatcacccaggctggagtacagtggcatgatcttggctctgcctcccaagttcaagcaattctcctgtcttagcctcctgagtagctgggactacaggcacaggccaccatgcctggctacttttgtttttttttttgagacggagtcttgctctgtcacccaggctggagtgcagcggcgcaatctcggctcactgcaagctccgtcttccgggttcacgccattctcctgcctcagcctcccaagtagctgggaatacaggcacccgccaccacgcccggctaatttttttgtattttttttagtagatacggggtttcaccatgttagccaggatggtcttgatctcctgacctcatgatccgcccgcctccgcctcccaaagtgctgggattacaggtgtcagccaccgcgcccagccaccyagctactttttgtatttttagtag

SEQ ID NO: 569522 - DNA, 551 bp, Homo sapiens
gtagggagaaaccaggggtaaggaatttgagcttgaggcagaggcaatgtgaaattattatcaattcttttttttttttttttttttgaggagtctcactgtatcacccaggctggagtacagtggcatgatcttggctctgcctcccaagttcaagcaattctcctgtcttagcctcctgagtagctgggactacaggcacaggccaccatgcctggctacttttgtttttttttttgagacggagtcttgctctgtcacccaggctggagtgcagcggcgcaatctcggctcactgcaagctccgtcttccgggttcacgccattctcctgcctcagcctcccaagtagctgggaatacaggcacccgccaccacgcccggctaatttttttgtattttttttagtagatacggggtttcaccatgttagccaggatggtcttgatctcctgacctcatgatccgcccgcctccgcctcccaaagtgctgggattacaggtgtcagccaccgcgcccagccacccarctactttttgtatttttagtag

SEQ ID NO: 569523 - DNA, 582 bp, Homo sapiens
cttgttcatgatcttaaaggcaaagctttcaactttacagcattaagtatgttgctttgtatgagcttcttgtatatggycattattgtgttgatgtaccttccttttacacctaatttgttgagaatttttatcatgaatgtatgttgaattttgttgaattccttttctgcatctattgagatgataatctatttttttcctttgttctgttaaggtggtgtatcacatttattaatttgtttatgttgagccatacttgaatcccagggatatatcccacttgagcatggtgaatgatccctttaaggtgccattgaattccatatactagtacttgttgcagaattgtgcatatatgttcatgaggaatactgggactataactttcttttcctgtaatgttgttacctggctgatatggtttggctgtgtccccacccaaatctcatcttgaattcccacatgttgtgggaggaacccagtgggagctgttctcatgatagtgaataagtctcatgagatcttatggtcttaaaaggggagtttccctgcctaagctttcttctcttgtctgccacc

SEQ ID NO: 569524 - DNA, 582 bp, Homo sapiens
cttgttcatgatcttaaaggcaaagctttcaactttacagcattaagtatgttgctttgtatgagcttcttgtatatggccattattgtgttgatgtaccttccttttacacctaatttgttgagaatttttatcatgaatgtatgttgaattttgttgaattccttttctgcatctattgagatgataatctatttttttcctttgttctgttaaggtggtgtatcacatttattaatttgtttatgttgagccatacttgaatcccrgggatatatcccacttgagcatggtgaatgatccctttaaggtgccattgaattccatatactagtacttgttgcagaattgtgcatatatgttcatgaggaatactgggactataactttcttttcctgtaatgttgttacctggctgatatggtttggctgtgtccccacccaaatctcatcttgaattcccacatgttgtgggaggaacccagtgggagctgttctcatgatagtgaataagtctcatgagatcttatggtcttaaaaggggagtttccctgcctaagctttcttctcttgtctgccacc

SEQ ID NO: 569525 - DNA, 619 bp, Homo sapiens
agaacctgtctcaaaaaagaaagaaaaaagagggccgggcgtggtggctcacgtctgtaatcccagcactttgggaggctgaggtgggtggataacaaggtcaggagttcaagaccagcctggccaagatggtgaaaccctgtctctactaaaaatacaaaaattagctgggcgtggtggcgggtacctgtaatcctagctactcaagaggctgaggcagagaattgcttgaacccaggaggcagaggttgcagtgagccaagattgcaccactgcactccagcctgggcgacagagtgagactctgtctcaaaaaaaaaaaaaaaaaaaaaaagaaagaaagaaagaaagaaagaaaatctgaataatggtatataaattaaggaaatttaatttaaaaccttcccacaagaaaactttagttcttcccacaagagctttagttcatgtcatacattttggttttattttttgtttcagtctacattctggggaggtgaggttactggcaaagttataagtaggtaaggtattactgtccataagtagtataataaaattcctcaatataattaatttaaataaactttagtaaattttaaacractgatactaagcc

SEQ ID NO: 569526 - DNA, 527 bp, Homo sapiens
agactttcccatacaaaagctgaggcactttaacaataccagacctgtcctataagaaatgctaaagaaagttcctccatctgaaagaaaaggatgttaaggagaaataagaagtcatctgaaggtgcaaaactccctggtaatagtaagtacatagaaaacattgtatcactgtaattgtgatgtgcaactattcatatctacagtagaaagactaaaagatgaacctatcaaaaataactttgaaaacaacttttcaagacatagtatatataataagatgtaaatagaaacaacaaaaagttaaaaagttgtgtgggggatggtgtagaatttttataagttgtctcattgttagtttctttatccaatcagtgttaggttgtcatctgtttaaaataatggcttataagatattatttgcaagcttcatggtaactcaaatcaaaamacctacaatagatgcataaaaaatcaaaagcaataagtgaaaatataccaccagagaaaatcacctttagtaagag

SEQ ID NO: 569527 - DNA, 586 bp, Homo sapiens
ggtgcagtagccagatacaattaagttagagacaggagcatgagataagtacaaagggtgcatctgaggaagctcaggggtctctcaagtggcttggggtaaattctacacaatgggtgcactatagagaatgacggcatattatcctttttcatttagaaatgtataacttctgtgggagtcccaggtagaagatgctgaacacattttctgggtgtctatgagatttctgaacggcctataaatctgaatcctagcatgattatcaggctgatggggtaactttcatgtgaccttgtcttcttgtgttcttggaataaacgttcacaactgaaggtaaaccacaggtgtttctgccttggatttcttaggaagaaaagtgtctacctgttggaagctcatgacctcttggtggtaaattgctcactattgcctgcagcatgctaggtcttgtcaaaccctctgcaccttgggctgcgcagttatctggacatgtgccaggttcaagctccatcctttgtcttcctgcycttgctgctctaaggtaagacaaatgaaagctgtctgagggtctcagatagttttt

SEQ ID NO: 569528 - DNA, 603 bp, Homo sapiens
aatttaaatactagtttgttccctataaactttatgttaaaaagtttctgaatttgtattgaccaaagtatgaagcctctacatttcagtaacgatgtggaggagattccagccagattttaaaaatctcaatttgtttttaaaaggtagattgttgtccaatcaggtttctttgtgctgtatttgtgcaaccaagtctttgaactgaaattccaaacttaaaaaaaaaaaagtcgtatatgcttctagraagagggtctatagtcaggaccctggactttactataaaatcgtaaagacctacctgttagatctgaagagagaattggacaccaccctcacctcttgtgacttttctggaattttcttcaggaaggaaagtgaagtgtgcagaaatgtcctatttcttaattgatttcagatatttttattaacagtattttcctctttttacttttccgttgatgtgttctcaaggtaaagtttaacataaatgagaagtagctctgtctttcttatagaagatttggacttagattaatgggagaaataaagtcataagtatgaagatagccttgctaatgttttaaaataatatttaat

SEQ ID NO: 569529 - DNA, 543 bp, Homo sapiens
gatatttctttattaatgattaatattaatcattaatatttatatgattatattatttgattatagttgtagaatatatttatattttatatttattaaaatacatgatatattaaaatatattgagtataaaatatactaaatataattaatattaaggattaataaataaattacatwaggaataaaaattatataagaaaatattgccttatcccctgcctgtctgccttttgactgatgtgtgctgtatgtactatgagcctctcacctgttctgcacctaatacaacagccaccatagccctgcttcccagacaccttaaaaagttgttttgttttaaatagatgtagcctggcacacatgcctgtgtcatgagggagagcatggctggcctgctctcttggtacttattataaggtccttcttactgggggttttattcgattatcacctttatgtctgttccagccagaatcctgctgtgtgacacctgggaatccatcaccctagtccctgctctggggtttgcacaccacattt

SEQ ID NO: 569530 - DNA, 543 bp, Homo sapiens
tggaacagcgaccacccctagcgaggcttgagatgcctcttccctccttaagactgagagcgccgctgcccccagtcctccatagcccagtgcctgctgccttcacgcagagctgcaggggaggccctgagcacccagcctgctggaccagcgctgtgcacggccctcccatggcggcaggggctgcytggactgcatactgggttcagcaacctcactataggtattcattccctcaggaacaactgcattcttttctcatttccagaaacctcatcccgtttacctcactacaaggaggaggatggtggagagtggtacattttaaaatgtgcactagtctccctgggactccccttcaaataacccaggagggaccacacaagggaaagcttatgcatcccccccacccagtgaccatcttcctaactctgggtgtagggagactcgtaagcctacgggattggtttgggaacagggtatttgagctcacaacacaaggtgatgcaagctaacaccaatctcgctgcagctttggccacc

SEQ ID NO: 569531 - DNA, 450 bp, Homo sapiens
tccaataatgagacctccccatatcatcacaagacatccaccatctcaacatcaaacatgtactgaacaatggattgtggatggatagtaaactacgatcttctgaggatraccccccaggcccactggcacccagcaggaccacgaggcttttgctagaccacacctctccatttcacatgcagcttctggcaaaagctcccttttttaccggttttaaaggttagctaatatttcccacttactcctcctggcaggaagtaaggattattgctccagaacccaccgagggtgcagtcagaggcagtaacgaggagaagaagccttcaaactagagacaccaactacgtcaggcaaagaccatatggaagtgccatcaccaaacgtggccatgggggagaaaggctccaaggaaaagtgggtgccagccaaccccatcatcagtgtcaa

SEQ ID NO: 569532 - DNA, 543 bp, Homo sapiens
tgtactgaacaatggattgtggatggatagtaaactacgatcttctgaggatgaccccccaggcccactggcacccagcaggaccacgaggcttttgctagaccacacctctccatttcacatgcagcttctggcaaaagctcccttttttaccggttttaaaggttagctaatatttcccacttactyctcctggcaggaagtaaggattattgctccagaacccaccgagggtgcagtcagaggcagtaacgaggagaagaagccttcaaactagagacaccaactacgtcaggcaaagaccatatggaagtgccatcaccaaacgtggccatgggggagaaaggctccaaggaaaagtgggtgccagccaaccccatcatcagtgtcaatatagaagcactgggaagaaagccctgagtgacaagatgtcagtgttctctatgattggccttgcttggtatcttatgtacaaatggcttgtgggtagctgcttaacccaggcctggcagcctagagggctgctagaacaggacagcccta

SEQ ID NO: 569533 - DNA, 543 bp, Homo sapiens
tgtactgaacaatggattgtggatggatagtaaactacgatcttctgaggatgaccccccaggcccactggcacccagcaggaccacgaggcttttgctagaccacacctctccatttcacatgcagcttctggcaaaagctcccttttttaccggttttaaaggttagctaatatttcccacttactcctcctggcaggaagtarggattattgctccagaacccaccgagggtgcagtcagaggcagtaacgaggagaagaagccttcaaactagagacaccaactacgtcaggcaaagaccatatggaagtgccatcaccaaacgtggccatgggggagaaaggctccaaggaaaagtgggtgccagccaaccccatcatcagtgtcaatatagaagcactgggaagaaagccctgagtgacaagatgtcagtgttctctatgattggccttgcttggtatcttatgtacaaatggcttgtgggtagctgcttaacccaggcctggcagcctagagggctgctagaacaggacagcccta

SEQ ID NO: 569534 - DNA, 582 bp, Homo sapiens
ctccaataatgagacctccccatatcatcacaagacatccaccatctcaacatcaaacatgtactgaacaatggattgtggatggatagtaaactacgatcttctgaggatgaccccccaggcccactggcacccagcaggaccacgaggcttttgctagaccacacctctccatttcacatgcagcttctggcaaaagctcccttttttaccggttttaaaggttagctaatatttcccacttactcctcctggcaggaagtaaggattattgctccagaacccaccgagggtgcagtcagaggcagtaacgaggagaagaagccttcaaactagagacaccaactacgtcaggcaaagaccatatggaagtgccatcaccaaacgtggccatgggggagaaaggctccaaggaaaagtgggtgccagccaaccccatcatcagtgtcaatatagaagcactgggaagaaagccctgagtgacaagatgtcagtgttctctatgattggccttgcttggtatcttatgtacaaatggcttgtgggtagctgyttaacccaggcctggcagcctagagggct

SEQ ID NO: 569535 - DNA, 553 bp, Homo sapiens
ttgttcattggctttgcagaaatgagaacagccaatgatgtcaggagtccggatttgccgaagtcatcagcatctggcaaascctgagctggagccagaaggaggcgccatggcctggtgggaagccccgatgaagagtgggaggtgaagctggagtcagggttttgtggaaccgcctgtgcccgatctgtgagaagctatgggttatcagccacccccggtttcctcccttttaaaagaagagggtgaattttatgtctttttagggaccaattttcaaactaggcagctcatcagaatcacctggtgattcttcacccaaaaaaaaatcaccctcgaatcagaatttttgataatgaggctctaggatctgtctttttaacaaaccccccaaatggccacaactcacacaatgttactgcttcatgcttttacacatcttgatgtatttctaggatttgtgaatgtatgctttttcaattttagcattttgaagttaaggtgaatcttataattgatgtaaataattaatgtggtcttctctccccttccc

SEQ ID NO: 569536 - DNA, 553 bp, Homo sapiens
ttgttcattggctttgcagaaatgagaacagccaatgatgtcaggagtccggatttgccgaagtcatcagcatctggcaaaccctgagctggagccagaaggaggcgccatggcctggtgggaagccccgatgaagagtgggaggtgaagctggagtcagggttttgtggaaccgcctgtgcccgatctgtgagaagctatgggttatcagccacccccggtttcctcccttttaaaagaagagggtgaattttatgtctttttagggaccaattttcaaactaggcagctcatcagaatcacctggtgattcttcacccaaaaaaaaatcaccctcgmatcagaatttttgataatgaggctctaggatctgtctttttaacaaaccccccaaatggccacaactcacacaatgttactgcttcatgcttttacacatcttgatgtatttctaggatttgtgaatgtatgctttttcaattttagcattttgaagttaaggtgaatcttataattgatgtaaataattaatgtggtcttctctccccttccc

SEQ ID NO: 569537 - DNA, 586 bp, Homo sapiens
ttaaacatattgatgttgtacttgaagattcacatgaaatctttttgcctgctttagccggaatggcctgcttcttctaaggtcctaaagcttcatgatgccaaatagtacccrtgatgttttttcatgtttcagccttgaatacttttatttattttgttttttaaaggtgtgctgtcatagggtctagaaaatggactgctctacctctgttgaatttagctttttcctgtggaatttaggaataacaattaataaatcattttatattgttatgtgctattagatgcaattagttaatgtaatcagaattaatttattaaccccctactttatgttacagtcatccatgcactctggtacaacaataagcaaaacatgcagcttcccttctggagtaaggaggcaaatgttacgtatagtaagtgaagtgtacagggagtgagatggttgcaattctatagttagcaatgaggaaaatcggagaatggaggtcagcagggggatcttgttgcaatttaaggttgagagatcagaaaagacctcagtgaccaagtgaaatttttagctgagacctcagatgctt

SEQ ID NO: 569538 - DNA, 593 bp, Homo sapiens
ttcactcggttgattgtttcctttgctgtgcagatgctttagcgttaaatgaagccacacttgtctattttccctttyattgcctgtgcctttggtgtcatagccaagaaatcattacctacatcaatgtcaaaagctttatccttctatacacttctagtagtttatggtttcagttgttacatttaggttttcaattcattctgagttgatgttcctacatggtgtgagataaagatttaaatacatacatatataaaatcatgaggtagtgtacactataaatatacaattgttaattgttactcaagtctaagtagaggtggaaataataaactttcttttttttacttaaaccactctgtgtcactgagctgatttcacctttagcctgataaaatcattgtcctctccaccctgattcctacaggagactactcaccccataacctcaaaaacctcttcatgaggatggtaagtcacctgaatcctgaagtgaattactcgctattccattggaactcatataggacacagaatctagacctccagagaacagcaggacccatcttcagaaaataagaagcatttgt

SEQ ID NO: 569539 - DNA, 578 bp, Homo sapiens
acccatcttcagaaaataagaagcatttgttccctgagcctgtgaatcaaaagtgcaattctatttctttttggaatgttaaaaagtgaatcataatatttaagcaggtgaacccacgagtaacatagcagggtctttcttgtcattattagctccaacctagcacagacattaaaggtacagatgtatactagcatgaaactgggagaacaggagcattcgagcaaccttgagaccaatgggcctctcttataaaatgcacacctcctctcactgagattgaggaaggtttcttgtctccgagccttctcccagtagagctataaatccaggctggctcctccctccccacacagctgctcctgctctccctcctccaggtgamcccagccatgaggaccctcgccatccttgctgccattctcctggtggccctgcaggcccaggctgagccactccaggcaagagctgatgaggttgctgcagccccggagcagattgcagcggacatcccagaagtggttgtttcccttgcatgggacgaaagcttggctccaaagcatccaggtgagagaggc

SEQ ID NO: 569540 - DNA, 578 bp, Homo sapiens
acccatcttcagaaaataagaagcatttgttccctgagcctgtgaatcaaaagtgcaattctatttctttttggaatgttaaaaagtgaatcataatatttaagcaggtgaacccacgagtaacatagcagggtctttcttgtcattattagctccaacctagcacagacattaaaggtacagatgtatactagcatgaaactgggagaacaggagcattcgagcaaccttgagaccaatgggcctctcttataaaatgcacacctcctctcactgagattgaggaaggtttcttgtctccgagccttctcccagtagagctataaatccaggctggctcctccctccccacacagctgctcctgctctccctcctccaggtgaccccagccatgaggaccctcgccatccttgctgccmttctcctggtggccctgcaggcccaggctgagccactccaggcaagagctgatgaggttgctgcagccccggagcagattgcagcggacatcccagaagtggttgtttcccttgcatgggacgaaagcttggctccaaagcatccaggtgagagaggc

SEQ ID NO: 569541 - DNA, 406 bp, Homo sapiens
ccagccatgaggaccctcgccatccttgctgccattctcctggtggccctgcaggcccaggctgagccactccaggcaagagctgatgaggttgctgcagccccggagcagattgcagcggacatcccagaagtggttgtttcccttgcatgggacgaaagcttggctccaaagcatccaggtgagagaggcaggcatgcagagctgctaagtctagagggaaggacgggagagaggttccagagttgggtctcagcagtctatgtcactgaggtggcttcacttagaatctctgggcattgattttctcatctagaaattgaacagagagccaaataaacmtgagaaactttatttctccaaagacttgattccaagaaacgtctgtgaaattcactaagtttaa

SEQ ID NO: 569542 - DNA, 632 bp, Homo sapiens
ttgcgaccctacaggcacctactaatgccctggaagctaaaactgtcaccagagcctcagtttccccaaagagcccaaatttcttcttatgctggggtgagactggtgctcacttcctccaaagctgaagttcctgggcctgccacacatcaggaattcactgcttcctcagagggacaggagaccccactgctctgccacagcgaccgcctctagcaaagcttgagatgcctcytctaccttaaggttgagggagatgctttagttatcactccactgcccccaggcctccaccggccgatgcctgctgccttcacacagagctgcgggggggccctgagcacccagcctgtgggaccagcgctgtgcacgacattcccatggtggcaggggctgcctggcatgcacactgggttcagcaacctcaccgcaggtatttattgcctctcgagcgactgcattcttttctcatctccagaaaccttaccccatctacctgactaggagaaggaggaggacggtggatagtggtacattttaaaatgtgctctagtcttcttaggaattctcctcaaataacacaggaggaaccacaggagtttgatcctgcatatttcaagcgaccactgatc

SEQ ID NO: 569543 - DNA, 394 bp, Homo sapiens
ggacaggagaccccactgctctgccacagcgaccgcctctagcaaagcttgagatgcctcttctaccttaaggttgagggagatgctttagttatcactccactgcccccaggcctccaccggccgatgcctgctgccttcacacagagctgcgggggggccctgagcacccagcctgtgggaccagcgctgtgcacgacattcccatggtggcagggrctgcctggcatgcacactgggttcagcaacctcaccgcaggtatttattgcctctcgagcgactgcattcttttctcatctccagaaaccttaccccatctacctgactaggagaaggaggaggacggtggatagtggtacattttaaaatgtgctctagtcttcttaggaattc

SEQ ID NO: 569544 - DNA, 632 bp, Homo sapiens
ttgcgaccctacaggcacctactaatgccctggaagctaaaactgtcaccagagcctcagtttccccaaagagcccaaatttcttcttatgctggggtgagactggtgctcacttcctccaaagctgaagttcctgggcctgccacacatcaggaattcactgcttcctcagagggacaggagaccccactgctctgccacagcgaccgcctctagcaaagcttgagatgcctcttctaccttaaggttgagggagatgctttagttatcactccactgcccccaggcctccaccggccgatgcctgctgccttcacacagagctgcgggggggccctgagcacccagcctgtgggaccagcgctgtgcacgacattcccatggtggcaggggctgccyggcatgcacactgggttcagcaacctcaccgcaggtatttattgcctctcgagcgactgcattcttttctcatctccagaaaccttaccccatctacctgactaggagaaggaggaggacggtggatagtggtacattttaaaatgtgctctagtcttcttaggaattctcctcaaataacacaggaggaaccacaggagtttgatcctgcatatttcaagcgaccactgatc

SEQ ID NO: 569545 - DNA, 632 bp, Homo sapiens
ttgcgaccctacaggcacctactaatgccctggaagctaaaactgtcaccagagcctcagtttccccaaagagcccaaatttcttcttatgctggggtgagactggtgctcacttcctccaaagctgaagttcctgggcctgccacacatcaggaattcactgcttcctcagagggacaggagaccccactgctctgccacagcgaccgcctctagcaaagcttgagatgcctcttctaccttaaggttgagggagatgctttagttatcactccactgcccccaggcctccaccggccgatgcctgctgccttcacacagagctgcgggggggccctgagcacccagcctgtgggaccagcgctgtgcacgacattcccatggtggcaggggctgcctggcrtgcacactgggttcagcaacctcaccgcaggtatttattgcctctcgagcgactgcattcttttctcatctccagaaaccttaccccatctacctgactaggagaaggaggaggacggtggatagtggtacattttaaaatgtgctctagtcttcttaggaattctcctcaaataacacaggaggaaccacaggagtttgatcctgcatatttcaagcgaccactgatc

SEQ ID NO: 569546 - DNA, 399 bp, Homo sapiens
tcaggaattcactgcttcctcagagggacaggagaccccactgctctgccacagcgaccgcctctagcaaagcttgagatgcctcttctaccttaaggttgagggagatgctttagttatcactccactgcccccaggcctccaccggccgatgcctgctgccttcacacagagctgcgggggggccctgagcacccagcctgtgggaccagcgctgtgcacgacattcccatggtggcaggggctgcctggcatgcacactgggttcagcaacctcaccrcaggtatttattgcctctcgagcgactgcattcttttctcatctccagaaaccttaccccatctacctgactaggagaaggaggaggacggtggatagtggtacattttaaaatgtgc

SEQ ID NO: 569547 - DNA, 530 bp, Homo sapiens
cccatcaaatatctcaactgtccttcccascagagttatttaataaacccaatggaaagtagcccaggttattaggacacctgatcccaaatgactcttaaatagggaagtcctctcctgtttgtgcacggctgctcttgctacaggagacccgggacagaggactgctgtctgccctccctcttcactctgcctaccttgaggatctgtaagtaacccaagacttaaaactttcacattgaggtttcaacattgaacctgtgcccccagtctgacctctgactcctgggccaccccagagggaccttgtgggtgaatctcttgctgcgcatttctctctgaacctctggtggctgctgggagctttagctaccggctcaattaatagagaacctcaaggaatttccttctaaatctacgtgtcctacttgacacgtccaatacagacaacaatagctccttagaacatccttttatttggagagaagcctatcctgctccttggcctgtttttcaaacaggttacttgt

SEQ ID NO: 569548 - DNA, 606 bp, Homo sapiens
cacatactatgtgcacatccttaacgaacccagcaaaacctgccctgcctgctaacacaagcccacgtgggattcagtctcaaccaggtggtctgcaacatcccagcccaccaatcggctttggtgtcttgttatggttagagctcaggtactgggcaggctggttcaggggaagattcctcatcctctcctgtgcatgggtgtcaaacttgaacttgtctctctaacagagtgtgtcctgtgatatgcaggccaggctctcctgggggctttaaatattcccttgctgcaactagctcagcatcagccaccagcacaggcatctcggggtccattgtgttaggagtcatggagaatccatcgttggttgctgcctgggcctgggcaaggttgacaaaggcagatgaggggaccctccatggactcctgtccgaaccccagcttcccatcaaatatctcaactgtccttcccaccagagttatttaataaacccaatggaaagtarcccaggttattaggacacctgatcccaaatgactcttaaatagggaagtcctctcctgtttgtgcacggctgctcttgctacaggagacccgggacagag

SEQ ID NO: 569549 - DNA, 343 bp, Homo sapiens
tatttaataaacccaatggaaagtagcccaggttattaggacacctgatcccaaatgactcttaaatagggaagtcctctcctgtttgtgcacggctgctcttgctacaggagacccgggacagaggactgctgtctgccctccctcttcactctgcctaccttgaggatctgtaagtaacccaagacttaaaactttcacattgaggtttcaacattgaacctgtgcccccartctgacctctgactcctgggccaccccagagggaccttgtgggtgaatctcttgctgcgcatttctctctgaacctctggtggctgctgggagctttagctaccggctc

SEQ ID NO: 569550 - DNA, 423 bp, Homo sapiens
caagatctaagctggaaaagggaatacagaatggccaagaggggctagaataaagttggaggggtccrctggataaaacaaactccagtgtacattagaggccaggtatgatggctgacacctgtaatcccagtgctttggaaggccaaggtgggaaggctagcttgaggccaggagtctgagaccagcctgggcaacataaggagatcctgtctctaaaaaaatgtttttaattcactgggtatgggggcacatgcctaaagtgtcagctactcagggggctgatgtgagaggcctgctggagcctgggaggttgaggcggcagtgagctgtgaccgtgccactgcacttcagcctgacagacagagtacgactctgcctcaaaaaaataaaaaagacattagaataacaaggaagctcctc

SEQ ID NO: 569551 - DNA, 415 bp, Homo sapiens
ctaagctggaaaagggaatacagaatggccaagaggggctagaataaagttggaggggtccgctggataaaacaaactccagtgtacattagaggccaggtatgatggctgacacctgtaatcccagtgctttggaaggccaaggtgggaaggctagcttgaggccaggagtctgagaccagcctgggcaacataaggagatcctgtctctaaaaaaatgtttttaattcactgggtatgggggcacrtgcctaaagtgtcagctactcagggggctgatgtgagaggcctgctggagcctgggaggttgaggcggcagtgagctgtgaccgtgccactgcacttcagcctgacagacagagtacgactctgcctcaaaaaaataaaaaagacattagaataacaaggaagctcc

SEQ ID NO: 569552 - DNA, 607 bp, Homo sapiens
cacaaactagctgggcctggtggcatgtgcctgtaatcccagctacttgggaggcttaggcatgcaaatcgcttgaacccatgaggcagaggttgcagtgagctgaaatcacaccactgcactccagcctgggcaacagagtgagactccatctcaaaaaaataaaacaaataaataaataaatagtgatacaaatcttaaaagtttaaccttcttactttataaatgagcaaactagggtccacaggcagctgatcatactaacatgaatatttattgaatactttatatgtaccatgctttatatgcatattgcttatttgatcttcacaatcatagctctgagatgggtaagacatttccattttactgatagagagactaatggtgagaaacacctggaaacttgtcctaaacagctaggatttgaagtccagctagttcatgctttatgctatatataattcctctgtatccaagtcacaawccataatcactccaagggtgcaacattccttaatttcattttcaaattttcagtccactatatatcctgtaactgtaaaaatgaagagccagaaagaattttaaaaataaactaaatagc

SEQ ID NO: 569553 - DNA, 572 bp, Homo sapiens
cagcgggtgcggtggctcatgcctgtaatcccagcactttgggaggccgaggcaggtggatcacgagatcaggagttcaagaccagcctggccaagatggtgaaaccccgtctctactaaaaatacaaaaaaaaaaaaaaaaattagccgggcatggtggcgggcacctgtaatcccagctactcgggaggctgaggcaggagaatcacttgaactcggagggcagaggttgcagtgagccgagattgcgccacggcactccagcctgggcaacagagtgagactccatctccaaaaaaaaaaaaagaatattcatgattcataggaacaggaacaggagtttggaagatgataccaatcctggatgattctgaggagttcaaaacttcagtggaggaagtcactgcagatgtggtagaaatagaaagagaaccagaattagaaacagagcctgaagatgtgactgaactgctgcaatcttgtgatcaaacttgaacagatgaggagytgcttcttatgaatgagcaaagaaagtgatttcttgagatggaatgtactcctggtgaatatgc

SEQ ID NO: 569554 - DNA, 452 bp, Homo sapiens
tacttggaaggctgaggtgggagaactgcttgagcccaggaggtcaaggccrcagtgagccatgtatgctctccactactggagccactactgtactccagcctgggcaacacagcaagaccctgtctcaaaaaaaacaattccagattcatggtatttctgggagagtataatagacattctttgacattctttatggtacctgtccagtctacacacatacagcctagttaactactaattttctattttttcagcttacattttcattgctacattaatagttaacatacgtacacatatctctcttctctgaaaacctccttcccctcccactgggtaaagtgcctgaatatgttcatctaagtatttatcaaaacaacaacaaactccctacctcatgagaaaagcagatactatttatacaaataactgctgcattagataataac

SEQ ID NO: 569555 - DNA, 598 bp, Homo sapiens
aattgcggccgggcgtggtggctcacgcctgtaatcccagcactttgggaggccgaggcagacagatcaagaggtcaggagatcgagaccatcctggctaaaaaattagccgggcatggtggcgggagcctgtagtctcagctactcaggaggctgaggcaggagaatggcgtgaaccggggaggcagaggctgcagtgaactgagatcacgccactgcactccagcctgggtgacagagcgagactctgtctcaaaaaaaaraaagaaagaaagaaagaaatttgcacttttcagaccaagatctggaattcaatgctgtcagcattaaaagaagtgaccctcctggtcccaacgtgtgcgactggattgctatgggacacaaaaagaaaacaacagaagaaagggccatgccttcattcagccgtctatgtactgaggacctgctgtgtgctgggcacttgaaatatatactaagcaaagagatatggccctacccttctggagcttacaaaccagtgcaacacggtgtggaaaagccagtgtcacagacagaggtagaataacaactgtaagaagtgctgtgaagaaaaggaaca

SEQ ID NO: 569556 - DNA, 509 bp, Homo sapiens
atggactttggggacttgcgaggagtagtgggagggggacgagrgataaaacactacaaataaggtgcagcgtatactacttgggtgatgggtgcaccaaagtctcacaaatcaccactaaagaacttactgatgtaaccaataccacttgtaccccaataacttatggaaaaattttaaaaaaggaaataaggaaagcaaaacaaaacaaaaccaaaacccaaatgcaaatgaaatacaaaactgaaaatcaataggttacgtcctcctcatcagtctgttctcaacaagacagccatagtcaccttatttaaacacgtcagaacaaggcaatgccctattcaaaattatacatgatccctctccctcagcacctttcacacacttagattaaaattgagccttattatgagtgaaggcactatatgatctggcttcccactatgttggaactcaaaatcctaccagtctccacctcattaaccacactttggatacaaaggcctagt

SEQ ID NO: 569557 - DNA, 509 bp, Homo sapiens
atggactttggggacttgcgaggagtagtgggagggggacgagggataaaacactacaaataaggtgcagcgtatactacttgggtgatgggtgcaccaaagtctcacaaatcaccactaaagaacttactgatgtaaccaataccacytgtaccccaataacttatggaaaaattttaaaaaaggaaataaggaaagcaaaacaaaacaaaaccaaaacccaaatgcaaatgaaatacaaaactgaaaatcaataggttacgtcctcctcatcagtctgttctcaacaagacagccatagtcaccttatttaaacacgtcagaacaaggcaatgccctattcaaaattatacatgatccctctccctcagcacctttcacacacttagattaaaattgagccttattatgagtgaaggcactatatgatctggcttcccactatgttggaactcaaaatcctaccagtctccacctcattaaccacactttggatacaaaggcctagt

SEQ ID NO: 569558 - DNA, 604 bp, Homo sapiens
gattctgctttcaaggggtttttaatatcaaatttaaaacaacaacacaagattttatacatgaaaagcatactctgcatcatgaaaggcacaaaatgcaacagatgtaccaacaatccatgtttgaatgaaccatctacaaatcattctataagccctctgatatgtctatctatcccatactagatctttattctggattcaacaatattctcttagtttgaggacaaaagagattaaggagacagccctcatttgtaattaaatttgttacaaaacttattgagcaaccactatgagtgggctgcttccataaatggaggagaaaaaatcattctgaaattagatagcaacagttatataattgtgtatttaaaggcacaatggtagtgtgtatactccacaaaatatcttactattgattaaaaaaaaaaaaaagctgcccctgaaaagagattttttagggaagkgttttttggggttttggtaaagtctatttgatattttactggctggggaaggaaaaaaaataggcccccaaacttgcatatgtcctaatcactgggaacctatgaatatgtcactttacagggcaaaagggact

SEQ ID NO: 569559 - DNA, 604 bp, Homo sapiens
gattctgctttcaaggggtttttaatatcaaatttaaaacaacaacacaagattttatacatgaaaagcatactctgcatcatgaaaggcacaaaatgcaacagatgtaccaacaatccatgtttgaatgaaccatctacaaatcattctataagccctctgatatgtctatctatcccatactagatctttattctggattcaacaatattctcttagtttgaggacaaaagagattaaggagacagccctcatttgtaattaaatttgttacaaaacttattgagcaaccactatgagtgggctgcttccataaatggaggagaaaaaatcattctgaaattagatagcaacagttatataattgtgtatttaaaggcacaatggtagtgtgtatactccacaaaatatcttactattgattaaaaaaaaaaaaaagctgcccctgaaaagagattttttagggaagggttttttgkggttttggtaaagtctatttgatattttactggctggggaaggaaaaaaaataggcccccaaacttgcatatgtcctaatcactgggaacctatgaatatgtcactttacagggcaaaagggact

SEQ ID NO: 569560 - DNA, 504 bp, Homo sapiens
gtgaatttatactgaattcaaaattcactgctagaagcaccaccatgagcccagctcagacagtgcatctgccctggaagtctctctcgtactcaagtgtgttagacccacacagacttgctgtaacctgacattccaactccatagattccctcaggtycctcatttcttgttgcagagcttagtgttccagaccattacattccatagaatgtgccaaggacaagagcattgattttcaatggtaacacacgccagtgcagtcacctctctgtgtcatcctgtgtcctgttttgtctcagggccagaagagaaatagaaaaagtttttgacttgacagagcggaaaaaaattaaaaagagaccttttcttaacacccgagaagggaaaataaattatgtagaattatgtcacatcaagaaaaacatgattaaaataacctgatataaatattcatccatgcttgacagaagggtggtagcaagatgagtgcttgcagcttat

SEQ ID NO: 569561 - DNA, 464 bp, Homo sapiens
ataactctctgacaaaatactagcttctccatagattagttaattgatttattcaattgatacttgttgagtctcatctacatatcgtgtatagtgctgaatggtcaaattccattatcagggaatttgaaacctagtcagacagccaaatattaaagaatcatctcaagaatgactcaaggtattttttcttggcactttttatgcaattctttttggtaagtatttcatggatttaaaaaaataataatgggcataaacrtgtgtgtgtgtgtgtgtgtgtgtgtgtgtgtgtgtgtgtgtactttatatacattctagggggagttacagaccttttctgaggatctgatggaagtaccatgttcccagaaaagttcacagtcacacacacatgcaaataataatttgtatagagctcaaagatttctcaatactcaaaaaaccaacccatacattttagc

SEQ ID NO: 569562 - DNA, 464 bp, Homo sapiens
ataactctctgacaaaatactagcttctccatagattagttaattgatttattcaattgatacttgttgagtctcatctacatatcgtgtatagtgctgaatggtcaaattccattatcagggaatttgaaacctagtcagacagccaaatattaaagaatcatctcaagaatgactcaaggtattttttcttggcactttttatgcaattctttttggtaagtatttcatggatttaaaaaaataataatgggcataaacgtgtgtgtgtgtgtgtgtgtgtgtgtgtgtgtgtgtgtgtgtactttatatacattctagggggagttacagaccttttctgaggatctgatggaagtaccatgttcccagaaaagttcacagtcacacacacatrcaaataataatttgtatagagctcaaagatttctcaatactcaaaaaaccaacccatacattttagc

SEQ ID NO: 569563 - DNA, 622 bp, Homo sapiens
acctgtttgaccccttttgttccttctatgtgaggacacagcaacaaggcaccatcttggaagcagagagcagccctcaccagacattgaatcttctggcaccttaatcttggacttcccagcctctagaactgtgagaaataaatttctgttatttataaattaccaagtgtaaggtatgttgtgatagcagccctacctaactaggacaaatattttagcaatgaggaaaaaattwttttcaataaagtgatcctggaacaaaaggatatctgtatgtgaaaaaaaaaaaaaccacccctagtttactacacataaaaaataattcaagaaaaatcacagacctaaacataaaagccaaaagtataaagcttcttagaagaaaacataagagaatattgtaagaccttgggataagcagtgatgttttatataggacagagaaacactaactataaaaaaattggataatttgggcttgcgcagtggctcacacctgtaatcccagcactttgggaagccgaggtccaaagatgtgtgaatggaaagtttactagagtccctgtagaaataaacagacatttaaccagactcttgaaagtcttataagttccttgccaat

SEQ ID NO: 569564 - DNA, 648 bp, Homo sapiens
ttggaggatctgcccatctggtggtatgcatactgccatagctctctggagtttacctattttctggttcatggagttttgttttaaccactgaaaaagaaatttgtcactcaaacaaacatttaaaaakggggttgggtgttgggatggggggaacattcttctagccattcttggtctggtgccagaaacagctgtaattttctataaatcacatttgagtgtgatggaaatgactgatttacaaccatctcctctcctcagacctttaattatgtctgcattccttttcatctctaatcttcaaaaaagatcatttctattcattgtttttaattgtatattttgcatgcttgtgtttcctttaaatataagaaaacaaagcattaaaaactttacactctggatggctggaagctactttttttttcggattttaaaattatcagtctaaagacattctttactctttttccattccttctttgctaatttacttttcagacacataaaggatttacacagcaattcttcccttcatctcttttgcccctaccttcctcaaagtaggtaagagtatctcgagcacacatctgcagtaattatattctccagagatactagtcaaatattttaagattttaatgt

SEQ ID NO: 569565 - DNA, 531 bp, Homo sapiens
gctcacgcctgtaatgccagcactttgggaggccgaggtgggtgatcacctgaggttaggagttcaagaccagcccagtgaaaccccatctctactaaaaatacaaaaattagccaagtgtggtggcatgcacctgtagtcctagctactcagaaggctgaagcaggagaatcacttgaacccggaaggcagaggttgcagtgaaccaagatcatgccactgcactccagcccgggaaacagagcaagactccatctgaaaaaaaaaagaaaaaagagaaaaagaaaaaagaaagmaaatctaagaaaaaatcatttatactctaaaataatggccagagttttccaatttgtatcaacataaatctggaaatatatgtgtaaatggcatcaaagagagttagagaaaggagacaatacaatgtctctgctgaatatattcatgagtgtatttaacagatttttcatttaatgtgtaacttatgcagctggaagagcttaatagtctgtcaatagctgactaaaacttgga

SEQ ID NO: 569566 - DNA, 425 bp, Homo sapiens
actgatttagggagtgatgagaaatataaaagaagaaacggcggtggaaaatgcctggcaggcattcccagtctttagtgccaacctagggargccattccttattatatgtcacaggagaccttggggaagtcagccagctagctcaggcagaggttacaggttgatagaagcttccaattgaattctgcaatataacatcaagtggggacaaactcccttggccagaacctgaggggtgagccagaagtgtgctgcagccaccagcacaggaactgggcacctggacttgcatacagatggaaaggggcatgccctgaatggtacaattgctacagttgctatcaccacagggaaagcttatggcctgggacaggtggagttcttaactcaggctgcttagagcttagctgggtgcttttatt

SEQ ID NO: 569567 - DNA, 442 bp, Homo sapiens
agaacctgggaggcggagcttgcagtgagcagagatctcaccactgcactccagcccgggcgacagagcgagactccgtctcaaaaaaaaaagaaaagggagaggaacatggtattcctggagcgcagtgtayggatttgacagggaggagaggagagactcctgcagaattgataattgagcttatatctgaaggatgcaaagagttgaccaggtgaagagaaaaagaggaggattccaggtagaaggagcggcatgtagagaaagccctgtctgtagaaggaggaaggcaggtacaagaggttaaaggatgatctggagaggtgatgactcagaggccagggtaaggagatttgcctttttataccacgaagagtagaaagttatttgcagttctccagatggcccaggatcatttccaaaataccagaaagttcaacaa

SEQ ID NO: 569568 - DNA, 442 bp, Homo sapiens
agaacctgggaggcggagcttgcagtgagcagagatctcaccactgcactccagcccgggcgacagagcgagactccgtctcaaaaaaaaaagaaaagggagaggaacatggtattcctggagcgcagtgtacggatttgacagggaggagaggagagactcctgcagaattgataattgagcttatatctgaaggatgcaaagagttgaccaggtgaagagaaaaagaggaggattccaggtagaaggagcggcatgtagagaaagccctgtctgtagaaggaggaaggcaggtacaagaggttaaaggatgatctggagaggtgatgactcagaggccagggtaaggagatttgcctttttayaccacgaagagtagaaagttatttgcagttctccagatggcccaggatcatttccaaaataccagaaagttcaacaa

SEQ ID NO: 569569 - DNA, 516 bp, Homo sapiens
ttatgattgtgactctatttttttkttttttgagacaagtctcactctgtggccagactggagtgcagtggtacaatctcagctcactggaaccactgcctcctgggttcaagtgattctcctgcctcagcctcccaagtagctgggactacaggcatgtgccaccatgcccagttaatttttgtatttttagtagagatggagtttccccatgttggccaggatggtctcaatctcctgaccttgtgatccgcctgcccttggcctcccaaagtgttaggattacagtcatgagcccccgtgcatggcccacatcacacttttaagctgtgtggtctacttattcccatgttgctttgttaactgagtttaaaattttatggaatcacatcaccagcgtccgtcttagtatactcagtcctcctgtgtcacactcatgcagcctgaccttctgcaaaaaaattaaacatgggagggagtgttcaaaaagaaccacagagggtagtaggtaggagc

SEQ ID NO: 569570 - DNA, 641 bp, Homo sapiens
ctcgctctgtcacccaggctggagtgcattggtgcaatctcagctcactgcaacctccacctcccaggttcaagcaattctacctgcctcagcccccaagtagctgggattgcaggcacaggccaccacacccacctaatttttgtgttcatagtagagacggggtttcgccgtcttggccaggctggtctcaaactcttgacctcaagtgatccgcccaccttggcctcccagagtgctgggattacaggcatgaaccaccgcgctcggccacatgtttttaacttttatttttccaatatttttgatctatgattggttgaatttgtggaagccaaacccacagacatggagagccagctgtgtattgttattgtcatgtcttttattctcccctgttcttttctgcctaaatgccttaggtacttctttacagagttagatagcatttaccattgataccacccagagtggtgtggtttgcttctyctgaccctttcatgagcaaagctggtttcaggggaaactcagggatctgaactgttagtaacactgattagaaatgcagcagttttattcaggccttggttttattgaccatttttggttggctcttatctctgtgactgatcatgtatgcg

SEQ ID NO: 569571 - DNA, 429 bp, Homo sapiens
ccttccagcttcaagcaattctcctgcctcagcctccgaagtagctgggattataggcacctgccactatkcccagatacttttttcgtatttttagtagagatggggtttcaccatattagctaggctgatctcaagctcctgacctcaggtgatccacctgcctcagcctcccaaagtgctggggttacaggcatgagctgcctcactcagccatgaatatcttcttttgagaagtgtctgttcatgtcctttgcccacaattgtattgttagtttttttcttgtgaatgtgtttaagttccttgtagattctgggtgttagacctttgtcagatggatagattgaaaaaattttctcccactgtgtaggttacctgttcactctaatgaaaatttcttttgctgtgcagaagctctttagtttaat

SEQ ID NO: 569572 - DNA, 584 bp, Homo sapiens
gcctggtggctcctatcagtgtgagaatgtggttatattctgtctcagtttttttgtatgcagcccttaaaatctttggaatgtctgatatgagaaatgtctttcgcatgctaatgagattactgctttccaggggcttctggacagcctcagaatggggattggttgccagaaaaaccaatcctgtaatacagagttaaaacttkcagcttaaccccttatctcctgggatgttagaggagctatcttgcctttgtaaaagtaaaaatagtaccttataccatttaaatgaatagataaattgttcaaaaaaggggcatatcattaaaaagctcctctgccccagcctgactacttaaagtacccattaggggaagtttttttggtatccttctgaaattgctttctgtctttccatgcataccatccttaggaaagggcacacttttttgagacggagtcttgctctgtctcccaggctggagtgcagtggcctgatctcggctgactacaacctccacctcccgagttccagtgattctcccacctcagcctcccaagtagttgggattataggcacccac

SEQ ID NO: 569573 - DNA, 584 bp, Homo sapiens
gcctggtggctcctatcagtgtgagaatgtggttatattctgtctcagtttttttgtatgcagcccttaaaatctttggaatgtctgatatgagaaatgtctttcgcatgctaatgagattactgctttccaggggcttctggacagcctcagaatggggattggttgccagaaaaaccaatcctgtaatacagagttaaaacttgcagcttaaccccttatctcctgggatgttagaggagctatcttgcctttgtaaaagtaaaaatagtaccttataccatttaaatgaatagataaattgttcaaaaaaggggcatatcattaaaaagctcctctgccccagcctgactacttaaagtacccattaggggaagtttttttggtatccttctgaaattgctttctgtctttccatgcataccatccttaggaaagggcacacttttttgagacggagtcttgctctgtctcccaggctggagtgcagtggccygatctcggctgactacaacctccacctcccgagttccagtgattctcccacctcagcctcccaagtagttgggattataggcacccac

SEQ ID NO: 569574 - DNA, 289 bp, Homo sapiens
tttctcccatttgcttttgaaagaagagaaatatggctctgttcygcctggctcaccggcggtcagagtttaaggttatctctcttgttccctgaacattgctgttatcctgttcttttttcaaggtgcccagatttcatattgttcaaatacacatgctctacaatttgtgcagttaacacaatcatcacagggtcctgaggtgatatacatcctcctcagcttacaaaatgacaggattaagagattaaagtaaagacaggcataggaaatcacaagggtattgatt

SEQ ID NO: 569575 - DNA, 289 bp, Homo sapiens
tttctcccatttgcttttgaaagaagagaaatatggctctgttctgcctggctcaccggcggtcagagtttaaggttatctctcttrttccctgaacattgctgttatcctgttcttttttcaaggtgcccagatttcatattgttcaaatacacatgctctacaatttgtgcagttaacacaatcatcacagggtcctgaggtgatatacatcctcctcagcttacaaaatgacaggattaagagattaaagtaaagacaggcataggaaatcacaagggtattgatt

SEQ ID NO: 569576 - DNA, 289 bp, Homo sapiens
tttctcccatttgcttttgaaagaagagaaatatggctctgttctgcctggctcaccggcggtcagagtttaaggttatctctcttgttccctgaacattgctgttatcctgttcttttttcaaggtgcccagatttcatattgttcaaatacacatgctctayaatttgtgcagttaacacaatcatcacagggtcctgaggtgatatacatcctcctcagcttacaaaatgacaggattaagagattaaagtaaagacaggcataggaaatcacaagggtattgatt

SEQ ID NO: 569577 - DNA, 289 bp, Homo sapiens
tttctcccatttgcttttgaaagaagagaaatatggctctgttctgcctggctcaccggcggtcagagtttaaggttatctctcttgttccctgaacattgctgttatcctgttcttttttcaaggtgcccagatttcatattgttcaaatacacatgctctacaatttgtgcagttaacacaatyatcacagggtcctgaggtgatatacatcctcctcagcttacaaaatgacaggattaagagattaaagtaaagacaggcataggaaatcacaagggtattgatt

SEQ ID NO: 569578 - DNA, 544 bp, Homo sapiens
tattaatgagtaaaataatatgtacttaaactcaaaatatttagtacattaatgggattttcatggttttcattagcattcattttccttttccttacataattaaattttgaaaatataatcctaataaaatkggcatgtaagatatctccctctagtttactggcaggagcttgtactagaaacagcattagacagggagataagagacctgggttttaaacctatcagttactgaacaagctctgtatgcacttagacaaaaccgagtatccttgctcattaaaaaaaaagggatgtttacctatgagaatcaagtagaactgctttctgactatgctatgtagaatgcgaagtgattaaacatcacagattattatacttccttttgataacccacataatatgaccatgtgactgttttaagtaaccaaatggagaaaacacaaatatcatgatattgaaggaaagaagcagaattgttccatctccatttgaacctactctactggcacatctaatccacaagtttgaggatgagatt

SEQ ID NO: 569579 - DNA, 544 bp, Homo sapiens
tattaatgagtaaaataatatgtacttaaactcaaaatatttagtacattaatgggattttcatggttttcattagcattcattttccttttccttacataattaaattttgaaaatataatcctaataaaatgggcatgtaagatatctccctctagtttactggcaggagcttgtactagaaacagcattagacagggagataagagacctgggttttaaacctatcagttactgaacaagctctgtatgcacttagacaaaaccgagtatccttgctcattaaaaaaaaagggatgtttacctatgagaatcaagtagaactgctttctgactatgctatgtagaatgcgaagtgattaaacatcacagattattatacttccttttgataacccacataatatgrccatgtgactgttttaagtaaccaaatggagaaaacacaaatatcatgatattgaaggaaagaagcagaattgttccatctccatttgaacctactctactggcacatctaatccacaagtttgaggatgagatt

SEQ ID NO: 569580 - DNA, 586 bp, Homo sapiens
tatgactatgttgtgtctgggttggagctctttgagtttttcctgctcaaaggttgtttattgaatttttggatttgtaggttaatgtttccaatcaatttaaacagttttggggcatcatttcttcaaacatttttctttttatgtctttttcccactcctttccttctaggactgccattttacatatgctggaacacttaatggtgtcccacagttctctgttttaatttttctccattcatttttctttgtgttcctaagagtgaagaatctcaattaatttatatttaagtttactgattatttcttctaacttcaagttcactgattcttctgccaggtcaaatctgctgccaaacccttctacataatttttcattgcagttcttatattttctaagtccaaaatatctattggttagtgtttctataatttctctctctttgttgacttttcttttattgaacctggtttaagatggtttcttttagtgcagcatctggactccctcaaagactgtttctgtggactgttttgtttgtttgyttttttctgttatgtgctgtattttcctgtttattt

SEQ ID NO: 569581 - DNA, 442 bp, Homo sapiens
aagatggtttcttttagtgcagcatctggactccctcaaagactgtttctgtggactgttttgtttgtttgtttttttctgttatgtgctgtattttcctgtttatttcatgttctgatttttgattgaaaggaagaatttagataatatagttgattctctttatttatggtagttatgctctataaagttactgcaaatgctgaattagagaatattgtattgtttctcctgtgggatatatgtatatgtgtgtttgtgtgtgtgtgtgtgtatatatatatgtatacrtgtgtgtgtatatatatataattgcctatgtgtgatatatgtatatgtgtgtatgtatacatgtgtgtatatatgtgcatatatatgtatgtgtatatatatgtgtatatgtatgtatatgtatatatatgtgtataatacatatacatac

SEQ ID NO: 569582 - DNA, 611 bp, Homo sapiens
atagacaataaaatatatagaaattaaattcattttgattcaaaaatatttattgagcacccactatgttcagcgctggagagaaaaagataagtaatagctctkccttcaataggtcattgtcctgtgaagaagatatataaacacacacacacacacacatgaaaatgtgtaattaaggcagtgggtaataggcaattttactccaccctcctacctcaaaacctattaaaataataaataatgacaaattaaaaaaatcttcactaataccaagacattgctataattcctgacctcatgttacaaagcacgcctagactgaaaaaaagaacatgcagaaataagtccccccaaattatattccaaaggacataaacaacattttttaaattaaaatgccccattagatcaattttgacaccccagaatcataaaacagggagcactgaaaggaaaaaccatggtggtgcacatgccacttctattgtccatgatgaagcttctctgccaaaggacatagcccagtggggaggaggattgaagaagttttaaaagactattagatccaggttgctacacttaacaatctaagagaacatttgctccta

SEQ ID NO: 569583 - DNA, 547 bp, Homo sapiens
tttgtcacagcactatttatagtataatagtatactgtatatatatacacacacacacacacacacacaggttgaacatccctaatctgaaaaccgaaatccaaaatgctccaaagtccaaaactttttgagtgctgacaacacaccaaaagwggaaaattccacaccagaccctatatgatgggttgcagtccaaacacagtcaaaactgtgcttcatgtaaaaaattattgactgatactgtgtagaattaccttcagggtacttgcataaggtgtatatgaaacaaataaatttcatgtttagacttgggtcccatcccaagatatctcattatgtatatgcaaatattccaaattcaaaaaaacctgaaatctgaaacacttctggtcccaagcatttccaataaggtatattcaacctgtatagcataatatacattttatatattacataatatacagtatatagcataattatgtcatataataattttgaggaaaaaatagaaacatttgaccaaaggagattggtttaataagtcatg

SEQ ID NO: 569584 - DNA, 483 bp, Homo sapiens
caataaaaggatcaatccaacaagaagatattacaatcctaaatatatatgcaccaaactctggagctccagagagtagattttaggtcctcctaccaccaaaacaaaaaacaaaaccaaaaaaaaaaaaacagaaaagttgctacatgagatggtggaatgttaatttgcctcactgttaataatcaacatgcatatatatatcaaagtatgctatacacctcaaatatatatatatatatatatatatatacacacacacacacatacatacatacacacacacacacacacacacacacacacaaataatttttaaacagccattgccatttctaagcctgaaaagcagtgggaagaaatagttcttaatactgacaggagctatgcagaggggraccacctgacaggatcagtggtttttagtagagaaacacaggcactgtcaaacagtgagccaataggaagagagtcagaaaaata

SEQ ID NO: 569585 - DNA, 574 bp, Homo sapiens
ttacatcttaacacatactgctaaaagacaaaaacaagatacaaaatcatctctagataatgatgtagactgtttaaaaataaaatagaaaattggaaataaatcaaatactaacatttgttatctgttagtgataagactgttgttaatatatgtggacatgcttattagacatacaagtggtgatgaaaaatagttattccaactcttctgtttagaatttttttgctttttttgttattcctctgtggaatatttccagaagtcaaataaagttgagggtcattcatgaataaaaggagctggttcattattgaggrgctcttaccaagacacttaactttttgttttgttttgttttttaagacagggtctcactctgttgtccaggctggggtgcagtggcacaatctcggctcacggcaacctccgcctcccaggttcaatgattctcatgcctcagcctcccaagtagctgggattacagacaggcaccaccacacccagctaatttttgtattctccgcagagatgagattttgccatgttagccaggtcagtctcgagctcctga

SEQ ID NO: 569586 - DNA, 540 bp, Homo sapiens
agagcaagactctgtctcaaaaacaaacaaacaaacaaacaaamaaaaaaacaaaacaaaaaaagatccttatccattacttatgtctgtcttcattactgattacaggagcatattttaatgattgtttggcagagggtgatcaagtagcaaaagttctggaactcagatacctaactcaaaacgaaacatcaaaaatgaaaaaaaaaaaatctagacagtggagcaaccaggagtatcatggtagacagttacaaaagaaaagggtaacacgaacatgaaaaagtcagttcccctccacattttagtaactagaccgggcaaaacaccatttatcctagatgcgtaatctccacaacaaaatgttctacattttggcccctaatctctacccttgaatgggtagaatgactcttcgtctttccaaagcactgcaatagaacagaatgccaggggaaatatccatacaagacagcatttatttggaccattgtacctttagtgagtgacagagaaaagctagaaaataaattaccactt

SEQ ID NO: 569587 - DNA, 550 bp, Homo sapiens
cttcttttttttttttttgagacaagtctcactctgttgcccaggctggagagcagtggatggagtacagtggctcactgcaatctctgcctcccaggttcaagtgattctcatgcctcagcctccggagtagctgggattacaggtacatgccaccaggcctggctaatttttgtatttttagtagggacgaggtttcatcatgttagccaggctggtctcgaactcctgacctcaagtgatccgcttgcctcagcctccaaagtgctgggattacgggcgtgagccactgtgcccagccattgttgtttcttactctcacttaatttgactttatttacttattttatgctaaatagataacatttgaattcctaagagctgcatgtrtatatgatacatcatctattatacagaagcctttatcagggcagatttggtaaaggaaggggaaatgcaattaaatgcaatctccatctacagaggaatgactaagttacaatctgttctataactagaatattctgtagccactgacaagcatgaacta

SEQ ID NO: 569588 - DNA, 333 bp, Homo sapiens
ttgcaagctgtgtaccctaagttaattataagtcatctgtttggaattaagaatgtatcttctagtgggaagaatattataaatggcaattaccttcctaagcaagaacacaagagactacttaacgtgtaacacagtgaaagactactaaggcaatgcctggtacaatatcagtaattatattaaatactcctgaatgagaatttttaaaattcattttggatggcagtgcttgagagattatttactgaaagataaataactagatggagaatctaagatagtctgcagaatctaaaacatactgaaraaactgctttttattaacaatag

SEQ ID NO: 569589 - DNA, 564 bp, Homo sapiens
attctttttttttttttttttttttttttttgagatgaagtatcactgtgttgcccaggctggagtgcagtggcacgatctcggctcactgcaacctccgcctcccaggttcaagcgattcttctgcctcaggctcccgagtagctgggactagaggcgcacgccaccacrcctggctcatttttgtactcttagtagagatggggtgtcaccatattggtcaggctggtcttgaactcctgacctcgtgatgtgcccacctctgcctcccgaagtgctgggattacagacgtgagccactgtgtctagccaagaattagatatttttaactctcttctttttttccaggaaaggttatgcttaaaccatgttattgtcaaagatctttagagaaagactttttaaaatttatatttatgtaagtaattttagattatttttatagctgagaagtgagtccagaaatcgtccagtgcgataacttcactttttatataataaaacggaatcttagacacattagaagtctgagagtagaaaaatcacacacaaaaaatgggtac

SEQ ID NO: 569590 - DNA, 630 bp, Homo sapiens
  misc_feature 1, 2, 3, 4, 5, 6, 7, 8, 9, 10, 11, 12, 13, 14, 15, 16, 17,18, 19, 20, 21, 22, 23, 24, 25, 26, 27, 28, 29, 30, 31,32, 33, 34, 35, 36: n = A,T,C or G
nnnnnnnnnnnnnnnnnnnnnnnnnnnnnnnnnnnnctggaatactttcatggattttctatttaaagtgatcttctttttctccttcacacacagtcatctaaaccctacaaacacttggggacctaccatcatctttgcgatgtacacctataaactggctgttattcctttcccaggtctgcgaatctctgtatagtcagaaacttgataataaacttttcttttagatgggatggatgcatctcttccattaggctattaataaggatatagtatagacaacttataattcttttgtgaacttgacttctttttattagaaacctgracacatctcaatgctaaatcatataattgatcattgattaattgatgaataaatgacgaccatattttctggcattgacattccattattccatgtttcaaaacccactgaatatatttttagaaaatatttacttaaaaattgtgagagactttcaagaatttaatccaaaatctacaatgaaacctcaatttgccctagtcatatcacttttttacttttagttaaacagataatactttaagagctggtgttattattatttttttattcttatttatttcactagtgtattagtc

SEQ ID NO: 569591 - DNA, 530 bp, Homo sapiens
cagtgctaaacatggaaaggaacaaccggcaccagccactgcaaaatcaggccaaaatgtaaagaccatcgagactaggaagaaagtgcatcaactaacgagcaaaataaccagctaacatcataatgacaggatcaaattcacacataacaatattaactttaaatgtaaatggactaaatgctccaattaaaagacacagactggcaaattggataaagagtcaagacccatcagtgtgctgtattcaggaaacccatctcacgtgcagagacacacataggctcaaaataaaaggwtggaggaagatctaccaagcaaatggaaaacaaaaaaaggcagggcttgcaatcctagtctctgataaaacagactttaaaccaacaaagatcaaaagagacaaagaaggccattacataatgctaaagggatcaattcaacaagaagagctaactatcctaaatatatatgcacccaatacaggagcaccaagattcataaagcaagtcctgagtgacctacaaagagac

SEQ ID NO: 569592 - DNA, 615 bp, Homo sapiens
gaagaatctccttgcatggtttaacctgtctttccaggtattgataccaggttagagtttccttgtaggaatttccctaaaccttttccactctaatatcccatgtcttcaacattttaaatcctgggttatcaaagtttttatttgtaagtctcatatccyatgctgtacttatatttgcaatataaggctagaaagtacatgattatccatccagaccaagacaaggtaaaatctcagcactcttttgaacacgttgaactgctcctactcccactaaggatgtggaggttagtctgagaggccatgctgggggaccagtccttacaggatattactgacacatcagctcctgtgtccataagcccataaaatttctttcctttaattctttttttttttttattttaagatcgtgttaggaagatttgaaaaaaatcgtacagtttccatatacccttcattcagtttcccctatgttaacatcttacataactaatgcacttatctctgagaaactaccataggcacaatgctattaaactacagattttttttattatactttaagttttagggtacatgcgcacaacatgcaggttagttacatatgta

SEQ ID NO: 569593 - DNA, 615 bp, Homo sapiens
gaagaatctccttgcatggtttaacctgtctttccaggtattgataccaggttagagtttccttgtaggaatttccctaaaccttttccactctaatatcccatgtcttcaacattttaaatcctgggttatcaaagtttttatttgtaagtctcatatcctatgctgtacttatatttgcaatataaggctagaaagtacatgattatccatccagaccaagacaaggtaaaatctcagcactcttttgaacacgttgaactgctcctactcccactaaggatgtggaggttagtctgagaggccatgctgggggaccagtccttacaggatattactgacacatcagctcctgtgtccataagcccataaaatttctttcctttaattctttttttttttttattttaagatcgtgttaggaagatttgaaaaaaatcgtacagtttccatatacccttcattcagtttcccctatgttaacatcttacataacyaatgcacttatctctgagaaactaccataggcacaatgctattaaactacagattttttttattatactttaagttttagggtacatgcgcacaacatgcaggttagttacatatgta

SEQ ID NO: 569594 - DNA, 433 bp, Homo sapiens
ctgcagcaacttcaattcttttctcctcaggaaaaaataatttgactgaggggcagaaagcagaaggagagaccaaggcaacttttagagcatgagtgaaartttactaacaaactttagagtaggactgaaaggaagtaaagtacacttggaagaaggacaagtgggtgacttgtacacagtttgacccttgacttagggttttatatgttggtatgcttctgaggtcttgtgtcccttctcacctgattcttcccttgaggtgggctatccacatacacagtggcctgttagcacttgggaggggccacatgcacaatttgtttactggagttctgtgcacactcacttgaagcgttcttcccttatcagttaccattcctagaggaagatcatagaccagttaaacttcaaccttttgcctcttagtgca

SEQ ID NO: 569595 - DNA, 433 bp, Homo sapiens
ctgcagcaacttcaattcttttctcctcaggaaaaaataatttgactgaggggcagaaagcagaaggagagaccaaggcaacttttagagcatgagtgaaaatttactaacaaactttagagtaggactgaaaggaagtaaagtacacttggaagaaggacaagtgggtgacttgtacacagtttgacccttgacttagggttttatatgttggtatgcttctgaggtcttgtgtcccttctcrcctgattcttcccttgaggtgggctatccacatacacagtggcctgttagcacttgggaggggccacatgcacaatttgtttactggagttctgtgcacactcacttgaagcgttcttcccttatcagttaccattcctagaggaagatcatagaccagttaaacttcaaccttttgcctcttagtgca

SEQ ID NO: 569596 - DNA, 555 bp, Homo sapiens
gccatcgccacctgaagtgccctggcaccaagaaaagaaaagaaaaatcagtttgaattctttctcatagcatctgcctggaaaaaaaatctacagtaacatccaaacagaaaaagtacaggtgatacctttggcccaggtttcccagtgggacctcttgcacctcttgaacctcgaggaccctgcagatgagaacaaaagatgaacccraactaatgccagacaaatccaaagacactaaatcaatttttatttttgaaaaataaattatcttgatacactaaattcaatatgaaaaatgtacatcattttaaatcaaggcacctaccgttggaccacgctgaccccgagggcctggtttgccagctactccctagcaaagacagttcaatttcaatatgcagtatatcacagtaaattatgagcctggtgctgagactgagtagtcatgcaagaacatcattcattcattcattcattcgtattcatttagagacagacttgctatgctgcccaggctggcctggaactccgggattcaagcaatcctccacc

SEQ ID NO: 569597 - DNA, 300 bp, Homo sapiens
taaaaatggtttttaaaaattcatatagacataaaaaytggatagaaagcatttgatttacaagattaaactgcaaggccaccttgcaatgcaaccaggaaagttaaaagccgcttatcaagaatagatccatcttagaagtaaatagcacatttgacttcatcttaaaacagtaagcatgcaataacttaagcaataactttttaacaaagaaaaataaaatgtgattttttttttttcttactgaatatactactttggtacttgggccattaaaaatgataaaaaacaaaggagatg

SEQ ID NO: 569598 - DNA, 300 bp, Homo sapiens
taaaaatggtttttaaaaattcatatagacataaaaactggatagaaagcatttgatttacaagattaaactgcraggccaccttgcaatgcaaccaggaaagttaaaagccgcttatcaagaatagatccatcttagaagtaaatagcacatttgacttcatcttaaaacagtaagcatgcaataacttaagcaataactttttaacaaagaaaaataaaatgtgattttttttttttcttactgaatatactactttggtacttgggccattaaaaatgataaaaaacaaaggagatg

SEQ ID NO: 569599 - DNA, 300 bp, Homo sapiens
taaaaatggtttttaaaaattcatatagacataaaaactggatagaaagcatttgatttacaagattaaactgcaaggccaccttgcaatgcaaccaggaaagttaaaagccgcytatcaagaatagatccatcttagaagtaaatagcacatttgacttcatcttaaaacagtaagcatgcaataacttaagcaataactttttaacaaagaaaaataaaatgtgattttttttttttcttactgaatatactactttggtacttgggccattaaaaatgataaaaaacaaaggagatg

SEQ ID NO: 569600 - DNA, 523 bp, Homo sapiens
attctgctgtcggtctgagctgagggagagggaaagctctaaataaagttggagttttgatatcacactggactgaacattctaatgtttggggaaagatgctattcacttgttagctgttggtgattgggataacctgagaacrgccagagatttcacccaggggcaacaaagaataaaagaagagctggtttggaggggaagtggggagaaccaatatagctgcttcctatttgcatcctgataggtgcagttcacccagaatccagttacagatacacaactatggaatgagagtcgacaagggaaaaaaaagcaaaatacagaactgtatatagcacggtgccttttatctaagaaagggagaatttaagtacaaacaagaagaaataaatgaataaatttgcttatatttttaacaaagaaaggataaaccaaaaactaatgaaaatggtttccaataacaggacagaggagacaggattggaaattaatcttctctgaaaatatcttgttgtagttt

SEQ ID NO: 569601 - DNA, 523 bp, Homo sapiens
attctgctgtcggtctgagctgagggagagggaaagctctaaataaagttggagttttgatatcacactggactgaacattctaatgtttggggaaagatgctattcacttgttagctgttggtgattgggataacctgagaacagccagagatttcacccaggrgcaacaaagaataaaagaagagctggtttggaggggaagtggggagaaccaatatagctgcttcctatttgcatcctgataggtgcagttcacccagaatccagttacagatacacaactatggaatgagagtcgacaagggaaaaaaaagcaaaatacagaactgtatatagcacggtgccttttatctaagaaagggagaatttaagtacaaacaagaagaaataaatgaataaatttgcttatatttttaacaaagaaaggataaaccaaaaactaatgaaaatggtttccaataacaggacagaggagacaggattggaaattaatcttctctgaaaatatcttgttgtagttt

SEQ ID NO: 569602 - DNA, 523 bp, Homo sapiens
attctgctgtcggtctgagctgagggagagggaaagctctaaataaagttggagttttgatatcacactggactgaacattctaatgtttggggaaagatgctattcacttgttagctgttggtgattgggataacctgagaacagccagagatttcacccaggggcaacaaagaataaaagaagagctggtttggaggggaagtggggagaaccaatatagctgcttcctatttgcatcctgataggtgcagttcacccagaatccagttacagatacacaactatggaatgagagtcgacaagggaaaaaaaagcaaaatacagaackgtatatagcacggtgccttttatctaagaaagggagaatttaagtacaaacaagaagaaataaatgaataaatttgcttatatttttaacaaagaaaggataaaccaaaaactaatgaaaatggtttccaataacaggacagaggagacaggattggaaattaatcttctctgaaaatatcttgttgtagttt

SEQ ID NO: 569603 - DNA, 523 bp, Homo sapiens
attctgctgtcggtctgagctgagggagagggaaagctctaaataaagttggagttttgatatcacactggactgaacattctaatgtttggggaaagatgctattcacttgttagctgttggtgattgggataacctgagaacagccagagatttcacccaggggcaacaaagaataaaagaagagctggtttggaggggaagtggggagaaccaatatagctgcttcctatttgcatcctgataggtgcagttcacccagaatccagttacagatacacaactatggaatgagagtcgacaagggaaaaaaaagcaaaatacagaactgtatayagcacggtgccttttatctaagaaagggagaatttaagtacaaacaagaagaaataaatgaataaatttgcttatatttttaacaaagaaaggataaaccaaaaactaatgaaaatggtttccaataacaggacagaggagacaggattggaaattaatcttctctgaaaatatcttgttgtagttt

SEQ ID NO: 569604 - DNA, 511 bp, Homo sapiens
atctggtggggacttggagaatctttatgtctagttaagggactgtgaatgcaccaatcagcactctgtatctagcttaaggtttgtaaatgcaccgatcagcaytctgtgtctagctcagggtttgtaaatacaccaattgacactctgtatctagctaatctagtggggacatggagaacttttgtgtctagctcaggattgtaaatgcaccaatcagcgccctgtcaaaatggaccaatcagctctctgtaaaacagaccaatcggctctctgtaaaatggaccaatcagcaggatgtgggtggggacagataagagaataaaagcaggctgcctgagccagcagtggcaacttgctcaggtccccttccacactgtggaagctttgttctttcgctctttgcaataaatcttactactgctcactctttgggtccacactgcctttatgagctgtaacagtgactgcgaaggtttgcagcttcactcctgaagccagcgagaccaca

SEQ ID NO: 569605 - DNA, 421 bp, Homo sapiens
ttctttcgctctttgcaataaatcttactactgctcactctttgggtccacactgcctttatgagctgtaacagtgactgcgaaggtttgcagcttcactcctgaagccagcgagaccacaaacccactgggaggaatgaatgaccccagacgcamcaccttaagagctataacactcaccgcaaaggtttgcagcttcactcctgagccagcaagaccacaaacccaccataaagaagaaactccaaacacatccaaacatcagaaggaacaaactctggacatgccacctttaagaactgtaacactcaccgcgagagtccgcggcttcattcttgaagtcagtgagaccaagaacccaccaattctggacacagaaggatcacgcagcaatatttgttgttctgcagcctccactggt

SEQ ID NO: 569606 - DNA, 421 bp, Homo sapiens
ttctttcgctctttgcaataaatcttactactgctcactctttgggtccacactgcctttatgagctgtaacagtgactgcgaaggtttgcagcttcactcctgaagccagcgagaccacaaacccactgggaggaatgaatgaccccagacgcaacrccttaagagctataacactcaccgcaaaggtttgcagcttcactcctgagccagcaagaccacaaacccaccataaagaagaaactccaaacacatccaaacatcagaaggaacaaactctggacatgccacctttaagaactgtaacactcaccgcgagagtccgcggcttcattcttgaagtcagtgagaccaagaacccaccaattctggacacagaaggatcacgcagcaatatttgttgttctgcagcctccactggt

SEQ ID NO: 569607 - DNA, 421 bp, Homo sapiens
ttctttcgctctttgcaataaatcttactactgctcactctttgggtccacactgcctttatgagctgtaacagtgactgcgaaggtttgcagcttcactcctgaagccagcgagaccacaaacccactgggaggaatgaatgaccccagacgcaacaccttaagagctataacactcaccgcaaaggtttgcagcttcactcctgagccagcaaraccacaaacccaccataaagaagaaactccaaacacatccaaacatcagaaggaacaaactctggacatgccacctttaagaactgtaacactcaccgcgagagtccgcggcttcattcttgaagtcagtgagaccaagaacccaccaattctggacacagaaggatcacgcagcaatatttgttgttctgcagcctccactggt

SEQ ID NO: 569608 - DNA, 587 bp, Homo sapiens
aaaaaataagcaaatatgagaagtaaaatttaccagctggtcaaaaatcaactygaaacgtgattttcacccaattattaaagctaagtcttgagtttctagtcattcacaatggatggatgcatgatgactgtgactattagaattccacgggtgcaaggctctcaggctctcctgcttttctcatgattcctctgtacctctcagtctgaccatctctttatttatttgccctttattctttcttctgtccctcccctatctttatctctctacatgtagtctcttcctttgtacccctcagcctttctttccaccccattttcttctctttcaaaaaaaggaaactggaacagagagaggaagctaagctcacaggcatctctcagtcactgctctttaaaaagggtgaaaaatacagagcagagaagccagaggccttgggacactgaagggcagagtgaagtagagagaaaaaaaggtagcagtttcaaattaagataattcaaaaggtgtgtaaaaggatattattttaatgttgtcaatagaatataggaaaaccactcagaatagtgcaataccacaga

SEQ ID NO: 569609 - DNA, 554 bp, Homo sapiens
gcaaaccctgtctctacaaaaaatataagaattagctgctatggtggcatgcacctgtagtaccagctacttgggagactgaggctggagaatcacctgagtccaggaggtcaagtctgcaatgagccaaaatgtagacctttaaaatgatgactttcccgtttgaatcagtcttcagggaagactatgcattcatttaaattaggttaatagtgtttaaaacatggctgaaacttctcttttcaattgcagtcaaagctgtttctcattctttgaatatcctctttgatggcaagtttttatactcataatatttaaattaaatatttaatttgatattaaaaatggctwaaatgccaggcatggtggcttatgcctgtaatcccagcacttgggaggccaaggccagaggatcacttgagttcgaggccagcctggccaacatggtgaaaccctgtctctactaaaaatacaaaaattagctgagcatggtggtgcatgcttgcaatctcagctacttgagaggctgaggcatgagaatcgcttgaacccgg

SEQ ID NO: 569610 - DNA, 513 bp, Homo sapiens
cttcccttatctgactatgagaagttcctttacaaggaacacaatcatcagccaggggaggttagctcacaggaaaagagactaaaggtctaacacgttgctcagagagacttttaccacaggctacaatctatccttcagagggctgctacctgagagacttcatctacataataagacaaacctttggttttagtgcatttcttcccctcactctctcatagcttgtcaccctcaccctccaggagccccagcccctattcctctctgtatgatataaaaacttcagtcatcttattcttctttgagtcatattttatgaggctcccatgcatatgcacatagtaaacctgtatgccttttcccctaataatctgtctactgtcagtttactccagagactcaaagtagtgaacyttcatagagaagcaggaaaatcttaactaataatttcttttgcaattttttttttttgagatggagtcttgctctttttgcccaggctggagtgca

SEQ ID NO: 569611 - DNA, 609 bp, Homo sapiens
ttatacaagttttcactatgtcgaaagaaaggaaagcttgctgtcattagatataattttacattagtttagctaaaaaaagaaagaaaaactaaataataagggaaaggagcagatgaaccatcaatattttaatatcatttgatgtttcctcctgaaatatacttcattgactcataaattaaagttgatatgattaagtcggtcagactttgtaagatatagttgctaaaacatgatgctgagtataaaagttagaacttttgagaatcataccactgagaggcagattttatattttgttttgtaaattaaatctctgtatattgtccatttatgtggcccttcctgtcgtgcatgtgaggtcagctcattttttycttgggcttctatatatatcttttctattcattttcatatttaatttttttcctatgagaataacaaaatgactagagctagcaggagtgatccattgtttttgaaatgattcatgaaaccaacaccacaaagaatggattgataaactaaagtactaattttttaatttacaaagggaaatctagcttaatagtttgcatattctcctagtctagtcattttattctt

SEQ ID NO: 569612 - DNA, 454 bp, Homo sapiens
acaaatatttgcacgggactattgcactraaactccctctttgatagtgttttctggatttcctctcaatgtctaccgagaaatagcacatatgtagagataggcatataaaaattcatgcatatgggtacattggccttctgtaggaacattattgtgtgaacttatttctgaaaacatgtaacactaaggaaagataacagattgaactgaactggtatgtttgtggctcattaattcagtacagatgttgagaaatcaagggatcaatcttacactcataaagaatgataataaatattatattatcacaaatagagatgcattttggagtagaatgcaaaatctttttaaattttaaaaacaaattcaaggctctcatagaaactcgagcttttgaaaagttgcttgggatgatccaatcaggcttggaaggtatgctcattctgtctct

SEQ ID NO: 569613 - DNA, 570 bp, Homo sapiens
catagtgccctgagaagctgatttgtttcatcaatactttttccaggcggggtgcagtggctcatgactgtaatcccagtagtttgggaggtcaatgcaggtggatcacatgatgtcaggagttcaagaccagtctgatcattacggtgaaacaccaactctactaaaaatacaaaaaaattagccaagcatggtggtgagcacctctagtccctgctactcaggaggttgagacaagagaattgcttgaacccgggaggcagaggttgcagtgagccgagatcactccactgcattccagcctgggtgacagagtgagagtccatctcaaaaggaaaaacaacaacaacaacaacaaaaagttttctcagaatgctaactctaatttctgctgaacaaactgcatttctyaccttgatttctggttagtttacttgttttttgcaatattgccagcttaatcaaaaccaacatttccacactggaaaagcggacactggaagccattatagtgcaacacatttatccctgaaagttctaaagaaattttaaattttaaaagaagataat

SEQ ID NO: 569614 - DNA, 538 bp, Homo sapiens
gaattcttttttaatgattccaggaacaatgcartataatcaaaatgttaatgtatagttccccagtacttgatacattctagaacatactaactcaaagaagagttccagcagcagcagccctccctgatctcttattaaaaatgcaaaatgtcacactcaacccagacatcagaatctgcattttaaacagatttctacttaggtgatttttgtgcaaatgaaagtttgagaagccctgatttaaaatattatactttcatccaccaaccatagtcttcttgagtaccacaaatatacgagactctatgctagacatagtgggtattaagataaattattcctgcactgaagagtcttaacacagtagaaggagagaaaagcagccactatggtgatagttgggtgaacaaaaggaaccaagaagagaaaataagtcaccaccctgtgataggcagagaataaagagatcgacattgccactgggccttaaaaggtgggagtatttctcaagctttcaaacttttatcagcaaagg

SEQ ID NO: 569615 - DNA, 533 bp, Homo sapiens
tgtgtggtttgtttgagtctcatttgacaatgtgatgttttatgtttgcttaatttgaactgctgtactgtcaaattatattaaaaagtagtatgatgtagactttcaattctgatgccttaaaattatctttctgattctggaccagtaaaatactttaattaaaaatagattttaaaatattgctttcaagtattttgtggagaaactcatctctttctttacctctcttcaaataattcttggtgatgttttatttttcctattccaagatacatttaatataatttttgtcaagtcccagagataattttacagatggaatataatatttataatatttggatttcctatcctggaacatcaataatttttcttcatttcttcaaatcttctcttccattttccacagatatctctgtatttttatttagataatgtctacaaattaacgtttaaaagcattgatactgtttcagttcttctaagtaatataccartttcccttaaatgttctgtatttttcaacaatt

SEQ ID NO: 569616 - DNA, 604 bp, Homo sapiens
cttctatccctctgttctctcttttttttcctccttctccttttcctcccacttgttcytcatcttcctcttcctcctcattctttgttccttatcccccttcttcttctctttcttcttcttttttatttctttttctttctctttattctttctttttcaagtgccttattcatgtttagaactttggcttaatcttttaaaaattatttgaaaagtaattttcctgttgcatgcaaagacttcatctagcatgaactaagctagtttgaatgctagcaacttataactgctatgaaacaaatgactcacaaagcattctcctctttgaaaaatgtaaaatatactgtaatagttaagcagtcttcaactgctgaatttaaattcacattttggattcattctgccgtagctgataagagtctgaggataaaggtgttgtgaggagtattcaatggcagttttggacagactgtaatgttatcaactccagcaatattctgtcatctgccttggcagcaggaaaagcaaagatctatctcacaacaacaacaacaacaaaaaagcagcagtaaaccaaaataaatgacaaaaaaaactactc

SEQ ID NO: 569617 - DNA, 541 bp, Homo sapiens
catctgcacacatcaggtttccagtcrcagtcgtttcaaatactacatgtcagattatcctgctcatttttgttggatagttctatattggaacatttaatcaaacaataggtggttaatagcattttaaagctattttgaacattgaagcacagaccaatgtaagaaaaataattaaaaaaaaattaaactaagacaacagatcccattcctaatccaaaaaagctgacaaaagaccatatggatgtaatagccaaattactaattctcataaattatgttgttttctggatatgattcgtactatttcaaactcacataaaagcagtgacataacattgttcctcttaaatatatgatggtattccttttggaatatacccagtagtaggattgctgggacaagtgatatttctggttctagatccttgaggaaatggttgaactaatttacattctcaccaacagtgtaaaagtgttcctatttctccacagccttggcagcatctattgttttttgactttttaataatccccattc

SEQ ID NO: 569618 - DNA, 569 bp, Homo sapiens
atctgttttgtagtagtgcagtttattttgttagttcatccagaagcttctgtgggaaaaacaattcatcctaactctgtgggaaaaacagtcttgttcattgtctgccgttgatcctgatcctcttttcttaggggttagggagggggtattccgggtctttttatcatccatagctaaaactgaagttatcattgaaaacacacacttctggaatattagaagcttttacagtctccttactactggtgtaaatttgagactccaagagttgtattaaggatttgaatgcaggcttttttcaaccaggcctatggtttctttggcaatataatcctccccaaatcttaaaaggcagagctgcaagtaaccacaatgaaagatcttgcttagatcctaattttaaactttatatttgttttatttttcytcttggcatcagtgataaggtaatagccttagcctgatatttgctgctggactcatcttcctctaattgacagagagatattagtgataatttattgaaaaaaatgggggaaatagcctcaacttcttcattgttattg

SEQ ID NO: 569619 - DNA, 530 bp, Homo sapiens
cacacatcgggacctggtgggggtagggggctaggggagggatagcatcaggagaaatacctaatgtagatgacaggttgatgggtgcagcaagccaccattgcacgtgtatgcctatataacaaacctgcacattctgcacatgaaggttgatgggtgcagcaaaccaccattgcatgtgtatgcctatataacaaacctgcacattctgcacatgtaccccagaacttaaagcataatartaagaagaaaagaagtacctgctgtaacatttttataatacaagtgtgaagtagtatgaaaatacttggaagtcaactataatgatataaaactatatttaagactagaataaagatacactaaaacatcactaaaatataaattaaaaagttatacttaaaaagctaaataaagtagagaaaattgaaacataagaatattgtaaaatttataattcaattttgatgcgaatgttctaaaaattccagttaaaactctatgaacatcataatggctaaaaaagtgta

SEQ ID NO: 569620 - DNA, 514 bp, Homo sapiens
atttctgttttaaatttttaaggacttttttgtacttaccatgacagatactctggacacaacttactgttccatgactcatacagtctgattttaactgtcatgcaactgctgttgagtaatatgcaactttctctttgcctctttggatggagaagaaaacaaggcagcacagttgggctccaaagataaaaacatgggcagggtttcaagatcactcatctctgtcttggaggatagaccaagagagataggacagaccaagagacaacatgaaaaaaacatgaaaagagaaacagcattgagaaataacaacagctgcactcaattcttttcctcaaggtgcattttaaccagatcttgaaatagaataaacacacctacaattctaatcctagagtggacatttttttaaaatcagyttttcatatccttttaccacaccaaaaagaacttaccaacaattttcatttaacaaaaataaaaataatcagcgagatcaaagaaatggtaa

SEQ ID NO: 569621 - DNA, 540 bp, Homo sapiens
gtagggacaggaattgaccaaattaatgcttccttcagaaatctttccttaaagagcaaatcagtattaacattttaatgctcagrgaagaatttcatatggaagactttcggttttctgttttgtaactaccgtcacagaccaccctctttccacctccaatagtacatttcaacagattttgttagacttactagattgaatgtaattaatttaaaaaaccctctgatttcatggctgcctcctcatttggacttttaatttacccattattaaagctcacagtatttctctaagcctgagaacattattccaacaaagattttcttacaaatctaatggtccaaagaaagatatgaggaggagtaaatgaaataaggtaggtgaaaatagtttggaggaggaaagcattttcaagtgtaaggtgttattaatattgacgaagtataaaactgtatctagatctaccacctttctggtttcatttgcctacctgctttgtggacacatgaatgcagtattctacccactcactttata

SEQ ID NO: 569622 - DNA, 552 bp, Homo sapiens
ataagcaaaacagggtgttaacagcgcagaaaggggttttgtaaagacagagaaagctaaaataaaattacaagataggtcacatttatgttcacagtctttcatttcccccacctccctgtttatcacctgcaccaagacgacgcctatgaagcaaagtcaaccagcscagccattgcctgactggcctccggtgattgccagtcactcagctatataaggattctattcaaatctttgtcaaactcccagattctgaacctagttatttccctcagctatgcaggaagagggcatgtgtcatctcactccaaccctgcactctggccatgtcttctctctttacccttagcaaaatttcctgagtgacccttatagcctaaaaaattatctctatatagtaaaaatgcctgagtcttctgtttcaaaaatctctctgtatacagtataaatgtcagcgtaattttgcaagaagctgtctctatgctttttagccaaatagatcaaataggacataaagggaaaagtgatggccactcctttctcttttcc

SEQ ID NO: 569623 - DNA, 552 bp, Homo sapiens
ataagcaaaacagggtgttaacagcgcagaaaggggttttgtaaagacagagaaagctaaaataaaattacaagataggtcacatttatgttcacagtctttcatttcccccacctccctgtttatcacctgcaccaagacgacgcctatgaagcaaagtcaaccagcccagccattgcctgactggcctccggtgattgccagtcactcagctatataaggattctattcaaatctttgtcaaactcccagattctgaacctagttatttccctcagctatgcaggaagagggcatgtgtcatctcactccaaccctgcactctggccatgtcttctctctttacccttagcaaaatttcctgagtgacycttatagcctaaaaaattatctctatatagtaaaaatgcctgagtcttctgtttcaaaaatctctctgtatacagtataaatgtcagcgtaattttgcaagaagctgtctctatgctttttagccaaatagatcaaataggacataaagggaaaagtgatggccactcctttctcttttcc

SEQ ID NO: 569624 - DNA, 552 bp, Homo sapiens
ataagcaaaacagggtgttaacagcgcagaaaggggttttgtaaagacagagaaagctaaaataaaattacaagataggtcacatttatgttcacagtctttcatttcccccacctccctgtttatcacctgcaccaagacgacgcctatgaagcaaagtcaaccagcccagccattgcctgactggcctccggtgattgccagtcactcagctatataaggattctattcaaatctttgtcaaactcccagattctgaacctagttatttccctcagctatgcaggaagagggcatgtgtcatctcactccaaccctgcactctggccatgtcttctctctttacccttagcaaaatttcctgagtgacccttatagccyaaaaaattatctctatatagtaaaaatgcctgagtcttctgtttcaaaaatctctctgtatacagtataaatgtcagcgtaattttgcaagaagctgtctctatgctttttagccaaatagatcaaataggacataaagggaaaagtgatggccactcctttctcttttcc

SEQ ID NO: 569625 - DNA, 596 bp, Homo sapiens
ataaaattattaaacaagtccaataatacggtttcagttatattttgtatgtagaagttgctgaaggaaagattgactgcataaattagagacatggaagctataaaaaatctcaaatcaaacttttagaaatgtctgggtaaacaaaatatgctggagaggattaacactagattatacatggcaaaagagaagatgagtaaaatgaaaaatatgtcagtagttattaccccatgtgaaatacagaaagaaaaatgacaaaaaatttacctgagcatcagtgagctatgtggcaacttcaagaaacctactgtatacagaattggagtcaatgaggagggagagaaagtgaggagaccaacaatatatttggaaaaatcacagccaatttttactraaaactatacaactacagaagcagaaaattcaataaactccaaattcaaaaagcataaaataaaataattaaattctgaaaacctgcaagaaagcacatcataaccagtttcttaactagtgataaagagaaagcctaaaagcagcaagagggccaggtgcagtggctcacacctgtaatcccagaactttgggaggcc

SEQ ID NO: 569626 - DNA, 520 bp, Homo sapiens
tccaaactatatcacctacccagggtaaagttagctactttctcttctgtgttccaataactagctactgcaaatctttattactggtagttatctaagtatctgcctacctaataactatccagctccttaagaacatgaaccgttttgaattcacagtgatttcctcaatatcttacacaaaaaaagccatgatttgtataaaattcaactcctgtttatcaaagaaataagaaatcagcaactgtataaatagaaaacgcaattctttctaatgcaatctttttaatacaattatgaataatgctgctgtgaagatctcaatgcaaaaatttgcatgcagatataactaaaggccattatagctctagtagacttttcatagatctgcatgaaaaratttgcaatatagatgcatggacatatgttgaggtacatattgaagttcatttgtttacatctggatattgtcatgggctgaattgtggtttcttgcaaattcttgcaccataaatcctaa

SEQ ID NO: 569627 - DNA, 573 bp, Homo sapiens
atattcaaagacattatgtcacttatctcaggtcacagcaccagtaaaccttagggccaggaaacacatttttaaaaatacatacttcccattggttaataggaaagacaaatctactaacaaacagattccacatttagtaacttaaaaaaatgataggatttatttatctttcttatgcagaagtccatgagaagcatggaagattttcaggtggtaccttaaccatgaatctatgttcgttttatttcgtagctctgcaatccccagggctttgatgtagrgcctaggctggactgacagccagaactgtcagcaggatagaagagaggacatggaaaggccacatgaaaaagttttgccagtagaatggtaaactgaagaaaggctagaaaatggagtctcgctacgcctccatgtgcccagctcccattctattaccatttaacaaaggaggcaagggtctctgcagtcacttaggcatttctacctcagcacaaattcctatgacttcaattcaacctctatgctctcgaccaccaatcttgagttttctctcaccacctcacatcc

SEQ ID NO: 569628 - DNA, 553 bp, Homo sapiens
gaaaatattttttatctattccttaaatgaaatatatcactaaagtcaatttcctctgttaattcttatctgttyaatgtgactagtagaaaattttaaattacatatgtggctcatatttgtggctctcctggcattggtatcctatcgtatagtgctattctagaacttgttcaccccaatcatgaacttaacaaattctatggtacagatgatagtgatttaactgtctcctctaatagtctttttaatggaaaagggcatgtcttacttatgtcttgtctttgctacctattacaacatctagaacttactagacacccagtaaaaagtctgcaaaataaattgaaattaaagcataagaaaagtgttttcaaacaattatatagttcaagttatattgttacctgtttacatattattaaaaaatattagtaatgagtaaaatagtttagaattacatttcctcatttttcttctcagttcttggtaggtatttgttaatctatgattcaaaagttatagaaagaaattctaccactaaaattatgtt

SEQ ID NO: 569629 - DNA, 553 bp, Homo sapiens
gaaaatattttttatctattccttaaatgaaatatatcactaaagtcaatttcctctgttaattcttatctgtttaatgtgactagtagaaaattttaaattacatatgtggctcatatttgtggctctcctggcattggtatcctatcgtatagtgctattctagaacttgttcaccccaatcatgaacttaacaaattctatggtacagatgatagtgatttaactgtctcctctaatagtctttttaatggaaaagggcatgtcttacttatgtcttgtctttgctacctattacaacatctagaacttactagacacccagtaaaaagtctgcaaaataaattgaaattaaagcataagaaaartgttttcaaacaattatatagttcaagttatattgttacctgtttacatattattaaaaaatattagtaatgagtaaaatagtttagaattacatttcctcatttttcttctcagttcttggtaggtatttgttaatctatgattcaaaagttatagaaagaaattctaccactaaaattatgtt

SEQ ID NO: 569630 - DNA, 553 bp, Homo sapiens
gaaaatattttttatctattccttaaatgaaatatatcactaaagtcaatttcctctgttaattcttatctgtttaatgtgactagtagaaaattttaaattacatatgtggctcatatttgtggctctcctggcattggtatcctatcgtatagtgctattctagaacttgttcaccccaatcatgaacttaacaaattctatggtacagatgatagtgatttaactgtctcctctaatagtctttttaatggaaaagggcatgtcttacttatgtcttgtctttgctacctattacaacatctagaacttactagacacccagtaaaaagtctgcaaaataaattgaaattaaagcataagaaaagtrttttcaaacaattatatagttcaagttatattgttacctgtttacatattattaaaaaatattagtaatgagtaaaatagtttagaattacatttcctcatttttcttctcagttcttggtaggtatttgttaatctatgattcaaaagttatagaaagaaattctaccactaaaattatgtt

SEQ ID NO: 569631 - DNA, 599 bp, Homo sapiens
tttgtttttgtttgtttgtttgtttgtttgagacggagtctcactctgtcgcccaggctggagtgcagtggcgcgatctcggctcactgcaagctccgcctcccgggttcgcagcattctcctgcttcagcctcccgagtagttgggactacaggtgaccaccaccacgcccggctaattttttgtatttttagtagagacggggtttcaccgtgttagccaggatagtctcaatctcctaacctcgtgatccacctgccttggcctcccaaagtgctgggattacagtcttgagccaccrcgcccggccccatcctttatttgtttacagaattatttatatacatttgtctcctccattatatttcagctcctctggatgtgaccatgatgggttcatttttgtatctcttccctcagcatagttcatggtacattgcaagggaccatagatgacatttattaagtcaaccccctatatgcatgagcaagttttgctgcagtttttctggctaagattatgaaaaagagatgctcaagttttccgaactggtttctacgtcaacaccttcacactggttccctaggcctggaaaaat

SEQ ID NO: 569632 - DNA, 591 bp, Homo sapiens
tacaaacagtggtataaacacatatatacatttgctagtacgtgtttaaaatgcatactagtttagctatgatcaacacctttttaactaggaaaacatttttaaggtaaaagattttccaagaatccctcatatggcaagaaagctattatgatatcaaagatgttcttaaatgcatttataatttattgaagatagtagcatacgcatttgtaaactttgggcagtttttcatataagttttttcatataagcaatatttattcattctatctaaatctgtatagattccaggatccctttctaagcagattagatgtgaagtgactcaataccccctcaaccctgacaacacctccaccctctaggttcaaatcccatagacttggaactacttttatagacayatatcacacatttattgtgacccattcaaaagcatatgagagggaacatataggctctctccagcaaaatattaataagggtggtactaattaattaagcaaaatattaaagtgtggtagggaatgggcaaagactatcaacacatttgttttagaaaaggaaatacaaatgagttttatacac

SEQ ID NO: 569633 - DNA, 465 bp, Homo sapiens
tagaactgtatactttaaaaagtgagttttactrtatgtaagttatatctcaataaatgtgtcttcaaaaaaatggcacaagttctgtctcaagaagcctacagtctgatagaaaaagctacataaaaacaaatgtggtaatatatctaaaggtgaagctttaaatgtaattgttggctgaatgtggtgactcacacctgtaaccccagcactttgggaggccaagggaggaggatcacttgaggcccggagtttgagaccagccacgacaacatagcgagacccctatctctacaaaaaatttaaaaaattagccaggcatggtggtgcatgcctgtagtcccagctacttaggaggctgaggtgggaggatcaccttctggactcaggaggtcaaggctgcagtgagccatgatcagtgagccactgcactccagcctgggcagccgagtgagacactgcctc

SEQ ID NO: 569634 - DNA, 465 bp, Homo sapiens
tagaactgtatactttaaaaagtgagttttactatatgtaarttatatctcaataaatgtgtcttcaaaaaaatggcacaagttctgtctcaagaagcctacagtctgatagaaaaagctacataaaaacaaatgtggtaatatatctaaaggtgaagctttaaatgtaattgttggctgaatgtggtgactcacacctgtaaccccagcactttgggaggccaagggaggaggatcacttgaggcccggagtttgagaccagccacgacaacatagcgagacccctatctctacaaaaaatttaaaaaattagccaggcatggtggtgcatgcctgtagtcccagctacttaggaggctgaggtgggaggatcaccttctggactcaggaggtcaaggctgcagtgagccatgatcagtgagccactgcactccagcctgggcagccgagtgagacactgcctc

SEQ ID NO: 569635 - DNA, 465 bp, Homo sapiens
tagaactgtatactttaaaaagtgagttttactatatgtaagttatatctcaataaatgtgtcttcaaaaaaatggcacaagttctgtctcaagaagcctacagtctgatagaaaaagctacataaaaacaaatgtggtaatatatctaaaggtgaagctttaaatgtaattgttggctgaatgtggtgactcacacctgtaaccccagcactttgggaggccaagggaggaggatcacttgaggyccggagtttgagaccagccacgacaacatagcgagacccctatctctacaaaaaatttaaaaaattagccaggcatggtggtgcatgcctgtagtcccagctacttaggaggctgaggtgggaggatcaccttctggactcaggaggtcaaggctgcagtgagccatgatcagtgagccactgcactccagcctgggcagccgagtgagacactgcctc

SEQ ID NO: 569636 - DNA, 465 bp, Homo sapiens
tagaactgtatactttaaaaagtgagttttactatatgtaagttatatctcaataaatgtgtcttcaaaaaaatggcacaagttctgtctcaagaagcctacagtctgatagaaaaagctacataaaaacaaatgtggtaatatatctaaaggtgaagctttaaatgtaattgttggctgaatgtggtgactcacacctgtaaccccagcactttgggaggccaagggaggaggatcacttgaggcccggagtttgagaccagccacgrcaacatagcgagacccctatctctacaaaaaatttaaaaaattagccaggcatggtggtgcatgcctgtagtcccagctacttaggaggctgaggtgggaggatcaccttctggactcaggaggtcaaggctgcagtgagccatgatcagtgagccactgcactccagcctgggcagccgagtgagacactgcctc

SEQ ID NO: 569637 - DNA, 588 bp, Homo sapiens
tgtgtcaggataaaccccacaggagcctcccggggcagggatgactctccaaaggctctttgtaaaaatggcctcctaagaaagggatgccttgtgcagatgtgaaccctttgtttgcagagaaccagatgggttcatacaggtatgtacagggaaaagtgatcaagcagagctcatccttgcataatggagggggagactttgatcgtggaactggggatggagtctacaaagagagagcagagctcatccctgcataatggagggggagaattttatcgtggaattgcagatggagtctacaaagagagargagtgtgcatgctggatgtttgcgagggaacaggtggaaggagcaaagggaaaacacttgactcaaccatccatcccaacacaaaggcaggggtcagaagaagacacaccctccatgcttcttcaaagggtgggctccaaggaactgggtgaatctttcaagataccatttgttttccgtataaggaagatttattatttatttatttttatttttttcttgttttgagatggaatctcactctgtcgcccaggctggagtgcaatggtgtgatc

SEQ ID NO: 569638 - DNA, 570 bp, Homo sapiens
ggggcaaactaaaagtaaaattaaaagtaaatatgcctcttatctcagctttattaaaattcttttaaaaagagggggagttaaagtatctacaaaaaatctaatcaagctatttcaaataatagaacaattttgcccatggtttccagaacaaggaactttagatctaaaagattggaaaagaattggtaaggaactaaaacaagcaggtaggaagggtaatatcattccacttacagtatggaatgattgggccattattaaagcagctttagaaccatttcaaacagaagaagatagcatttcagtttctgatgcccctggaagctgtttaatagattgtaatgaaaasacaaggaaaaaatcccagaaagaaacggaaggtttacattgcgaatatgtagcagagccggtaatggctcagtcaacgcaaaatgttgactataatcaattacaggaggtgatatatcctgaaacgttaaaattagaaggaaaaggtcccgaattaatggggccatcagagtctaaaccacgaggcacaagtcctcttccagcaggtcaggtgcccgt

SEQ ID NO: 569639 - DNA, 570 bp, Homo sapiens
ggggcaaactaaaagtaaaattaaaagtaaatatgcctcttatctcagctttattaaaattcttttaaaaagagggggagttaaagtatctacaaaaaatctaatcaagctatttcaaataatagaacaattttgcccatggtttccagaacaaggaactttagatctaaaagattggaaaagaattggtaaggaactaaaacaagcaggtaggaagggtaatatcattccacttacagtatggaatgattgggccattattaaagcagctttagaaccatttcaaacagaagaagatagcatttcagtttctgatgcccctggaagctgtttaatagattgtaatgaaaacacaaggaaaaaatcccagaaagaaacggaargtttacattgcgaatatgtagcagagccggtaatggctcagtcaacgcaaaatgttgactataatcaattacaggaggtgatatatcctgaaacgttaaaattagaaggaaaaggtcccgaattaatggggccatcagagtctaaaccacgaggcacaagtcctcttccagcaggtcaggtgcccgt

SEQ ID NO: 569640 - DNA, 570 bp, Homo sapiens
ggggcaaactaaaagtaaaattaaaagtaaatatgcctcttatctcagctttattaaaattcttttaaaaagagggggagttaaagtatctacaaaaaatctaatcaagctatttcaaataatagaacaattttgcccatggtttccagaacaaggaactttagatctaaaagattggaaaagaattggtaaggaactaaaacaagcaggtaggaagggtaatatcattccacttacagtatggaatgattgggccattattaaagcagctttagaaccatttcaaacagaagaagatagcatttcagtttctgatgcccctggaagctgtttaatagattgtaatgaaaacacaaggaaaaaatcccagaaagaaacggaaggtttacattgcgaatatgtagcagagccggtaatggctcagtcaacgcaaaatgttgactataatcaattacaggaggtgatatatcctgaaacgttaaaattagaaggaaaaggtccmgaattaatggggccatcagagtctaaaccacgaggcacaagtcctcttccagcaggtcaggtgcccgt

SEQ ID NO: 569641 - DNA, 570 bp, Homo sapiens
ggggcaaactaaaagtaaaattaaaagtaaatatgcctcttatctcagctttattaaaattcttttaaaaagagggggagttaaagtatctacaaaaaatctaatcaagctatttcaaataatagaacaattttgcccatggtttccagaacaaggaactttagatctaaaagattggaaaagaattggtaaggaactaaaacaagcaggtaggaagggtaatatcattccacttacagtatggaatgattgggccattattaaagcagctttagaaccatttcaaacagaagaagatagcatttcagtttctgatgcccctggaagctgtttaatagattgtaatgaaaacacaaggaaaaaatcccagaaagaaacggaaggtttacattgcgaatatgtagcagagccggtaatggctcagtcaacgcaaaatgttgactataatcaattacaggaggtgatatatcctgaaacgttaaaattagaaggaaaaggtcccgaattartggggccatcagagtctaaaccacgaggcacaagtcctcttccagcaggtcaggtgcccgt

SEQ ID NO: 569642 - DNA, 457 bp, Homo sapiens
tctcatattaatccttgtgtgcctgttttgtctgttgttagtctgcaggtgtacccaacagctccgaagagacagcgaccatcgagaacgggccatgatgacgatggcggttttgtygaaaagaaaagggggaaatgtggggaaaagcaagagagatcagattgttactgtgtctgtgtagaaagaagtagacataggcgactccattttgttatgtactaagaaaaattcttctgccttgagattctgttaatctataaccttacccccaaccccatgctctctgaaacatgtgctgtgtcaactcagagttaaatggattaagggcggtgcaagatgtgctttgttaaacagatgcttgaaggcagcatgctccttaagagtcatcaccactccctaatctcaagtacccagggacacaaaaactgcggaaggccgcagggacctctgcctagga

SEQ ID NO: 569643 - DNA, 457 bp, Homo sapiens
tctcatattaatccttgtgtgcctgttttgtctgttgttagtctgcaggtgtacccaacagctccgaagagacagcgaccatcgagaacgggccatgatgacgatggcggttttgttgaaaagaaaagggggaaatgtggggaaaagcaagagagatcagattgttactgtgtctgtgtagaaagaagtagacataggmgactccattttgttatgtactaagaaaaattcttctgccttgagattctgttaatctataaccttacccccaaccccatgctctctgaaacatgtgctgtgtcaactcagagttaaatggattaagggcggtgcaagatgtgctttgttaaacagatgcttgaaggcagcatgctccttaagagtcatcaccactccctaatctcaagtacccagggacacaaaaactgcggaaggccgcagggacctctgcctagga

SEQ ID NO: 569644 - DNA, 457 bp, Homo sapiens
tctcatattaatccttgtgtgcctgttttgtctgttgttagtctgcaggtgtacccaacagctccgaagagacagcgaccatcgagaacgggccatgatgacgatggcggttttgttgaaaagaaaagggggaaatgtggggaaaagcaagagagatcagattgttactgtgtctgtgtagaaagaagtagacataggcgactccattttgttatgtactaagaaaaattcttctgccttgagattctgttaatctataaccttacccccaaccccrtgctctctgaaacatgtgctgtgtcaactcagagttaaatggattaagggcggtgcaagatgtgctttgttaaacagatgcttgaaggcagcatgctccttaagagtcatcaccactccctaatctcaagtacccagggacacaaaaactgcggaaggccgcagggacctctgcctagga

SEQ ID NO: 569645 - DNA, 535 bp, Homo sapiens
agggttttgtatttttaaagtgtgctccaagaaaactagtccttcaagatactccttggtaaatgcttgtaatgcccaggtccacagggcatgtgtgactcactatagtctcctcttggatgcttataacatccagtagactatgagaagcactgagaaattatgtcattttaaaaagtcatttaagtttaaacctattcaaaactggaaatcatttgtggaatatttaatataacttttgttcaatacaatattttaaattctaaaaactgagtaggtagcttccacatcacagataagaaaaatgaggtcgtcagcaattgctctgaggtctatgagcaaatccctaaaaactgaatccacattccaaagtctgtgctccccagtctccacaggccctgccagtagcrtggtagggtctgcacctgcacagataggtcaagttcatgcctcaccctcactatgtggaggctgctttccaggcccacatacccagaaacactaggtggggaagggaaaagggacagaaaagaaa

SEQ ID NO: 569646 - DNA, 540 bp, Homo sapiens
caattacaggtcttgggtgatttaaaagctgtttctgcaggggccgataaatcttttacaaaggctttgccatccaacatacttattcagcttgtctttggctgtttatatgcactggataataccacctgggactctgagagtcctaccaacaagcctgcacggcaggagacaatcagacttgtttctgtttgytctctggtacctttgccaccaccaggagaatgagattcctgggttgggccactgctcccaggaagatgatgaaagagagctcgaatattaagcactgattgtggaataccagtgaggttttagggttcttgttatatagtgttattttggctctatatggcttatttgatggccattgcccagattaatcagaaacgcaaagaggacaaagggcaacggcagaatgatgtcaaataggattgacaaatgccatcatcagagaagcaacatgcacactcaggacaggtggactgggggttgagagatcaagcgcaaatgagtggactaccctccaagctggaggca

SEQ ID NO: 569647 - DNA, 540 bp, Homo sapiens
caattacaggtcttgggtgatttaaaagctgtttctgcaggggccgataaatcttttacaaaggctttgccatccaacatacttattcagcttgtctttggctgtttatatgcactggataataccacctgggactctgagagtcctaccaacaagcctgcacggcaggagacaatcagacttgtttctgtttgctctctggtacctttgccaccaccaggagaatgagattcctgggttgggccactgctcccaggaagatgatgaaagagagctcgaatattaagcactkattgtggaataccagtgaggttttagggttcttgttatatagtgttattttggctctatatggcttatttgatggccattgcccagattaatcagaaacgcaaagaggacaaagggcaacggcagaatgatgtcaaataggattgacaaatgccatcatcagagaagcaacatgcacactcaggacaggtggactgggggttgagagatcaagcgcaaatgagtggactaccctccaagctggaggca

SEQ ID NO: 569648 - DNA, 540 bp, Homo sapiens
caattacaggtcttgggtgatttaaaagctgtttctgcaggggccgataaatcttttacaaaggctttgccatccaacatacttattcagcttgtctttggctgtttatatgcactggataataccacctgggactctgagagtcctaccaacaagcctgcacggcaggagacaatcagacttgtttctgtttgctctctggtacctttgccaccaccaggagaatgagattcctgggttgggccactgctcccaggaagatgatgaaagagagctcgaatattaagcactgattgtggaataccagtgaggttttagggttcttgttatatagtgttattttggctctatatggcttatttgatggccattgcccagattaatcagaaacgcaaagaggacaaagggcaamggcagaatgatgtcaaataggattgacaaatgccatcatcagagaagcaacatgcacactcaggacaggtggactgggggttgagagatcaagcgcaaatgagtggactaccctccaagctggaggca

SEQ ID NO: 569649 - DNA, 625 bp, Homo sapiens
tctgctttcattccataccaaatggaattaaagtagaaatcaataaaagaaggatagctaggaaatctcaaaacaattaaagattaaacaacacacttccaaataacacataggtcaaaaaagaagtctcaagagaaatttaaaagtactttgaacaaaatgaaaatgaaaacaccacttatcaaaatttgtaagatgtggtaaaagaagtgcttagttagtaatttatagcactgaatacatacattagaaaagaataaaaatctgaaatccataatctaagcttccaccttagaaaaaagaaaaacacagcaaattaaacccaaagtaggcaaaagaaaagaaataataaaatcaaagtagaaatcaatgaaactgagaacagaacatcaataaggaaaatcaatgaaaccaaaagctgtttatttttaaatatcaataaaattctttagcccttrgaataagaacaaacaaagaggacacaaatttataatatcagaaatgaaagatgaaacatcactgcagatcccttagacattaaaataagaaaatctgactgaaactaatccttgacaaaagagtaaaggcaacacaatgaagaaaagagtgttttcaacaaatggtg

SEQ ID NO: 569650 - DNA, 578 bp, Homo sapiens
agacagctgagcctacccccagcgtttctgatgttatagtgctggtgaatttgcaatttgaacaagttcccagatgacrcagatgcagctggtctggggaccacatactgagaaccactaatgtagagaatatattggagttagagattggacggggtgggaagcacatcttccaaaacaggtggccattatagtaagagatagtgacagcctggatgagtaacgtgggagaggtgatggactgtgatcaaggtgtagaactgagagttctcagtgactaattggatatggcaggtgatgaggtctttgaagtgtgtagtcagaaggattatgttactccctggggcagggaaaaaatgaggaagagatgggacagaaaaatggcatttgggtcctgagggtggtgcttataagtctcataagtagaatgtaataatcaagtgtaagttatttcaaatgtatatatcagatttacacaaagcaggtagttaaatatatgttattaaggagctaaaagaaatagaaaaatggacagagacacaggtcagggatctgggaaggtatggagatagagatta

SEQ ID NO: 569651 - DNA, 578 bp, Homo sapiens
agacagctgagcctacccccagcgtttctgatgttatagtgctggtgaatttgcaatttgaacaagttcccagatgacacagatgcagctggtctggggaccacatactgagaaccactaatgtagagaatatattggagttagagattggasggggtgggaagcacatcttccaaaacaggtggccattatagtaagagatagtgacagcctggatgagtaacgtgggagaggtgatggactgtgatcaaggtgtagaactgagagttctcagtgactaattggatatggcaggtgatgaggtctttgaagtgtgtagtcagaaggattatgttactccctggggcagggaaaaaatgaggaagagatgggacagaaaaatggcatttgggtcctgagggtggtgcttataagtctcataagtagaatgtaataatcaagtgtaagttatttcaaatgtatatatcagatttacacaaagcaggtagttaaatatatgttattaaggagctaaaagaaatagaaaaatggacagagacacaggtcagggatctgggaaggtatggagatagagatta

SEQ ID NO: 569652 - DNA, 578 bp, Homo sapiens
agacagctgagcctacccccagcgtttctgatgttatagtgctggtgaatttgcaatttgaacaagttcccagatgacacagatgcagctggtctggggaccacatactgagaaccactaatgtagagaatatattggagttagagattggacrgggtgggaagcacatcttccaaaacaggtggccattatagtaagagatagtgacagcctggatgagtaacgtgggagaggtgatggactgtgatcaaggtgtagaactgagagttctcagtgactaattggatatggcaggtgatgaggtctttgaagtgtgtagtcagaaggattatgttactccctggggcagggaaaaaatgaggaagagatgggacagaaaaatggcatttgggtcctgagggtggtgcttataagtctcataagtagaatgtaataatcaagtgtaagttatttcaaatgtatatatcagatttacacaaagcaggtagttaaatatatgttattaaggagctaaaagaaatagaaaaatggacagagacacaggtcagggatctgggaaggtatggagatagagatta

SEQ ID NO: 569653 - DNA, 602 bp, Homo sapiens
caggtcagggatctgggaaggtatggagatagagattaaagctgtagaaatagcccagagagaacatgtagataaaaagagaagccctagaacaaatttttgaaaaaagaaatgggtcatttgagaaatgggcaaaggaaggaaggaagaaatgggcaaaggaaggaaaaaaggaagacccaaaaggtcaggagaggcaatcagaagtgctcaagaaatgaacagaatagaagagaacatttccaggaggagatgatgctctacaactgcagagaggaccaacaagagagggtcacagacatccattgtcttcaggaacaygggagagttgagaccatagggagagcatgttagttgaatgataagcagggtaaccagatgcagtactgacgtgatgatactgtattctaggcagtggagggtctgttgggaattggaaattctactgcttattctcaagtttaagcaccttcattctgtgttcagggacatttgaaaatttcatgtctaggggaaagcaaccatgaaggctggtaagtgaaactgacattgcacatatactggtctaaaaggaagagtatcagtgacacagttcaaagccc

SEQ ID NO: 569654 - DNA, 411 bp, Homo sapiens
agatctgacggttttataaagggcttttcccccttttgctyggcacttctcgctgccatcatgtgaagaaggatgtgtttgcttccccttctgccatgattttaagtttcctgaggcttcccccagccatcctgaactgtgagtcaattaaacctctttcctttgtaagttacacagtcttgggtatttctttattagcagcataagaatggattaatacaggaggggaagcagagtctattgacttgacaagggccatcttgtcaaccacctaccagcctgccatgtgactttgtacccatggtgtacttctctgatctcaggcctgccatctgcagagggatgtactaatttgcaaaatacaccagggactgcttgttcctgggaaaccacagtgaaatgggaaaattt

SEQ ID NO: 569655 - DNA, 592 bp, Homo sapiens
tcccttaccgggcatggaggtggaagggtcttcccagggcaggctgggctaggtgggactgggcagtcaacttggccaaagcaataagtgtttctgggcaggtcttaaatctagggaggaagggttttctgtccttgagccttgcaaataaggtcagttgctgattatctctgctaacggcaggatgagtggcctggatctttcaaacagaagggaatctgaaaatcatttttatttggcatcacagtgcatagagtaattcttttttcacagcagatttcccctaattacgttgtgcttagattaatattaaagtcaatctgcattcctggggccacggcagctggtggttggaaaaaggaacccgggaggcttctgattagtgagagaagctaggctggcatttaaaaggtgctgacttttaggctgggcatggtggctcatgcctgtaaccccagcactttgggaggccaaggcaggtgcatcacttgaggccaggagttagagactagcctggccwgcatggcgaaaccccgtctctactgaaaatgcaaagattagctgggtgtgatggcacgtgcctatagtccca

SEQ ID NO: 569656 - DNA, 430 bp, Homo sapiens
agcttggcaatatttatttgctgttctctctaaccattttaaacattttcttttttttttttttttttgagacagggtctcactctgtcgcccaggctggagcagccatcacagctcactgtaacctccaactcctgggctcaagcaatcctcctgcctcagcctcccaaatagctggaactataggcatgcaccaccacaattagctaattaaaaaagttttttttgtagaaacagggtctttctcatatcagatcccaagttgcctaagctggcctcaaactcctggcctcaagcgatcctcctacctcagccttccaaaatgctagaattacaggcatgagccascacacccagcctaaacattttctttaggtagacagggaggggtcttgtccacctcccaactctatgcttatacacccagggt

SEQ ID NO: 569657 - DNA, 633 bp, Homo sapiens
cttgagcacagaagtttgaggctgtagtgagctaagaaggtaccactgctctctagcctgggccacaaagcaaggctccgtctctaaaacataaataaataatatatttagacatatataagagaagagaaagatgctgagagctgagagttccatacttttcaaactgtgtggggagcatcagggaatttgcaccagyagctgcctccgcctgaggagctttgctaaggatttaatggatatgctcctttataggattggaaaactgaacagagaagggttgggaaccgtgaatgctatttaagttggcctctctgtccttctgtcaatgtgatgaatgggcatggtaacggagaaaccctggatgacaagaggtaacgcatgttgggtcaacaggacagggcctcacacacagaaagcacaccatgcacgttggacaccactgttactgccccaccattgttgattgacagggcttggcggtgttccagaggaaacacaccttccccgggagtgtgactccagggcatgtacctgacacctttggtacttttcttggttcttttcacttttctctccaaatgtaaaggttggctgtagcaaactcagacactaggtaaaatatactaggca

SEQ ID NO: 569658 - DNA, 633 bp, Homo sapiens
cttgagcacagaagtttgaggctgtagtgagctaagaaggtaccactgctctctagcctgggccacaaagcaaggctccgtctctaaaacataaataaataatatatttagacatatataagagaagagaaagatgctgagagctgagagttccatacttttcaaactgtgtggggagcatcagggaatttgcaccagtagctgcctccgcctgaggagctttgctaaggatttaatggatatgctcctttataggattggaaaactgaacagagaagggttgggaaccgtgaatgctatttaagttggcctctctgtccttctgtcaatgtgatgaatgggcatggtaacggagaaaccctggatgacaagaggtaacgcaygttgggtcaacaggacagggcctcacacacagaaagcacaccatgcacgttggacaccactgttactgccccaccattgttgattgacagggcttggcggtgttccagaggaaacacaccttccccgggagtgtgactccagggcatgtacctgacacctttggtacttttcttggttcttttcacttttctctccaaatgtaaaggttggctgtagcaaactcagacactaggtaaaatatactaggca

SEQ ID NO: 569659 - DNA, 585 bp, Homo sapiens
ctcacacttcctgatttcaaaatttactacaaagctagagtaatcaaaatggtgtgattattgacattaggacagatacatacagtagcaacagaataaaatagagagctcagaagtaaaccttcacatttgatttttggcaaggccacaagaacatttaacagggaaaggacagtctgttcaacaatggtgcaggaaaaacaatgtcgacctacaaaagaagttggggccttactttgtaccacatacaaaaattaactcaaaatggatcaaagacctaaatagaaaagctaaaactaacttttagtagaaaacacacagacagatatttacaacattggttttggtgatgatttcctcaaaatgacaccaaaaacacagacaaaaacgaccaaaataaactggatttcattcaaattaagaactttygtgcatcaaaggacactatcaggtgagtgaaaatacaacccacagaatgaaagaaaatattttcaaatcatatatccagtaagagattaatatctagaatatacaaagaactcctacaactgagcaacaacaacaataaaaagaaaattttaaagt

SEQ ID NO: 569660 - DNA, 491 bp, Homo sapiens
aatcctaattagatttgtattccttctaacaaaaattctaagcctcctgaaacttgccaaatgattcaagttatggtcaaatagtaagaacaaaattttcagaccttctgaaaacatccctttggttgaataacatttgcctctaaagcaaaccaccttgggtgaaaaaaaaaaccccgattaataggattaataaataaccttgctttctgtttctatctccggaatagtacttgagttttagatcattacattaaaaatcaaacaaaatttgctcagcaagtaaacatgatgattgtcaaaggaaacaactgtgtttccaaatggcccattktgtggcttcctacttaacccactaatgctggttctcatcatgctgcttttctcctaccaactaagttgctttagttccgttttaaataagtccatggagattacttggaatcattttaaattatattgttcaacagcagagtggagtgactatggtt

SEQ ID NO: 569661 - DNA, 501 bp, Homo sapiens
cctttgcaacacttgctcaccagctcagaaagaaagctcagagatggtggcgccagaggttctaggagcagacttcactctccccacaaatctaacttcttgcatcttcctccctttcgaaaacctggagcaacttttgtctttgtcttgttgctatataggagttagggctctttgttccaatactatttaagtaaagctccccgtccttgagagataagtactttttgaactctccagcatgatgggtgcagcgcccgttagtaagcttctgttggttttttgtatgttattccaactttcgttttcaggatagtgtctcaactaagaatgtaaaaagggaaggaaaagaaattatattttctcccctacaagagcatgggcttttctatagatatttggctaaaaaaaaaacccagataattccagctggtgtccagggtctttgaagyatcagtgaccaaacctgtggcaggtgcatctagtgccgtttcaactgtt

SEQ ID NO: 569662 - DNA, 487 bp, Homo sapiens
aggaaccgctgcttttgctcagtttgtgatcccttctggtcagttacactcagttctggagtgtaggctgattattgcatgctggttgcttaatgtagcttattgagtcatcacaggtatctttttcttacttcacagattaagaaaccaaggctcaaaggagaaaagtaacatattcaagcctcccagtcattcacagaatgagttcaaagtcacaactttttgaccctaaagccaattgtattcacattagcagactgttgagaagagaactgaggagaagggaggcagaatgccagagtcagaagaaagggagtaaaagaaggctgatggggccggtgcctgtaatccctgcactttgggaggccgaggcaggtggattacctgaggtcaggagttcragactagcctggccaacatgatgaaaccccatctctactaaaaatacaaaaaattagctgagtgtggtggtgcatgtctgtaatcc

SEQ ID NO: 569663 - DNA, 578 bp, Homo sapiens
gcctgggcaacatagtgagaccccatctctacaaaaagtaaaaaaaaaaatagctgggtgtggtggcactcacctatagtcccaactactaggaggctaargttggggcattgcttgagcctgggaggctgaggttgcagtgagccatgattacacacaccattgcacttcagcctcagtgacagagagacaccctgtcttaaaaaaaaaaaagtctgagaatacttgaatttaggagggagaggaagcagtagagccagtaacagagacagaaaaaaaaaatgatcaaagtgacaggatgatatggtttggctgtgtccccacccaaatctcatcttgaattcccacgtgttgtgggagggacccagtgagaggtaattgaatcatgagagtgggtctttcccctgctgttctcgtgatactgaataagtcttacaagatctgatggttttataagggggagtttccctgcacaagctctctctttgcctgctgccatctgtgtaagacgtgactttctcctccttgccttctgccatgattgtgaggcctccccagccacatggaactgtaagtcc

SEQ ID NO: 569664 - DNA, 578 bp, Homo sapiens
gcctgggcaacatagtgagaccccatctctacaaaaagtaaaaaaaaaaatagctgggtgtggtggcactcacctatagtcccaactactaggaggctaaggttggggsattgcttgagcctgggaggctgaggttgcagtgagccatgattacacacaccattgcacttcagcctcagtgacagagagacaccctgtcttaaaaaaaaaaaagtctgagaatacttgaatttaggagggagaggaagcagtagagccagtaacagagacagaaaaaaaaaatgatcaaagtgacaggatgatatggtttggctgtgtccccacccaaatctcatcttgaattcccacgtgttgtgggagggacccagtgagaggtaattgaatcatgagagtgggtctttcccctgctgttctcgtgatactgaataagtcttacaagatctgatggttttataagggggagtttccctgcacaagctctctctttgcctgctgccatctgtgtaagacgtgactttctcctccttgccttctgccatgattgtgaggcctccccagccacatggaactgtaagtcc

SEQ ID NO: 569665 - DNA, 578 bp, Homo sapiens
gcctgggcaacatagtgagaccccatctctacaaaaagtaaaaaaaaaaatagctgggtgtggtggcactcacctatagtcccaactactaggaggctaaggttggggcattgcttgagcctgggaggctgargttgcagtgagccatgattacacacaccattgcacttcagcctcagtgacagagagacaccctgtcttaaaaaaaaaaaagtctgagaatacttgaatttaggagggagaggaagcagtagagccagtaacagagacagaaaaaaaaaatgatcaaagtgacaggatgatatggtttggctgtgtccccacccaaatctcatcttgaattcccacgtgttgtgggagggacccagtgagaggtaattgaatcatgagagtgggtctttcccctgctgttctcgtgatactgaataagtcttacaagatctgatggttttataagggggagtttccctgcacaagctctctctttgcctgctgccatctgtgtaagacgtgactttctcctccttgccttctgccatgattgtgaggcctccccagccacatggaactgtaagtcc

SEQ ID NO: 569666 - DNA, 578 bp, Homo sapiens
gcctgggcaacatagtgagaccccatctctacaaaaagtaaaaaaaaaaatagctgggtgtggtggcactcacctatagtcccaactactaggaggctaaggttggggcattgcttgagcctgggaggctgaggttgcagtgagccatgattacacacaccattgcacttcagcctcagtgacagagagacaccctgtcttaaaaaaaaaaaagtctgagaatacttgaatttaggagggagaggaagcagtagagccagtaacagagacagaaaaaaaaaatgatcaaagtgacaggatgatatggtttggctgtgtccccacccaaatctcatcttgaattcccacgtgttgtgggagggacccagtgagaggtaattgaatcatgagagtgggtctttcccctgctgttctcgtgatactgaataagtcttacaagatctgatggttttataagggggagtttccctgcacaagctctctctttgcctgctgcyatctgtgtaagacgtgactttctcctccttgccttctgccatgattgtgaggcctccccagccacatggaactgtaagtcc

SEQ ID NO: 569667 - DNA, 544 bp, Homo sapiens
actaatacaggagccatcctagggtggtagtgaatatgtttgtgaaatggttaataatatgccaagcctgakagatgtgatagaaaaggagaatagaggatcatagtgtgactgatggtgaaaataaaaatagagatgcctttagggctggcaagcaattgagtgaggaggaaggaaagttgatgatggtaagagaggatatttgggggttggcatctttaattttgagccatggtgaaggataagcaagtctatgttttagagttcttgctaagtgactgaggtgcattgcaggtggagggcactggagttcaggacatcaggaatacataattgttaacgtttatacatttctctacaaatttgagttatttttcaagaaggaaataatactgctagtttttttttttaaatcaataaaagcaacactgatacattatagcattccaaggaacaaaacagagggagaaatttcaggttcacatccaggtcagtaagtcagcaattccttactgaactcacgtatgttttgctggactggatt

SEQ ID NO: 569668 - DNA, 560 bp, Homo sapiens
tttctttcatcagcattttatagttttcattacaaaaatattttacttatttggttaattcctaggtagttaatttttgtgtggctatttgtaaatggaatagcttttttttcacattgttctctattggcatatagaactcctactaattttatatttttttgtatgctgcaactttactgaatttatcagttttaatagttttctgtgaagtcgtaatgtttttccaaatttaaaatcatataatctgtaaacaagaataatttgacttcttcttatcttgtttggatgccgtttatatctttcttttgtctgattgctcttactaggatttcagtaatatattgaataacatcatgacggcaggcatccttgtcatatwccagatttcagaggaaaagcttttctgcattcagtataatactagctataggtctgttgtatatggcttttattatgtttaattatgttttttctatccccatttttaacagggtttttattatcaaaagatgttgaattttatcaattgctttttcatcatcaattgaaatgaccat

SEQ ID NO: 569669 - DNA, 412 bp, Homo sapiens
gtttgtgtgtgttggtctaaaaatgaaaccccaccgaatggcattaccggcttccacaagcacagaaacgtcactgtttattgtggaggctgtgagaagaatgtgcaaagcacattggccttcaatggaggtgaaggtgggactaggagagagtcaggggtcctttaacatgggtctccatgctccccttatgcttccattatctgcctcttacctaattcctaagtggtcagtattgaagtgccatgcaattgccttagaaacttctgatgccagaaaattcactctcaaaaggagaataaaagatkaatagaagttcctaaacattttcaagggaaacttgagctgacacaaaatgcaaaaaggtctgcagaattttaacacatttctgatacaggttagaattagaatt

SEQ ID NO: 569670 - DNA, 609 bp, Homo sapiens
ctaggttcaagcaattctcctgcctcagtctcccgagtagctgggactacaggtgcacgctgccagacctggctaactttttgtattttagtagagacggggtttcaccatgttggccaggctggtctcgaactcctgagctcaggcaatctgcccacctcagcctcccaaagtgctgggattacaggtgtgagccaccgcccccaggctcagctcggttttctattcttcttcttgcatgagtactccctttcctctgggagtaycatctctactggtggagctacaatcacagtggggaattggccaacctacttactacctctcatgcaggaagggtgggcacatgacccagcctcacagttgaatgtagtccatttctctctgatcacagggactgctccgaggggtggcggtttactaagtcaatcaggagtcttccctggcatgtttgtcctgggaagtagccctctctgtttttttttcttttttaattttttattattattatttttttaagagagacagggtctcactctgtcacccaggctggagtgcaatcatgggatcgtagctcactgcatgggcttaattgatcctcctgcctca

SEQ ID NO: 569671 - DNA, 547 bp, Homo sapiens
tgaaatgcatttaaaaattgaaattgaaagtagaactactggagaagttttaaatatttgtgagtacatgtatgtgtgtatgtgcatgtatacttatgtgtgtrtatatatatatatatatatatatatatatatatatgtacataaaatacatagttaacttgttcttcatttggttcttgtttatttatagattggaacagaaagagcaatctccacaagtgtttattaagttcctattatgtgctgtcctgcattttcaattctcaaatgatttatcaactttgaagtacaaagtagtaaaacattctttctacacatgttgaagaaactactgcaagttaaatttggataaatatctcagtatctgatgcatccaggtacttggatgatttctgtgaactatatctgacttctcaccagcaaacatgttttaaaaataatacaaagacggggcacagtggctcacgcctgtaatctcagcactttgggaggtgaggcgggtggatcacctgaggtcaggagtttgagaccagcctggccaaca

SEQ ID NO: 569672 - DNA, 547 bp, Homo sapiens
tgaaatgcatttaaaaattgaaattgaaagtagaactactggagaagttttaaatatttgtgagtacatgtatgtgtgtatgtgcatgtatacttatgtgtgtatatatatatatatatatatatatatatatatrtatgtacataaaatacatagttaacttgttcttcatttggttcttgtttatttatagattggaacagaaagagcaatctccacaagtgtttattaagttcctattatgtgctgtcctgcattttcaattctcaaatgatttatcaactttgaagtacaaagtagtaaaacattctttctacacatgttgaagaaactactgcaagttaaatttggataaatatctcagtatctgatgcatccaggtacttggatgatttctgtgaactatatctgacttctcaccagcaaacatgttttaaaaataatacaaagacggggcacagtggctcacgcctgtaatctcagcactttgggaggtgaggcgggtggatcacctgaggtcaggagtttgagaccagcctggccaaca

SEQ ID NO: 569673 - DNA, 612 bp, Homo sapiens
atatatttttattttcatattttttgatagtcaatacttgtttccaacatggacaatattaaactgtaaagtttctgaagtactccaggtttctcaaatactcttatttccaggtaagaataaaaaatgtaaaaaatattttaaaagttaaaaaaataatattgcaagtaagcaatgtaggtaaggtgttttgcatctgagagtgcgtttgcccaacttaactaatagggcaaaagcactattgtgatgacatctttgacgaatctttcttggacccaatatcaccgatgatgttggtttgtgggttgggccttcttcactgcttggtttatctttggtgtcaatcagtggtaatgatacaatccatgacaaaatattttttgttgaatatttatcatcactcaaaataggatacagttctttctaaagataaaggctttctcctaaggcatttgttcctactttaaggatttactgtagcagaatatgcttcttggattttatttattagagctaagttatctgatctttgggggacatattgtatctttttttttttttttmtttttttgagacacagtcttgccctgtcgcccaggctagagtgcaatg

SEQ ID NO: 569674 - DNA, 502 bp, Homo sapiens
tctttctggaggagtcctcagggttttcaaggtaaacaattatatcatcagcaaacagggacagtttgacttcctctttatcgattcagatgcccctatttctttttctcatctgattgctctggctaggactgccagtactatgttgaagaggagtggtgagagtgggcatccttgtcttgttccggttctctgcgggaagsctttcaactttttcccgttcagtattatgttggctgtggttttgtcatagatggcttttattacattaagatatgtcccttgtatactgattttgctgagggttttaatcataaaaggatgctggattttgtcaaatgctttttctgcatctattgagatgatcatgtgattttcatttttaattctggttgtgtgatgcatcacatttattgaccctcctacgttaaaccacccctgcatctctggtatgaaacccacttgatcatggaggattatctttttgatatggtgttgaatt

SEQ ID NO: 569675 - DNA, 384 bp, Homo sapiens
aacatggtgaaattctgtctgtactaaaaatacaaaaattagcggggcrtggtggtgggtgcctgtaatcccagctactcaggaggctgaggcaggagaatttcttgaacccgggaggtggaggttgcagtgagccaagattgcgccactgcactccagcctgagcgacagaacaagattccgtctcaaaaaaaaaaaaaaaaaaaaaaaaagaaagtcccagagggggaatgaaaacaagggaagaggtcacagaggggatgggtgccttggaaatgggtgccaaggatgagtccctgccctggcacccctgagtgcacaggtgaaccagggaccctggaggtgagtgagaccccagcccccaacctcagaccagcgcctgac

SEQ ID NO: 569676 - DNA, 547 bp, Homo sapiens
ggtgaaattctgtctgtactaaaaatacaaaaattagcggggcgtggtggtgggtgcctgtaatcccagctactcaggaggctgaggcaggagaatttcttgaacccgggaggtggaggttgcagtgagccaagattgcgccactgcactccagcctgagcgacagaacaagattccgtctcaaaaaaaaaaaaaaaaaaaaaaaaagaaagtcccagagggggaatgaaaacaagggaagaggtcacagaggggatgggtgccttggaaatgggtgccaaggatgagtccctgccctggcacccctgagtgcacaggtgaaccagggaccctggaggtgagtgagaccccagcccccaacctcagaccagcgcctgactcaccactttcggctgggcatttctgggcttcctggggggcagatctggccgtgggggcaatggaggagccgaaaggggcacctggggkgggacagaggaaggagaaggggcttgtgagctgccattttcttctcgcctccatgttctcctgcctgggactcagcatt

SEQ ID NO: 569677 - DNA, 531 bp, Homo sapiens
gctctgtcacccaagctggagtgcagcggcacgatctctgctcactgcaacctctgcctcccaggttcaagtgattctcatgcctcagcctcccgagcagctgggattacaggcccctaccaccacacccgtctaatttttgtattttttttttagtagacacgggttttcaccatgttggccaggctggtctcgaactcctgacctcaagtgatycacccaccccggcctcccaaagtgctgagattacaggcgtgagccaccgtgcccagcctcactgtggcctttgggaggtcactattctcagccccgttctccaggggacgaggctaaggctcagagacgtgaagccactggctggggatcacctaggcagagaaggaaggagagctttccactgataacattgccggagagggagaaacagaggcagcgtgtgcagagtgggatggaaccagaggccctgggaaagacagccgggctcctgagtggttgccatcagctctttgccctctctggccttcggtttcc

SEQ ID NO: 569678 - DNA, 531 bp, Homo sapiens
gctctgtcacccaagctggagtgcagcggcacgatctctgctcactgcaacctctgcctcccaggttcaagtgattctcatgcctcagcctcccgagcagctgggattacaggcccctaccaccacacccgtctaatttttgtattttttttttagtagacacgggttttcaccatgttggccaggctggtctcgaactcctgacctcaagtgatccacccaccccggcctcccaaagtgctgagattacaggcgtgagccaccgtgcccagcctcactgtggcctttgggaggtcactattctcagcccygttctccaggggacgaggctaaggctcagagacgtgaagccactggctggggatcacctaggcagagaaggaaggagagctttccactgataacattgccggagagggagaaacagaggcagcgtgtgcagagtgggatggaaccagaggccctgggaaagacagccgggctcctgagtggttgccatcagctctttgccctctctggccttcggtttcc

SEQ ID NO: 569679 - DNA, 576 bp, Homo sapiens
ctacatgtaatggaatgtaacgcatccttaaaaaggaaaccctaaggccgggctctgtggctcacacatgtttttttttttttaattttatttatttatttatttatttatttatttattttttattgatcattcttgggtgtttctcacagagggggatttggcagggtcataggacaatagtggagggaaggtcagcagataaacaagtgaacaaaggtctctggttttcctaggcagaggaccctgmggccttccgcagtgtttgtgtccctgggtacttgagattagggagtggtgacgactcttaacgagcatgctgccttcaagcatctgtttaacaaagcacatcttgcaccgcccttaatccatttaaccctgagtggacacagcacatgtttcagagagcacagggttgggggtaagatcacagatcaacaggatcccaaggcagaagaatttttcttagtatagaacaaaatgaaaagtctcccatgtctacttctttctacacagacacggcaaccatccgatttctcaatcttttccccacctttcccccctttctattccaca

SEQ ID NO: 569680 - DNA, 576 bp, Homo sapiens
ctacatgtaatggaatgtaacgcatccttaaaaaggaaaccctaaggccgggctctgtggctcacacatgtttttttttttttaattttatttatttatttatttatttatttatttattttttattgatcattcttgggtgtttctcacagagggggatttggcagggtcataggacaatagtggagggaaggtcagcagataaacaagtgaacaaaggtctctggttttcctaggcagaggaccctgcggccttccgcagtgtttgtgtccctgggtacttgagattagggagtggtgacgactcttaacgagcatgctgccttcaagcatctgtttaacaaagcacatcttgcaccrcccttaatccatttaaccctgagtggacacagcacatgtttcagagagcacagggttgggggtaagatcacagatcaacaggatcccaaggcagaagaatttttcttagtatagaacaaaatgaaaagtctcccatgtctacttctttctacacagacacggcaaccatccgatttctcaatcttttccccacctttcccccctttctattccaca

SEQ ID NO: 569681 - DNA, 554 bp, Homo sapiens
accatttttctaccttacaccacatgcacagacatgtacacatacacacacacacacacacacacaactggctcacattcatattttgcctctttccacttaattattcaaattatgaaaaaggaaaatgaaacccagttggtctcttctgctctcacacacttctgacaccaaatgtttgggatattttttttttccacaccaagcaatttttcaattatttgcrgattccaactaggtgtcctacaattcaattcagttctgaaactgtcttcctggagctagcctcagatccccacaagttaagggcttggtctaacaagactgccccaattttagatgccagttgccagtctgagctccacttctgaccgaccagctataaattgggggttcccaagaccccctccttgagtttgatcattttttatagtggatcatgaacgtcagggaaacatgtacttatgtttagcagtttattataaaggatacaactcatgatcagttatatggaagagacataaaggacaatgtgtgggggcagtggtgcagag

SEQ ID NO: 569682 - DNA, 583 bp, Homo sapiens
gccacattttcttaatccagtctgtcattgttggacatttgggttggttccaagtctttgctattgtgaatagtgccacaataaacatacgtgtgcatatgtctttatagcagcatgatttataatcctttgagtatatgcccaataatgggatggctgggtcaaatggtatttctagttctagatccttgaggaatcgccacactgtcttccacaatggttgaactagtttacagtaactagttcaaccatttcagttttttcatatgaaaatcttaactcatcaagatacaaaaggaattgtataattgtattttctcaataaacactcagaaaattaawtgttatcactcataattattattgagttatttccatgaattctatgccacagatactcagcaggcaaggtggtatttcttaattttgtgagaataactgctggaattctgtcatgcaactttatagcaaatgtttactgataagctctctattttgctttgttttcataaagggaatataagtacatttttcctagcaggttaagaaaaaaaaaaaagctgattgagctgttttatacaaa

SEQ ID NO: 569683 - DNA, 363 bp, Homo sapiens
gaaaaatttaagccattcagctttataatccttagagaatgtaaaccacctaatccaaggaaatgagattcaaaacaaaatgccaaagaagagagaaacaaaatagcaataacaaaagaagctttgtccttatcctagaaaaggtgattttaatactactccttgaagagtgtaagctgttgtaactaagctgacaacagcaagatctgattgttcaaatgaatactctcaaagcacctttggactacaagataagaacattgaatatttyagttattttgttgtgtaaaaaaagcagaaggcaagaattagccaaagttgtacagaacatatttcagtacacagtatttcactatgtatgaa

SEQ ID NO: 569684 - DNA, 444 bp, Homo sapiens
tatatgagtagttcacacactgagttacaatgttataatattatgtgtttttctgtgtacttactattaccagtaagttttgtacattcaagtgattatttattgctcactaatgtactcttttcataattgaagtaatccctttaacagttcttataggacagrtctgatgataataaaatttctcagttttttttttgtctgggaaagtctttatttctccttcatgtttgaaggatatttccaccaggtacactattttatggtagaatttttctccttcagcactttaaatatgtaatgccactctctcctgccctgtaagattttcactgaaaagtatgctgccagaggtattggagcttcattgtatgttatttgttacttttctcatattgtttttcatatcctttctctatctttgacctctgaaaattttgatta

SEQ ID NO: 569685 - DNA, 474 bp, Homo sapiens
catgtagaaccacaaaagacccccaaacagccaaagcaaccttgagcaaaaaatttttaaaaaacaaagctagaggcatattaccttacttagctctattaatgagaagatcatcatattgacataaaaatagacacacagaccaatataacagaatacaaagcccagacataaatccacgcatctacagccaactgcttttcaacaaaggtgccaaaaatacacactggggaaaaaacagcctcttcaataaatgrtgctggaaaaaatggatatccacatgcagaagaataaaactggatccttattttcaacacatacaaaattcaactcaaagtggactaaaaacttaaatgtaaatactgaaactgaaactactagaagaaaacataggaaaaatgcttcatgacactaggcaatacttttttagataagaccttaaaagcacaggcaacaaaattaaaaaacagacaa

SEQ ID NO: 569686 - DNA, 605 bp, Homo sapiens
taaaatgtctggcacatagtagtcacctaataaaactagctccataataccctgctttcttttagagagtgaaaagacagcagataatggcaggtgaaaaagtattctgcaaagacttttgataaaatctgcatttgtacaccttagtgaagtctgagtaaaggtatgaaacgataaaatattttatttttctatttatttagattttatgaagattttatttatctgtttttaaaagatggggtcagaaactacctcaatccagtagtttctaagcctgattgatcagtaagataacttgttgcattcttttaaaacacagattcctgagaccatctcgagattaatttagcaaactggagatgtaggccttaatctgcagaaatttatttcaaacattatatggaggagacagaaagtgaatttcagaaaagtaaacttctagagtcttaaaaacrtatgctatattaataatgactattctgccaatgtgttaagatgaggccttctctaggcctcgactttaatatacaaaaaaagattcacttaatatattaatttggagaacacagagaactcagctcagagacactgggaccctggat

SEQ ID NO: 569687 - DNA, 555 bp, Homo sapiens
cccaccacttaatataaaggaataaaataaggctcacaaggctaagtaaaggacctgatgttgaagagctgtgttagagattgactggctagaacacagactgcaaagcctgtgttcttcatcggtgtattctatcccttcccattctattgaataaatactgtgttgtaatgggtagaaattattcattttataaatgaaggtaactgagggattaggaaatgaaggcttttaaaacatgattccataaatgcaggatttcatttctccctatagaattacaaaataaaagcaagtccataaacccgattagcagatacagggctgcccgtctttgggaatgttaatctctggtcacatgttgcaaatgtttaactgttctatccatcacataatctcttcttgtaaatttatcatgaaatatatttacagctctctatatgacatataaatcatagacyaagagctgaatttagccaacattttgaaatcattcccaagagatgttgcggtataaaattttatattcagtttagcacactatgttaacgaaca

SEQ ID NO: 569688 - DNA, 579 bp, Homo sapiens
tgctaatgttgaactgatactatcacccacttccaacctcccttgattagaaaactaatagatgcaagtctcctgacacataataaggatgcaataaatggaaatttcattgataacttgataacttggacaaggacagccctttttgtttctattatatattctagaatataaaatatgaatacatgacaaatgaccaacattacaatatatactgaagtatatggggcaagtgctattaaataaaggacatttaaattattttaagatactctatcaatattttaaaagcatacaagtttgtggcataatcagtattgaaatgaaatcaattytaaatcatgtttgacttctagttagaggtttatattctttcatttaatcagtgtttaccttgtattctgtaaattcatttggttttcactgggcttttatgtcattaatttcttatttaataatttgtaacatcccattttagcttagctgaaaaaagagtaaaatggattttatggcattgatcagtgtactacctaggtcaatgtaaaagctaggtagtagaacatgttttgaaaccaaagc

SEQ ID NO: 569689 - DNA, 577 bp, Homo sapiens
attacataattttccagaactataatagtttcagaacaaacctactgggagggccaatacgggagtcaggaagcactcaagaagttaagtaagaaagaaggatctgaaagaagcagggataggttgggaaaggaaacaacagagaagactgttttttttgtttgttcgtttgtttgtttttgtagagacaggtcttgctctgtcaccgtggctaaagtgtagtggtgtgatcacagctcagtgacacttcaacctgctgggctcctgtggtcctcctgtctcagcctcctgagtagctgggactgactacaggcacacaccactatgcctggctaattttatatacagacaaggatctctttatgtttctcaggctggtcttgaattcctggcctaaagcaatctgcctgcctcagcytttagcctcgaaaattgctgggattgaaggtgagagataattaatataatggtttggaatccttaatatacctggaacatgcatgttcttaagcattcccgtccccactattctgcttcaggggaccagcatctctcacctggactagtgcaataacct

SEQ ID NO: 569690 - DNA, 581 bp, Homo sapiens
gtgtgctatgcaattttcttgacaaagagagattgtcatagcaattccttttctgacaatcacaggcagagttatgtagttctttcatggttctacagtacttaaaaaaaaaaaccttctagattacttgcaaaacaatatcaaaatttttgyttatctatttccagtagtaaattttgtgttcctgaaggacaagaatcatattgtgtttaccttaaatccttagtgccaattgcattgcacaaaatatagcaggtactcagcaaatatttcataaatgaatgattgttttattctgttcattagattcactagtgaggagaggcactcctaatggactagccaagggacattatgatatgatggaaacagcaagttctgataggtgacacctggatttaagtccctcctctatcagttcctaatggcaatgacaccttcaattgccctgagcaacacattccttatgcataagttgggagaaatcatacctgctaggctactttccagtgtggccatgaggatcaattgtgataaatgtgaaaataacagcaattttattaatagcaaattattacgtg

SEQ ID NO: 569691 - DNA, 483 bp, Homo sapiens
aggcaaacagttgttaatgttttattatagataaatgacatttgttaatcgtgttaatgatcatagtggctaacattatttattgaatggttattgtatctaagcattargcttttgaaatgctttccatattttatttgaatttcataaaaaccctatatactagatctcttttgatctccattttactgatgaagaaattaaattttacaaagattgaattcctttaaataccctgctagtaaatttaatgcaaggcctaatttggtttaactcttcagcccatcttttgaaacacatcactgaattagctctaagtaaataaatcttttcatatagcaaaatatcgttctacaactatgtaattatgtttctgaataatatttaaaggcatgagaaaatgtccatagcacaagagtaagggtgtatgacacatatcaaggaaatgtatatatacatttaggaaaatacttcaaggaaata

SEQ ID NO: 569692 - DNA, 581 bp, Homo sapiens
ttagaagctttttgaaagtggaaacaaattcagcttagcttagctgcttatccccagcatctaagataatatcttgagtataacagctgccaattaaaaagagtcagtcattgaataacttaaaatatatatcatcctctaatctgtttgggaaggttctggaaatcctgataaaaatatacaggttgagataagaaataatttttccagtttatatatatacatgaaatatgagactcagtgaaatcaaatacttctcagactatgcattgtgagggatggaacccacgttccggactctgaattatctcttttcaatttaagcatgttggaggctaggagttgtcttaatatggcataccttgaaaacccagcgaattttctatgagattttctgttttcagaaattgcaagctattatttaagctatggtagttttagacacattaacaagtgaaaattaagaagcygaaaatagcagtctttgtggttacatattaagatttctgagagttgacccacaggtctagacattttctctgcttctttatgttatacaatagcagataaacttctcgaga

SEQ ID NO: 569693 - DNA, 553 bp, Homo sapiens
caatgtgtggctaaaatgctgccttggtcatgaagtatatttttcactttccattagaatacatttctatatttccaaaatttccataaaattaaaattacgtatttcatagcacatagcattgtttacattgtcattttatatcctttactagactataagcacttgggcttataaatcctatgtttgctttctgtaaccttcgtagagctagaactactattctctccttggcatatggyaaacaagacttacaaaaatctcactaatgcgtaattcttatgcattcttcactcgaattcaccaaatgttgacatattacataaattagtacagtttttcaacaccagggaacaccatttctaaactattaactaatccattgacctttttcaaagtttatcaattgccccactaaagtattctataggcaaaaatcttattcaggatcatatactccatatacttattgtatcatcttacatttattttaatttaggacagattttcagcctttctttgtttttgatgactttgtgaagaataatggctg

SEQ ID NO: 569694 - DNA, 553 bp, Homo sapiens
caatgtgtggctaaaatgctgccttggtcatgaagtatatttttcactttccattagaatacatttctatatttccaaaatttccataaaattaaaattacgtatttcatagcacatagcattgtttacattgtcattttatatcctttactagactataagcacttgggcttataaatcctatgtttgctttctgtaaccttcgtagagctagaactactattctctccttggcatatggtaaacaagacttacaaaaatctcactaatgcgtaattcttatgcattcttcactcgaattcaccaaatgttgacatattacataaattagtacagtttttcaacaccagggaayaccatttctaaactattaactaatccattgacctttttcaaagtttatcaattgccccactaaagtattctataggcaaaaatcttattcaggatcatatactccatatacttattgtatcatcttacatttattttaatttaggacagattttcagcctttctttgtttttgatgactttgtgaagaataatggctg

SEQ ID NO: 569695 - DNA, 497 bp, Homo sapiens
ggctctccttccaacagaattgccatttagccctgttttatagaaaccccatgtctgttcttgcatgggctattacagcaggacccacagttttaagggaaaasggtgatggaccatctcacttcttctgtaagaatccagtaggcaagtaaatgtgtaaagctctgaggaaaatatcaagagaaaatatctactcaagttgccactacttggcaccaaactgggtacacgatagacttcatgttatgttcaggttttactagtacaagattctagggggaaggggaaagtggtgagcagatgatattttcataacctgagtataatggaactttatctcaatctcagtttccaaacatctaggacatccacacttctcatgccaaataatttgcctcactgctggattaagttcagggtgactggaaatgacagagccaggcctttctcataacgaccctcaatggtgacctcctcatagaaggcattgtatcttt

SEQ ID NO: 569696 - DNA, 577 bp, Homo sapiens
tagtagagtacattgattaaaaatgatgactgacattgattgaagagagagtgtatgcctgtctgtatactagactattttaattgatactcaattataattgttatattttacacatagcaaataaatataccgtagaattgttaagtgacttcacaagttatatagtcaagaaatggaaaagccagattttaaacccagggttatggtcacccaaagcttttgctttttctctactactcacttctcctaatttttttttctttttctttttttttttttttctgagacagaatcttgttctgttctatcacccaggctggagtgcagtggtacaatcacagctcactgcaacctcaacccttcgggctcaatccacccacccacctcagcctcccaagtagatgggactacaggcacrtgccaccccacctagctaatattgtatttttttgtagagacagggtttcaccattgttcccaggctggtcttaaactcctgagatcaagctatccacctgtctcagcctccccaagtgcagggattacaggcatgagccaccatgtccagcctgat

SEQ ID NO: 569697 - DNA, 566 bp, Homo sapiens
acaaaatttttaaaaatgtcatatattattttttactttgaaatgaacaagaytcacaaagtaagtatactgtgagtataatattgtcattgcataaagaagacaccccgttatccaattattttaatgagataatattccatttctaacaaacaaccttctgtttctcactaaaaccaaaggctctcaacctggtttcccattttctggtagtgacgagttaaggcttcaaaactgtttccaaaaacacagctcatttttccacaaactctaatgatttattcagatgcatgtggttttcaccatgtcaatgtgaatacagcataacaagctgggtaacacattccttagacttaagcattggagataaacagattatgactgaaactgacctaagacttggagtagatatagaacgaagataaatgcctgaatttagataaacatgaagcttcttacttatgttcctgttaaactaccagatcactagaccccactagaatatttctgaactctaggctgtacgtgtacctctaaattttaaaaagcctctctagatgatagat

SEQ ID NO: 569698 - DNA, 566 bp, Homo sapiens
acaaaatttttaaaaatgtcatatattattttttactttgaaatgaacaagattcacaaagtaagtatactgtgagtataatattgtcattgcataaagaagacaccccgttatccaattattttaatgagataatattccatttctaacaaacaaccttctgtttctcactaaaaccaaaggctctcaacctggtttcccattttctggtagtgacgagttaaggcttcaaaactgtttycaaaaacacagctcatttttccacaaactctaatgatttattcagatgcatgtggttttcaccatgtcaatgtgaatacagcataacaagctgggtaacacattccttagacttaagcattggagataaacagattatgactgaaactgacctaagacttggagtagatatagaacgaagataaatgcctgaatttagataaacatgaagcttcttacttatgttcctgttaaactaccagatcactagaccccactagaatatttctgaactctaggctgtacgtgtacctctaaattttaaaaagcctctctagatgatagat

SEQ ID NO: 569699 - DNA, 566 bp, Homo sapiens
acaaaatttttaaaaatgtcatatattattttttactttgaaatgaacaagattcacaaagtaagtatactgtgagtataatattgtcattgcataaagaagacaccccgttatccaattattttaatgagataatattccatttctaacaaacaaccttctgtttctcactaaaaccaaaggctctcaacctggtttcccattttctggtagtgacgagttaaggcttcaaaactgtttccaaaaacacagctcatttttccacaaactctaatgatttattcagatgcatgtgkttttcaccatgtcaatgtgaatacagcataacaagctgggtaacacattccttagacttaagcattggagataaacagattatgactgaaactgacctaagacttggagtagatatagaacgaagataaatgcctgaatttagataaacatgaagcttcttacttatgttcctgttaaactaccagatcactagaccccactagaatatttctgaactctaggctgtacgtgtacctctaaattttaaaaagcctctctagatgatagat

SEQ ID NO: 569700 - DNA, 566 bp, Homo sapiens
acaaaatttttaaaaatgtcatatattattttttactttgaaatgaacaagattcacaaagtaagtatactgtgagtataatattgtcattgcataaagaagacaccccgttatccaattattttaatgagataatattccatttctaacaaacaaccttctgtttctcactaaaaccaaaggctctcaacctggtttcccattttctggtagtgacgagttaaggcttcaaaactgtttccaaaaacacagctcatttttccacaaactctaatgatttattcagatgcatgtggttttcaccatgtcaatgtgaatacagcataacaagctgggtaacacattccttagacttaagcatyggagataaacagattatgactgaaactgacctaagacttggagtagatatagaacgaagataaatgcctgaatttagataaacatgaagcttcttacttatgttcctgttaaactaccagatcactagaccccactagaatatttctgaactctaggctgtacgtgtacctctaaattttaaaaagcctctctagatgatagat

SEQ ID NO: 569701 - DNA, 248 bp, Homo sapiens
gatagcttcatgagtgaattctaccaactgtttaaggaaaaactaacaccaatacttctcaaattttcctaaaattaatatggaatttcaagtgagctcaaawagccaagacaatttgaaaaaaaaaaaaaaaaaaacaaagtggaaggactcacactttccaatttaaaacttactacaaagccatagtaatcgtaacagtgtggttttagcatctagattaatggaatagaacagagagcctagaa

SEQ ID NO: 569702 - DNA, 584 bp, Homo sapiens
agataaccagtctttaaaggaatattctggttaaatgacataaaagcattaacctgatgatagcctgggcattgagagagatctgactatgacctttgtcactcttttatctctggggtgttttagctcatctagctgacagggcaaatcccctttccacatcatctcctgaggccacccaatcatcagagaggacaccccttctaggctcagacccaggaatgtagccagctagtcaaaatcatcagctctcccaggaactctgataactactctatcaagggtaaaaaaagagaatgwcttctcactgatggtaagaagccgtaacccagatgctacaccatacatttggggacatcacattttttggagtgggtgcacaaaaagcttgctgaatgaatacatggtattagctagaactacgggttctgagagcaaaggaccatatggcacacaatgggaagagaagggataggaggaggaggagaaaaataatgaaatccctttttcctgaacacagctggccttgggcaaatttgtaaaacaggctttgaagaagaattgactaggatcatgactcctcc

SEQ ID NO: 569703 - DNA, 584 bp, Homo sapiens
agataaccagtctttaaaggaatattctggttaaatgacataaaagcattaacctgatgatagcctgggcattgagagagatctgactatgacctttgtcactcttttatctctggggtgttttagctcatctagctgacagggcaaatcccctttccacatcatctcctgaggccacccaatcatcagagaggacaccccttctaggctcagacccaggaatgtagccagctagtcaaaatcatcagctctcccaggaactctgataactactctatcaagggtaaaaaaagagaatgtcttctcactgatggtaagaagccgtaacccagatgctacaccatacatttggggacaycacattttttggagtgggtgcacaaaaagcttgctgaatgaatacatggtattagctagaactacgggttctgagagcaaaggaccatatggcacacaatgggaagagaagggataggaggaggaggagaaaaataatgaaatccctttttcctgaacacagctggccttgggcaaatttgtaaaacaggctttgaagaagaattgactaggatcatgactcctcc

SEQ ID NO: 569704 - DNA, 594 bp, Homo sapiens
acaaaaaaaaagactgtcctagactggacaccatggctcctgcctgtaatctcagcactttgggaggcggaggtgggcagatcacttgatcccaggagttcaaggccagcctgggcaacatggcgaaccctgtctctactaaaaaaatacaaaaaattagtggggcatggtggttcatgcctgtagtcctagctatctgggaggctgaggtgggaggatcacctgaacccaggaggtcaaggctgcaatgagccatgatcatgccactgcactgccagcctgggagacaaagtaagacactatcttcctctcccccgcaaaaaaatactgtggttcagtctgctggaagaaaggacaggccagattcccagaggaggcggtgcatgaactgagacttgaaggatgagtaagagttgcacaagaatataagagaaaaatctcttaccaggtacaaaaaaaaaccaagtgaacatattggttgggtaattttgttagcatttttcttttagccattgtgatcagctttgaacacgaattagcattgtgatttattttgtccagtagaatrctgcagaagtgactgtgtaccaattg

SEQ ID NO: 569705 - DNA, 583 bp, Homo sapiens
tcttatctctgagtaaaggtaacgatctgctcttttttccccaaaggtgtygaaacttaaggaaacttaagtttctttaattaattaatttcctagcagcctcaagtcaaggacttatgtgacatgaaagcgaagtattgttgtagacatttctcacagtaataacctcactgtcagctagctggtttacagcttgaagattcatgcataatttcatatctcaacatattgttcatttttcacaattttagatcagagacaaggatgtgccagtgaggtgaatcaatgacacaacaagcaatgctatttagaaaaattactcatgttattctagagtcaactactcaaaactggtaagaaattacaaactttcagtctaaacaattaaactgaaaaaggcaaactaactaaaaacaaagaggctatgaatctaaaagctctgagctaattgtagaatcatttgaattctatcaaactctcattttggatctgagattaaagaaacatttttcaggttttgctatttgccatttgttagggtccaaacagtgcctttaagatctctctgggcttgttaaaaggg

SEQ ID NO: 569706 - DNA, 555 bp, Homo sapiens
tcacatgaagaaatttaaaactagaaaattcacatttaacagtgctaatatacatgaaaagaaagagatcagagatagttatggtcacatttcttataatagcaaactctggtatacgttgacctctgatgtgagtgaagatatcaggagtctattttcagggagaaacattaactctgtatacatctaactcagcctgctctgtacatggacctgtgtagctaaatgcaactagagcaaaccacacagccatactgatcagcctcactttaaattcawgacattaatctttaggagcccttagtggtacccagaaatcatactctgcttccctagtcctttcatcttcccattcttcacaccttgtcttccatcttcaaacactcaggacacccccccaacccatccccactcccagcgttgacctcacttcctattttgctaagaaatagaaggcataggaagcttcttctcatcctacgtagaaatgggtgcccatttcctcttcctttcacctattcctatggatgaactgtcctgcatctaggtagggtt

SEQ ID NO: 569707 - DNA, 416 bp, Homo sapiens
tttactcaccccctaaaattatccatacttccctatctccctttctcctaagaagaagggtgtataaccatctgtgcccccattgagtaatcattcttctacaattcacctgtgctatgactgttaaaataaaattgtatgccttttctcccataatatttctgccttttgtcagttgatttgtagtgaactttcagagggcaaaggaggacattttcccttagcccctacaggtatgtatgtgaattatyctaggaagagtctaaggaggttcatgtctcacaaaaggttagtagtcactgtattagaagggtccatttccagtcagatgaattttacatgaaaattttgtgtctttctaaagtggagagatagtggtcacctcgctaaataacataaggtactagacacatggg

SEQ ID NO: 569708 - DNA, 404 bp, Homo sapiens
tttactcaccccctaaaattatccatacttccctatctccctttctcctaagaagaagggtgtataaccatctgtgcccccattgagtaatcattcttctacaattcacctgtgctatgactgttaaaataaaattgtatgccttttctcccataatatttctgccttttgtcagttgatttgtagtgaactttcagagggcaaaggaggacattttcccttagcccctacaggtatgtatgtgaattattctaggaagagtctraggaggttcatgtctcacaaaaggttagtagtcactgtattagaagggtccatttccagtcagatgaattttacatgaaaattttgtgtctttctaaagtggagagatagtggtcacctcgctaaataacataaggtac

SEQ ID NO: 569709 - DNA, 615 bp, Homo sapiens
gggaccgtccaagcagtctgtgttttctggccaccagcccctggatctgctgataaaatgtcttcctttttgcagsagcactggaaagagtagttgcctaagggagtctgtgctgcagacagacttcccttcctgacacgtgtagtgtcacaccatgaaacctccacccctaagggtggcctgccccttttctctctggcattatgtgggcaacagaggctacagtagagctcttttaataaggattaaaggcaatcgttcccaacatttggctggaggccctgaatttaaatgagcagaaacagataggaaattatcaacaatttcctgattttccatttctggatttcctgttcctctgttgacaagaaatcaagaaaatttatagataggatgtcgcttgtgcttatatttgactgtccgagaacatttcttctaggtttctcctaacccgttgttgtctcctaacttgaatttcagtagaccactgcttagcactcaatatttaatgaatattattcttggttcattctaaatcatttttctagttggaaacagtaggggttatcccaaatgataccttctaattcttagaattcccctcatacctgtgga

SEQ ID NO: 569710 - DNA, 615 bp, Homo sapiens
gggaccgtccaagcagtctgtgttttctggccaccagcccctggatctgctgataaaatgtcttcctttttgcagcagcactggaaagagtagttgcctaagggagtctgtgctgcagacagacttcccttcctgacacgtgtagtgtcacaccatgaaacctccacccctaagggtggcctgccccttttctctctggcattatgtgggcaacagaggctacagtagagctcttttaataaggattaaaggcaatcgttcccaacatttggctggaggccctgaatttaaatgagcagaaacagataggaaattatcaacaatttcctgattttccatttctggatttcctgttcctctgttgayaagaaatcaagaaaatttatagataggatgtcgcttgtgcttatatttgactgtccgagaacatttcttctaggtttctcctaacccgttgttgtctcctaacttgaatttcagtagaccactgcttagcactcaatatttaatgaatattattcttggttcattctaaatcatttttctagttggaaacagtaggggttatcccaaatgataccttctaattcttagaattcccctcatacctgtgga

SEQ ID NO: 569711 - DNA, 623 bp, Homo sapiens
taaaagttacatctggattctgccatttatcactttatatattttgagacaattttgctagcatatacagtttcaaaattcttttactacctttctaagttgctccttttatcattacagaattactccctttatgcctattaatgtcatttttgccttaaggtctagcttctctgatgttaccactacagcagctttttttttgttttgttttgctttttttttaattaagatttgtctacaatatcttttcccattccttttcttagttctcacaaccattttatattttgggtgtgaatcctgtaaaaatgatgtagctggattttattttaaattctaagcagatyatgttttcatttttacaaagagattccatctatttacatataatgagattaatatgttgactcatttttatcttgctattttatgtttttctactctttaaatagttatacttaaaattgcaggacacactcttatcaaaatctaaagttaatcagcgtgtctattattctccagtacaatacaaattcttaaaccattttaaatctattagctcatctggttttaaaccatccaaatttggtcactgttgcaacagtcattttaagaagctt

SEQ ID NO: 569712 - DNA, 547 bp, Homo sapiens
atgtcttcattttttatgaagtcttttttcaatccaagacacctggcaaacaattcttcctcccagcccccatccctggattggaagagttctttttgtctctttttcacagaggaaagcagctctcctggggatctggcttttgtgggattctcagttgcaggcggttacttctctttttccaaacccaagcaccaggccctctttctgggtcttgaatagccctttgggtctttgaatagtcctttggggagccccaactcaccagccagtgctcaggaataacatcccctctttgtttctgcctcttggggattttgctgactctcttttgagcttgaccaggcattagcaaaaattcttaaatgtttatattttatcctggatttccatgtgttttctttgggctgggagagctacagcagctcattccaccamgttcctggaaggctgcaggtatcagcttgcaagtgccaagtgtcaaacaagtgataaagaaaagtgttggtgtcatgcagagaagggaggaatcactgcagacagtaat

SEQ ID NO: 569713 - DNA, 324 bp, Homo sapiens
gccagggagcatggatgaaactgagaaggcgctggatggaggttttctaagatgtgtgcctaatttaaaaggggccgggagtcaaagtcccctggagagaactaaggggggtggatggacaatggcagtattggaaatgtgacagcaatggccttggagcctgcagatttccccaaagagaaaatccaattagatggactatcttacgtcagcaaatgaaaacagaaggtgaatgcataatttcatgagaacattctttttctctgcttattagattaggygatctaacaaggcactctgcttctctcaataccaggaagtaaa

SEQ ID NO: 569714 - DNA, 592 bp, Homo sapiens
ttctgccctgttccttgagcacatagtgccatttctcatttatttgctctgtcatttgaggtatgtttcccccattagggcagagtctgtctgggtccctccccagcccttacattaatgtctggaacttagtagatgctcaataaacacttgtagaatgaatggaataactgagaatgagaaaaatatggcaaaagcactcatacataatagaatcattattgacttgctgctattttaggatatgaggasttctttctactctaaaaaaaataaaataaaataaaaccaccaacaccacccaatcccacaaaacactgactggtaaaagacacgttgatccttagaagttctaccacctaaaatatatctgttttttagttcataaggtagaatagaaaatatactttacaagatacatcttcaaatggcatttccttaacttccagaattaaaaaaaagttcagccgacttatttggaaccattgaaccaaatacctttgactccttggacacacagctttacactttaaaaataaaatgacctggtgtatgcgtgtcccctcctcacaccagctggtatctcagagtc

SEQ ID NO: 569715 - DNA, 592 bp, Homo sapiens
ttctgccctgttccttgagcacatagtgccatttctcatttatttgctctgtcatttgaggtatgtttcccccattagggcagagtctgtctgggtccctccccagcccttacattaatgtctggaacttagtagatgctcaataaacacttgtagaatgaatggaataactgagaatgagaaaaatatggcaaaagcactcatacataatagaatcattattgacttgctgctattttaggatatgaggacttctttctactctaaaaaaaataaaataaaataaaaccaccaacaccacccaatcccacaaaacactgactggtaaaagacacgttgatccttagaagttctaccacctaaaatatatctgktttttagttcataaggtagaatagaaaatatactttacaagatacatcttcaaatggcatttccttaacttccagaattaaaaaaaagttcagccgacttatttggaaccattgaaccaaatacctttgactccttggacacacagctttacactttaaaaataaaatgacctggtgtatgcgtgtcccctcctcacaccagctggtatctcagagtc

SEQ ID NO: 569716 - DNA, 592 bp, Homo sapiens
ttctgccctgttccttgagcacatagtgccatttctcatttatttgctctgtcatttgaggtatgtttcccccattagggcagagtctgtctgggtccctccccagcccttacattaatgtctggaacttagtagatgctcaataaacacttgtagaatgaatggaataactgagaatgagaaaaatatggcaaaagcactcatacataatagaatcattattgacttgctgctattttaggatatgaggacttctttctactctaaaaaaaataaaataaaataaaaccaccaacaccacccaatcccacaaaacactgactggtaaaagacacgttgatccttagaagttctaccacctaaaatatatctgttttttagttcataaggtagaatagaaaatatactttacaagatacatcttcaaatggcatttccttaacttccagaattaaaaaaaagttcagccgacttatttggaaccattgaaccaaatacctttgactccttggacacacagctttacactttaaaaataaaatgacctggtgtatgcrtgtcccctcctcacaccagctggtatctcagagtc

SEQ ID NO: 569717 - DNA, 406 bp, Homo sapiens
aaccctagagaagaaccaaaggacagatgtcagtgacagtgggccattcattgatggatttctctccaggataaaggccacaccaatcaatattcttacagctgggcctttgaactatttgcttcctccatatggactctccaagggtaaattgacattttccccagtgccttaatttcttattcaattccagcctcctaggttacaaaagagtttggctaattctaacagctaattttccataagcgcttaaatagtttagtcagaatgatggttgggaatattttakgcggctttcattatgcttcggctaggcagggtaattcttatgaattaccttgttgatttaattaagtaatgcaatacacgacaaaatattaccctgggtcatgaaaaatagagatct

SEQ ID NO: 569718 - DNA, 600 bp, Homo sapiens
accttaacagcttgcacctgttccacctcattatgtggcccaggtcagaccctgcatggaaataccaattcatagaatattctaattaatagaacagtgaatattaaagagcatctcgtaggtggtaattgtctggtaactagtgtgtaagtcactgtccttccttctgttgatggactatatacatagrtcatggtgcgtgtggaagaccccattgagtgcctgtattttgtgccagtgggcttttgtttttgttagtcaatcatttgaccaaaaagcattgctttgatcaggtgcacactgtctatgtttgttaatagaacaaaccttaatgcctttctcaaggtcatgcacaatctcaattagctagagagacagggataggatgacttattttaaaagaatgcatccttattctttcattatcagggaatattactgacatgtacagaaactttatatgtattccatttgtaattctaaatgtttatttttctctgatttagtaaaataactcactgaagtctaaaaatgaaaacctggttttgtttagatgtgtaagacggtccgagacacactctgggaagcagcagcagcttc

SEQ ID NO: 569719 - DNA, 600 bp, Homo sapiens
accttaacagcttgcacctgttccacctcattatgtggcccaggtcagaccctgcatggaaataccaattcatagaatattctaattaatagaacagtgaatattaaagagcatctcgtaggtggtaattgtctggtaactagtgtgtaagtcactgtccttccttctgttgatggactatatacataggtcatggtgcgtgtggaagaccccattgagtgcctgtattttgtgccagtgggcttttgtttttgttagtcaatcatttgaccaaaaagcattgctttgatcaggtgcacactgtctatgtttgttaatagaacaaaccttaatgcctttctcaaggtcatgcacaatctcaattagctagagagacagggataggatgacttattttaaaagaatgcatccttattctttcattatcagggaatattactgacatgtacagaaactttatatgtattycatttgtaattctaaatgtttatttttctctgatttagtaaaataactcactgaagtctaaaaatgaaaacctggttttgtttagatgtgtaagacggtccgagacacactctgggaagcagcagcagcttc

SEQ ID NO: 569720 - DNA, 550 bp, Homo sapiens
gtctttggcatatctttcaaaatttcactggcctccatgctttaatttgatcttttcaagtattctttaaccacttcagaagttttgtaatcaactggtagtgaaggacattttcaaaatattcccgagggggatcccatctactgaagtacaaacagagatttagaattgtaagttaagtatgtgcgatggatgaatatagacatctttgtggttgattcccatgtcacatttctcttggaatcctgttattcttctttctgtgtaataatgtggtcattggctgacacaaggagtaactaaagatrtattttatgaacaaatctgtgtttattactcccattgaacataagcctttggaaggtaaagctgatgtccctgtgtccctttgcactcaggacaggggtgcctccagcagacagggtgctcaatgtatgtttgttgttagtaataactataacttattgggtgatggccattatttactatgtaccaggcactattctacacattttatgtatgtatattaactcatgcagttctcataagg

SEQ ID NO: 569721 - DNA, 604 bp, Homo sapiens
aatccactctaggattttaagcctaatccccaactatgaaataagacaaaaatcacactgtaatggaatccaggtattaaacctggtgaccagcattttatggagtccaggaaatgatatcacataagtacctgattatgtaatgtataaggtcagttcttatcaaatgaactgtatccccctgaagtccattaggtacggtaagccaaaaaatgattatagagcactacaataatagtttacatcacaaagtatctttttctgtggcttagaaatcttttctaaatgaaaacacaacatgaatataaacatcaatatttgaaatagaaaatcaaagcattcttaccttactacatcatcaatattgttcctgtatacgccttcaagtctttctgcaggaaatcccatagcaataatgtttggataaatatctgagtactttagttaaggaaagaaatatctgaaatatgcagcaatcaaactaaaagaatactttttaaaacattagctagttatgaaaagaaagytttccccactatagctggagtaataaaaggtggtcaatgtatttatgtataaccatttatgtgttaatactggtaaa

SEQ ID NO: 569722 - DNA, 606 bp, Homo sapiens
aacattctcaattaatgtcaacttcaaaatttgcaaatactcttttaaaatawtatttttggcttaacagaaaactaaattttgggaagctacttcttcagtaagttttacattcatttcaaaacaaaaacttgggcaaaattaactgtgcacatttatatgcagctaacataatccaacggaataaaacctctcccgatataaacgctgtcttaaaaaaaaatattccccacaatttttagcaggacatatagacactgtagtgtcactctacctttagacaaaatgcaactgacatttgctaagaaataacttttattaaaaatactgtgctagtacttatgcaattacataattttaactaaatattgtccactgccacaattcgcattaccaaactcatattaccaaattttaggccttgatagagcctaaatgcttcagtcacttcagaccaataacttaattctgttttcacataccttatacactggcctaccaatagctctcaattcctgtcaatactttccccattctgcaaaaagagggccccatccccatccctaatcaaaaccaatgtgttgtacctgaaactgcaaagattaa

SEQ ID NO: 569723 - DNA, 587 bp, Homo sapiens
taaggagttcctgatgtctaggtgttctactagattgcatggtaaaaaccagagctgtgtttaattatcaattactgcgtggtagaaaaagggaaaatgaagatgaacttttaaaaggggagtagattagggaggggtaaaatgtctcacatttgtttcttagattgctgatcttgtctccagagtccctgttattagcactgcccttctctgtccctcccctggagcctaccctaagtgacaattagtctcatagcatctgagaatctctgaaatctgctttcatggaagcaaatgaaacaagggtgcattcctgtcctggtgcgacagaatcctcttggattccatggcacagagttactctggagcagagataatctgcatcaccagcactaaagtgctrgaatatgagaccagcctccaagtacttccatccggctgaagaaagaaaatgggaaatgggttttactgcttctctaaacatcaggtccctctacttctctctagtggtgaatgaaaggatcatcaatgttggcagatatttggccagcccaacagcaacatcaggtggttattaggagttggtg

SEQ ID NO: 569724 - DNA, 657 bp, Homo sapiens
gtctttctcaagaaaaaagaggcatcattcttaaatttgaagttggtttgttacttctatgagggaagtgttacaagccaacacactatttactrtgttaatagacaatggaattaacaataaattggattatgctgaataggtaaggagtttcttactcctgaatttactttctagagagtggtatttaaaaaagaggtaaaatgttattattcttgataaaagtagtaaatgaaaacacaaatagagataaatctatgtccttactgctctactctccccttagctaattctcagttaaacatgattcattcagcaccataagacaggggggaaaaaaacatgattcataagaatctatgtgagtgtttcagaatttgttacagtaatctctcaccaactgagagtggggatgattacattcctaaaaggtgccatgttaggtaaaacctccattggcaaaattcaagaaaatatggaacttgtaagatagtaaagcaataaagttggtcataaagcagaaaagaatcttctccttcagctgttcatgagctcatattctgaaaaatcatgattggtgtgaaagataggatgtatttatattaaccacacttcctttcacagcttttgatctggcccttactatactgctatttc

SEQ ID NO: 569725 - DNA, 635 bp, Homo sapiens
aattttattaaattattaaatatttagcattatgacattatataaatagtatcatgatatttagtaacagtaaataatggtatattaaatactgaataaaacagccataatctgcatcctgcatgcttcaaactactttggcagagactatatttgttcttcacctacctggcactctatgcttgataaatttcctgtgttgggttcagaaacagattttgagaatgataattaaaatgaagtatcatggaccccatcttcctgtagaatgaggaggaaatgrggtaacactagagagacttttagttgtcttctctttttggcctatgagtgtgtgttcaggtgctgcaaatccttctgattgattcaactgaagaaatatgattagtcatcaaaaataagacaaaatatgatcactgtatttcatggctttagacatcattcatttaaactctttcacctgtttatttccaagagtcccaaggaaggggtgagagagggacagaagaggtttcttaaatactagcctgtgaggacactatgatgactatatatggaaagctagtttatgtaacataagtaggattaagtgatggagggactgtaatgtggaaggtggcacacggtccagccag

SEQ ID NO: 569726 - DNA, 481 bp, Homo sapiens
ttacatttttaggcacaccctaattaactaacatcttgatgtcccttgaggtatgcctcctacaaaataatattagaaaaggcagattcaagatttcaggagcgtcagtttgccagctggctgccatgtgtttgactggtgtttaacagtgagtattggctgacctctgctgaagaacagggatagtatctgggcacctgaggcaactgcggtccacaggtgaaaacataatctctcagatttgtaatggaatactgagagatgtcaagttgagtcatatcacataagtgtcamctgctctgacagcattcaggacatttgcccatggtgcttttcttccattttttctcttcgtataatcatacactgtaagaggtcagtggggactggtagtcttttaaagtgcattgacagaaaaggacagtatatatttcaaatctggctcatttgttatagcaaaagacagatactgaattgcaat

SEQ ID NO: 569727 - DNA, 481 bp, Homo sapiens
ttacatttttaggcacaccctaattaactaacatcttgatgtcccttgaggtatgcctcctacaaaataatattagaaaaggcagattcaagatttcaggagcgtcagtttgccagctggctgccatgtgtttgactggtgtttaacagtgagtattggctgacctctgctgaagaacagggatagtatctgggcacctgaggcaactgcggtccacaggtgaaaacataatctctcagatttgtaatggaatactgagagatgtcaagttgagtcatatcacataagtgtcacctgctctgacagcattcaggacatttgcccatggtgcttttcttccattttttctcttcgtataatcatacactgtaagaggtcrgtggggactggtagtcttttaaagtgcattgacagaaaaggacagtatatatttcaaatctggctcatttgttatagcaaaagacagatactgaattgcaat

SEQ ID NO: 569728 - DNA, 565 bp, Homo sapiens
acttcaccagttcttttactaattggatctcaccttatatttagctgccatatctcctttggctcctccaatctatgacattccctcagtcttttcttgtctttcatgaccttgccacttttaaagaatactagtcagttatattgcagaataactgccarttggggttggattgatgttttctcattattggattgaagttatgcatttttggcaggcatgctacagtgatataaccttctcagcctatatatcagggagtacatcatgtcagtatgtcttattactggtgataattaaccttgatcatttggttaaggtggtgtctgctggctttctcccctgtaaagttacactttttccttttataattagtaaatatcttgaaggagatattttgagactatgaaattattttgtttctcctcaaactttcgcatactaatttggacatccattggtagatttttttaaacttttaagttcagggatacatgtacagatttgttattatagataaacttgtgtcatggagatttgttgtacagattccttgtcacccagg

SEQ ID NO: 569729 - DNA, 565 bp, Homo sapiens
acttcaccagttcttttactaattggatctcaccttatatttagctgccatatctcctttggctcctccaatctatgacattccctcagtcttttcttgtctttcatgaccttgccacttttaaagaatactagtcagttatattgcagaataactgccagttggggttggattgatgttttctcattattggattgaagttatgcatttttggcaggcatgctacagtgatataaccttctcagcctatatatcagggagtacatcatgycagtatgtcttattactggtgataattaaccttgatcatttggttaaggtggtgtctgctggctttctcccctgtaaagttacactttttccttttataattagtaaatatcttgaaggagatattttgagactatgaaattattttgtttctcctcaaactttcgcatactaatttggacatccattggtagatttttttaaacttttaagttcagggatacatgtacagatttgttattatagataaacttgtgtcatggagatttgttgtacagattccttgtcacccagg

SEQ ID NO: 569730 - DNA, 565 bp, Homo sapiens
acttcaccagttcttttactaattggatctcaccttatatttagctgccatatctcctttggctcctccaatctatgacattccctcagtcttttcttgtctttcatgaccttgccacttttaaagaatactagtcagttatattgcagaataactgccagttggggttggattgatgttttctcattattggattgaagttatgcatttttggcaggcatgctacagtgatataaccttctcagcctatatatcagggagtacatcatgtcagtatgtcttattactggtgataattaaccttgatcatttggttaaggtggtgtctgctggctttctcccctgtaaagttacactttttccttttataattagtaaatatcttgaaggagatattttgagactatgaaattattttgtttctcctcaaactttcrcatactaatttggacatccattggtagatttttttaaacttttaagttcagggatacatgtacagatttgttattatagataaacttgtgtcatggagatttgttgtacagattccttgtcacccagg

SEQ ID NO: 569731 - DNA, 513 bp, Homo sapiens
gggttgagactatgggattttctagatatagaatcatgtggtctgcaaacagggatagtttgacttcctctctttctattcggatgccctttatttctttctcttgcctgatagctctgactaagattttcaattctatgttgaataggagtgatgacagagaacattcttttcttgtgctagttttcaagggggaatgcttctagcttttgtccattcattatgatgttggctgtgggtttgccatgatggctcttattattttgaggtatccagggaaacttctcatcctttcatgcctccatcaagtggtcttccaacaataatgataatttgcatttttttaaagtgtgctataattttgaaagctctcacacattcattacttaatttaattcttatgaaaatcctctgaaattgactyagcaggtcctattttccataattttcaagtaacagtactgaaaaagccattgctcaaatgtatatcctactgaccataggttatttaaa

SEQ ID NO: 569732 - DNA, 398 bp, Homo sapiens
atgcctttttttcctctgggtagatatctagtagtggggttactagatcagatgatagttctactttcagttctttaaggaatctccacactattttccatactggttgtactagtttacattcccaataacagtgtaaargtgttcccttttcactgtatccatgccaacacctttttttgttgttttgttttttctgatcatggccattcttacaagagtaaggtggtatctcgttgtggttttgatttgcatttccccgataattagtgagttgaacatttttttcatatgcttgttggccatttgtatatctttttttttttgagaatcgtctattcatgtccttagcccactttttgatgggattttttttcttgctgatttgtttgagttat

SEQ ID NO: 569733 - DNA, 565 bp, Homo sapiens
aggaaaaatatttggttattaaatagcactgagattcaaacataaaaatgaatgccccaaacactgcacgctggtcaaatgtggagtataaatttaactctaagctgtttaacaaaagagagtgatataaaatagttacagttattaactattttraaatttaaaattagtaacttatttagtaaaatgtactttttaaacatataattaaatgtttatggaaagcacaacacttactgatttgcaggtacaccattcattttctatttttaatccacagttcttgttttgcttacgggtggtgtctgttttcccttcatgagctttaattggctaaaactgatcccttctcattcaggtagctaatgtctaggccacaggaaattgaatgtaagtggctattaaaggagttctctggaatactcacagtgcataaattagagttttataaatgatctaaaactagttaatggtcaaaatagtgtgaagttagaaattatacaaataaaggtaaggaatagaagctagcttttgaatcatctaaataaacatgctattttcctgt

SEQ ID NO: 569734 - DNA, 550 bp, Homo sapiens
aattgaatgtaagtggctattaaaggagttctctggaatactcacagtgcataaattagagttttataaatgatctaaaactagttaatggtcaaaatagtgtgaagttagaaattatacaaataaaggtaaggaatagaagctagcttttgaatcatctaaataaacatgctattttcctgtcactgagcacagggctgctgctgctgctgctgttgaagttaggtgaaaatgrtgaagaattgaactggagactgtataatgagaaatgttcagaagctccagaaattcaacagcaaatttttccttgttttcattctcagaattctctagtagaatgaatcagatatggatgaaaattgaatagagaagtatgccgagaacttcacagtatcagtcagtctctactgcataacatttaaatattttcaggtaatgcttcccatgaagtcatttagcactttctaactttaaatttcaattgttgttatataatataatataatataattaatataaatagtatgagtactttcaattcacgttcact

SEQ ID NO: 569735 - DNA, 550 bp, Homo sapiens
aattgaatgtaagtggctattaaaggagttctctggaatactcacagtgcataaattagagttttataaatgatctaaaactagttaatggtcaaaatagtgtgaagttagaaattatacaaataaaggtaaggaatagaagctagcttttgaatcatctaaataaacatgctattttcctgtcactgagcacagggctgctgctgctgctgctgttgaagttaggtgaaaatggtgaagaattgaactggagactgtataatgagaaatgttcagaagctccagaaattcaacagcaaatttttccttgttttcattctcagaattctctagtagaatgaatcagatatkgatgaaaattgaatagagaagtatgccgagaacttcacagtatcagtcagtctctactgcataacatttaaatattttcaggtaatgcttcccatgaagtcatttagcactttctaactttaaatttcaattgttgttatataatataatataatataattaatataaatagtatgagtactttcaattcacgttcact

SEQ ID NO: 569736 - DNA, 567 bp, Homo sapiens
cttcccatgaagtcatttagcactttctaactttaaatttcaattgttgttatataatataatataatataattaatataaatagtatgagtactttcaattcacgttcactcacactatctaattcaaatatctagatcacctgtgagraagataaaaatagttataatttatttattgtcatatcatttcaaagcctgttctaaattcttttcttaactcatttaagtaaatcctatgaggtatatactgttaatattttacagatgcaggcattgaggcatggagaaaatatcttcataactgaaggcctcacaagtggtaaatgccagagatggaatttgaatgcgagcagccgggctccagaactgcccctaggctttgccaacatattgcagggaaggaagtaggagcgaagacattatataagtctgtgattcctaatacatatctctctatgacgtgtagaggtatagaaaaaaatgtcatctggttgggtctgaagttatagaaaatccagccttaaggtttcaatcagtcagaattagaagccagagttcttccatt

SEQ ID NO: 569737 - DNA, 567 bp, Homo sapiens
cttcccatgaagtcatttagcactttctaactttaaatttcaattgttgttatataatataatataatataattaatataaatagtatgagtactttcaattcacgttcactcacactatctaattcaaatatctagatcacctgtgaggaagataaaaatagttataatttatttattgtcatatcatttcaaagcctgttctaaattcttttcttaactcatttaagtaaatcctatgaggtatatactgttaatattttacagatgcaggcattgaggcatggagaaaatatcttcataactgaaggcctcacaagtggtaaatgccagagatggaatttgaatgcgagcagccgggctccagaactgcccctaggctttgccaacatattgcagggaaggaagtaggagcgaagacattatataagtctgtgattcctaatacatatctctmtatgacgtgtagaggtatagaaaaaaatgtcatctggttgggtctgaagttatagaaaatccagccttaaggtttcaatcagtcagaattagaagccagagttcttccatt

SEQ ID NO: 569738 - DNA, 567 bp, Homo sapiens
cttcccatgaagtcatttagcactttctaactttaaatttcaattgttgttatataatataatataatataattaatataaatagtatgagtactttcaattcacgttcactcacactatctaattcaaatatctagatcacctgtgaggaagataaaaatagttataatttatttattgtcatatcatttcaaagcctgttctaaattcttttcttaactcatttaagtaaatcctatgaggtatatactgttaatattttacagatgcaggcattgaggcatggagaaaatatcttcataactgaaggcctcacaagtggtaaatgccagagatggaatttgaatgcgagcagccgggctccagaactgcccctaggctttgccaacatattgcagggaaggaagtaggagcgaagacattatataagtctgtgattcctaatacatatctctctatgacgtgtagaggtatagaaaaaaatgtcatctggktgggtctgaagttatagaaaatccagccttaaggtttcaatcagtcagaattagaagccagagttcttccatt

SEQ ID NO: 569739 - DNA, 563 bp, Homo sapiens
ctagtttacattcccaataacagtgtaaaggtgttcccttttcactgtatccatgccaacacctttttttgttgttttgttttttctgatcatggccattcttacaagagtaaggtggtatctcgttgtggttttgatttgcatttccccgataattagtgagttgaacatttttttcatatgcttgttggccatttgtatatctttttttttttgagaatcgtctattcatgtccttagcccactttttgatgggattttttttcttgctgatttgtttgagttatttggagattctgaatatgagtcttttgtcagatgtgtagattgtgatgatctttctcccattckgtgggttttctattaactctgctgattatttctttttctgtgcagaagctttccattttaattaagtaccatctatttatccttgtttttgttgcattgtgctgttgggttcttggtcacagagtctttgccgaaaccagtgtctagaagggtttttcagatattatcttctagaattcttatggctctaggtcttacatttaattctttca

SEQ ID NO: 569740 - DNA, 646 bp, Homo sapiens
caggtttttcctgcactgttctcatgatagtaaatgagtctcacaagatctgatggttttaaaaagaggagttctccctgcacaagctctctctttgtctgctgccatccatgtaagatgtgacttgcttctcattgccttctgctatgattgtgaggcattcctagccatgtggaactgtaagtccattaaacatctttcttttgtaaattgcccagtctttggtatgtctttatcagcagtatgaaaatggtttacacatggtttctgattataagtatcctatcattcttatccttttttcactgacttcttcaagatgtctttggttttctgtagttgaatataatatgcttggctgtactttcttggtatttatcccgtttggtcttctctgaggttcatctatctatagtttgttatacatcatgaattgctgaaaacgatcagccattatcatttcaatgtttcttttgcttcattttcttttttctttcttctattacatgyaatgtatgttacaccttttctaattgttccacactccttggatgctctttattaagtaattttttttctcttcacatttcaatttgggaagtaggtaatgacaaatttcaagctcactgattctcttctcagctgt

SEQ ID NO: 569741 - DNA, 544 bp, Homo sapiens
gttttggtggagtctttaggtttttcttaatataagataatttcattgcaaagaaggacaatttggcctcccattttccaatttggatgacttttctttctttttcctgattgctctggctgataaccttcagtactagaatcctgaaggggagttataaaagtgggcatcctcatcttgttccggatcttgatagaaaggctttcagctttgttccaatcagtatgatgttagctgtgagtttgtaatatgtggcctttattatgttggggtatattccttctaaatctactttcttgagagttttcatcatgaaaakatcttgaattttatcagatgcttttactgagcctattgagatgatcacattttttaatctttcattcttttgatatgatgtatcacgtttattgatttgtgtatgttgaatcatccttgcatcccaaggataaatcccacttgattaacatgtgttatctttttggtgtgctgtttgattaattttgctagtattttgttgagggtttttgtgtctcattcatca

SEQ ID NO: 569742 - DNA, 544 bp, Homo sapiens
gttttggtggagtctttaggtttttcttaatataagataatttcattgcaaagaaggacaatttggcctcccattttccaatttggatgacttttctttctttttcctgattgctctggctgataaccttcagtactagaatcctgaaggggagttataaaagtgggcatcctcatcttgttccggatcttgatagaaaggctttcagctttgttccaatcagtatgatgttagctgtgagtttgtaatatgtggcctttattatgttggggtatattccttctaaatctactttcttgagagttttcatcatgaaaagatcttgaattttatcagatgcttttactgagcctattgagatgatcacattttttaatctttcattcttttgatatgatgtatcacrtttattgatttgtgtatgttgaatcatccttgcatcccaaggataaatcccacttgattaacatgtgttatctttttggtgtgctgtttgattaattttgctagtattttgttgagggtttttgtgtctcattcatca

SEQ ID NO: 569743 - DNA, 597 bp, Homo sapiens
tgtctttacaagtgaagtgagtttcttagaggcagcagatagttgggtcatgtggtccttgcttttggttttggtttttgttttcaaatccattcagccagtctttctctctatatatattttttagatggagtcttgctctgttgcctgggctgcagtacagtggcacaatctcagctcactgcaacctccacctcctgggttcagcctattctcctgcctcagcctcctgagtagctgggattacaggcatgtgccaccatgcctggttcattttcgtatttttagcagagacagggtttcaccatgttggccagactggtcttgaactcctgacctcgcgatctgcccrcctcagcctcccaaagtgctgagattaaaggtctgagtcaccaagctatatcttttaagagcaaaatttaatccatttaccttcaaagttattatttatgtgtgaggatttatttctgtcattttgtaaattgttttctggatgttttgtgtatacttcgttcctttctttcttattgtttatcattatggtttggtgtttttctgtagttgtaccatttgagtagtttctacatttgtatgttt

SEQ ID NO: 569744 - DNA, 626 bp, Homo sapiens
gaactaaggctgattatttcaaatttttaaattgtaccctttaaaaattgactttgggtcactgcacaatatcgtaattcaataaagcatgtaaatcaattgagagcagcaaaaatgacacattaacatgaaaactagctgcataactcagtatgtctcaagtcatactcagtctgaataagctgattgaaaatagtaagctttacggtgtcctaaaatttaatgacctatagctgtactagactagaatggtgggggtgcggggggcatgccaaagatcagctgccaaaggtcttgtcatctcagaaacaacaacaaggcctgagactggtggcaaggcagacccttgaactaactctgtactgaatctattagctgtgattggtcttgactaagttagtggctctttcacctttgtgtgtttcttcatctggaccttagaataatattatgccatgaccagaataagaagtgagtcagtaggctttaagaaggtcagatgctaactaataatggctaaattatattattttcctaaattgaatgcgattattttctgagcttataaaakttggtctgatatgaaaggagcaggggcagccagtatatcacggtggtttaaagcg

SEQ ID NO: 569745 - DNA, 626 bp, Homo sapiens
gaactaaggctgattatttcaaatttttaaattgtaccctttaaaaattgactttgggtcactgcacaatatcgtaattcaataaagcatgtaaatcaattgagagcagcaaaaatgacacattaacatgaaaactagctgcataactcagtatgtctcaagtcatactcagtctgaataagctgattgaaaatagtaagctttacggtgtcctaaaatttaatgacctatagctgtactagactagaatggtgggggtgcggggggcatgccaaagatcagctgccaaaggtcttgtcatctcagaaacaacaacaaggcctgagactggtggcaaggcagacccttgaactaactctgtactgaatctattagctgtgattggtcttgactaagttagtggctctttcacctttgtgtgtttcttcatctggaccttagaataatattatgccatgaccagaataagaagtgagtcagtaggctttaagaaggtcagatgctaactaataatggctaaattatattattttcctaaattgaatgcgattattttctgagcttataaaagttggtctgatatgaaaggagcaggggyagccagtatatcacggtggtttaaagcg

SEQ ID NO: 569746 - DNA, 547 bp, Homo sapiens
tagaatcctcttgaagtttggcatgatatagactcatttgtaaaatgtgtattttgtttggcattcagtaggaagcttgccaggcaatacatttaattaaaaacatgaggaagagaataattgtggtttggcatagtgtattatcattacttttaggttctacatgtgcttaagatagtggtctcctaacaaggtatgcatttaaaactagaggtaatttccctttcatcagcccagggtttttaaactgggaaacatagtattttgaggggaagggtactttagctgctccttagatataacactgtctatcatttaaaagatgagagccttagctgctctccttagaaacaatctttgtccattgtttaagacttgaaaaattgatgcattgcctttcaggagcttagacagctttatttaagttgaactttctctagagatgcattgaaataatgaaatgcaatgccttacttgaacataaccatgtacrtaacatctagtcctgcctgatgtgtaaatttgataagagcaactcaaatattat

SEQ ID NO: 569747 - DNA, 623 bp, Homo sapiens
gccacacgataatgttgaggaacttcaacaactcactaaaagtgttagacatgtgaaatgttagtcaattaaacctctctytttttttttttaataaattagctagtctcagtatcttcatagcaatgtgaaaatggactaataaatttacttttgggtaaacaatgaaattaaggcagtaaccaaaaaattctttgaaataaataaaaataatagacacaacatataaaaatctctaggatgtagcaaaagtgctgttaagaggaaagtttatagcagtaaactcctacctcaaaaagttagaaagatctcaaattaatgatttcacatcatgcctagaggagcaagaaaaacaagaataaaccaacccaaaagttagcagaggaaaagaaaaaattaaaattagatggaactgaaagaatttgagacctaaaaattcataggaagaatcaatgaagaccaaagttgtgttttttttttttttgaaaaaataaacaggatcggtagactgctagctagattaacaaagaaaaaaagagagaggattcaaataagcacagtcagaagttataaaagtgacattgcaaccaatatcatagaaatacaaaagagcctcagaaact

SEQ ID NO: 569748 - DNA, 593 bp, Homo sapiens
ttttatacccagaaaacataaaatactttactaaaaggctcctggaactgagacacgacttcagtaattttttaggatacaaaatcattgtataaaaatcaatagcatttytatacaccaataacattcaagttgagaaccaaatcaagaactcaactccatttacaatagctgcaaataaataaataaataaaacacctaggcatgcatctaaccaaggaagtgaaagatctctacaaggagaactatacaacactgctgaaagaaatcatagatgacacaaacaaatggaaaaatcatttcaatttcatcaactggaagaatgaatatcgttaaaatggccatgctgctcaaagcaatctacagattcaatgctattcctatcaagcaaccaacgtcatttttcacagaactagaaaaagaactattctaaaattcatatgaaaccaagaaatatcttgaatagacaagcaatcctaagggggaaaaaaaaaaaaaaaaaagaagccagaggcatcatattacttgacttcaaactacactataaggctacagtaacacacacagcatgatactggcacaaaaacagatac

SEQ ID NO: 569749 - DNA, 561 bp, Homo sapiens
tgtttcaaattactttgatgtagtttaagaaaaacccaaatatggctctggaactatggttaaaytgttatttctaggtaatgggaatatgagtctgtattgtactagtgattaaacatttctgtgcatttaatttttcacaataaaaaatgaaacacaaataacattttctacaattttttgtggaggcatgagagatcttacaggatatataatatcttatttcaaaatatcattccatctataacatttgtgaccaataatgctttcaccacttttcggactttcctgaaagtccaatgctggattctctgggcctgagaaataaagcagtccatgcacattttaccaataaaaattaaaacataataaatgagactcatgacctccagaagtaatcttcacatagataaatttcattcaggatcttggcatgtatcataatgacagaaatttacacttaagtgtggctgtagcataaacctttctccaaaaagaaaagttgtttcaaaggtggtgatctgtatggagcccctaaaacaagatgctgatgtgagcagg

SEQ ID NO: 569750 - DNA, 409 bp, Homo sapiens
caaaattaggaaggactcagtagaaaagaacgatctttcctaagaaagaatggctgttcctttggttgattttacctctccccgactccgcaatcacaacctcattgttacttggcaatctcttggaagattwttgttagtcacaagtgatgtgagaggtgtgcgctactggtgatagagtagtaagaaattatttaggcagttagtgagggtgaaagagttcttggtagaattttcttttaataaaaagcagcccccaaatcatttcttttctaataaaaagcagcctgaaaaatcaagttacaagcatagataagcaagatggaaatttgcatagataaatggcatcagctgtacctggaagctaggtacatccaacatggtgattccttcttccttttccttgtcg

SEQ ID NO: 569751 - DNA, 409 bp, Homo sapiens
caaaattaggaaggactcagtagaaaagaacgatctttcctaagaaagaatggctgttcctttggttgattttacctctccccgactccgcaatcacaacctcattgttacttggcaatctcttggaagattattgttagtcacaagtgaygtgagaggtgtgcgctactggtgatagagtagtaagaaattatttaggcagttagtgagggtgaaagagttcttggtagaattttcttttaataaaaagcagcccccaaatcatttcttttctaataaaaagcagcctgaaaaatcaagttacaagcatagataagcaagatggaaatttgcatagataaatggcatcagctgtacctggaagctaggtacatccaacatggtgattccttcttccttttccttgtcg

SEQ ID NO: 569752 - DNA, 508 bp, Homo sapiens
ttcccaattctgtttcaagagtttcttctcagacaccgtaatgtttttctgagggttaaacttagcagttttatatataggctattccttggttccacctttgtcacatttctttcattgcaggtttttcgcttgtttgtagtgggacctgtgagagtgagggtcacagctggcagtgcagtatttatcagctagtagtcccccatttggtggtagtagtagtacacttgaagtcctccatatagattttaaatagctctatagtttaaaaataataaaagaaaaaatagctcatgctttatatcttctgaagtgccacaaaatgctgttttctcattttattcaaatattattttattaataaaagacataatgatasctaaactttgatgagtgcttactgtgtactgtatcttgagaaaaacatgttttcttgtttatcctctagacagtttgattgattattataccctccattttattaataaagaaatagaggtcagataaa

SEQ ID NO: 569753 - DNA, 583 bp, Homo sapiens
aaacctgaatagacaaataacaagtattgagatattaacagaagtctcccataaaagaaatggctaaaagctratggcttcactgttgggttctaccaaacaatttaaaaataaataatgtcaatcctactgaaattatttctaaaatgtgaggaggagggagtacttcctaactcattctatgaggctagtattatcctaataccaaaaccagatgaaaagacagcagaagaggaaaatgacaggccaatacctctgatgaacatgataaaaaaaatactcaacaaaatactagcaaacagaattcacaacacattaaaaagtacattcatcatcattgagagggattcattccagaaatgcaacagtggttcaacatatgcaaatcaataagtgtgatacatcataccaacagaatgaaggatgcaaaccatacaattatttcaaaagattcttaaaaaaaatctgataacattcaacatcccttcatggtaaaaaccctcaacaagtatgtatttgtcctcaaaatgaaaaatatctcaataagataagcgctatatataacaaacccacagctagcatc

SEQ ID NO: 569754 - DNA, 616 bp, Homo sapiens
gtatttgtactaggaaatgttatagagggagggatcctcagagaaacagagacagtaaatttttgctactctgaaatgtaattgcttaagacacttttaatttaaacaacrtacaacatgcacacactgagagagaacttgaccctctctagtaaacatttcttgtactttgtgtaagtctttgacctcgaatgctttaccttgagtacagatattttcctctgccttccccatccttcatttcaagtaagtactcacctcaaaggcaatctttgatatttgtattttgtgaccacatttcctaattatggataagaatttatctcagtgcctataccttggctgttacaggctcattagccaggtcctttctgcatgatttcactggtcaattgggtgcaactatacaaatattagttatcattctcattgtaattatcatggcacttaaaatgtaagaatgccttctgtttgttcatataatggcaaaatggccctttagtatactttctccatgggagcttactctgtgctttcaaatcattatatttacttatctagactttcccatcaatatagcattcatatcatgtgccaatttatggaatttttactg

SEQ ID NO: 569755 - DNA, 566 bp, Homo sapiens
gctcattcattcatgcatgcatttaaaaaatatttcatgatcatgtattatacacaggattatggtcttcacgtaaaaaacaaaatctgaayttggactcaatttctgtccttgaggacttacagaaattagaggaataataaatgtaataaataagaatccaggttgggtgcagtggctcaggcctctattctcagcactttgggaggctaagatgggaggatgcttgaggccaagggctcaagaccagtctgggcaacaaagagagaccccacaccctcacttttccctcccaccacaaaaataaaaaggaaatattagctgggcatggtagcccacacctgtagtcctagctactcaggaggcttaggcgagaggatcacttgagcccagaagttccaggctgcagtgagctctaattccaccactgtactcccatctgggcgaaagaacaagaccccatctcttaaaaaaaaaaagtaagaaatgggaacccagaaaagaagtgagcagcctatgtcctgtggattaatgaagaattcataaaggaagaactatttgagctc

SEQ ID NO: 569756 - DNA, 580 bp, Homo sapiens
agtcctggagccacactgatggagcttgatggtttggatgccgggtgactgaatatggcataatacgccacctcttcaagtcatggtgtcctctttgcaaaattgggatgtggacattcattagatattattaaatatctactatatgccrtgcacattttgcgttctagggatacacaatgaataaaacagaaaaaatatctgccttcataaccatatatcctagtgagatgataatagctatattcacctcttcagttattatgaggactaaaatgagataataacaatagctgtgacggtctgtctactgccaaaattcataggttgaaatcttaacccccaagttgatgatattaggaggcagggtctttggggctgtgactaggtcatgaaggttctgaatgggattagtcctgtagtgaaagaggccccagaaagctccctggcccctctgccacgtgagggcacagagagaagacgttgtctatgaaccaggcaacaggccctccccagacaccaaatctgccagcgccttgatcttggacttcccagtctctataactgcaagaaagaaatt

SEQ ID NO: 569757 - DNA, 580 bp, Homo sapiens
agtcctggagccacactgatggagcttgatggtttggatgccgggtgactgaatatggcataatacgccacctcttcaagtcatggtgtcctctttgcaaaattgggatgtggacattcattagatattattaaatatctactatatgccatgcacattttgsgttctagggatacacaatgaataaaacagaaaaaatatctgccttcataaccatatatcctagtgagatgataatagctatattcacctcttcagttattatgaggactaaaatgagataataacaatagctgtgacggtctgtctactgccaaaattcataggttgaaatcttaacccccaagttgatgatattaggaggcagggtctttggggctgtgactaggtcatgaaggttctgaatgggattagtcctgtagtgaaagaggccccagaaagctccctggcccctctgccacgtgagggcacagagagaagacgttgtctatgaaccaggcaacaggccctccccagacaccaaatctgccagcgccttgatcttggacttcccagtctctataactgcaagaaagaaatt

SEQ ID NO: 569758 - DNA, 580 bp, Homo sapiens
agtcctggagccacactgatggagcttgatggtttggatgccgggtgactgaatatggcataatacgccacctcttcaagtcatggtgtcctctttgcaaaattgggatgtggacattcattagatattattaaatatctactatatgccatgcacattttgcgttctagggatacacaatgaataaaacagaaaaaatatctgccttcataaccatatatcctagtgagatgataatagctatattcacctcttcagttattatgaggactaaaatgagataataacaatagctgtgayggtctgtctactgccaaaattcataggttgaaatcttaacccccaagttgatgatattaggaggcagggtctttggggctgtgactaggtcatgaaggttctgaatgggattagtcctgtagtgaaagaggccccagaaagctccctggcccctctgccacgtgagggcacagagagaagacgttgtctatgaaccaggcaacaggccctccccagacaccaaatctgccagcgccttgatcttggacttcccagtctctataactgcaagaaagaaatt

SEQ ID NO: 569759 - DNA, 599 bp, Homo sapiens
tcactgcaacttccacctcccaggttcaagcaattctcatgcctcagcctcccgagtagctgggattacaggtatgtgtgaacaagctcagctaactttaaattttttttttttttggtagagatggggttttgccatgttggccaggctggtcttgaactcctgacctcaattgatctgcctgccttggcctctcaaagtgccgggattacaggcgtaagccactgtgccaagctcctcctctctttttgtccaagatctaacattttggattcaggcaaatacaatctagccatcatctgaagtcttcccagagaaatcacttcataatcttatttatttattcattcattygttcattcattcattcgttcttctgtttcctcctctgcaaggcagaccccataatttctatcactgcacgtcctaggctcttcccagctctgttatctcctactttctgctttgcagaatccaccagctcccataactgctagtttttacccaaattcatttccctctccccatcaaaataaccaggaagacactcttgctcctactgggacatcatattcagatggcattaaatagctgagccc

SEQ ID NO: 569760 - DNA, 562 bp, Homo sapiens
agtccctgtctcataagattgttgtgaggattgaagaagttaatacatggcaaatgcttagactaagcacctactacatggtatacatgtaataaacactgttgttaatgttattattattattattattattattwttttttttttgagatggagcgtctgtcttgttgcccaggctggagtacaatggcaagatcttggctcactgcaacctccgcctcctgggttgaagcaattctcctgcctcagcctcctgagtagctgggattacaggcatgtgccaccatgccccgctaattttgtatttttagtagccgtggggtttctccatgttggtcaggctggtctcgaactcccgacctcaggtgatccgcctgcctcagcctcccaaagtgctgggattacaggtgtgagccactgagcccgacattattattctttaataatgtggttcaccatcttttcatctctttgtgtagtaatacacccccaagtgtttgtcttcattcattgtcgtgtaattgtcaaggagagatcataaatagcacatgtagcctgtggt

SEQ ID NO: 569761 - DNA, 562 bp, Homo sapiens
agtccctgtctcataagattgttgtgaggattgaagaagttaatacatggcaaatgcttagactaagcacctactacatggtatacatgtaataaacactgttgttaatgttattattattattattattattattattttttttttgagatggagcgtctgtcttgttgcccaggctggagtacaatggcaagatcttggctcactgcaacctccgcctcctgggttgaagcaattctcctgcctcagcctcctgagtagctgggattacaggcatgtgccaccatgccccgctaattttgtatttttagtagccrtggggtttctccatgttggtcaggctggtctcgaactcccgacctcaggtgatccgcctgcctcagcctcccaaagtgctgggattacaggtgtgagccactgagcccgacattattattctttaataatgtggttcaccatcttttcatctctttgtgtagtaatacacccccaagtgtttgtcttcattcattgtcgtgtaattgtcaaggagagatcataaatagcacatgtagcctgtggt

SEQ ID NO: 569762 - DNA, 605 bp, Homo sapiens
aattttatgttttaaatttttggaataagtagaaacctgaaatttataaaattaatgacttgagtatgcgagtgaatagcttcagagagttatttggcttatggaagatttcagattatggtaggtgcttgaatatacttatttctcatactctttcttccatccctttaacaacaaaaaaaggccttattagaaataggcaaacttgaatacacatagagctgtactgctcaaattgagtacttgagttggggagaaaagtctcccggtctagatatagctttgaaaagagaaggatcaggtaggatgccgtacacggcaggtgtgtgcagggacagggataacgttaaccccttttgctgtgaatattgtcagagggtctgatgtgtaattaggcatyccttagcttcactcctgataaaaacacactcttggacagtttctctgtatgtgcacttaaagcagtttgaatcttgttaatcaaatatttctcggggttgtaacttctttttttggcattgggaagactgttgaagtcatgttgtaaaaatttggagttgagcctgggatcaaaatttggagttatggcccaagatttatcaagc

SEQ ID NO: 569763 - DNA, 570 bp, Homo sapiens
ttctggctgcgggtttctccacattgactccttctttacatccacagagtctctccaccatattatttcgtagctttctcccaagattttgggacagattttcaatgtcctggctttccatttgattcctacagacaccagattcctgaaggcttccagcattgcatttctgtagagattcttccaggaaggtcccagcaaagcccactcctcctgggtgaagttcacagccacattctcaaagcctactgagtccatttccagcttcctggtgtcctggcatcctctctacgattcaggcagccacagcaggtcccatgcaacagaagctgcagtatcaggaccaccagtggcctcccagaggaattgaaatcccctaatcttatttacaatcttaaatgcaaaagtcataaataagttattagaaaattgaatcctacagtacataatatattatgattaaaaagttctatcyaggaatcaaataatagtccaaattttaaatgaattaattttttaaatgaatttatgtaactgtgaaacaacattaataaactaaaagaaaaaatt

SEQ ID NO: 569764 - DNA, 405 bp, Homo sapiens
tttcccttttactatgctgttttggatttagctttttggtagccagacttcaagatagcccacatcccttaggtagtcatctcccacactggatccaagttagtctgcatgattaatacaagatggcagaaatgatgacatgtggcttctgaggctacctcataaaagacctgtggcttcgcgtgaacccggggggcggagcttgcagtgagccgagatcgcgccactgcactccagcctgggtgacagagcragactccgtctcaaaaaaaaccccaaaaaacctgtggcttctgccttgtcttctgtccctgggattactccctctgggagaaagcaggtgtcatgtcaaggggacacccaaacagctctgtggagagttcagtgccatgaggaactaagatc

SEQ ID NO: 569765 - DNA, 405 bp, Homo sapiens
tttcccttttactatgctgttttggatttagctttttggtagccagacttcaagatagcccacatcccttaggtagtcatctcccacactggatccaagttagtctgcatgattaatacaagatggcagaaatgatgacatgtggcttctgaggctacctcataaaagacctgtggcttcgcgtgaacccggggggcggagcttgcagtgagccgagatcgcgccactgcactccagcctgggtgacagagcaagactccgtctcaaaaaaaaccccaaaaaacctgtggcttctgccttgtcktctgtccctgggattactccctctgggagaaagcaggtgtcatgtcaaggggacacccaaacagctctgtggagagttcagtgccatgaggaactaagatc

SEQ ID NO: 569766 - DNA, 367 bp, Homo sapiens
ttcatctttcattttctccttcatctcacctccttgatgactcagccactattttttttttctttttttagacaaggtctcactctgtcacccagactggagtgcagtggcatgatcttggctcactgtaacctccacctcctgggttcaagcaattctcctgcctcagcttcctgagtagctgggactacaggtgtgtgacacaatgcctggctaattttttcgtattttttgttttastagagacaaggtttcactatgttggccaggctgatctcgaactcctgacctcaagtgatccgcccgccttggcctcccaaagtgctgggattacaggcacgagccaccgcagccggcccccttggct

SEQ ID NO: 569767 - DNA, 633 bp, Homo sapiens
tatgtggtttcttgccttataattcatatcataattcatacttataattacttaaaatagtttccaagaccttctcctgcatttgacattagaaacttacccttgtaacttccctgaggctcctcccctcagtgaggttagtgtagaaaggaagagaagaaggaagttaattgaaggcaggacccactcaatgagtagccactgagatgggaagccrgagaaagtctaaatggactctgaagacatttcccttttttcattaattcatcaaatatttgttgagcacctgctagatgctagatcccaagctaggtaaacagtgaacaaagtagatatgactctgccctcatttaatttatattctagtggggtagatggtaaataaacaagtatgacacacataatttcaaattgtcctcagtgcaacaaaatgaatacggtactgtgttaaagaataacaagatggatcaggacaggtgctgtggctaacacctgtaatactggcattttgggaggctgaggcaggaggattaattgagcctaggagtttgagactagtctgggcaacatggggagaccctcaactctacgaaaaacaattctaaaaaattaaccaggcatagtggtgtgcac

SEQ ID NO: 569768 - DNA, 633 bp, Homo sapiens
tatgtggtttcttgccttataattcatatcataattcatacttataattacttaaaatagtttccaagaccttctcctgcatttgacattagaaacttacccttgtaacttccctgaggctcctcccctcagtgaggttagtgtagaaaggaagagaagaaggaagttaattgaaggcaggacccactcaatgagtagccactgagatgggaagccagagaaagtctaaatggactctgaagacatttcccttttttcattaattcatcaaatatttgttgagcacctgctagatgctagatcccaagctaggtaaacagtgaacaaagtagatatgactctgccctcatttaatttatattctagtggggtagatggtaaataaacaagtatgacacacataatttcaaattgtcctcagtgcaacaaaatgaatasggtactgtgttaaagaataacaagatggatcaggacaggtgctgtggctaacacctgtaatactggcattttgggaggctgaggcaggaggattaattgagcctaggagtttgagactagtctgggcaacatggggagaccctcaactctacgaaaaacaattctaaaaaattaaccaggcatagtggtgtgcac

SEQ ID NO: 569769 - DNA, 633 bp, Homo sapiens
tatgtggtttcttgccttataattcatatcataattcatacttataattacttaaaatagtttccaagaccttctcctgcatttgacattagaaacttacccttgtaacttccctgaggctcctcccctcagtgaggttagtgtagaaaggaagagaagaaggaagttaattgaaggcaggacccactcaatgagtagccactgagatgggaagccagagaaagtctaaatggactctgaagacatttcccttttttcattaattcatcaaatatttgttgagcacctgctagatgctagatcccaagctaggtaaacagtgaacaaagtagatatgactctgccctcatttaatttatattctagtggggtagatggtaaataaacaagtatgacacacataatttcaaattgtcctcagtgcaacaaaatgaatacggtactgtgttaaagaataacaagatggatcaggacaggtgctgtggctaacacctgtaatactggcattttgggaggctgaggcaggaggattaattgagcctaggagtttgagactagtctgggcracatggggagaccctcaactctacgaaaaacaattctaaaaaattaaccaggcatagtggtgtgcac

SEQ ID NO: 569770 - DNA, 534 bp, Homo sapiens
ggagctggggtttgcaaactctctggtgaaccgactggcatgtaccctggcaatgtggcccagcactttctgccacttggctttgctgttgagagcgttgtgccaggtgaatgttaaggaactgagtgccttgtcacagtaaaactacgctgtggacaggyaatttgaaaaatgtattttcaaggctgacttaggggaaagaataaatcatcttaccatgtgacattagccttagccagggcttgctctgctgatggctgtaacttagcactgccaagaaagcccttctaatgatctggacttccttgtttgtctttttctttttaaaattgagcccggagcattgactgtcaccatttgtagaagtgtaagtttctttgccttatcaacaccttccttcaattaatatttatagagtgcctgaaggatcaatgtcgtacccacacctctgacttctcacatttacaattggtagcaaggaggaacagcagctgccttcatttgtagcagcccttctctgcaagatgaacagcg

SEQ ID NO: 569771 - DNA, 534 bp, Homo sapiens
ggagctggggtttgcaaactctctggtgaaccgactggcatgtaccctggcaatgtggcccagcactttctgccacttggctttgctgttgagagcgttgtgccaggtgaatgttaaggaactgagtgccttgtcacagtaaaactacgctgtggacaggcaatttgaaaaatgtattttcaaggctgacttaggkgaaagaataaatcatcttaccatgtgacattagccttagccagggcttgctctgctgatggctgtaacttagcactgccaagaaagcccttctaatgatctggacttccttgtttgtctttttctttttaaaattgagcccggagcattgactgtcaccatttgtagaagtgtaagtttctttgccttatcaacaccttccttcaattaatatttatagagtgcctgaaggatcaatgtcgtacccacacctctgacttctcacatttacaattggtagcaaggaggaacagcagctgccttcatttgtagcagcccttctctgcaagatgaacagcg

SEQ ID NO: 569772 - DNA, 556 bp, Homo sapiens
ttgttaaggcgacatttgtagattaatctctgacttgagctaagtggtttctcctaatggctttaattcagtgactcccattgtcagattcactggaggagcttgttaaaaagaggtgcccagacttcccctcccccagctcatgatttgctggccctagggtgggatgagggcatctctgctttggaaggaaagctcctcaggtgactggattctggtggtagccacctttgtgagccttggctctgaatctgcctcccaaggccgtgaagcctcacacacccgctgaaagcatatgggcctaattgcagcaactccagtccaggttctagaacaggaaatatttctaagagccagctttcccractcaatcacctctatactcacatcactgaatctgcctttttcctgaagtgctccatcacctgagggggaatagtctatgcttggctgtgctattgtccattttcatgaactttcatgaaccttgtcagacatttgaaagatcttcatggtccaccgggattttcatctagcgagatggctatggacttcc

SEQ ID NO: 569773 - DNA, 464 bp, Homo sapiens
aggctaggtcaagaaggggcaggacaggaggactgatttaattgtgtgacagaggcacagctaaatttttaagaaggtggtttaaagggaactcttaatataccatatctcatcttttctgacttccaaatctgattcttccatacccaccaacattacttgaatccaacaaactgaatccagaggtatctcaaggctccattctctatgttggcttcagaatcatgtccaaaccccttaacacagctcctgcgacctttaatgatccgctctagcttacctcctgaccaatacttccccatcctatacctcttcaccagcagtcaaatctagccctacttatttttcagtttctcaggcctgmtcatgctttttccctatctctaggccttaacacatgttcgttttcttgcaacatactccccactggcagcacctggttatttcctgctccgtgtggcatc

SEQ ID NO: 569774 - DNA, 449 bp, Homo sapiens
gatgccacacggagcaggaaataaccaggtgctgccagtggggagtatgttgcaagaaaacgaacatgtgttaaggcctagagatagggaaaaarcatgatcaggcctgagaaactgaaaaataagtagggctagatttgactgctggtgaagaggtataggatggggaagtattggtcaggaggtaagctagagcggatcattaaaggtcgcaggagctgtgttaaggggtttggacatgattctgaagccaacatagagaatggagccttgagatacctctggattcagtttgttggattcaagtaatgttggtgggtatggaagaatcagatttggaagtcagaaaagatgagatatggtatattaagagttccctttaaaccaccttcttaaaaatttagctgtgcctctgtcacacaattaaatcagtcctcctgtcctgcccc

SEQ ID NO: 569775 - DNA, 449 bp, Homo sapiens
gatgccacacggagcaggaaataaccaggtgctgccagtggggagtatgttgcaagaaaacgaacatgtgttaaggyctagagatagggaaaaagcatgatcaggcctgagaaactgaaaaataagtagggctagatttgactgctggtgaagaggtataggatggggaagtattggtcaggaggtaagctagagcggatcattaaaggtcgcaggagctgtgttaaggggtttggacatgattctgaagccaacatagagaatggagccttgagatacctctggattcagtttgttggattcaagtaatgttggtgggtatggaagaatcagatttggaagtcagaaaagatgagatatggtatattaagagttccctttaaaccaccttcttaaaaatttagctgtgcctctgtcacacaattaaatcagtcctcctgtcctgcccc

SEQ ID NO: 569776 - DNA, 560 bp, Homo sapiens
agcattacccagtaagaaaaaactgtgccttgggttcaaatggatgtaagttttgaccctggctctgctcctgatgcactgagagaccctggctgcttatatgaaacctgaatgtctatgactgcatgtaaaaaataaagatgagaagctgggcgcggtggctcatgcctgtaatcccagcactttgggaggccaaggcaggcagataggttgaggccaggagtttgagaccagcctagtcaacatggcaaaacttcgtctcttctaaaaaatacaaaaattagccaggcgtggtggccctgcacctgtagtcccagctactggggaggctgaagcaggagaatcacttgaacccaggaggtggaggttgcagtgagcggagatggtgccactacactccagcctgggtgacagagcaagacttcatctcaaaaaaaaaaaaaaaaaaaaaaaaaaaaagaaagaaagaargaaagaaaaaagatgagaattatgcctctcaggggctgtgacaataaattgatctacgtgtgttttaaaatgcctttcacacagaatat

SEQ ID NO: 569777 - DNA, 476 bp, Homo sapiens
tcaggcacaacatgtaaggaggtgctccttttgggactgaccctgcctttgcatagccctgggaatgagccaccctcatgtttgcacccaggcctctctcttgcctcatcctgcacctgccatgagtttactactgagctcacttctgaaattggctctgcattgcctgtcacctatggcaagagagaaacaactaggttatgaytattgtgaactgagaaaacctataaagccaattcagagatcaaatctatcctaaaattaaattcaagcagaatttttgtgccagcggctttgaataaagactgaagaacacggtgagttatatcttcaattacagtttacaaagaacagaggtactccttccaaaaggggactcttgatttagctctctgtaaggacagaaagcataacactgaatcttgggtcagcaaaaacattttcacaagggcctcaggtatcatgagatttagctc

SEQ ID NO: 569778 - DNA, 494 bp, Homo sapiens
gttctaccatgcataagctgtttcctagggcaccttccataacctcttggagactcttctgtttttttgcttttgtgtgtgtgtgtgtgtgtgtgtgtgtgtgttgttgctgttgtcattattttgtaaaatgggatgtctcagttggggttcctctgcaggagaacctgagaaaaggatttgattacaaatagttaacttgggaagtgatctcaggaaacaccagtaagggaacaggaaagtggggaggagatgggaaagcatccataaagagtttgttatcaagcatttatcactgtgggcaactaaaggaaaatcccactggggtactctggcagccaggatctacacatggctttatgtgtaaacagaagagccttgcgaccaaggggtgagggggctggggcattgatccawcacctcctgttggtcactggttgaggaggcattaagtccctagcacttacgacctgtagacaggcccacaagcaagc

SEQ ID NO: 569779 - DNA, 568 bp, Homo sapiens
aaatttggccaaacataacatttcatcaatcttgttttactgactggaaaaacaacatcaaacaaagggtgctaatggccctttattaccgtgcctttcccaagcttatattttctgatgaaagatctaagtgaccaaaggccttctttaaactacttagtaattagcttttgaaccaggaaacaatgcataaagtagtgaacaggcccggtgctgatgacaggacggactctgtgtctgcagggtcaggaacagtggggacccaaaaagaacattaaaagcaaagtgcattttcataaacggagaagaaaaaaaagagaaagagagagagagagagaaaaccaggctaaaagcggtgataaaagattacagagccagaacagagtggcaggaagtctgtgatctgaagtcatcagcacctgaaagtttgagtggaactgccagggtgaaagatgaccggatcggactgggggcagtgagtgagtgccgggctgagagccccatctgggtcagctggcaccraaagctgccggcctccagcccacccaccagctcacccacatttgac

SEQ ID NO: 569780 - DNA, 606 bp, Homo sapiens
aagtgtctcttaaggacaaggctctatgcttggtgctgggtactcacgcgttccatctttaaaacacagtctagtggagtgaatctgacatacgtaaatattggcgagatgctagcttcattgatcgtttacatttcaaaagtaatatgattctagcacatagaagaataattaaaaggcagaaatcaaggttattggcaatcagaaaaacatgaagaaatacaatattcactgtatgtgaataatattacattattgctaataaayagaggactgataaattcttatctcaggataatgaacagtaaaaggcaggaggacatacttttaaagacttcagtgccattggattctctttttcttttcaacttgactaatagaaagtgaatttgacctcacagtcacatagatgagcagtcagagagaggaaaccaatttggaattaaagcaaaataaaataaacaagcaaaaaaaacactaacacccaaggagtaaagccaatcataggttgaatttgttggctgtgtcaggttcattcaggaagctaggtcccagcctgtgttaccaggaaaatgatgctgaatctaatcctcaaaactacagata

SEQ ID NO: 569781 - DNA, 574 bp, Homo sapiens
ggggcacataaattatcattatcaaagacgatcctatatttataataatttcctgtatcttattgtatttcttcatcttcaggacaaggctgcaattggtacagtctttgtggccattttttaggttaagaaaatgagaatttttctatatctcatccttttgctaagatggtttaaaattcagattttctgactctaaaaccagtgagttttcttattacacctctaacaatgttattttccctgctaattctttgatatatttacacacatgcacacacacacatatatatcctctccttatacaggggtcagactgcggtataargctggtggtcttagagagaagggcaggtataatgtcggagacgaatgcctgatatcggaggagacatcagtagatagagtctcctgtgatcaaagattactaagttcattctgattttagggcagagatggtctacttacagctggtagggtggatctgggtccatagatttaactataactgtaacgaagacagagtttcctggaacaccaagggtccttatgttccatattccttccagtacca

SEQ ID NO: 569782 - DNA, 596 bp, Homo sapiens
gactcagaattctcttctgttgtcagggtgcaacctcagaatcctcctgaaaacaataccccgtcactgtaaattggagtggcatgccagatgcaacctgcttgccatctctgctccgggatacatttgacctcttgccacatgtcccatcagcacatcagcaactgtattcatctacccgaaattctcttttttatcttcaccacgttgatacttatcttgtacttagtaattcatgccttggtgctgactatttcatttcatttgtttgtttctttgctttttaatagagccaccacataaaattattttttaaatgggctactgtatacaattttttttttttttttttttttgcgagagtctctctcygttgcaccagactggagtgcagtggtgctatcttggctgactgcaacctccgcctcccagattcaagcgattctcctgcctcagcctcccaagtagctgggattacaggcctgtgccaccacacctggctgatttttgcatttttagtagagatggggattcaccatgttggccaggctggtcttgaactcctggctgcaagtgatccacctacctcggcctcc

SEQ ID NO: 569783 - DNA, 569 bp, Homo sapiens
ttatgattctggaaatgtaatgcatgcctcactggccctgctgatgaygtctgcaagcatctttgtttgatttttttaaaagctggaagcaacaatgctggatgttgacttgttaatgaagaaagagatctaagacctgagacctttacttagtcagaggttatttagcaaatctggttggctttggattgaaaaaaaaaaatctattttcctatactggagagaaaaaggatgctaaagaggtgaatgaggttacctgatcatcacaaagtgcctatgctgcctttctgcaactaaggcattggaaattgaagtgtataataatacaggcacttcaccctttctgaaactggtcacactgatggtgtttgtattattaggtttgctttacacatttaccatagtttcctgcccaaccaactcctcttgagaaaattctgtgtggctctatgtacagctatgcactaaatattggcaggaagccaagcattaattggataaatatcaccccttctggaaaaatatttttcccaggtttttctcttgtatctcccctttccattatacct

SEQ ID NO: 569784 - DNA, 484 bp, Homo sapiens
atatcaagatactgaggtagcattcaatggtaaatgtcagtggtatgctgactgccaaatatttgccaactggatggggtgtgtgtgtgtgtgtgtgtgtgtgtgtgtgtgtgtcaagagggagatgagggtaaagctctgatttacagtgttttctaatctccataaacattctcctatgccaactttgagctaccagcttgaggtcactgaacatagtcctgggaagagatgtatactgtagattcttgcaagctgatgagagctagctccaaggtatcactggttagattatatgctagctttcagtaagtctaaaaaatttttctcctagtatttatcagtcattttggaaacattacacctttttcaaaaatcygtaaaatattgctatgagacatagtgatgcctggaacacttcctttccagtttgtcagcagaggatgaagaatagcatcatctcccattaacacaagggtaggga

SEQ ID NO: 569785 - DNA, 548 bp, Homo sapiens
gttgctataggatcatcttcatttcactgatgctgactccttgaaaagcccttccaacttccttctctttcttcttttrtatattaaggattctcttctatctttccttccctgtattcatagtgttgaaattatctatttgcttgctgttttctcctattaggcaaggaacaatataaaaatcataagctacacaccaacttcattttagtgggtagatactgtatgaaactctgtgttgagaagatttctgaagtttgactaatcctactggaggaaacataaaaagagtgaatattaatgtctactctgaacaagtgagcaatggacctgcttttttgcatcacgtatattattttaattttacacccattctctgtggaacataatcccagtttttcaaatgagaagaataagattactaaagtaccttcttataaaaggacatataataaatggcaaagacaagattaacctgatgttctctaacttgaaataccctatttctttcagaaacacattctacccccaatgttcacagaattaat

SEQ ID NO: 569786 - DNA, 548 bp, Homo sapiens
gttgctataggatcatcttcatttcactgatgctgactccttgaaaagcccttccaacttccttctctttcttcttttatatattaaggattctcttctrtctttccttccctgtattcatagtgttgaaattatctatttgcttgctgttttctcctattaggcaaggaacaatataaaaatcataagctacacaccaacttcattttagtgggtagatactgtatgaaactctgtgttgagaagatttctgaagtttgactaatcctactggaggaaacataaaaagagtgaatattaatgtctactctgaacaagtgagcaatggacctgcttttttgcatcacgtatattattttaattttacacccattctctgtggaacataatcccagtttttcaaatgagaagaataagattactaaagtaccttcttataaaaggacatataataaatggcaaagacaagattaacctgatgttctctaacttgaaataccctatttctttcagaaacacattctacccccaatgttcacagaattaat

SEQ ID NO: 569787 - DNA, 548 bp, Homo sapiens
gttgctataggatcatcttcatttcactgatgctgactccttgaaaagcccttccaacttccttctctttcttcttttatatattaaggattctcttctatctttccttccctgtattcatagtgttgaaattatctatttgcttgctgttttctcctattaggcaaggaacaatataaaaatcataagctacacaccaacttcattttagtgggtagatactgtatgaaactctgtgttgagaagatttctgaagtttgactaatcctactggaggaaacataaaaagagtgaatattaatgtctactctgaacaagtgagcaatggacctgcttytttgcatcacgtatattattttaattttacacccattctctgtggaacataatcccagtttttcaaatgagaagaataagattactaaagtaccttcttataaaaggacatataataaatggcaaagacaagattaacctgatgttctctaacttgaaataccctatttctttcagaaacacattctacccccaatgttcacagaattaat

SEQ ID NO: 569788 - DNA, 572 bp, Homo sapiens
aaaaaaaaacttaggtgagaatacactgatcagatttaattcttatgtcaataggtaacataatccaattttggaagataagtgttttcagatacacagaaattatttggatctctggacaaaggtggcataattcttctgrtagggccacttaataaaggtcctaagtggagctaaagaggaagccaggataaacccttttaggctttttggaatacatcttactgtagctgcaaaagggatgggggcttctggccaagcctctaaagcgccttgctacctgcctatgcatgaatcatgctctacttctagatgaagtatgaaaatgacattcctgaactcaccataaataaattaaaaacctcaagtccttttttctagtagggtaagtccttatacactaacctaaatatgctcttttcacttattcatattgtgacaaagtaatgctactttatgaaatgactggtaaggatttaagttgcagcccaaggccagggagcgaggctaattaggccatgtaggaattgaacatttcactgtagactctgcattcagtcttaaacatgggc

SEQ ID NO: 569789 - DNA, 659 bp, Homo sapiens
atacgaatccaggaaaaaaaaaaacttaggtgagaatacactgatcagatttaattcttatgtcaataggtaacataatccaattttggaagataagtgttttcagatacacagaaattatttggatctctggacaaaggtggcataattcttctgatagggccacttaataaaggtcctaagtggagctaaagaggaarccaggataaacccttttaggctttttggaatacatcttactgtagctgcaaaagggatgggggcttctggccaagcctctaaagcgccttgctacctgcctatgcatgaatcatgctctacttctagatgaagtatgaaaatgacattcctgaactcaccataaataaattaaaaacctcaagtccttttttctagtagggtaagtccttatacactaacctaaatatgctcttttcacttattcatattgtgacaaagtaatgctactttatgaaatgactggtaaggatttaagttgcagcccaaggccagggagcgaggctaattaggccatgtaggaattgaacatttcactgtagactctgcattcagtcttaaacatgggcaacataatagtatttttgaggcaatatttttcagttcctttcacaggatttcctggttgagtcaggaaaata

SEQ ID NO: 569790 - DNA, 549 bp, Homo sapiens
ccataaataaattaaaaacctcaagtccttttttctagtagggtaagtccttatacactaacctaaatatgctcttttcacttattcatattgtgacaaagtaatgctactttatgaaatgactggtaaggatttaagttgcagcccaaggccagggagcgaggctaattaggccatgtaggaattgaacatttcactgtagactctgcattcagtcttaaacatgggcaacataatagtatttttgaggcaatatttttcagttcctttcacaggatttcctggttgagtcaggaaaatatcagtttttcccaatgcacagctggcaagcarcagagtggacagggactgcatctttccataaaatttaaggtagaattattgtatgagatcttgaaaatctgatccattttcaagtctcaaccttgtgcagtaaatataaaaaatcaagccaaaatctctgctacatactttcagcggtctgtcacttccctctctcctcagtgtcaccccactggatatgacctgttacttccatgatggattgag

SEQ ID NO: 569791 - DNA, 614 bp, Homo sapiens
ctacaggccccatgcaagtccaaaatccagcaggagagtcaaatcttaaagctcaaaaatgacctccttttgactccatgtcttrcatccaggtcttgctgatgcaagagttgggttcccatggtcttgggcagctccacccctgtggctttgcaggttgtagccccactcctggctgctttcatgggctggcattgagtgtctgtggcttttccaggtgcacagtgcaagctgtcagtggatctaccattctagggtccagaggacagtggccctctcctcacagctccactaggtggtgcctcagtagggactctgtgtggtggctcctagcccacatttcccttccacactgccctagcagaggttctccatgagaccccacccctgcagcaaactcctgcctgggcatccaggcatttccataaatcctctgaaatctaggtggaggttcccaaacctcaattcttgacttctgtgtacccgcaggctcaacaccatgtggaagttgccaaggcttggcacacagcagaaggaccctaagcctggcccatgaaaccattttttcctcctaaacctctgggcctgtaatgggacaggttgcttcaaaggtc

SEQ ID NO: 569792 - DNA, 580 bp, Homo sapiens
ctatgtcatggtacaggagtttcagccactgttcctgcacaaactccactgatgttcttatttcactggtctactgaaaataatatattcggaatacctttcctcttctgacatagagcacttggttttctatccaaaatgggctagaargaggaaacaggcatctataatatatattagtaaaattttcagtcctcagtgatatggattccaatgaaggtaatcaccaattaccttaggtgattatttactctggtgtaattgaaaggagagagtgtgctaagaagaagacgacactgaagagccggcagactagtcagaattcacagcagcaagactctgaatactaaaacacagactgtcctcatgcaattcctagtgcacgaatcccagccttactgcacaattataaatggcgtaccctaggcatcctaataaatggtatgggtcctagcactgaggaacaaaaatggagaacttagaaaaaagcacaaagaataaagggtcaaaggaaagaagaaaatataggtcagggatggcaaacgtacagccctcccctgtcccacacacggcaaaaagc

SEQ ID NO: 569793 - DNA, 580 bp, Homo sapiens
ctatgtcatggtacaggagtttcagccactgttcctgcacaaactccactgatgttcttatttcactggtctactgaaaataatatattcggaatacctttcctcttctgacatagagcacttggttttctatccaaaatgggctagaaggaggaaacaggcatctataatatatattagtaaaattttcagtcctcagtgatatggattccaatgaaggtaatcaccaattaccttaggtgattatttactctggtgtaattgaaaggagagagtgtgctaagaagaagacgacactgaagagccggcagactagtcagaattcacagcagcaagactctgaatactaaaacacagactgtcctcatgcaattcctagtgcacgaatcccagccttactgcacaattataaatggcgtaccctaggcatcctaataaatggtatgggtcytagcactgaggaacaaaaatggagaacttagaaaaaagcacaaagaataaagggtcaaaggaaagaagaaaatataggtcagggatggcaaacgtacagccctcccctgtcccacacacggcaaaaagc

SEQ ID NO: 569794 - DNA, 423 bp, Homo sapiens
tttcacctgccatcttgtctcaatgccagtgtcacaatttaaatcctttttttattgcataatgaaaatttccaatcccccttgcatgtgatttaagctgggaaaataagatccttgttcaggccaagactatttcttaaacctttgcaaaacagagtcttcacttttggagggctaacctatgtagagaattttaggcctagaattagtggagaccattttgccaccayttttttaacagagcgcagacttggctccttgacacttgcaaagccaataaaaagtgcagtgaaaggaaggtgactttacttccagagttagcagtgggcaagcagccagcttatgcttccagaaaccccttcaaactttaggttgggaagaggagtttttaaaaaaggaacttggaatggaaggcatgcagga

SEQ ID NO: 569795 - DNA, 564 bp, Homo sapiens
ctagtttacattcccaataacagtgtawaagagttcccttttcactgtatccatgccaacacctttttttgttgttttgttttttctgatcatggccattcttacaagagtaaggtggtatctcgttgtggttttgatttgcatttccccgataattagtgagttgaacatttttttcatatgcttgttggccatttgtatatctttttttttttgagaatcgtctattcatgtccttagcccactttttgatgggattttttttcttgctgatttgtttgagttatttggagattctgaatatgagtcttttgtcagatgtgtagattgtgatgatctttctcccattcggtgggttttctattaactctgctgattatttctttttctgtgcagaagctttccattttaattaagtaccatctatttatccttgtttttgttgcatttgctgttgggttcttggtcacagagtctttgccgaaaccagtgtctagaagggtttttcagatattatcttctagaatttttatggttttaggtcttagatttaattctttcatt

SEQ ID NO: 569796 - DNA, 564 bp, Homo sapiens
ctagtttacattcccaataacagtgtataagwgttcccttttcactgtatccatgccaacacctttttttgttgttttgttttttctgatcatggccattcttacaagagtaaggtggtatctcgttgtggttttgatttgcatttccccgataattagtgagttgaacatttttttcatatgcttgttggccatttgtatatctttttttttttgagaatcgtctattcatgtccttagcccactttttgatgggattttttttcttgctgatttgtttgagttatttggagattctgaatatgagtcttttgtcagatgtgtagattgtgatgatctttctcccattcggtgggttttctattaactctgctgattatttctttttctgtgcagaagctttccattttaattaagtaccatctatttatccttgtttttgttgcatttgctgttgggttcttggtcacagagtctttgccgaaaccagtgtctagaagggtttttcagatattatcttctagaatttttatggttttaggtcttagatttaattctttcatt

SEQ ID NO: 569797 - DNA, 581 bp, Homo sapiens
tgttaaaccaccttggcaggccaggtggtcttgggaaacgcaacatttcggcaggaaaacataaatgcttgtcctcacctaggtccgtgggcacaggccccggggtggaccccaaaccaaggaccacgcccttcccttaccagcacttccctgccccctcctgtatcagttacatcctgtaaattttagtttatattattttaaatctcatcttatgtagagttattttttcctatggctgatccatgcattcrtgtgtctctactgagaagtcttacaatttcttctgccaggaatccaagaattcattggtcctgggtgagttttttgtttatatctcaaatagcaatttcaaattcatgtgcagttcttaaaactgagtcacaagtcctatgcagtctaagcatagataaaaatttttccatgttttttttcaaaagctctttatatacaaacactttcacaagcattggttatttcagcagctatttaaaatagggatcatttcatcaacttaccaaagaaagaagatgaatattagaagttaattcagcaagtctattcacaacctgataagaaaa

SEQ ID NO: 569798 - DNA, 531 bp, Homo sapiens
atcccactcaagcctgtctcccgacacagcacacacttacgggctccttttgaggttctaatcgtaaaaagtattctgctttgtcttttttgccatcaataagagctgatcacatggagggaatatgattctctgagcaactaatagcccagagagaacctccttgacagaatggagactgtgtggtctcaaatttctgtgagtaactgtttcactttgtgtagctgtgagtgaaattctgagtcataacccagcttacagatcagctgactggtctgaagaataccaaacactaaatggctaaatgagtggtataaaacatgcatcatgacagtaagttaattccttaatgtataaaatcttgcattcaatcaatttgtattgaatttcactgtgttgtgttgaattgaactcatctgagaatgctaaatgccrtgaatgaacctacagatgaaccttaaagtgagtctttctataatggtgaaaaggctgggaccttaagaaactctttaactctttctccttaccccc

SEQ ID NO: 569799 - DNA, 531 bp, Homo sapiens
atcccactcaagcctgtctcccgacacagcacacacttacgggctccttttgaggttctaatcgtaaaaagtattctgctttgtcttttttgccatcaataagagctgatcacatggagggaatatgattctctgagcaactaatagcccagagagaacctccttgacagaatggagactgtgtggtctcaaatttctgtgagtaactgtttcactttgtgtagctgtgagtgaaattctgagtcataacccagcttacagatcagctgactggtctgaagaataccaaacactaaatggctaaatgagtggtataaaacatgcatcatgacagtaagttaattccttaatgtataaaatcttgcattcaatcaatttgtattgaatttcactgtgttgtgttgaattgaactcatctgagaatgctaaatgccatgaatgaacctacagatgaaycttaaagtgagtctttctataatggtgaaaaggctgggaccttaagaaactctttaactctttctccttaccccc

SEQ ID NO: 569800 - DNA, 494 bp, Homo sapiens
atttgtgtaaagcattcattgtaagaagctagaattaaaacaaacaaacaaacaaaatcacacaaaaaataagaaatttatgaagctatcatgatactaaaatttaacatttgcttggtgaaataaatagagaaaataagttgtttctttgataacaataataaaattatactccccatcaagacttatcaacaaaaaatatagattaagtaatgaaagataatttcagatttatattgatattaaatataatgagtacttaatatgatcagmcatcattaagagtggtgaaatattaaatgatttcctgctgagttatggacaaagaaatgtatgccctctataatcaccttggtttaacctactggaggttttaaccatttcaataagataagaaaaaataaataaaaggcatgaatttacaaaaatttgaaaaaacaaatatctcaattttttcaaatgatgcatatgtccttaaaatatctaaaagaaac

SEQ ID NO: 569801 - DNA, 564 bp, Homo sapiens
gcattttctctttattagtgtcttataggcactgctamaataatatataataggtttaacagtaatctaatctattaccttggtggtgtttgccaaaaataaaggaaagtaaaccaatgaaataaaaacaaaatgagcaagtgaacaaaaaaacctatttcatgcaggttataacacaagattcaatctgctttctaatagtattcagaggtgagggttaaaatagccaactgcaactggaactaattaaatatgattgtaccattttttaaaaacttcattgttataattatctcactgagaaaccacacatcagagctgggaaagcagcaataacttctgcttctcacatgctttcatgttcatgcttctctgctccagaactttcgtttgttttcttaaacccccagggacatcccctgtgacagccctattaaaatatttgcagcatttgctgtgaggtctggtgagaagacagaaatataaagtgctctttcaaaatgtatttattgatatctttttttttatgacaaatgaattccttgttaaccgttaaagaaaaag

SEQ ID NO: 569802 - DNA, 551 bp, Homo sapiens
catttttttcagtattgtgtgcctgtgtgtgtttgttgagtacggttctccaactctttcaatgtcactctgtcttcaatccacctaaatccctataatygtttaacttatcctttcctctgtgtaatcacactttgaagctccttccaattgacttttaagatatcatcccgttccattcttggtccctgtaatttaggctgggtagactgcgcatccttgttctaagggtaagcccatgactccagtcctggccaatgaaagtgttaattgctatttttgttaaagtaaatctcaaatatgaatgttttatttcagagatgtcttcagggcccaatataagaagaagttttctccagaatgattcaaacatagaaacaaagagagaagaaaacaaaagaaaagtattttggtggcatgatttgagaccctagatccagctccctctgtaacatgaaccttttgttgatattagcataggttgctaaaaaatgagctgcatctagcccaggctagattcagagaatcagaaatgtttttccagagagaac

SEQ ID NO: 569803 - DNA, 644 bp, Homo sapiens
gtgaaaaattactttatcatttgattccttgaaaaataaaatacaaattaacttctagcttactcagtgtatacaacagaagaaaatgtaaatactacttgctttattatcctagaacactctaaaatatattgagttttgaggtaaaaattgaaaggtggatagttagaatgtgtatggtgataaggaaactatttgtctgagctatgaatagaatgaccactagttctgatttacccaagaagttgtctgcttatacctaaagtcttggcataattattaatgaagaatatttttatctcccaaatttcccaattttgaccataaattgtatggttgctatgatagtaaattatatgtgttaacttggttaggctattgcatctctatctgcatctctatatctgaatggtatattggttttgtaactctggagaaagttgacacgtttaccacaggtataaatagttagataataataataaccagtaactatagctattaccactaactaataatcccaasctgccaaagttctcatttataaaatgatgaaaataactcccacttcatagtctgtttattttgagtatttgagatccattttttgtgcctggtcagaatagtattccaaaaaagaaaaa

SEQ ID NO: 569804 - DNA, 572 bp, Homo sapiens
gtgaaaaattactttatcatttgattccttgaaaaataaaatacaaattaacttctagcttactcagtgtatacaacagaagaaaatgtaaatactacttgctttattatcctagaacactctaaaatatattgagttttgaggtaaaaattgaaaggtggatagttagaatgtgtatggtgataaggaaactatttgtctgagctatgaatagaatgaccactagttctgatttacccaagaagttgtctgcttatacctaaagtcttggcataattattaatgaagaatatttttatctcccaaatttcccaattttgaccataaattgtatggttgctatgatagtaaattatatgtgttaacttggttaggctattgcatctctatctgcatctctatatctgaatggtatattggttttgtaactctggagaaagttgacacgtttaccacaggtataaatagttagataataataataaccagtaactatagctattaccactaactaataatcccaacctgccaaagttytcatttataaaatgatgaaaataactcccacttca

SEQ ID NO: 569805 - DNA, 390 bp, Homo sapiens
accgattctaattctgattctgattcagaaagtgttgagtgatgcctggtatcgcatttttagcaaactctacataggtggtcctaacacacagccaggctttaacattacagggctaggaaatcagagggaaacacaaattgccccagttagctctcagcatcaacctgctcttaccyttcctcatcaaactttcctttccttttaaatattataaatttcttttttcaacttcatgattctttcctcactgtgaatcattcctttattttagtataatatttctaaaaggagaacacccctttttttctgagtaatttggaactatcaaatcaaacaaattcaaagttaaacatggattttacatataaaatatcctgttattgatga

SEQ ID NO: 569806 - DNA, 390 bp, Homo sapiens
accgattctaattctgattctgattcagaaagtgttgagtgatgcctggtatcgcatttttagcaaactctacataggtggtcctaacacacagccaggctttaacattacagggctaggaaatcagagggaaacacaaattgccccagttagctctcagcatcaacctgctcttacccttcytcatcaaactttcctttccttttaaatattataaatttcttttttcaacttcatgattctttcctcactgtgaatcattcctttattttagtataatatttctaaaaggagaacacccctttttttctgagtaatttggaactatcaaatcaaacaaattcaaagttaaacatggattttacatataaaatatcctgttattgatga

SEQ ID NO: 569807 - DNA, 634 bp, Homo sapiens
aggagaagacacacatatatacacatacaaatattgggttatttcaaaggctgtctctggaacattttgatcaataaaatacagtagcattaaattccaagtcaaagtgtaaaatgaatattcataatttatactgacataagtaaattatagactacatgggacagaatagaccaatctcctgtgcaaaatttttaaaagaatctatgtagacattcagttatcaaggaagtggagcgcaacttcctaccctttttcaagttgactgaacatgatgactcttgtccaaagagtactgaatgaaaagggattagggggaagagtaattttataatggagaaacctgacaaatactacctcagccaagtgatcaaagtcagcaccaacagtgataagtcatattgatattatatrtttttaatatgatgcgatgagaatggcaatttatattgttttcctctcaaaaacagatgtcgagtataatcaggagaaatacacaagtccatactgaaaggcattttataaaacatgtgataaatgctccttaaaactgtcaaggctgtgggaaaaaaaaggaaaatgagaaattctcatagtcacaagaagcctaaggagtcatgacaaaatataatgt

SEQ ID NO: 569808 - DNA, 584 bp, Homo sapiens
cagcaccaacagtgataagtcatattgatattatatgtttttaatatgatgcgatgagaatggcaatttatattgttttcctctcaaaaacagatgtcgagtataatcaggagaaatacacaagtccatactgaaaggcattttataaaacatgtgataaatgctccttaaaactgtcaaggctgtgggaaaaaaaaggaaaatgagaaattctyatagtcacaagaagcctaaggagtcatgacaaaatataatgtgatatcctgaattgaacgctgacataaaacagacgttaggtgaaaactaagaaaatctgaaaaagtaacagattgtagctaataatgtaccaatcaatattgagtcacttgtactatactaatgtaacataacccttgaaaagtgaaacaggatgtggagtattggaaactatctgtattacctgcttaatatttctgtaaatcaaaaattgccctaaaatacaaagattatttttaattacctacaatgtgttttgggactataacattaaattcttagggaggacttattggctttttgcaaatagctttaaaagtatagtctga

SEQ ID NO: 569809 - DNA, 575 bp, Homo sapiens
aaatactacctcagccaagtgatcaaagtcagcaccaacagtgataagtcatattgatattatatgtttttaatatgatgcgatgagaatggcaatttatattgttttcctctcaaaaacagatgtcgagtataatcaggagaaatacacaagtccatactgaaaggcattttataaaacatgtgataaatgctccttaaaactgtcaaggctgtgggaaaaaaaaggaaaatgagaaattctcatagtcacaagaagcctaaggagtcatgacaaaatataatgtgatatcctgaattgaacgcygacataaaacagacgttaggtgaaaactaagaaaatctgaaaaagtaacagattgtagctaataatgtaccaatcaatattgagtcacttgtactatactaatgtaacataacccttgaaaagtgaaacaggatgtggagtattggaaactatctgtattacctgcttaatatttctgtaaatcaaaaattgccctaaaatacaaagattatttttaattacctacaatgtgttttgggactataacattaaattcttagggaggactt

SEQ ID NO: 569810 - DNA, 552 bp, Homo sapiens
aataatatggtttggctgttttcccacccaaatctgatcttgatttgtagctcccataatcgccacatgtcatgagagggacctggttggaggtaattcaatcatgtgggtaggtttttccatactgttctcatgacagtgaataaatctcatgagatctgatagttttataaagggcaattccccacctcactcactacattctcctgccctgtgaagaaggtgccttggttcccctttgccttctaccgtgattgtaagtttcctgaggcctccccagccacgctgaactgtgagtcaattaaagctttcttccttttaattacccagtcttgggtatttccttacagcaatgtgagaatgaactaatacaacgaggtacatgtctagggaggtagtcacgtcacaaagagtgtgttacattcaaacccataattcccattttctgttccattcttkcactgatcagacctttatggagatcctgttatttataagcccctaaactagttttaaagtacataaagatgcaacaaagtatttcaactaacc

SEQ ID NO: 569811 - DNA, 565 bp, Homo sapiens
ttgaaggatgtaaagtattgatcctgggtgtgtctgtgagagtattgccaaaggatattaccatttgaggcagttggctgggtaaggcagacccacccttaatctgggtgagcaccatctaatcagctgccagcaaatataaagcaggcaaaaaaaaaaaaaaaaaaaatgtgaaaaggctggactggcctagcctcccagcctacaccttctmccatgctggatgcttcctgcccttgaacataggacacaaaattcttcagtttgggactcggactggctctcctttctcctcagctctcctttctcctcaggcccagagcctgtggaggacagaatgatttttgtggacccggccagggttccattgctctgttcagccttgggatgttgctcccttcatctaggctgctccagctccagccttggctcaaaagactcaaggtacagctcaggttgcaactctgaatgatgtaagccataagccttggtggctttgatgtagtattaaagctgcaggttctcagagtagaggaggcatgacagcttccacctagatttcagg

SEQ ID NO: 569812 - DNA, 565 bp, Homo sapiens
ttgaaggatgtaaagtattgatcctgggtgtgtctgtgagagtattgccaaaggatattaccatttgaggcagttggctgggtaaggcagacccacccttaatctgggtgagcaccatctaatcagctgccagcaaatataaagcaggcaaaaaaaaaaaaaaaaaaaatgtgaaaaggctggactggcctagcctcccagcctacaccttctcccatgctggatgcttcctgcccttgaacataggacacaaaattcttcagtttgggactcrgactggctctcctttctcctcagctctcctttctcctcaggcccagagcctgtggaggacagaatgatttttgtggacccggccagggttccattgctctgttcagccttgggatgttgctcccttcatctaggctgctccagctccagccttggctcaaaagactcaaggtacagctcaggttgcaactctgaatgatgtaagccataagccttggtggctttgatgtagtattaaagctgcaggttctcagagtagaggaggcatgacagcttccacctagatttcagg

SEQ ID NO: 569813 - DNA, 598 bp, Homo sapiens
cagtcatttcatattactgtttagcatcagtttctttcaayttgaagaactctttagcttttctcataagccaggactactgctgttgaacaccctcaaaatttgtttcacaaggagtttttattacttacttttttttgaagaaaattttgccagatatagtatttttgtttgacagttatttatttatatctcattagagttttgaaaatatcatcgcacttccttctggcatgcattgtttctactgagacatctactgatagtcttacagatttcccttatatgtgaaaatcacttttcacttactgctttcaaaattctccttttgtctttgacttttgccaatttgattataagttttctaggtatggattttttttggattttccttatttggggcttggtaagcttctagacatggatgtccattttcttcctcagattttgaaagttttcatctatcacatttttaatattctttcctcccctttatctctctcttcttttgggatttccataaggcaagtatttgtctacttggaattaaatttgtggtttttaaatatttgtttgaattttcagtgtttgctgagat

SEQ ID NO: 569814 - DNA, 542 bp, Homo sapiens
atgccaagtaagtatgtgaaaaaagttcaatatcatatttcattagggaactgcaaattttaaaagcaatgagacaccactatacactgattagaacggtgaaatccaaaccatcttcaatgcaaatgctggtgaggytatggagcaacaggaactttcattcattactagtgggaatgcaaaatggtatagctactttagaagacatattgatggtttcttataaaactacacatattcttagcatgagctagcatttgcattgttttgttttacccaaataagtggacaattgtctccacaaaaaacctgtacataaatgtttatagcagtttttatagtcaccaaagcctggaagcaagcaactgagatgtccttctgtgaatgggtggataaataaactgtggtacatccagacaatgaatattattcagtgttaaaaactcatgaaaagacatagagaaattttaagtgtgtggtgaagaaagaagcgataaaagccagtcttaaaagactccataatatgtgatcccaactttgac

SEQ ID NO: 569815 - DNA, 519 bp, Homo sapiens
  misc_feature 128: n = A,T,C or G
tcaaaaatggagaaaacatatttgataaaatgcactatacatttataatatttagcaaaccagggatagaaggaaattttatttaccaataaagaacatctttactaaaacaacaaacaacaaaagcncagggtttgccttacaataattacataagaacatggtgattgtggaactcaaacatcattatttttcaaaatctgttagttgactaaatttttgccaggttgagaaccactgctcaagaggtacttaataaataattattgtatcaaaaaaagataacctgataaagcaatctaatttacattagcataaaaaagaataaaatactcagaaataaacttgactaagtaggaaacagacttgtacctggaaaatcataaaacattgatggaggaaattaacaaaaaaayatagaaaagcattccatgttcatagattgaagatttaagttgttttagttaatatggacattttaacaattgacaaatgcagtgcaatccctatttaaactcc

SEQ ID NO: 569816 - DNA, 589 bp, Homo sapiens
ggaacaaaagagacagtccagaaataaatctaggtatatgcagtcattgactttcacaagggtgccaggaatacacaatgaggaaaggatagtctctttaatatattatttttggaaaagtggataccaacrtgcaaaagatatgaatttggacctttacactatacacaaaaaatcaactcaaagtgaattaaagacttaaaaataagtcttgaaactataaaacttattaaagaaaacatggaaaaatcataacattggttttgaaaatgattttttgaatatgacagcaaaagcactagtaacaaagcaaaaatagacaagtgggactatatcaaaacaaaatacttctgcatggcaaaggaaatgatagaagatacagtgtatagaatgagagaaaatatttgtaagtcatttattagataaggggtcaatttctaaaataagctaagaacttctaaatcaatagcaaaaacaaaacaaaacaaacatacaattacctgtttaaaaatgggcaaatgatttgaatagctatttctccaaagaaggtgtacaaataacagataaatgaaaaggtgctcaatatcac

SEQ ID NO: 569817 - DNA, 573 bp, Homo sapiens
tttaatatattatttttggaaaagtggataccaacatgcaaaagatatgaatttggacctttacactatacacaaaaaatcaactcaaagtgaattaaagacttaaaaataagtcttgaaactataaaacttattaaagaaaacatggaaaaatcataacattggttttgaaaatgattttttgaatatgacagcaaaagcactagtaacaaagcaaaaatagacaagtgggactatatcaaaacaaaatacttctgcatggcaaaggaaatgatagaagatacagtgtatagaatgagagaaaatatttgtaagwcatttattagataaggggtcaatttctaaaataagctaagaacttctaaatcaatagcaaaaacaaaacaaaacaaacatacaattacctgtttaaaaatgggcaaatgatttgaatagctatttctccaaagaaggtgtacaaataacagataaatgaaaaggtgctcaatatcaccaatcaccagagaagtgcaaatcagaattacaatgacatatctgctcacacttgttaggataactattaccaaaaaaaaa

SEQ ID NO: 569818 - DNA, 589 bp, Homo sapiens
ggaacaaaagagacagtccagaaataaatctaggtatatgcagtcattgactttcacaagggtgccaggaatacacaatgaggaaaggatagtctctttaatatattatttttggaaaagtggataccaacatgcaaaagatatgaatttggacctttacactatacacaaaaaatcaactcaaagtgaattaaagacttaaaaataagtcttgaaactataaaacttattaaagaaaacatggaaaaatcataacattggttttgaaaatgattttttgaatatgacagcaaaagcactagtaacaaagcaaaaatagacaagtgggactatatcaaaacaaaatacttctgcatggcaaaggaaatgatagaagatacagtgtatagaatgagagaaaatatttgtaagtcatttattagataaggggtcaatttctaaaataagctaagaacttctaaatcaatagcaaaaacaaaacaaaacaaacatacaattacctgtttaaaaatgggcaaakgatttgaatagctatttctccaaagaaggtgtacaaataacagataaatgaaaaggtgctcaatatcac

SEQ ID NO: 569819 - DNA, 460 bp, Homo sapiens
ttaccatattacattaaaataaaatgtaaaaaaaaaattttaaatataactagatccaaatgctttgcttcagaaagaacgtgccattgtaaagtatcatcaccagatagtgattttaaaattgttttaataaatgtaagttataaatattacatgattttaaatatgtgaaaaataattttaaatattttagtattttaaatattaaattattttctcctcctttcacaaattattctaaaattctctcaagcttgtgagcactgatgcttgtctaagtgkcttatctgatgaggtgacctggacctacattcctgatgtttatgagcagctagtcaccttgcctttcgcagtttatggcttattcacctcttatgaaatttggattggtggtctgaagagttgctcaagtaattgtcaggttgcaatcatattattatctaccccatttttaatagaa

SEQ ID NO: 569820 - DNA, 596 bp, Homo sapiens
attagaagcttgaacacgagaataggctgctttacgttgctttaccataagtcctatgaatgagctatgagccttggctccaagagaactgtcctatgagtataggagttctaattaggagagtgtgaagcaaaaaccagcagagtatctcaaatggcatcatgttacacataagccatgaactataattagagaaggtagcaggagtggatgatatttgatgattttctaaatatatgataatttacatttgcataaagaaaggcatgctattaaaacagcaaggccaaaatcctccttatttaattttctcatggtctcttgagaaaagctgtttgattcaatacctctcacatcaatgattcaaatgaatcctttgtaatagcatcgttatcgtacttatagtcagagcagcctatgtaactggccaaggtgagcaggtgggttgcaggacrtggacagcgtagtgataactttgcttttttggagggtgaatcctttgcaactctatagcttttgcccttaagacatagcctcattttcttgctcctgaaattgcttctctttatttacatactaatgaagcatcaaaactg

SEQ ID NO: 569821 - DNA, 610 bp, Homo sapiens
gcatcgttatcgtacttatagtcagagcagcctatgtaactggccaaggtgagcaggtgggttgcaggacatggacagygtagtgataactttgcttttttggagggtgaatcctttgcaactctatagcttttgcccttaagacatagcctcattttcttgctcctgaaattgcttctctttatttacatactaatgaagcatcaaaactgcatctggatcctttagtgtctgcatttgagtaatggtattaaaagtataaaggtatttttttctctctgtactctgtggtgtatcacctcgagattgcccatgtttctttgaaattgtctttaattctctcaagtcacagaatatagaaactatatataagctaaacatgtgaatgttaataataattttaagagtaaagccattgtcttggcttcagaattcattacttcatttaaacattgcagcaaaactacaacataagcattaacttgaacttaaaatgagaaaactcatgctcaaacaggttaatttgccaataactactaaatagcacagccagaatttaaaacaattttgccaaatgctaaaaaactccctctgacttcattgaggaact

SEQ ID NO: 569822 - DNA, 610 bp, Homo sapiens
gcatcgttatcgtacttatagtcagagcagcctatgtaactggccaaggtgagcaggtgggttgcaggacatggacagcgtagtgataactttgcttttttggagggtgaatcctttgcaactctatagcttttgcccttaagacatagcctcattttcttgctcctgaaattgcttctctttatttacatactaatgaagcatcaaaactgcatctggatcctttagtgtctgcatttgagtaatggtattaaaagtataaaggtatttttttctctctgtactctgtggtgtatcacctcgagattgcccatgtttctttgaaatygtctttaattctctcaagtcacagaatatagaaactatatataagctaaacatgtgaatgttaataataattttaagagtaaagccattgtcttggcttcagaattcattacttcatttaaacattgcagcaaaactacaacataagcattaacttgaacttaaaatgagaaaactcatgctcaaacaggttaatttgccaataactactaaatagcacagccagaatttaaaacaattttgccaaatgctaaaaaactccctctgacttcattgaggaact

SEQ ID NO: 569823 - DNA, 610 bp, Homo sapiens
gcatcgttatcgtacttatagtcagagcagcctatgtaactggccaaggtgagcaggtgggttgcaggacatggacagcgtagtgataactttgcttttttggagggtgaatcctttgcaactctatagcttttgcccttaagacatagcctcattttcttgctcctgaaattgcttctctttatttacatactaatgaagcatcaaaactgcatctggatcctttagtgtctgcatttgagtaatggtattaaaagtataaaggtatttttttctctctgtactctgtggtgtatcacctcgagattgcccatgtttctttgaaattgtctttaattctctcaagtcacagaatatagaaactatatataagctaaacatgtgaatgttaataataattttaagagtaaagccattgtcttggcttcagaattcattactkcatttaaacattgcagcaaaactacaacataagcattaacttgaacttaaaatgagaaaactcatgctcaaacaggttaatttgccaataactactaaatagcacagccagaatttaaaacaattttgccaaatgctaaaaaactccctctgacttcattgaggaact

SEQ ID NO: 569824 - DNA, 602 bp, Homo sapiens
aagaggtgtaacacaaacagggctgaaacgtgccccttgctcaccacgttacaggtgacaaggatagaagagagatggagataagagctgcagccctttgggaagcccagacccaggagttctccaaaccaggctgcaacaccctctttggggctttgcagttcctggcatctccaagcttctgggtgccaccacatttcgcagtgctgtggagggggyttgcagtactcctggtccagctgcagcctcacagggagctggcatccatgctggtccctggagctgctcaccctgctgcatctagtgtgcctggctgtgcacagtggccaggtaccatactcatttgctcacacacccctcaccactccacacctggctcacccttggtaggcttgggatccaggccagtagcacaagccaagtgcaacctgccacgctgagtgggtagaacaagcccagtgggccccaagaaagagttgagcaaaggtgccaccagccacagaggtttctggctggaaaagctacaccccaaggatcctgtgacaaaagctttaccttattactagatagtttattttgaaatctcccacatccagtaacgc

SEQ ID NO: 569825 - DNA, 611 bp, Homo sapiens
ctgggtgccaccacatttcgcagtgctgtggagggggtttgcagtactcctggtccagctgcagcctcacagggagctggcatccatgctggtccctggagctgctcaccctgctgcatctagtgtgcctggctgtgcacagtggccaggtaccatactcatttgctcacacacccctcaccactccacacctggctcacccttggtaggcttgggatccaggccagtagcacaagccaagtgcarcctgccacgctgagtgggtagaacaagcccagtgggccccaagaaagagttgagcaaaggtgccaccagccacagaggtttctggctggaaaagctacaccccaaggatcctgtgacaaaagctttaccttattactagatagtttattttgaaatctcccacatccagtaacgcttatatgtcttatcgtccctaaatcttcagtttctttacacctcaccactagttctgtaaggtccaattatatcttgtctgatctactcgaataaacttctaattgagtctacgacaaccattcttttcttcactttcagacttatcagactaaggcatagcatatatgaactttctttttagggcctaa

SEQ ID NO: 569826 - DNA, 611 bp, Homo sapiens
ctgggtgccaccacatttcgcagtgctgtggagggggtttgcagtactcctggtccagctgcagcctcacagggagctggcatccatgctggtccctggagctgctcaccctgctgcatctagtgtgcctggctgtgcacagtggccaggtaccatactcatttgctcacacacccctcaccactccacacctggctcacccttggtaggcttgggatccaggccagtagcacaagccaagtgcaacctgccacgctgagtgggtagaacaagcccagtgggccccaagaaagagttgagcaaaggtgccaccagccacagaggtttctggctggaaaagctacaccccaaggatcctgtgacaaaagctttaccttattactagayagtttattttgaaatctcccacatccagtaacgcttatatgtcttatcgtccctaaatcttcagtttctttacacctcaccactagttctgtaaggtccaattatatcttgtctgatctactcgaataaacttctaattgagtctacgacaaccattcttttcttcactttcagacttatcagactaaggcatagcatatatgaactttctttttagggcctaa

SEQ ID NO: 569827 - DNA, 529 bp, Homo sapiens
aaaattcaggtgttgaaacttaatggccaatgtgatggtattaagaaatggggcctttaagaggtgattaggccattaagtctccccactttgtgaatgggactgaggcccttttaaaagaggcttgcttacccttctgccacatgtgaggacatcacgttcctccccttcagaggatgtagctacagaggccatcttggaagcagacagaagccctcgccagacaactgaatctactagtgtcttggtcttggacttcccagcctctacaattataagcaaatgggtttctattctttataaattactcagtcttggatactttgttacagcagcaaaaatgaagtaagataaccattggtgagggcaaataataataataatgactaccaaagatgttggttacaaactrcaggccagatactttaacactttccttgcattatgtttcacaacaattctttttatcaaaatgaggaaacaagactgaaagaagttaaatacatagccaaagtcacaaaactagcaa

SEQ ID NO: 569828 - DNA, 593 bp, Homo sapiens
tacagctggagtatcttcaaataaagtatccaggcttcatcacggtatatggcaagcataatctgaagaatgtgttaaaattatgcatccctcatattttccccagactttctgagacataaaattttgggagtttagattaaatagttttgtgatgaagcttcttatgagactgcaatagatattcacttctgattaagaatatttgccacattttcttgctacatgtttctcagtayagcaaaaaaaaaaaaaaaaaaaaaaaaaaaaaaggttagctctactcttaaactagcaagaatctaagaagaaactagataacctggagtttggcacaatagtgacactcaataaatatgtatttgtcttagtccattttttggtgctgtaacagaatactacagactgggtaatttaaaataaacagaaatttattgactcttgactttggaggttgggaagtccaagattaaacctttggaacctgatgagagcctttttattgggtcctaacttaaagagaggcatcagaagggcaagaggagggagggggagccaaatatatccttttatgaggaagctattcctttagt

SEQ ID NO: 569829 - DNA, 403 bp, Homo sapiens
tccccacccaaatcttatgtcaaattgcaatccccagtgttggaggtgaggcctggtgtgaggtgattggatcacaggggtgggtttcttatgaatggttcagcaccatcccctcagtgctgttcttgtcatagtgagttattgtgagatctgcttgtttaaaatgtgtagcacctctccactctctctccctcctgctctgacttacccttcaccttctgccataattgtaagtttcctgagacctccccagaagcaacagccattgtttcctgtacmccttgcagaactgtaaggcaattaaatgtcttttctttataaattacccagtttcaggtatttctttagagcaatgtgagaagggactaatacagtacatttattattccccattccataggtg

SEQ ID NO: 569830 - DNA, 564 bp, Homo sapiens
ttgtcagagccatgagctcttcctcatccctttctccttgttatgtgaatgatgggagcagacacgaccttctgtccatgatccatttagttcagataataggaaaggatgttgcagtctaaggatcaacagaacaatagaagaacaagggggagaaagagggcagaagaggagggggacagaaatcaacattacattatcatggtggcgagtcagacatggtggcaaccactgtgtgtactgtttttttttttttcatgcagagatggcttttggattcccagtggtaggaagagaagcttaaatggatgaatacaaaataattattaaaaaatgaaatagagaattattaggaattttctcttttaaaaaagaggaggtctgtagtctttaaaaatgtcagcatcataaaagacgaagaaargctgtggaagtgttctagataaaaggagactataaaatacataacaaataaatacttgatctaggctgagatctgtactggaggagaaaaaaaatgctataaaggacattactatctcaattgacaagattggaatatgg

SEQ ID NO: 569831 - DNA, 576 bp, Homo sapiens
gagtgggtgatgtgcttcgtgagagaattgtttcttgaagagcgaagccttacagtattcttcaattcaaattatgtgagcagctatcagctgatgagttcagcagaatctcttatttgtagaagtgtagtatgttcagacctcaccattctgactaaaaagtaatttcatatttatccaaatgccacataagttgagctcccagttgcccataaggaacatattgctcctcagaacggtgctgtccgcatcctctttcaggccattagagaagaaascccataagatattccagactggcctgtcaaatctctgttcctttacttctgcagacagactcccatgagaccacagcctctccagaaaaatacttccacaaaaccacagacacatttaaagtaatgtaattgactaattgcaggaagtaagtttctggccatgcaacatattgaaaagataaatgtcattaggattaagccaatgacttcagccaccttagcaactgcagtttagtcaatcacacaaactattagcagacatgtgatggaacctggagggaaactgtgacactgaatt

SEQ ID NO: 569832 - DNA, 618 bp, Homo sapiens
gacctaaatccatgacattatagcaatgtgcctgagaaaggcagcacggctacaaccatgcatttcccagtgctccaaaaaaaaaaaaaaagaaaagaaaagaagtgataacctctaacatgtggatgtcagtcttcaactgaaacttttaaatatgtatttatttgaatagtttcttagaaggcttaataaatacagatatttagggttctttcttccagcaagagtaagcatattagattgggaaaagcttgagttacaggaagcttgtcaaatcctgtaccctacagtattactctcttgaaaaytgaaataccagctcttagttccacttttatttcttataaaatggaagagcatatattcataaacctgaaatacaaagtgctatacaatgtataaaaggctgacagtgcatttaaatgggttttgaatagttttcatttagtgcaaacagaaacttctgtgaggtacatttgtcagatgttttggtcaatatcattgctttgaagttatggtttatcttctgaaatattatgctgatagaacttgtaaccacaagaaagcaaacataaaaccagatttcaggtatgtgaacttaaaactctagtcatttca

SEQ ID NO: 569833 - DNA, 618 bp, Homo sapiens
gacctaaatccatgacattatagcaatgtgcctgagaaaggcagcacggctacaaccatgcatttcccagtgctccaaaaaaaaaaaaaaagaaaagaaaagaagtgataacctctaacatgtggatgtcagtcttcaactgaaacttttaaatatgtatttatttgaatagtttcttagaaggcttaataaatacagatatttagggttctttcttccagcaagagtaagcatattagattgggaaaagcttgagttacaggaagcttgtcaaatcctgtaccctacagtattactctcttgaaaattgaaataccagctcttagttccacttttatttcttataaaatggaagagcatatattcataaacctgaaatacaaagtgctatacaatgtataaaaggctgacagtgcatttaaatgggttttgaatagttttcatttagtgcaaacagaaacttctgtgaggtacatttgtcagatgttttggtcaatatcattgctttgaagttatggtttatcttctgaaatattatgctgatagaacttgtaaccacaagaaagcaaayataaaaccagatttcaggtatgtgaacttaaaactctagtcatttca

SEQ ID NO: 569834 - DNA, 558 bp, Homo sapiens
agtcactgttctggcactaattacctttgtgaaacaactttgtaatccttggtttctcaagtgtggtttcctacaatgaaagggtcaggaaaccgcagtagaggcataagaacagatattctgttgtcaaaccaaacgtatttcaacatttggctccatcagttacctgggagcatcatttataatctctaaacctgtttcctcatctgtgaaatgaggatagcaataaaakttaacttctaaatttaagtattcaatgagatattacttataatgcatatgatacgtacataataactttgtttttaagctcttcaggccctttccacccatcacattgtattgttcaattttattgcaacataagtcagtctgaagctaaagcaaatgatcattgggtagttttgatgtattcttcatgtgactatcaacctaacagttaccaactctagcttcctgacctaagagaggtgacttatttcttgtttgctaccttgaagacatgttttgctgctaatttttgatgtgcagattcgtgactcagcatacctacatagc

SEQ ID NO: 569835 - DNA, 631 bp, Homo sapiens
cttataaatatatacgtttgtaatgtagtatatagattgtggaaaacaattttcacctatatccattagcttatgaattatttgacacctaacccaaaactcatatagacctaagaaaaatagaaatactgtcaccagcttagaaaaccaaaagcatcaaaataataaagaaaaactatctgagaagacaccataaagagtggggctactgtcacaaagaacrgatgctgataaaaagcttaatcaaaagctgacaaaggcatcacaataacagtgtaaatatgattatatgcatgccatggctgtgcaaagatttaaaagttgagagaattggctttggaattattgaaggtagcctagcatgaggaagaccaccaacttaggaattatgagactagaatttcatgtctaaggttaggcctaaattggagtttaagctaagctactcatttaatgtagcttggcccagaatccacacccatcatacagtgagttgcacttggcatcagacaagcaagttgcatctgtcctgagcgaaaaggagaagcctcagcggtagataaaggttggtatgggaaaggatccactgctttgatcagattttaaggagtctatgattcctaaatgctta

SEQ ID NO: 569836 - DNA, 555 bp, Homo sapiens
atctcacacttgtacactcatacttacatgagttggggaatagggaatagctgctatgtggctggtaagaatatatgggcctttcggcattgtgcatctacaggagctagcagatgtggaacccaaggaagatgctgattcatcaaacagaataggaagataaaaccgtactgaaatagagaacaaatgcacaattccaagagttggtgggatataaagtatctgtgttcagatgaatgagaagcytgatgcaaattttctatagtagatattattgttagctaattagagctaacatttgttgggcacttaacatgtgccagccattatccaaatcccctttaaacattactttatttaaacttcataacaaatttatgagttagtattattttctccattaaaaagggaaaatgataatcataaagattaaataacttggcactatcacatggcttttaaatggatcaagaattaaaaacagtcagtgtaattacacaattgcaactcatctgccaatattgatatgcctgaattagaggtgacaagaggaaa

SEQ ID NO: 569837 - DNA, 555 bp, Homo sapiens
atctcacacttgtacactcatacttacatgagttggggaatagggaatagctgctatgtggctggtaagaatatatgggcctttcggcattgtgcatctacaggagctagcagatgtggaacccaaggaagatgctgattcatcaaacagaataggaagataaaaccgtactgaaatagagaacaaatgcacaattccaagagttggtgggatataaagtatctgtgttcagatgaatgagaagcctgatgcaaattttctatagtagatattattgttagctaattagagctaacatttgttgggcacttaacatgtgccagccattatccaaatcccctttaaacattactttatttaaacttcataacaaatttatgagttagtattattttctccattaaaaagggaaaatgataatcataaagattaaataacttggcactatcacatggcttttaaatggatcaagaattaaaaacagtcagtgtaattacacaattgcaactcatctgccaatattgatatgcytgaattagaggtgacaagaggaaa

SEQ ID NO: 569838 - DNA, 502 bp, Homo sapiens
aaataaatcttgttttgcagaattttccatgagagattttatatctattcttactcataaatgatcttacattgaatatgcacatgttgcatgytatttatataaatgagataagataaacagcagttctacattggagtctatttttgtccgcactatagcttaattttccacagttagtttaaccagagatattatttcaattggcttgttagaatccttagttgtgttcctcacagattttgattttatatgtgcaattgctcagacaatgggtttttgtagccattgaatcttttatagtgatttctctagagatcttgctttctttttttaatacgaccctgacaccattaacttaaaatatggttgcttagtaataaaatacattgaatatgtcatgtattcatactttgtagtatgtttgctgcaggtgcctgagaattttttttctcacttttccactgttttgcaggaggagtctttggcatgactgtgttaa

SEQ ID NO: 569839 - DNA, 500 bp, Homo sapiens
taggaggtaaaatcagttaaccttgcatacactgtttgagatgtgaatttaagaaaaacaacaaaaattcctactgtcctgggaaaaagtaaatcaaagaaacatggagtcaagtgtcagggtcagactctaaattgttcttgcagctgttagtaggcaggaagycaaagccaattattatctgagtgagagacatgtcaatccatcagccacagcatggtgtactgaacattgccttacgactttcaaatctagaaataggaagaaaggcccatgttgacaagtgtgaggaaatttccaccaatgtccaagatgaacaagtgttaccatttttcatttttctactattgataatctgttatctaatctcagctccctccactctttcttccatatgtaaactcattaactctgatactgggacttgctacaatatgacaaagttatgccatttttcaaagtgtgaaatatgtcatatacatgtacaatctgaaccccaa

SEQ ID NO: 569840 - DNA, 500 bp, Homo sapiens
taggaggtaaaatcagttaaccttgcatacactgtttgagatgtgaatttaagaaaaacaacaaaaattcctactgtcctgggaaaaagtaaatcaaagaaacatggagtcaagtgtcagggtcagactctaaattgttcttgcagctgttagtaggcaggaagccaaagccaattattatctgagtgagagacatgtcaatccatcagccacagcatggtgtactgaacattgccttacgactttcaaatctagaaataggaagaaaggcccatgttgacaagtgtgaggraatttccaccaatgtccaagatgaacaagtgttaccatttttcatttttctactattgataatctgttatctaatctcagctccctccactctttcttccatatgtaaactcattaactctgatactgggacttgctacaatatgacaaagttatgccatttttcaaagtgtgaaatatgtcatatacatgtacaatctgaaccccaa

SEQ ID NO: 569841 - DNA, 500 bp, Homo sapiens
taggaggtaaaatcagttaaccttgcatacactgtttgagatgtgaatttaagaaaaacaacaaaaattcctactgtcctgggaaaaagtaaatcaaagaaacatggagtcaagtgtcagggtcagactctaaattgttcttgcagctgttagtaggcaggaagccaaagccaattattatctgagtgagagacatgtcaatccatcagccacagcatggtgtactgaacattgccttacgactttcaaatctagaaataggaagaaaggcccatgttgacaagtgtgaggaaatttccaccaatgtccaagatgaacaagtgttaccatttttcatttttctactattgataatctgttatctaatctcagctscctccactctttcttccatatgtaaactcattaactctgatactgggacttgctacaatatgacaaagttatgccatttttcaaagtgtgaaatatgtcatatacatgtacaatctgaaccccaa

SEQ ID NO: 569842 - DNA, 628 bp, Homo sapiens
ctgggtttgaatcccaacagtatgacacccaggtgtctcttaatctttgcacatagtgatgtaccttgaacccagaaaatctgagacaggtcccaattaatttaggaagcttattttgccaagatcgaggacacacctgtgacacagcctcaggaagtcctgatgacatgtacccaaggtggtcacagcacagcttggttttatatatttagggagacaggagacatcaatcaatatatgtaagaagtacattggtttggtctggaaaggtgagacaacttgaagcaaaggcaggaagactggaagcagggagggagcttccaggtcacagacaggtgatcgacaaatggttacattcttttgagtttgctgattagcctttccaaagaaggcaaattagatatgcatctaatttgaatagaatgggaggcaggtttggcctaagcartttccagcttgaatcttccttactgatttggaggcccaagatattttcctttcataacctcataaggatgtcgtggggctcagaacaatttatgcatataaaataatccagtccatatagcttggtgtttattcaggctctataatcagatagacttggctttgaaccttagcttcatct

SEQ ID NO: 569843 - DNA, 562 bp, Homo sapiens
atatgcatctaatttgaatagaatgggaggcaggtttggcctaagcagtttccagcttgaatcttccttactgatttggaggcccaagatattttcctttcataacctcataaggatgtcgtggggctcagaacaatttatgcatataaaataatccagtccatatagcttggtgtttattcaggctctataatcagatagacttggctttgaaccttagcttcatctcttactagctgtgtagccttgaacaactacagaatctcttaagaagtttagtttctttatctgtaaagtggggaaaayaattccctagcccccagggttgttctgaagtgacagatgctatcaaaatttcttattgacatgtaaagtagtagtatttagtattccctcactcctatatcgtagcatagctttagtaatgctcattctcaccctaagatgtcttcctctgtccatcttttctgcacactgaccttccagaatagtcttagaatagtcattttttttctttgctgtttgtcttttcaggagtttgtattaaaagactcctttataa

SEQ ID NO: 569844 - DNA, 580 bp, Homo sapiens
ttgcttttggattttattctctggttggtggagttatggatggattttaagcaggagggaggcyacatggggtgtgaggtagagtcttgggccattcaaaggtatctggtttagtgccaggcacatgctggattctcagaaaatatcttttgaatgaataggatagtaaatatgtaatcattaaagacagtaagaaataaggtagatctctatgtgctgctgatatgggaagatgttcaacattactattaagtgaacaagagcaacttcagaccagtatataaagtatatttccatttgtgtttgaaaaaattacatatgtgtttatttctatgtgtgtgtggtagacagtaggcaggtggatggatgcatggatacctaatttcaactttatgtttcatataatatgcatcatttgaattacccaaattgcatgaaattttttgtgatgatgatgatgttgatgttgttgacgatgaaaaaataaagagactctccaggtaattattcaagtatatagccagattctacaatgtaacctaatgaattattatttacatttcattttgattgtgacagg

SEQ ID NO: 569845 - DNA, 580 bp, Homo sapiens
ttgcttttggattttattctctggttggtggagttatggatggattttaagcaggagggaggccacatggggtgtgaggtagagtcttgggccattcaaaggtatctggtttagtgccaggcacatgctggattctcagaaaatatcttttgaatgaataggatagtaaatatgtaatcattaaagasagtaagaaataaggtagatctctatgtgctgctgatatgggaagatgttcaacattactattaagtgaacaagagcaacttcagaccagtatataaagtatatttccatttgtgtttgaaaaaattacatatgtgtttatttctatgtgtgtgtggtagacagtaggcaggtggatggatgcatggatacctaatttcaactttatgtttcatataatatgcatcatttgaattacccaaattgcatgaaattttttgtgatgatgatgatgttgatgttgttgacgatgaaaaaataaagagactctccaggtaattattcaagtatatagccagattctacaatgtaacctaatgaattattatttacatttcattttgattgtgacagg

SEQ ID NO: 569846 - DNA, 580 bp, Homo sapiens
ttgcttttggattttattctctggttggtggagttatggatggattttaagcaggagggaggccacatggggtgtgaggtagagtcttgggccattcaaaggtatctggtttagtgccaggcacatgctggattctcagaaaatatcttttgaatgaataggatagtaaatatgtaatcattaaagacagtaagaaataaggtagatctctatgtgctgctgatatgggaagatgttcaacattactattaagtgaacaagagcaacttcagaccagtatataaagtatatttccatttgtgtttgaaaaaattacatatgtgtttatttctatgtgtgtgtggtagacagtaggcaggtggayggatgcatggatacctaatttcaactttatgtttcatataatatgcatcatttgaattacccaaattgcatgaaattttttgtgatgatgatgatgttgatgttgttgacgatgaaaaaataaagagactctccaggtaattattcaagtatatagccagattctacaatgtaacctaatgaattattatttacatttcattttgattgtgacagg

SEQ ID NO: 569847 - DNA, 593 bp, Homo sapiens
gagagaaaagagaaagcgggggaaagaatatatgcagaaataatgctgagaattttctaggattgaaaaaaaactgcattctcaaaaggagatgcayagagttttattcttcatttattgataaatatatctgtacctacattaattatagcaaaaatgcataatgtcaaagacagaaacagctaccagagagacagtttacctacaaaggaatggtgatttgactggctgcagaacatgaatgtcagaagacaatgtaataacacttcaaatgaaatttgacctagatatttacacctaacccaaaattcactcatgtgtaggcaagggcagaaggtataaaccaatcatctcttcaaagaataaatctaaaagaaatgaggtgggttacaggagcaatagtgggcaaaggaatttgtaaacgagttgataaatgttaaataattaggttttggttgtgtctgaaaaaatacagtaataataatgattaatatttggggaccagtagaaaactacctagaagattggtaggagtaattaatttggagtttaacacacttaatattatattattattcaagagaggaatagag

SEQ ID NO: 569848 - DNA, 516 bp, Homo sapiens
tatgcaatcacagagtaattaatcatcattttacgataattggagaagattttgtagaggagaaaatagttgagctgtgccttgaaagatatctaggaatttgctaggcagtcaaggatattacagtttgtgaaacctatcaaagagtgtcatgtggatagttctaataatatygagtactgctgcgcaactgaaggtggaaatgtagagtacgttgaggtagcatacaagagacaagactggaagggtaagcattgcttagagtcttgtatctcagttccagctttgatgcctcctaggttggtcacaatttttctccttctccccaggtactcactgctccagttgggtttattcagtctgttgagtgagatctaggcagtgagtgtttgaattagggcaggagtcatagggtttaaaaattagaaatagaatagggagagagtttggaggtaaaatttgttgggctcagtgactgatgaaatgtcagaggtgaaggagattgaagtatagcag

SEQ ID NO: 569849 - DNA, 574 bp, Homo sapiens
agttccagctttgatgcctcctaggttggtcacaatttttctccttctccccaggtactcactgctccagttgggtttattcagtctgttgagtgagatctaggcagtgagtgtttgaattagggcaggagtcatagggtttaaaaattagaaatagaatagggagagagtttggaggtaaaatttgttgggctcagtgactgatgaaatgtcagaggtgaaggagattgaagtatagcagatgatgccaagatttctaactgcagagagccaagtgggtggtgatgctgttacttaggatggaaaaagttggaagataattgaatcttgtgktctctaaattcatttcatatttccctgagttttaatgtaagggaaatatctttctactttgtttcacattaagtataaacagagctatcacagattgaagatatcaaaattatgcatattcatgtatgtacatgattagaaatatgtgtgattttatatattctcctagtagaatctaggatccattacagtgttctatagctgcagaaacttctagacatcatctaatcaagaagtcaaa

SEQ ID NO: 569850 - DNA, 610 bp, Homo sapiens
atcaaaattatgcatattcatgtatgtacatgattagaaatatgtgtgattttatatattctcctagtagaatctaggatccattacagtgttctatagctgcagaaacttctagacatcatctaatcaagaagtcaaaaatttgttcccaaagacctttttactttggtttcctttttttttttttaagccaaaccaaccatgaaaacaaacaaaaacattgaaaaggaaattattttggatgggtaccatttagcatccttatcctcttactttagaacctctgaactcatttaaatgagctacctgctctaacaggcacttgagttttctacccttgagctaattcaaccttctcattgactagatgtgaaactgggttagtttaacagactttggaaacaaggtatgaaggagggaaaaaacaggagcagtagttatacaacaaaatagttgcataacttatataaactataataattataagactataaaaatatttatkggagtaagatacttttaaacaagatgggatattttttcctgccccctccccaccacaccccccaccaaaaataaccgttttctattttttctgttcatgtagtgt

SEQ ID NO: 569851 - DNA, 615 bp, Homo sapiens
ttttatatgccatgctactcaggcgtgattgttgctttttagcgacagcaagttgaagtattgagctcatttgatatgtgttctgccagtcttcatgttatcacacaggctattaagtgccaaaaaaggcattagtttcactgaatatatttaatttttaaaagttagttttataaggttagtgaatgtaattttctctttcttcattataagcttttctagagaaggatattatttctacagaactaacataataccaaatacagttgtcttgatattgtggggggaggattggtttcaggatccccttaaatactaaaatccatgcatgctcaagtcccacagtgggytctgctgaaccacagatatgaaaagttgaccctcgtgtccacgggttttgcatcccaggaatactgtttttgatctgcgtttggttgagaatgaggaacctgcagatgtggagggcccactgtatttattgaaaaaaaagaatctgcatttaagcagacctgcacaattcaaacccatgttgctcgagtcaactgtgcaaagtaaggtgtggtatatatggttgcaggagtaattaatacatttaacagatatcagcaattggtg

SEQ ID NO: 569852 - DNA, 615 bp, Homo sapiens
ttttatatgccatgctactcaggcgtgattgttgctttttagcgacagcaagttgaagtattgagctcatttgatatgtgttctgccagtcttcatgttatcacacaggctattaagtgccaaaaaaggcattagtttcactgaatatatttaatttttaaaagttagttttataaggttagtgaatgtaattttctctttcttcattataagcttttctagagaaggatattatttctacagaactaacataataccaaatacagttgtcttgatattgtggggggaggattggtttcaggatccccttaaatactaaaatccatgcatgctcaagtcccacagtgggttctgctgaaccacagatatgaaaagttgaccctcgtgtccacgggttttgcatcccaggaatactgtttttgatctgcgtttggttgagaatgaggaacctgcagatgtggagggcccactgtatttattgaaaaaaaaraatctgcatttaagcagacctgcacaattcaaacccatgttgctcgagtcaactgtgcaaagtaaggtgtggtatatatggttgcaggagtaattaatacatttaacagatatcagcaattggtg

SEQ ID NO: 569853 - DNA, 615 bp, Homo sapiens
ttttatatgccatgctactcaggcgtgattgttgctttttagcgacagcaagttgaagtattgagctcatttgatatgtgttctgccagtcttcatgttatcacacaggctattaagtgccaaaaaaggcattagtttcactgaatatatttaatttttaaaagttagttttataaggttagtgaatgtaattttctctttcttcattataagcttttctagagaaggatattatttctacagaactaacataataccaaatacagttgtcttgatattgtggggggaggattggtttcaggatccccttaaatactaaaatccatgcatgctcaagtcccacagtgggttctgctgaaccacagatatgaaaagttgaccctcgtgtccacgggttttgcatcccaggaatactgtttttgatctgcgtttggttgagaatgaggaacctgcagatgtggagggcccactgtatttattgaaaaaaaagaatctgcatttaagcagacckgcacaattcaaacccatgttgctcgagtcaactgtgcaaagtaaggtgtggtatatatggttgcaggagtaattaatacatttaacagatatcagcaattggtg

SEQ ID NO: 569854 - DNA, 562 bp, Homo sapiens
atttgtttgaaatcaaaagatttagtcatatcctccctcccacaagctgttattgtccaaatttttacgtgtattaccagaatgtatttctggttagctttgctcacttttgagtttttatttgttgtgtattcgatacttgaggtagtttttggaggcaagctgtactgacattgttgcagctactcttccagttatttagagaccaggtagtgatcccaagtaagccaccagaagactgatctgtgatatccaygtcaggaaagacaaaattgttccccagttaaataaaaaattaagtaaataaaaatggaaaaactagcaccatcggacatcatgcccttttaaagaaattggggtttaaaagcaagttgtatttagattgaagggctatggggacaaaaatccaaaatctatccaccaaggagaggcaagttaaaggcttgaaagcaaagagtacaccacaggctggaagactcttggttgggagagaagggtcaggaaggagctcgggaagaatgattcttaaaaactagcaccaaggatgggtaggagcactagc

SEQ ID NO: 569855 - DNA, 584 bp, Homo sapiens
ggagagggatagcattaggagatacacctaatgtaaatgatgagttaatgggtgcagcacaccaacatggcacatgtatacatatgtaacaaacctgcatgttgtgcacatgtaccctagaacttaaagtataataatgaaaaaaaaaaactgcaaattcttttgttgatagataaattgggaataagggcctccctacattttatgtaatgctagaatgttcagtgcagatctacttgcaaataccttatgaaaagacacactgaaatgtgtcttcattaaaatgaaaataattctctaattttaggaagcaataatgtcatgtatttcagaaatttagacattaattacagttcagtgtgtgtgtrtgtgtgtgtgtgtgtgtgtgtgtgtgtttgagacaggatcttgctctgtcacccatgctgaagtgcagtggcatcatcattgtaaccttaaagtcctaggtcaagtgatcctcccaccttagtgtcctgagtatctggaaatacaggcatacactaccctgtctggttagttttttaaaaaattatagagatagggtcttgctatgttgcccaggc

SEQ ID NO: 569856 - DNA, 472 bp, Homo sapiens
ggcatcatcattgtaaccttaaagtcctaggtcaagtgatcctcccaccttagtgtcctgagtatctggaaatacaggcatacactaccctgtctggttagttttttaaaaaattatagagatagggtcttgctatgttgcccaggctcgtctcaaactcttggcctgaagagtttctcccacctcgggctcccacagcactaggattataggcatgacccactgtgcctggcctcaaattacagtttgatataaccaagccacmgtttcctagatgatagtgtgttaatctttaaaatgcagaagaaagcttgtttgaacctggaaatgtaactctagaccacaagaagatatggaataagacatttactaacacaatctattactgttttttcttcaaaaataagtataaaatatttttgatgcctataacttctttaattataaagacattaaacctcaaaatgaaaat

SEQ ID NO: 569857 - DNA, 456 bp, Homo sapiens
ctcccctttataaaaccattagatctcatgagactcattcactatcacgagaacagcacaggaatgacctgccccatgattcaattacttcccacccggtcccttccatgacatgtggaaatcatgggagctacaattcaagatgagatttgggtggggacacagccaaaccmtatcattctgcccctggcacctctaaaatctcatgtcctcacatctcaaaactaattatgccttcccaacaatccctcaaagtcttcagcattaactcaaaagtctaagtccaaagtcttacctgagaccacgcgagtccctcctgcctatgagtctgtaaaatcaaaaagcaagttagttacttcctaataaaattagggtacaggcattgggtaaatacagccattccaaatgggagaagttggctaaaacaaaggggccacaggccccatgtcagtctga

SEQ ID NO: 569858 - DNA, 456 bp, Homo sapiens
ctcccctttataaaaccattagatctcatgagactcattcactatcacgagaacagcacaggaatgacctgccccatgattcaattacttcccacccggtcccttccatgacatgtggaaatcatgggagctacaattcaagatgagatttgggtggggacacagccaaaccctatcattctgcccctggcacctctaaaatctcatgtcctcacatctcaaaactaattatgccttcccaacaatccctcaaagtcttcagcattaactcaaaagtctaagtccaaagtcttacctgagaccacgcgagtccctcctgcctatgagtctgtaaaatcaaaragcaagttagttacttcctaataaaattagggtacaggcattgggtaaatacagccattccaaatgggagaagttggctaaaacaaaggggccacaggccccatgtcagtctga

SEQ ID NO: 569859 - DNA, 623 bp, Homo sapiens
aattcttttttaagcctgtcagatttaaatggggaccaaaacagtaaaagatttggctgcaggtctgggctgtggtacaaacactgtcgccacctkggccatattggtttacaaacttatggtatctgttgtaaaaataaactaataagcaaacaaataagaaactactctggagttcaagacaagtccaatcagagtatcaaaacataaatacctataatcctgtagctagtctgtgatatttgtatcaaagagttaaacatttttcaaagagcagtattttgtgagctattgggtcctggtagagatggagaaatcaagtgacagtgtgactgaaactgcctactataagctgggttctgccagacccactatgtcttaaggctggccagtcccagcatcactgagttgtaaggtataagtaatatatccaggaataagaacaaggaggtacctccagatctccatgtgatctaataatgttacaccagtacctgttctccagctctcaaatatgaccatgtggaaagttttttatcatcagctaatcaaggagcaaaaaatgccaggttttgttcacagataggttggaataatagctgggtataactgggtacatgggt

SEQ ID NO: 569860 - DNA, 623 bp, Homo sapiens
aattcttttttaagcctgtcagatttaaatggggaccaaaacagtaaaagatttggctgcaggtctgggctgtggtacaaacactgtcgccacctgggccatattggtttacaaacttatggtatctgttgtaaaaataaactaataagcaaacaaataagaaactactctggagttcaagacaagtccaatcagagtatcaaaacataaatacctataatyctgtagctagtctgtgatatttgtatcaaagagttaaacatttttcaaagagcagtattttgtgagctattgggtcctggtagagatggagaaatcaagtgacagtgtgactgaaactgcctactataagctgggttctgccagacccactatgtcttaaggctggccagtcccagcatcactgagttgtaaggtataagtaatatatccaggaataagaacaaggaggtacctccagatctccatgtgatctaataatgttacaccagtacctgttctccagctctcaaatatgaccatgtggaaagttttttatcatcagctaatcaaggagcaaaaaatgccaggttttgttcacagataggttggaataatagctgggtataactgggtacatgggt

SEQ ID NO: 569861 - DNA, 526 bp, Homo sapiens
tcagagtatcaaaacataaatacctataatcctgtagctagtctgtgatatttgtatcaaagagttaaacatttttcaaagagcagtattttgtgagctattgggtcctggtagagatggagaaatcaagtgacagtgtgactgaaactgcctactataagctgggttctgccagacccactatgtcttaaggctggccagtcccagcatcactgagttgtaaggtataagtaatatatccaggaataagaacaaggaggtacctccagatctccatgtgatctaataatgttacaccagtacctgttctccagctctcaaatatgaccatgtggaaagttttttatcatcagctaatcaaggagcaaaaaatgccaggttttgttcacagataggttggaataatagctgggtataactgggtacatgggttgtggttgcactacagcctcactcaggggtggtcctgaaatgatcrctgaaggaaaaatccttccgtttggcatttcttcaagcaatgcatgca

SEQ ID NO: 569862 - DNA, 584 bp, Homo sapiens
ttatctactttatgaccttgcagcggcatggcaaaggagacaggatctcacaggattttacaaactgtgtataaaaggaattggaattgggaggatagataaggtctgctggtcacagaaaaatgggcctaaaattccttttagtttcaggggagggggaagggagagagggagagaggacacagagaagcttayaacaaaatttttgctgtttatagccttcttggggaagaaaacacatgaacaaatcctggtgttaggaatattttaagcatgtatctttcaatattattcatccaggaccaaagtaagtcctgatgcaggaaatacgtgagtttcacagctctctgagcccctactcgacccaggaagcccagctggcacctcctgtcattgtgtgctttttctaatgcctattattgactagataattcaatcaggaaaagcaatcctttgtttctgctgagctatattcttttttattggttctgatctgaaggaccaaaataaattcttttttttttttttttttttttttttgcttcctgccagttgttttactttattttccatttgattcaaca

SEQ ID NO: 569863 - DNA, 571 bp, Homo sapiens
aaactctggtatttggcattggtgaacatttcttggccatggttagttaggtactttctcagtccaatggatacatttctgcttgggcactttyctttcttagataatttacccttcctaagaggatggccattctacctagccctggaacatgcagttctgcacgcagttggtcacacaaagtagcaacacggcagctatgactatgacagacgaatgatcataaagtggtaccaactatgtgaataatctattgagcaatcaagctgtttgtgctttacggatactatgttgcatgcaactaaacacttctctctttgcactgtttgctgggaagcatagctctaaactatgtctcggctctaaaaagcaaactggatctcccagaaaagagtgtggtattggtctcattctcttttcctatcttccctccctgcctctgcacaacatgcctcaatttctcaattgagaaaaaaattttctcaatatttttctgagggtactgatctttcttcctcctgcctccatctttctaaaaacaaaagacacacaaaaatatgtgatgggcatg

SEQ ID NO: 569864 - DNA, 626 bp, Homo sapiens
tttggggttggtttgctctcgcttctttagttcttttcgttgtgatgttagattgtaatgagttctatagatgtctatcagattaatttggttcaatgttgagttcaggtcctgaatatctttgttaattttctgcctcaatgatctgtctgatactgtcagtggagtgctgaagtctcccactaagtctctttgtaggtaaagctcgctctatgaatctgggtgctcctgtgttgggtccatatatatttaggatagtcaggtcttcttgttgaattgaacccttcaccattatgtaatactcgcctttgtttttttttttatctttgttggtttaaaccctgttttgtctgaaattagrattgcaacctccgttgtctgatttccatttgtgtggtagattttcctccatccctttattttgaacctaagagtatcattgcatgtgacatgagtctcttaaagacagcatacctttgggtcttggttttgtttatccagcttgccactccatgccttttaaatgaggcatttagcctgtttacattcaaggttagtactgatatgtgtgggtttgatcctgtctttgtgttgttagctggttattataccagcttgttagtgtg

SEQ ID NO: 569865 - DNA, 576 bp, Homo sapiens
ttatctcatcagctactagacaaaaaggttgaaaattactaatattaaagtgagctattttctgtagattctaatttgagagtactaaatccttttgaacttataagtttttatctatgaaattagtgaattttgctctcagcctaacccractgttttatacatattaagctgatgcaaatctttatttttattaatactctttcctgaacagattagaaaccttaaagctggcccattggggaggcttcttatctgggcaggcacagatacagccagtagaaagggaagagaggtgcgcccctctcgatccatgggctcacccctcctgtgtaagcctctgaaaactaggccatattttacttctcaccattacaccttgtgattttgtaaaatgagtcagacagaaaacactgatgcagccctgtgatagccctgccgtggtctatttgttcttgaccagtaagggagccttgctttgagtatatttttaagtatgaatcattttcccaataaatggtagaaactgctaactagagatttactccactataaaaccttgctctgaaaagccaa

SEQ ID NO: 569866 - DNA, 487 bp, Homo sapiens
aagaaagataattctaagtttttagtctgtgccttgagaagtgaaattcagagctaacaggtattgttgacatgtatgacagtcatctgccgtatttttatratattaagctgttaattttagctgaataaactatgtgattttaaggtttatttttcaaactctccccagttagtcatgtaaacataaacattgacatcctgagagctataggcacacaggcattaaatatgatgtgtttctggtatccaatttccacttaaggacagtgtcatttgaaagaatcttttgttccccatgtacaatgaatagacttttgcctaggcagaaaatgacagaaaacataaattaactttaggaagaaaattatttaacatccctgtgacttactttcttctataaaatgaagatgatgaaagaaagtaccaatcacctatggtagttgtgagggttaaatgagttaatatatgtaaggcagataggataa

SEQ ID NO: 569867 - DNA, 487 bp, Homo sapiens
aagaaagataattctaagtttttagtctgtgccttgagaagtgaaattcagagctaacaggtattgttgacatgtatgacagtcatctgccgtatttttatgatattaagctgttaattttagctgaataaactatgtgattttaaggtttatttttcaaactctccccagttagtcatgtaaacataaacattgacatcctgagagctataggcacacaggcattaaatatgatgtgtttctggtatccaatttccacttaargacagtgtcatttgaaagaatcttttgttccccatgtacaatgaatagacttttgcctaggcagaaaatgacagaaaacataaattaactttaggaagaaaattatttaacatccctgtgacttactttcttctataaaatgaagatgatgaaagaaagtaccaatcacctatggtagttgtgagggttaaatgagttaatatatgtaaggcagataggataa

SEQ ID NO: 569868 - DNA, 564 bp, Homo sapiens
tttcttggtactcttcattcacagggctgaaaaatatttattcactttttttcctattttgaaagtagagtaagagaaggcatactggaatgactggattgataaactagtaaacctcaactgatacaaatttgaaaaatgttaagttgcatggtcacatatttcaaaggatttttacctaaaatacctcaaaactggactgtgttctctcatcagaattctagacaacatgtcaggagagagtgtctcctttttattattctattgccaacttggtatatgaccttgagaaaatgattcattctccatttcatttttcayatgtgaaatgttgatcaaaatcatggcactgttctactctgtggtttgttaggattttatgcatgtcgatactttttaaaagttctaattatcatggtcttcaatgctcttgagatgattcatcttgaatccaaggatacttctttagatagaatagtaattataagcctgtaattgtgatctactgtctgaaaatataagtagtgtattatggaatatgtagattttcataataatacttta

SEQ ID NO: 569869 - DNA, 554 bp, Homo sapiens
ctatgctctctctccaaatttgtcacctggctacctctgggaattaattcaagtgtctgctcaaaaaataaccctttaggaaggactgaccgccctagttaatataccctcctccctttccttcttctcttcatctctttgttctgtattttaccttgttctgttattgctgtgttttwaaaaaatttttattatatagcatttataaatatgcttattttctatctctttccaccagaatgtaaatactataaaatcaaggactctctttttttcactgttgcatcctcagagcctagcaaggtgtctggcacataataaaggatttagaaaatatttgtaagtgactacattatttccacatttcataaatcctaaaagagacattacctttctttataaagcagctgtttccccaataaccacattatgcctgtcgttctttcacttttctaaattaaagactttagaatgatggaattattgatatagtttggctctgtgtccccacttgaatctcatctcaaattgtaatccccacatgtcatgggagt

SEQ ID NO: 569870 - DNA, 554 bp, Homo sapiens
ctatgctctctctccaaatttgtcacctggctacctctgggaattaattcaagtgtctgctcaaaaaataaccctttaggaaggactgaccgccctagttaatataccctcctccctttccttcttctcttcatctctttgttctgtattttaccttgttctgttattgctgtgtttttaaaaaatttttattatatagcatttataaatatgcttattttctatytctttccaccagaatgtaaatactataaaatcaaggactctctttttttcactgttgcatcctcagagcctagcaaggtgtctggcacataataaaggatttagaaaatatttgtaagtgactacattatttccacatttcataaatcctaaaagagacattacctttctttataaagcagctgtttccccaataaccacattatgcctgtcgttctttcacttttctaaattaaagactttagaatgatggaattattgatatagtttggctctgtgtccccacttgaatctcatctcaaattgtaatccccacatgtcatgggagt

SEQ ID NO: 569871 - DNA, 554 bp, Homo sapiens
ctatgctctctctccaaatttgtcacctggctacctctgggaattaattcaagtgtctgctcaaaaaataaccctttaggaaggactgaccgccctagttaatataccctcctccctttccttcttctcttcatctctttgttctgtattttaccttgttctgttattgctgtgtttttaaaaaatttttattatatagcatttataaatatgcttattttctatctctttccaccagaatgtaaatactataaaatcaaggactctctttttttcactgttgcatcctcagagcctagcaaggtgtctggcacataataaaggatttagaaaatatttgtaagtgactacattatttccacatttcataaatcctaaaagagacattacctttctttataaagcagctgtttccccaataaccacattatgcctgtcgttctttcacttttctaaattaaagactttagawtgatggaattattgatatagtttggctctgtgtccccacttgaatctcatctcaaattgtaatccccacatgtcatgggagt

SEQ ID NO: 569872 - DNA, 517 bp, Homo sapiens
acatggtgttgtgtctatgggtaggcaggagacaaaagtttagctttgggagcctcagcctatatttcagaggatgtatggaaatgcctggatgtccaggcagaagtctgctgcagggacagagccctcgtggagaacctatactagggcaatgcagaagggaaatgtaggactggagcccccacacagagtccccatyggggcactgcctagaagagctgtgagaaggttaccatcctccagaccccaaaatggtagatttactaacagcttgcactatgcacttggaaaagccacaggcactctatgccagcccattaaatcagctgtgggggctgtaccctgaagagccacagaggcagagctgcctcaggccttgggaacctatgccttgcatcagtgtgccctgaatgtgagacatggagtcaaaggagattattttggagctttaagatttaatgaatgccctgccagctttcagacttacatggggcctgtggcccctttgttttggcca

SEQ ID NO: 569873 - DNA, 517 bp, Homo sapiens
acatggtgttgtgtctatgggtaggcaggagacaaaagtttagctttgggagcctcagcctatatttcagaggatgtatggaaatgcctggatgtccaggcagaagtctgctgcagggacagagccctcgtggagaacctatactagggcaatgcagaagggaaatgtaggactggagcccccacacagagtccccattggggcactgcctagaagagctgtgagaargttaccatcctccagaccccaaaatggtagatttactaacagcttgcactatgcacttggaaaagccacaggcactctatgccagcccattaaatcagctgtgggggctgtaccctgaagagccacagaggcagagctgcctcaggccttgggaacctatgccttgcatcagtgtgccctgaatgtgagacatggagtcaaaggagattattttggagctttaagatttaatgaatgccctgccagctttcagacttacatggggcctgtggcccctttgttttggcca

SEQ ID NO: 569874 - DNA, 517 bp, Homo sapiens
acatggtgttgtgtctatgggtaggcaggagacaaaagtttagctttgggagcctcagcctatatttcagaggatgtatggaaatgcctggatgtccaggcagaagtctgctgcagggacagagccctcgtggagaacctatactagggcaatgcagaagggaaatgtaggactggagcccccacacagagtccccattggggcactgcctagaagagctgtgagaaggttaccatcctccagaccccaaaatggtagatttacyaacagcttgcactatgcacttggaaaagccacaggcactctatgccagcccattaaatcagctgtgggggctgtaccctgaagagccacagaggcagagctgcctcaggccttgggaacctatgccttgcatcagtgtgccctgaatgtgagacatggagtcaaaggagattattttggagctttaagatttaatgaatgccctgccagctttcagacttacatggggcctgtggcccctttgttttggcca

SEQ ID NO: 569875 - DNA, 536 bp, Homo sapiens
ttgcctcttttttaggaatttatagatgagggattttttttccttcagtcattttttttccctaaaaatctgttaagtgktatttaaatataagactctctatcttaatagcagacttttaaagtgtcctgagtagcaaaagtaaatacttaaaaatgtattgaaacaaaaatagaagtaaaaggaaataaaaataacctctaccaccattgtttaaatgtacagaattgtcatctcaaccacccatatttacttggtatgaactcctgtttattattaagattcttgattcttaacgtatggaatttagaactataaaatggacagtcttaatattacttcacctcatacatcttttaaactgtttaaatctagagtaaatggttacacaaaacacatgtgaagttggggctgattctcttcctttggtatggaaaaaagaacagcaaccatgaaataagaattgtatatgatccatgaaaaggaaaggaaaaattaagctaataactatcagtgagatctataaacccatttcc

SEQ ID NO: 569876 - DNA, 578 bp, Homo sapiens
gcccacataaatgagaaagaaccagtgtaagaactcgttcaactctggcaactcaaaaagccagagcactttctttcttccaaatgaccacacttgttccctagcaagggttctcaacaaggctgaaatggccgaagtgacagaaatagaatacagaatatggatgggaatgaagatcatcaagattcaggagaatgtagaaactcaatccacagaatctaagaatcataataaaatgatacaggagctgatatacaaaatagccattataagaaagaaccaaactaatctgatagagctgaaaaatacacaagaattgcataatgcaaatgttattaacagcagaatagaccaggctgaggaaaaaatttcrgagctcaaagactggccctctgaaattactcagtcagaccaaaatgaagaaaaaagaatgaaaaataatgaacaaatcctccaagaaatatgggattacatataaagaccaaatctatgattcactgatgtccctgaaagagggaaaaaacaagcaacttagaaaacatatttcaggtatcatccatgaaaactttcccaacctt

SEQ ID NO: 569877 - DNA, 527 bp, Homo sapiens
  misc_feature 270, 274: n = A,T,C or G
aagtgaaggagaaataagatcctttttcagagaagcaaatggtgaaataatttgttacgactagacctgccttacaggagctgctgaaggaagctctatggaaaggaaagaccgttaccagcaagtacaaaaacacacttaagtacacagacaagtaaactataaagcaaccacaaaaaagagtctgtatttaacatcaacaactaccatcacaatgacaggatcaaatccacatgtatcaaaactaaccttcagtgtaaacaaaagggngggnctaaatgcccccatttaaaaggcacagagtggcaaggtggataaagaaaygagaccaaatgttatgctgtcttcaagagacccacctcatatacaataacattcttaggctccaaataacaggatgaagaaaaatatacaaagcaaagaaaacacagaataaagcagagattgtaactgtaatttcacacaaaatagactttaaaccaacaaagaccaaaaagacagtgaacagcattatataatggtaaagg

SEQ ID NO: 569878 - DNA, 569 bp, Homo sapiens
tatatgtgcacccaatataggaacacccagattcacaaagcacattcttagagacttatgaagagatgtgaattcctgcacaacaatagtggaagtcttcaacactccactgacagtattaaacatatcatggaggcagaaaattaacaaaaatattcaggacttgaackcaatacttgcccaaatggacctaatagacatctacagaactctccacctaaaagcaacagaatatacattcttttcatcacatggtacatattctaaaatggtacacactctaaaatcagacataaaatagtactcagcaaatgtggaaaaacaaaaatcacaccaaacacagtcttgggctacagtgcagtaaaaattgaaatcaataccaagaaaatccctcaaaataacacaattacatggaaattaaacaatctgctcctgtatgacttttggaaaataatgtaattaaggcagaaatcaagaaaatctttgaaactaataagaacaaagatacaacataccagaatctctgggacacagctaaatcagtattaagagagaagtttctagtacta

SEQ ID NO: 569879 - DNA, 569 bp, Homo sapiens
tatatgtgcacccaatataggaacacccagattcacaaagcacattcttagagacttatgaagagatgtgaattcctgcacaacaatagtggaagtcttcaacactccactgacagtattaaacatatcatggaggcagaaaattaacaaaaatattcaggacttgaactcaatacttgcccaaatggacctaatagacatctacagaactctccacctaaaagcaacagaatatacattcttttcatcacatggtacatattctaaaatggtacacactctaaaatcagacataaaatagtactcagcaaatgtggaaaaacaaaaatcacaccaaacacagtcttgggctacagtgcagtaaaaattgaaatcaataccaagaaaatccctcaaaataacacaattacatggaaattaaacaayctgctcctgtatgacttttggaaaataatgtaattaaggcagaaatcaagaaaatctttgaaactaataagaacaaagatacaacataccagaatctctgggacacagctaaatcagtattaagagagaagtttctagtacta

SEQ ID NO: 569880 - DNA, 579 bp, Homo sapiens
tataggaacacccagattcacaaagcacattcttagagacttatgaagagatgtgaattcctgcacaacaatagtggaagtcttcaacactccactgacagtattaaacatatcatggaggcagaaaattaacaaaaatattcaggacttgaactcaatacttgcccaaatggacctaatagacatctacagaactctccacctaaaagcaacagaatatacattcttttcatcacatggtacatattctaaaatggtacacactctaaaatcagacataaaatagtactcagcaaatgtggaaaaacaaaaatcacaccaaacacagtcttgggctacagtgcagtaaaaattgaaatcaataccaagaaaatccctcaaaataacacaattacatggaaattaaacaatctgctcctgtatgacttttggaaaataatgtaattaaggcagaaatcargaaaatctttgaaactaataagaacaaagatacaacataccagaatctctgggacacagctaaatcagtattaagagagaagtttctagtactaaacacccatatcaaaaagttagaaa

SEQ ID NO: 569881 - DNA, 619 bp, Homo sapiens
attgaaactggacctctagcttccatcttatatcaaaaatcaactcaagattgattaaaaagttaaatgtaaaacctaaaactataaaactcatggaagataacctaggaagtagcattctggacaaaagaatgggcaaagatttcatgacaaagacacaaaaagcaattgcaaaaaaatcaaaaattggcaactggtatctaattaaactaaacagcttctccacagcaaaatagactatcaacagagtaaacacacagcttacagagtaggagaaaatacttgcaaactatgcatctgacaaatgtctaatttccaraatctgtaaggaactttataagcaaaaacaacaaacaatcacattaaaaagtgggcaaaggacataaacagacacttctcaaaagaaaacaaaggatataaacagacacttttcaaaagaaaacatgcatgcagccaatacgcatataaaaaatgctcaagatcactaatcattacttaaaccaggggtgttgaaaaactaactgctgagtactatactcatcatctgggtgataggatctttcatatttcaaacttcagtgtcatgtaatacacccatgtaacaaacctgcacatgaac

SEQ ID NO: 569882 - DNA, 619 bp, Homo sapiens
attgaaactggacctctagcttccatcttatatcaaaaatcaactcaagattgattaaaaagttaaatgtaaaacctaaaactataaaactcatggaagataacctaggaagtagcattctggacaaaagaatgggcaaagatttcatgacaaagacacaaaaagcaattgcaaaaaaatcaaaaattggcaactggtatctaattaaactaaacagcttctccacagcaaaatagactatcaacagagtaaacacacagcttacagagtaggagaaaatacttgcaaactatgcatctgacaaatgtctaatttccagaatctgtaaggaactttataagcaaaaacaacaaacaatcacattaaaaagtgggcaaaggacataaacagacacttctcaaaagaaaacaaaggatataaacagacacttttcaaaagaaaacatgcatgcagccaataygcatataaaaaatgctcaagatcactaatcattacttaaaccaggggtgttgaaaaactaactgctgagtactatactcatcatctgggtgataggatctttcatatttcaaacttcagtgtcatgtaatacacccatgtaacaaacctgcacatgaac

SEQ ID NO: 569883 - DNA, 619 bp, Homo sapiens
attgaaactggacctctagcttccatcttatatcaaaaatcaactcaagattgattaaaaagttaaatgtaaaacctaaaactataaaactcatggaagataacctaggaagtagcattctggacaaaagaatgggcaaagatttcatgacaaagacacaaaaagcaattgcaaaaaaatcaaaaattggcaactggtatctaattaaactaaacagcttctccacagcaaaatagactatcaacagagtaaacacacagcttacagagtaggagaaaatacttgcaaactatgcatctgacaaatgtctaatttccagaatctgtaaggaactttataagcaaaaacaacaaacaatcacattaaaaagtgggcaaaggacataaacagacacttctcaaaagaaaacaaaggatataaacagacacttttcaaaagaaaacatgcatgcagccaatacgcatataaaaaatgctcaagatcactaatcattacttaaacmaggggtgttgaaaaactaactgctgagtactatactcatcatctgggtgataggatctttcatatttcaaacttcagtgtcatgtaatacacccatgtaacaaacctgcacatgaac

SEQ ID NO: 569884 - DNA, 593 bp, Homo sapiens
tatgaaattaggaggaaatgtcaagcatgagattgtagggcattgcaagtagcaatctctgaaactgagatatctctagatatcagggaagtctgggttaccatgtttcaagtttttgacctccccaaactatagtcacctgatatattcatgccatatatttaaaaatgtaccaagactctcaccataattggggagcaactcataagatcaaggttgatcccaaggtccataaataataaagtagcaaatatattactgaagaggattagacacagagaaaaacgtcactggagttggcaaactaaagactattccttgacacccagactggagcctaagtattaaaactgggtatgttttaatagatttggcattagagctagactaggcaatttttatatttattyatagagaaagataacaaggaatgtctgattcctgtgtcaggtactgggatactgagatgaacaagacacaaattcaaaataggtttgaaaactgaatatatgtatagaaccagctcaattagagacaaattggtgtctgtattaaaatggttttttgttcctttaccagtactagtaggaaaa

SEQ ID NO: 569885 - DNA, 604 bp, Homo sapiens
tcaatttggtaatagctaactaattagagattaaaatggttctctgcaatagttatttgcattatgataacatacccctgaggaatgacaaatcgtgaaaatccagaagaatctttcagaatgtcaggtgccattgggggagagaagagggaaagtagaggggagatttggggacagcaaacccttgcaggcaccactctaagatcaccaactaggtcagtctcaggaaggaacatgcacccaatggtgatttgcccaccgaggtcacctgtattcttcttcttatatagcttgtcactctgtgtccacatgataggactgtatgaactccacatgtcacatcgcccgttgtcacattgcttaactaataggatgatacacttaaaatatttcacagcctcagcctttcctacagcctaagtggattttattttggttcattttccagaataaaatctagggtgatgtgaggatattggcaggatggtcacaggaaaacaaatgtgcctttttagaatggtgtcagctgcaattatttgaacytgtctttttttacagagctgttattgactggtgtgcttctcaaaaaatgtgtattaagcag

SEQ ID NO: 569886 - DNA, 550 bp, Homo sapiens
caatttttaatatgctggtgggccatcaatcaaaatttaacacacttaagaaattattgttaaaaaatgtatatggtaagtggataagtcagaaagtcatagaagagatttaagaaggagaagtaaaagggaacatacaaaccagagcttaccaagcgttttttagaaaaggccaaacaataaatattttcagctttgtgggccaaacagtctgtggcatgaaaactcaatgccatttcacccaagggccatagttttctaaccmcttttataaataaacttatttcacagttgaagaatttgagtcccagaagtgtcaggtatactcaaatcacactgtttaataagaattaagacagatcgggtattcacattcttacactataatgcatttgttatatctcaggattttagaaaataatgagggtttgaaaaacctcttttccgaatcctttagtttaaaaatgaggaaggcgagtcccagaaggagtgtggattgtccaagctctttaatgttaagggtgggattacagcacaggcctcataacat

SEQ ID NO: 569887 - DNA, 441 bp, Homo sapiens
tcatgaaaatgaataaatcgtatgatagtccacctgaaaaagaggaattgatggcttatgaattgaactaaaatattttcattgaattaaatcttaatctaattacactacttctaaatatatatagatatatggatctttatagatatctctcaatatatagatcaatcratcagtggtaaaatatttgagttccaaatgactcttcaaatggataagaacctcacgagtcacatctccatcatcctggctaaatatttggaattagaatttaaatgacaattttatcaattcagctaataaatttatttcattaaaaacatgtgggcccttactagctcactcccctcacatcccataacagctttggttcgcctgttgattttcattgtaccgtccttttacttgccataccatacatttacaacactcgtttatctg

SEQ ID NO: 569888 - DNA, 619 bp, Homo sapiens
gagcctaccaagaacactggaaccaggaagctgaacccttttgtccttgaagtatctccccaataccttctgccaacaaagtttcagtgccagtcaacccgatccacttttacagagcagttaaaagagtaaattttggactgagagggaataaatcaattatccatacagattccaaaccaaatcctattctgggatccagagatataaaggtgaatagcaaagtcttctccttctttggattaactcttggtccaaacagatgcattcaaaaatcagcatgagaaactgcattttgagtaagaataaaatacttggggaacattgaggatggaggaatatgtttggcyggtagcatcccagaacttcctggacactataacatgagagccaagttgttaagtttgagtaggtatattacaagtgaggaaggaagggtaaagacagctactgctgagggaaggacctgtatagaagacaaggaatttagaaagacctttgtacagtaataaggggagtgtggcaataacagaggatttatgggacaaggaactggataattaggaggaaagctggaagatgtgtttggaaagaagagatggggatagatagtaaataa

SEQ ID NO: 569889 - DNA, 626 bp, Homo sapiens
tttatttcctctaatttaacaaaatgattgactataacttatagctcatatatagagagatttacagagctacagtgaatagaatgcagtggaagattataagtattgttgaatcamaatttaggtaattctccttggactacttttggatcaagtgtatgcatatgtcagtatttacaccagtggcatgtcacacaaaaatgaagaaaacaatatttatatttttattattcctattcttttgactgatctctgaatgcctgggatagaagtagaactcaaggctgacttcttaaaagatatcatgaaatgacatgtctgaccacggttacagttaaaattatatcttatattttccaatgttagaagataagaaaattttaatattttgtagtttataagatagattgttagagcttatcatttattgtcttattgtttagattgactaaagaatcagggaaaattgaaaatcgccatggatgtaaattatttgaaaagttgcatagggaatttgtcctgacattctagatttgttttttctttactacatggctaattcttcgctatgatgcaatgatgtgtttatcctttgagatggatttctgacagtcttttgttaccac

SEQ ID NO: 569890 - DNA, 538 bp, Homo sapiens
agaaaattttaatattttgtagtttataagatagattgttagagcttatcatttattgtcttattgtttagattgactaaagaatcagggaaaattgaaaatcgccatggatgtaaattatttgaaaagttgcatagggaatttgtcstgacattctagatttgttttttctttactacatggctaattcttcgctatgatgcaatgatgtgtttatcctttgagatggatttctgacagtcttttgttaccaccctgttagtgcaaattttactgcctaaaagtaatgctttgtaaccagtttcagctgaagacaggtgcattagtcatgcctttttacgagtttcatagtaagtataagtagaaaaagtgtggaaattacaccacaggaaccaattcccttggcaatatttcagagcactctggggattctgggagggaagtagtactaatatattagactctcttgacacattcaagatcttttactttaaaccagacataaatttctactaacttacttttttaggtcacacaa

SEQ ID NO: 569891 - DNA, 538 bp, Homo sapiens
agaaaattttaatattttgtagtttataagatagattgttagagcttatcatttattgtcttattgtttagattgactaaagaatcagggaaaattgaaaatcgccatggatgtaaattatttgaaaagttgcatagggaatttgtcctgacattctagatttgttttttctttactacatggctaattcttcgctatgatgcaatgatgtgtttatcctttgagatggatttctgacagtmttttgttaccaccctgttagtgcaaattttactgcctaaaagtaatgctttgtaaccagtttcagctgaagacaggtgcattagtcatgcctttttacgagtttcatagtaagtataagtagaaaaagtgtggaaattacaccacaggaaccaattcccttggcaatatttcagagcactctggggattctgggagggaagtagtactaatatattagactctcttgacacattcaagatcttttactttaaaccagacataaatttctactaacttacttttttaggtcacacaa

SEQ ID NO: 569892 - DNA, 549 bp, Homo sapiens
aactttccttttttctcctactgagttcattttatccttatctgatgaacatatagttgccattagatttttttcaatgtcaaagttggaaaaaatagtatttttggtgtagatatacagaagagtgaaataaacattatctttctagtataaatgtatcatctgtatcttaatcttgctttcctttgattattaaatgtgtcraaagatggcattttatagaaatcaggtggcattttatagaaagacgccacctgatttcattggtccaagattaaatacctctgtggaaaacaatgttatttccaacagaatcaaagaaccagaaatatttacaaactgaggtcgcaagtggaatgccagaaaataaggccccactctttctcttcacatctaccccttacccccatttcctcacatctctttcttatgctgttattctcactttctcgctatggaacctggttttattagtctactctaagtgccctcttaaatgtcaccagagatttgctagttacctcatgaaatggtccttttatttttttc

SEQ ID NO: 569893 - DNA, 579 bp, Homo sapiens
tggtattagctctggaaaatacactaatttcactttctggggaaaaaaatccttttcttcctttgtctcctaatttttgagaagcactcaagtctcaccagtgcactgcttctgaggagttatatggcatactgcagaataaaaaagggggcaaaatcctaaatgactctaccttcagctctgarcaagactactctcagacaagcctagacagaaacaaaaaatccttaccataagaaccacatcctccaatgtgtgaggagcccttttctccctcatgtaatttaattctctctttccattctttattgacctcaagcactcaagatgccctttaaactcaatagtgccttctcaaagagaaaggttaagtgtttattttaaactcctaaagaagtaaaatattgagtaaattctacatacatttgacctgctccactatttttgctatagggttcatgagaaactgtgatcaacctgctctttttctttttgagtactggatttattttggtagaaacttcaatacatatttatacttcagatggtgactctgaaacactaaattgtgtgattccc

SEQ ID NO: 569894 - DNA, 588 bp, Homo sapiens
gagactctgacttcctccttccccaaccatgtcactagagtgactgtgatggaagccctggtccctcctgcactgtttctactcagctgtgcaaaaatctgctgccttccacaatgaagccattctctaagaccagccagagtcccacctactgaaagactgtaatgaagtcattcctaattatgccttccagttagcactgtcttcagcacacaattgagcaattactgcttcatgcatacatcttaccttcctgggtggactgcaagacatcaaggataagaactatgttttgccttctataatgtaayttaaagtgcccaataatgatggcatagcaggcactcaatatatattaaggggcaaatgcagctcagcttgaactttcactgggctgaagttgcttagtgtcaatttttctgcttagaatcaactcataagagagagaaaagaaaaaaaaaccctgcagaggcatttttgcctaagaatgtggataaaaagacatgctgcactgtctttcatccatctacttgtgcagcctgccctacaagtccacttaaaccctgtccattttgcctttgcttgaac

SEQ ID NO: 569895 - DNA, 588 bp, Homo sapiens
gagactctgacttcctccttccccaaccatgtcactagagtgactgtgatggaagccctggtccctcctgcactgtttctactcagctgtgcaaaaatctgctgccttccacaatgaagccattctctaagaccagccagagtcccacctactgaaagactgtaatgaagtcattcctaattatgccttccagttagcactgtcttcagcacacaattgagcaattactgcttcatgcatacatcttaccttcctgggtggactgcaagacatcaaggataagaactatgttttgccttctataatgtaacttaaagtgcccaataatgatggcatagcaggcactcaatatatattaaggggmaaatgcagctcagcttgaactttcactgggctgaagttgcttagtgtcaatttttctgcttagaatcaactcataagagagagaaaagaaaaaaaaaccctgcagaggcatttttgcctaagaatgtggataaaaagacatgctgcactgtctttcatccatctacttgtgcagcctgccctacaagtccacttaaaccctgtccattttgcctttgcttgaac

SEQ ID NO: 569896 - DNA, 590 bp, Homo sapiens
acacattggggaatgaacagtctcttcaataaatggtcctggaaaaactggatatccacatgcagaagaatgaaactagatccctatctctcaccatatgcaaaaatgaacttcaaatggattaaagacttaaacataagacccaaaactatgaaagtactagaagaacatataagggaaatgcttcattacattgatctgggcaataattttttagtaaaacctcaaaagcacaggcaacaaaagcaaaaataaacaaatgagattatgtcaaactcaaaagcttctgcccagcaggggaaacaatcaacatagtgaagagacagcctgcagaatgggagaaaatattctcaaattatacatccaactgggcattaatgtcyggtctatgtaagaaactcaaacaatccaacagcaataaaaaaacaaataacttgatttaaaaatgggctaaagatctaaatagtcatttctcaaaggaagatttagaaatgggtaacaggtatataaaaaatgtttttatcactaattatcagggaaatgtgaatcagaaccatgatgagatttcacctcactccagttagaattgc

SEQ ID NO: 569897 - DNA, 596 bp, Homo sapiens
aatcataccttggctattgtaaatagtgctgcaatgaaggaatggattaaaaatgtggaatatatacacaatgaaatactttttagctctaaaaaataaaatcctggcatttgtgacaacatggataaatctggaggacattaagtgaaataagtcaaacataaaaagctacatactgcatgatctcacttatatgtgaaatgtaaaattttgtttcataaaaacagagagtagaatattggttaccaggagctggagagggtaggagaaagggagggatggggaaagatacaaagtgacagttagagaggaaaaataagttttggtattctatttcacattttaggtaaaaataatatatatttcaaaatagcaaaaagaggatttgcatgttgtcaccacaaagaaatgataaacatttatggtaatagactgctaattaccctgatttgaacattacacatgtatatatatgtattgaaacatcacattttacttcataaatatgtacaattatacatcaattaaaagaaaaacttaaaaaattttgraaaaaaaaaccaaggattgaaaatccattaagtaaacagtgtcat

SEQ ID NO: 569898 - DNA, 556 bp, Homo sapiens
agtccaggcagccagtgctaggtcaacagttgtctttgaatcataaactctgaaggtgttcaagaggcttaaaagataatgatgtgctctaaccaccaaagamacaaagaactcaaaaatatttgagattcaaagaaagaaaccagcagtgccagttgtacaaaagcctatgtagtcatcttgcactgtgagaagtgctaaaagttagtgtggaaaattgggtacttggatataccaaaatgtaattataagtgattgccttttgtcataatgtgggaaaggtaaggcagaagattgaggaagaagatcagagagctcaatgaggaaacagatgaactgagtcaatgtgtcatttacttaaatggagattatacattcttttaaaaacgtactagtactttctacctatgcacacctttaaaagggaaataattttaaaaacgacagaactccaatacaagtatttttattaatgataattactaagaatgatttgatgtagaagccaagatacttcattgttctgaaagtttatggcttttgtaaagaaagaaaa

SEQ ID NO: 569899 - DNA, 649 bp, Homo sapiens
gagggacagtgatggacaggctctctatccagaagtcttagataactatacttgatgattaaaagaaaaaaaaacaattttttgtccacatttgggtttctaccaaggagtttaggttttctaggtgctctgagtcagccccagaggaatggagggacacacttcattgatgtttagagctctctttgtttgatatccacattttcactcctgggggcatgatggttcttgcagggaggagaaaggctctgactgtggttatctggaaaccatccttccttcccacrgtagagtgatcctggtgaaacttttaagcagtcaaaatgcatgctgatgtttgctgagattctggttttgactctttaggatgtgtttctgtatttcttctcatccacaggacattaactagggagatctctgaattttgaatacaaagtaaggttggaagtgaactttactattgtgatttttttgtgatagaggagagaatggtaaagacattaaactttagattgttcagaggttgaaggtcactgggttaattatattggatttggagaatgacgcaataaaaataaattcatttctattttatgagttataagattcagtcactctgaccttctttttttatgtaaagtacatgcac

SEQ ID NO: 569900 - DNA, 641 bp, Homo sapiens
ctttggggaaatgtattgcttaatttagacgtgctgtcaattttctttctctatctatcctcctaatctctgatttataactccgttttcttatttgaaatgaagaggtttgggctaaatctatcttcaatctagttatctttcaacaaatatatattgaatgcctattttgtgttaggcactgttcaaactgaagcaatgaatatagcataagacctccaggtaacggggggaggagtcacagatagcaagcaaaagagtaataatttcagatcataaagactgtgatagaagactcttctcgcaggaggctttgctgtggtttgcagctgtgctggttatcacgcagtcattaaagcatgcaggagcattttggcagcagcaaacctttggatagctttctactatcacagaaatacaaacagggatacaaagtgaatggggtcggagtgcacactggtaagattggccagaaaaaggctttatgaggccccagtgatgacagcaagataaygtcaaaaatcttaaggaggagtgctagagaaaggaccagttgagtgcaaagtccctagaagggatccagcatggcacatgcaagtcacagaaaaaaagccagcaagtctgaaacagaatcacaagag

SEQ ID NO: 569901 - DNA, 582 bp, Homo sapiens
gtaattgctatcagctggggacagttttgttcccaatggagtaattagcaatgtctggagatagttttgatttctgcagctggggttagggtgctactagcatctagttggaagaggctggcaactctgttaaacatcctgcagcaaaactggatgtacaggacatctccctacaataagaacgaatggcctcaaaatgtcaatagtgctgaggttaagaaccccttactttygctcattttaatatattacaaataattttggctttctgaaagaaaataactatcacatggatagggatatgctttttaaaaggagatggatgaggggaatgagctcacataggttaagagttcttcaatttttggtgctttttatttgcatttttctactttttccaaaataattgtatattcactagtattatttgatcataatgagctgcttattctcctctttctgaggtgtttttaacctgctgaatattggtgacctctttatccttctgttggggctcaagaatcctccatggagaagctcttgggaagtcacatgtctcccagactgtgctctcacacgtat

SEQ ID NO: 569902 - DNA, 561 bp, Homo sapiens
ctattttgttttatgctcagttgatgggagaaaagaatattttcatcaaacaatcgaaatgaatgaatttaaaggtatgatgtaatcacctagaaaaatgacattaaaagcagtcttgaaaatgagcattrtagcacaccagcatggcacatgcatacatatgtaactaacctgcacattgtgcacatgtaccctaaaacttaaagtgtaataataataaaaaaagaaaatgagcattatagagatgatatctttgtcattattgcatacattgactaatattcattattaaatcatgatggttccaggcttggataaaattccattaggatgaatatatccctgggggttgatatttgaagaggctgagctgtttggtaacttactgcttgcttaattttttttcttattgtttctacttttcagacccactatgaaaatggagaatatattatcaggcaaggtgcaagaggggacaccttctttatcatcagcaaaggaacggtaagctttggtggcacaagacagtgatgcactaggggagcctggggttggttagta

SEQ ID NO: 569903 - DNA, 561 bp, Homo sapiens
ctattttgttttatgctcagttgatgggagaaaagaatattttcatcaaacaatcgaaatgaatgaatttaaaggtatgatgtaatcacctagaaaaatgacattaaaagcagtcttgaaaatgagcattatagcmcaccagcatggcacatgcatacatatgtaactaacctgcacattgtgcacatgtaccctaaaacttaaagtgtaataataataaaaaaagaaaatgagcattatagagatgatatctttgtcattattgcatacattgactaatattcattattaaatcatgatggttccaggcttggataaaattccattaggatgaatatatccctgggggttgatatttgaagaggctgagctgtttggtaacttactgcttgcttaattttttttcttattgtttctacttttcagacccactatgaaaatggagaatatattatcaggcaaggtgcaagaggggacaccttctttatcatcagcaaaggaacggtaagctttggtggcacaagacagtgatgcactaggggagcctggggttggttagta

SEQ ID NO: 569904 - DNA, 561 bp, Homo sapiens
ctattttgttttatgctcagttgatgggagaaaagaatattttcatcaaacaatcgaaatgaatgaatttaaaggtatgatgtaatcacctagaaaaatgacattaaaagcagtcttgaaaatgagcattatagcacaccagcatggcacatgcatacatatgtaactaacctgcacattgtgcacatgtaccctaaaacttaaagtgtaataataataaaaaaagaaaatgagcattatagagatgatatctttgtcattattgcatacattgactaatattcattattaaatcatgatggttccaggcttggataaaattccattaggatgaatatatccctgggggttgatatttgaagaggctgagctgtttggtaacttactgcttgcttaattttttttcttattktttctacttttcagacccactatgaaaatggagaatatattatcaggcaaggtgcaagaggggacaccttctttatcatcagcaaaggaacggtaagctttggtggcacaagacagtgatgcactaggggagcctggggttggttagta

SEQ ID NO: 569905 - DNA, 428 bp, Homo sapiens
cttaaacgtcatgtgactcctggtctagaggctgaattaaatatgttgtgtttggggcaaggaaaccatatgaaagcctttaatgttgaactcatggggttctgggtggcccaggggcattgtccaatgtaaacaacaaaaaacaaaacaaaaaaaactgtaaaaaggcagttgtttattggctaggtacttcctgacttcagggacaaagttttgattatggaaccaatccrgaaaaggggttcatgttctttagccctttttgttatgcatccataagactgtcagctgatgtttatcttttcccttcacctgaaggcttagggtttagcatctttatagagaagggcagtcctgatcataaacttgacttcatttgcacaaaatagagttaggctattccttcctgccttaagtcctggtgctga

SEQ ID NO: 569906 - DNA, 445 bp, Homo sapiens
tattgttattaagtgccctgtattcctggaaaactgatcctttgcttcttcattgtttatatgaatttatgcagtatgaataagatttcaagaaaatccctaggcaatatatgagtagggaaatgtcattctaatgacctgcctctacaaagtccatgtatttaaaatggactaaatagggctcacaaaaaatatataatgtggttatggtaaaattatgtcaaattcgtattccttaatatttttaggctgtaaagtatggggccaayggatacctgtctctgaaatactagcagtgttaaagatatatcagtggcctttgaaagctgtattttgttgtcataataagacaggagttcaacagaaaaataaacctgcttgcatattttcagattttttttcagaagtattataaaaatgcagagagatatgctgatatgaattc

SEQ ID NO: 569907 - DNA, 511 bp, Homo sapiens
gccttacagaatgaagtcaactcaggactgcgtggctatttagtggcaagccaggcttataccctaggtttgtgattccaaaagcaaccctaacagtatctaagtcactgtggatggtaacatcttatagatgamcctgtatcactttttacttttgtgtgatgtagattgaatttatactttgaacccactgtgatccatcttttattttccccacacatatctcaaaccctactctcctactccgacctgttacccctcccaggattacatgtattttaaagaaaaaccatagagaaaagaggatccacaataaggcctgtgtcaaaatactgtgtgacatagtgtcttcatagttagagaatgatgctaagacaaagtggtctttctaagacttatcacagggaaaaatctcttcctagactctgattcttacaaattattcatctcgtacttctgtaaaagaatgactcatcgtaactctctttcaggacactttggaagagcagtg

SEQ ID NO: 569908 - DNA, 638 bp, Homo sapiens
ttattgctataaatcagccatgactctctcaaaaagggagttaaatattcactacgctcctataaaacctccatcagtaattcagggacatgtttactcaggattcatgataaattaatgtaattagagggaactgtagaaactgactttacaaggaacaaagggctatcaaaatgtattatttttgtgaaatgaaaattatcataataaaaaacatttgtggtatcttcttgacatagaaatgattattgcttcagttattaaatgagtattttcagtacatgctgaattaacctactgtaacattttcttccttttaactttgcaactgcatggaactttttctcaactaaattttttccttattagaccaaaatttatgtattttatcttcacattctatatgataaatgttctatatagcaatgtacttgatagctaagcaaataaaaataagaaaaccttacctttagagagttttatggtttacaatctccatttttgttccctaaggcacaaagcattatgccctataatgactaagtacctcagaaattaatggtaatgattcatagcatcttcaaaggacatcttgatttttaaaaagytatcagcaatctgtacatatatatatatat

SEQ ID NO: 569909 - DNA, 622 bp, Homo sapiens
aagccctaactgccagtgtgataatctttggagatggggtcttgggaggtatttagctctacatgaggccatgagtgtagtagggtcctcaagatgggattaatgtccttataagagaagaaacaagagagcttgtgcagatgcctgtcccacaccagccctgtgagcacacagcaagaaggcagctgtctgcaagccaggaagagaggtctcaccagaacttaccatgctggcatcctgatctcagacttttgaaactctagaatcaagaggaaataaatttctcttgtttaagccattcaggctacagtattttgttgtgacagcttgagcagactaagatagtaatgaacatgagggagaattctttggttttaatgtttaaatatatgaacggtggtgatataaaataaaagaaatgaaataatgggtttatataaatgagagataaaagagagagagagagagcatcaagtgatatgagtacaaattaatgtatagtgattaaataaaaatatcaaaaaaagaaattagcttagcagctgacaaaggaaatgtattagcagtattattgacaaaygaggaagaatgaaaacgtatgaactaaactagtaatagtagg

SEQ ID NO: 569910 - DNA, 532 bp, Homo sapiens
aaatttgtttttatacagatctaggtgaatttcaaatccttcactgtgcctaaaacatcattttgtcaagcataatacaactacaagaatatttaccatattttcaagacagttctttcattaatctattctatattaaagaaatagacccctaagcaaacattttccccagtttgtatgattttcttttttagaatctttaatatacatctcaaggtgcttgctaaataacaactctccaatttgtctgggaaatagtagcaagttgatttctgcaaccrtaggggttcttaatctggttttcactggcaggttttggaatgtctgtaagctcctccgctgtgtgcataattttctgtatatgggaatttattttttgtagaagagtctatagttttcagagtttaaaactatagaaggttaagctccactctactacagctcttcccacatgatatataacagttgggtttcttaggatgcctccaaaaagctcaatttttgctgtgatctagactaaggcaacacctac

SEQ ID NO: 569911 - DNA, 598 bp, Homo sapiens
tagtaatagtaggaatgattgcataaatttgtttttatacagatctaggtgaatttcaaatccttcactgtgcctaaaacatcattttgtcaagcataatacaactacaagaatatttaccatattttcaagacagttctttcattaatctattctatattaaagaaatagacccctaagcaaacattttccccagtttgtatgattttcttttttagaatctttaatatacatctcaaggtgcttgctaaataacaactctccaatttgtctgggaaatagtagcaagttgatttctgcaaccataggggttcttaatctggttttcactggcaggttttggaatgtctgtaagctcctccgctgtgtgcataattttctgtatatgggaatttattttttgtagaagagtctatagttttcagagtttaaaactatagaaggttaagctccactctactacagctcttcccacatgatatataacagttgggyttcttaggatgcctccaaaaagctcaatttttgctgtgatctagactaaggcaacacctacactaacaaatggaagtaataaacagaggtgattatttgcata

SEQ ID NO: 569912 - DNA, 636 bp, Homo sapiens
tattattagaggcaattttaaaggttaaaagaaaaattccttttcctgtaaagaagttcacattgattttgtttttgaggcttgctttcatggtgytttttctttactttcacatgtacattttcaaaacaatttgcttttgcataaaatattaatgccagagcacctaaattccttaagtagctagagctagatgaaatttatttcacttttaagttattttctctgacaaatggaaaaatgcaaggaactcagaaaggataacagttatttgaccacttctttttaaaaagatttcagaaacatcttatttctattaagacagcttaaagagtcacttgaattttcacctaaagaaacaaaacgtctctattacgtagtaatcttcacttctttatgttccaatataatatttgtcatgtatttctaacaatgaaagttaaacaagtgccaggaaaccctaacagtggttctacatccaaggttttcttgaacaatcacatttcatggggtactaagattatcatcccattttactgaaaagaaccaagtttcatttatctagtcacactcacattgctaataattgggattcaaaaccaggattctacagtccacattttacaggcctctaag

SEQ ID NO: 569913 - DNA, 636 bp, Homo sapiens
tattattagaggcaattttaaaggttaaaagaaaaattccttttcctgtaaagaagttcacattgattttgtttttgaggcttgctttcatggtgttttttctttactttcacatgtacattttcaaaacaatttgcttttgcataaaatattaatgccagagcacctaaattccttaagtagctagagctagatgaaatttatttcacttttaagttattttctctgacaaatggaaaaatgcaaggaactcagaaaggataacagttatttgaccacttctttttaaaaagatttcagaaacatcttatttctattaagacagcttaaagagtcacttgaattttcacctaaagaaacaaaacgtctctattacgtagtaatcttcacttctttatgttccaatataatatttgtcatgtatttctaacaatgaaagttaaacaagtgccaggaaaccctaacagtggttctacatccaaggttttcttgaacaatcacatttcatggggtactaagattatcatcccattttactgaaaagaaccaagtttcatttatctagtcacactcacattgctaataattgggattcaaaaccaggaytctacagtccacattttacaggcctctaag

SEQ ID NO: 569914 - DNA, 598 bp, Homo sapiens
tacacacacaaaagtctattttcagttactagccttcaaattttagtactcacggaaacctacactacaaatataacaaaaagcataggaaattttatttaaaataaaatttagtgtatgtcggtaggctgttactttacacataaataggctggagcaaatctgaagagatgatatgagatgttcttacctaaaatrcgtattgtcataccccttatgagtcatcctccctaacaggtaaaattaaggcataataaaagtctaaccaacctgcctattaggtgtgaagaacaatggagataatctactgggtttaatataggaaccacaagttaaatactaagtgctcatgctcacaatgcagcctcattagcaatcaagaaggaaacgctggtaaccccaggagaagtttttgcccagaagtagtcataccgtgacatcaagtcagccctactttctcaaactctttccttatacagaacaataaatatctgattcgctttcaaaaagatgattattgtacatttgggattgctgcaccagaggatgaatatcaaaattccatgaatgtgcattaaggtttgctccttcgttactt

SEQ ID NO: 569915 - DNA, 614 bp, Homo sapiens
tttcagtctgtttctgctgccataacacaatacctgagactggaatttacttcttacagttctagaggttgggaagtccaagatcaaggtgctggcaagttcagtgtctggtaaggacccagcatctgcttccaagatggcaccctgttactgtgtcctcacacactgggagatggaagggaaaaagacatgaacgctgtgttcacacacagcacaggagatagaaggcaaaaagtccctgctagtttcctccagccctttcacacctcttaaagattctatctcgtagtactgttgtattgggaattcagtttcaacatggattttgaagaggacacaacattcaaaccatagcacccatcaagaaagtytaagttaaattgaatatataaatatataaaataatatcaatttattatatattaataaacataaataatatactgtttgatattgtaaacaaactatttcctcattaaatagtattttattaaataatatttagtcattaaaaagaacaaggcatttttgtggatgtgaagtttttcaaatttttaaattaaaaaaataaggcaaagaactgagtgtatactataattccttttgtttaacct

SEQ ID NO: 569916 - DNA, 465 bp, Homo sapiens
atgtagcaaaatgtcagtaaccggtgaaattgagtaaatgtataagggagtttcctgtgttaatcttgcaacttctacgttaatttgcaactttttcaaatttgtgaaaaacatggcaatatatctcaaggcaataaatatttcaaatttgagtcttagtagaatcaggtcttgttggaagtgaatgaataaagataatgaaatttgaaactgcaaaaactttcatctcatttgtcttgaaagcatcttagttgagcagatatttgtttcattgtgttgtgtaaatgaaatgcattttattaagtattacagcagtaagaaaaccttactgctcctttttaaaaaccagaccctatcaagcrttttaaatgcactgctaatcatcttctaatgaactccttgtaaagttgggctatcttatgagcaaatattaaaatccgctatttcccttgtagaaattcccca

SEQ ID NO: 569917 - DNA, 465 bp, Homo sapiens
atgtagcaaaatgtcagtaaccggtgaaattgagtaaatgtataagggagtttcctgtgttaatcttgcaacttctacgttaatttgcaactttttcaaatttgtgaaaaacatggcaatatatctcaaggcaataaatatttcaaatttgagtcttagtagaatcaggtcttgttggaagtgaatgaataaagataatgaaatttgaaactgcaaaaactttcatctcatttgtcttgaaagcatcttagttgagcagatatttgtttcattgtgttgtgtaaatgaaatgcattttattaagtattacagcagtaagaaaaccttactgctcctttttaaaaaccagaccctatcaagcattttaaatgcactgctaatcatcttctaatgaactccttgtaaagtygggctatcttatgagcaaatattaaaatccgctatttcccttgtagaaattcccca

SEQ ID NO: 569918 - DNA, 646 bp, Homo sapiens
tgatttattaaataaaaggggttttattccccctttcgctcagtacttcttcttgccgccttcatgtgaagaaggatgtgtttgcttccctgtacaccatgattgtaagtttcctgaggcttccctagccacgcagaactgtgagtcaattaaacatctcttctttataagttacccaatctcaggcagttctttatagcagcatgagaatggactaatacggatattaaatggtcagtttatccacaatatcaagtagatttaatgagacccctattgtcaggacaagaaacattcttctctcagatagctgtggctcactttcttatctccttcaaatctttgctgaaatatcactttctcaatgaggaccataccgaccaccctacttaaaattgcaaattcctccaacctaccaccttgttcacccttaccctgctccattttatcctgagctctcgtcatcttctagcttctttttctcgttactccttacctcagaatgtaagatccatgaagaaacatgttttgcttctccatcagtatttcccaaatgcctacatcgtacatggcatayggtaagtattgaatgaattatgattaatcaatcaaattaagatatgttatagaattcctaccttaattg

SEQ ID NO: 569919 - DNA, 633 bp, Homo sapiens
attgtaccacattaactccaaagtttctattcaacacacattttacaagaaatttaatttcaaggtaaacatcacacattgtacgttgggtttcctgagaaacaatatctgagactctgaaatgtgtttgcaagtggtgtgttgaagagggtgctcagcagcaacacctattggggtgaaggaagccggactgaacacagggagaagttgagctatgatgcaattgcaacagaggcctcagcctattctatcaggagttttagagtaaatagccctgcagaattgttctaattgaggccagggaatcaagctcacagtaatcaacactctggacagctagaggaatgacatggtcttaaaagtgatcttggtggcataccacagcatctattatatcaccagattaatattattattattctcaaaaatgctagagactttaaataaattaaattcattttaaaaactttaacagaataataaaaaarggagaaaataaaagtcaatgtttttgtatgatacacaaaacaaataccaaatagcaatttaagattaaaaaatagatagtaatcaactcagtgggaatccagaagattctgtaggccttacttttgtacttatcaaccaaattaa

SEQ ID NO: 569920 - DNA, 653 bp, Homo sapiens
atgactcactctgctttagcaaatggaaaattaatgaaattgttgttgctagtgacagaataatttatccagtcttcctttgaataagaatagcagttaaaatgagaagcaataaaaataattgtggtatatggtagtctctggtgtgtgacagctggyttaatctttttgttacctctcaggtgcatacagggacatgattatcataggttagctcatggtagtgtatggaatagtgtacacatgtaggaagttagaatgatatgaaatgtcaatagtttcttgtaggaaagtttctataacctattattttccgcaatctcaaatccttactattcttgggtaggtctagaaacataaaaaccatacatttatctttcccccatatatttaaaaaatgattattttaaaaataattagtggttattttaaaattttatcaattttaagattaacttcaagtacatgttttacaattcttgactatttgtgtttggtaatacaatgtaaaagacttaaagtaaacaaattctatttctccaggttagcaaatccatgtttctaagggaattaagtgcatatggatgtaggcggtagaaaacctgtattcttcttacagaatgtgtgtggaaaatgttcctttcaaagcaaca

SEQ ID NO: 569921 - DNA, 653 bp, Homo sapiens
atgactcactctgctttagcaaatggaaaattaatgaaattgttgttgctagtgacagaataatttatccagtcttcctttgaataagaatagcagttaaaatgagaagcaataaaaataattgtggtatatggtagtctctggtgtgtgacagctggcttaatstttttgttacctctcaggtgcatacagggacatgattatcataggttagctcatggtagtgtatggaatagtgtacacatgtaggaagttagaatgatatgaaatgtcaatagtttcttgtaggaaagtttctataacctattattttccgcaatctcaaatccttactattcttgggtaggtctagaaacataaaaaccatacatttatctttcccccatatatttaaaaaatgattattttaaaaataattagtggttattttaaaattttatcaattttaagattaacttcaagtacatgttttacaattcttgactatttgtgtttggtaatacaatgtaaaagacttaaagtaaacaaattctatttctccaggttagcaaatccatgtttctaagggaattaagtgcatatggatgtaggcggtagaaaacctgtattcttcttacagaatgtgtgtggaaaatgttcctttcaaagcaaca

SEQ ID NO: 569922 - DNA, 653 bp, Homo sapiens
atgactcactctgctttagcaaatggaaaattaatgaaattgttgttgctagtgacagaataatttatccagtcttcctttgaataagaatagcagttaaaatgagaagcaataaaaataattgtggtatatggtagtctctggtgtgtgacagctggcttaatctttttgttacctctcaggtgcatacagggacatgattatcataggttagctcatggtagtgtatggaatagtgtacacatgtaggaagttagaatgatatgaaatgtcaatagtttcttgtaggaaagtttctataacctattattttccgcaatctcaaatccttactattcttgggtaggtctagaaacataaaaaccatacatttatcyttcccccatatatttaaaaaatgattattttaaaaataattagtggttattttaaaattttatcaattttaagattaacttcaagtacatgttttacaattcttgactatttgtgtttggtaatacaatgtaaaagacttaaagtaaacaaattctatttctccaggttagcaaatccatgtttctaagggaattaagtgcatatggatgtaggcggtagaaaacctgtattcttcttacagaatgtgtgtggaaaatgttcctttcaaagcaaca

SEQ ID NO: 569923 - DNA, 637 bp, Homo sapiens
aggcggtagaaaacctgtattcttcttacagaatgtgtgtggaaaatgttcctttcaaagcaacatgtttccccatatgggaagcaggcttgcagcaacgatgtcgtcgagtagacagtgagagtggcagtcggccatctgggyggcagacaactgtcatccactgctgctgagggcacctctaagcacagaaattgactctcaaagacaagacccttttgcctatccctgcttgcatggttcgagttatccattacttgacttgttcaaaaccccatgcctttatagaagatgattactactgtcagtgagtttattgcactcatgggcatctaattccatttacccaaatgagccctaaagtattctgctattggtgactgtagtaaaacctactgcagaactaaaatgttattaaaagatgttttgataatagaagcatagagaactctgagcctcctgtgtgtagaaccatgaaagtgatagtgggtacgactgtctagtgagttttaaaacgtcatattagatttactgaggtataattgacattaaataagctgcacatttaaaatgtacaactcgaaaacttttggcatttgcagacattctaattactgtcaccatgatcaatataatg

SEQ ID NO: 569924 - DNA, 460 bp, Homo sapiens
gccctcccaaaagatatgtcgaagccctagccctcaaacctgtgaatgtaattatatttgaaaataaggtcttccagatatgatcaagttaaggtgctgccatactggatcagggtgggccctscattcaatgactggtgttctcataaagaaagattttgatacagaggcacacgcagagggaaaacagccatgtgaagacagtgacagaaactaaagtgatgtagctccaagacaaaaaatgccaaggactgctgggaaccaccaaaagctaggagtgaggcatggaacagattcctccctagagcttccaaagggagtgtggcctggtgacactttgactttggatgtctagcctacagacctgtgaaagaataaattgctattgttttagccacccagtttgtgtaatttattatggccacactaagaaacttaatacaaatactttgtcatcatc

SEQ ID NO: 569925 - DNA, 460 bp, Homo sapiens
gccctcccaaaagatatgtcgaagccctagccctcaaacctgtgaatgtaattatatttgaaaataaggtcttccagatatgatcaagttaaggtgctgccatactggatcagggtgggccctccattcaatgactggtgttctcataaagaaagattttgatacagaggcacacgcagagggaaaacagccatgtgamgacagtgacagaaactaaagtgatgtagctccaagacaaaaaatgccaaggactgctgggaaccaccaaaagctaggagtgaggcatggaacagattcctccctagagcttccaaagggagtgtggcctggtgacactttgactttggatgtctagcctacagacctgtgaaagaataaattgctattgttttagccacccagtttgtgtaatttattatggccacactaagaaacttaatacaaatactttgtcatcatc

SEQ ID NO: 569926 - DNA, 561 bp, Homo sapiens
agatgctgtattagtttcctattgctgctgtaacaaattactacataacaacataaatgtattattttatagtcctggagatcaaaagtctgaaacgaatctaacagattaaaatcaaagtgtcagcaggtctgtatttttcttaaagttccatggaaaaaatctgtttttttgccttttcactgtttctggaggcaccctgcactcattggcttgtgaccctatcaaagaccatcactttaacctgagcttccgttgtcgtgtatccttttgctgacattgaccctcttgcttccctcttgtaatgatcctggtgtttgggttcactggataattcaggataatccctccacctcaagattcttaatcacatcttcaaaatccctttgccaagtaaagtaacgtgcataggttctgaggattaggatgtaaacatctttaaaggctcaatattctgcctaacacagatgcttcaaatacatctttatgttcattccaataacagtttratgacagcattgaattaaataaagcttgcccttattgtgaatgttaatgtaa

SEQ ID NO: 569927 - DNA, 568 bp, Homo sapiens
gttttcttacatcaacatagtgcagttatcagcttcagtaaactttaacattgatataatgcttttcaattttgaacttacctttaatacgtttaacttttaattttgttaattcaactaataatgtccatcacaacactttttcttttagatcatgatccagtataggatcaagtattacatttagttgtcatgtctctttaacctctttaatctagaacatttctacaacctttttttttgtcttttatgacattatataaagaatagagcccctatttttataaaataggttgatgcaatcacttttaaaaccttgttttataagaaatttcgaacagataaaaagaaaataaattgtattatgaactctcaygtatgactcactcagcttcaacaatcatcaacttttatttttttatttatttagtttttgctatccttgtttcatttgtacttatgctcactggtgtagctagttttgaaaactttgaagctgaccatattgtatacatgattaatcatctgatatatatatcagatatatcatctgatatatatatatcag

SEQ ID NO: 569928 - DNA, 568 bp, Homo sapiens
gttttcttacatcaacatagtgcagttatcagcttcagtaaactttaacattgatataatgcttttcaattttgaacttacctttaatacgtttaacttttaattttgttaattcaactaataatgtccatcacaacactttttcttttagatcatgatccagtataggatcaagtattacatttagttgtcatgtctctttaacctctttaatctagaacatttctacaacctttttttttgtcttttatgacattatataaagaatagagcccctatttttataaaataggttgatgcaatcacttttaaaaccttgttttataagaaatttcgaacagataaaaagaaaataaattgtattatgaactctcacgtatgactcactcagcttcaacaatcatcaayttttatttttttatttatttagtttttgctatccttgtttcatttgtacttatgctcactggtgtagctagttttgaaaactttgaagctgaccatattgtatacatgattaatcatctgatatatatatcagatatatcatctgatatatatatatcag

SEQ ID NO: 569929 - DNA, 568 bp, Homo sapiens
gttttcttacatcaacatagtgcagttatcagcttcagtaaactttaacattgatataatgcttttcaattttgaacttacctttaatacgtttaacttttaattttgttaattcaactaataatgtccatcacaacactttttcttttagatcatgatccagtataggatcaagtattacatttagttgtcatgtctctttaacctctttaatctagaacatttctacaacctttttttttgtcttttatgacattatataaagaatagagcccctatttttataaaataggttgatgcaatcacttttaaaaccttgttttataagaaatttcgaacagataaaaagaaaataaattgtattatgaactctcacgtatgactcactcagcttcaacaatcatcaacttttatttttttatttatttaktttttgctatccttgtttcatttgtacttatgctcactggtgtagctagttttgaaaactttgaagctgaccatattgtatacatgattaatcatctgatatatatatcagatatatcatctgatatatatatatcag

SEQ ID NO: 569930 - DNA, 631 bp, Homo sapiens
agaagttgcttctttctaagggttccctagtgggacccacatgaggcagcggcactttggagcaacaggatcagcccaagattcaaccctgccagtctctagtgacaagcttctgcctaggggaaggtgcaggctgatcctgtcacatggaatgtgtgaycaatgcttgccatggcttcattagcacctccaggagctgaaaaacactgttgctatgaaccaaggtgaaatgatctgcctcacattccagcaagctacactcaaccttgctgttactcagcagtctgttttatgaatctcacgctgcctccctgaggttccagatcatactcattttctactcaaaccatcctttactcttgtaaaagtagcaccatcctccttttcattcagactcaaatgcctgacacataggctgaatttattatgttccattgcatgtcttctaaactggaaaccattggaacaatgccacctcaacagtttctcttgaagaaactgctttctgacttattcatcctgtgatcattctgctttggtcctacttacatctttcacttggtatattagttgcaatgttcctccatagtgctcttggcattgctctcatggatgcagaaatagtggactc

SEQ ID NO: 569931 - DNA, 623 bp, Homo sapiens
ttgcataatgcatatcattttctgaaccccaaaggaattggcttgtatctcttatgacactgtaacattctgcctttttaatagtctctctgatgtttttctaaaagataataaggcccttgaggttgtaaactgtcattttaaaaagtcagtacagtagcttatacctagtagaagatagtgacagagagtatattggaatttggtgcccaactacgtagaaaatgtcttcaaagctagacaaagattcycaatctggaatagtaggaaataagaaaatatactgacggtttttactggtatatctggtagggagtggttttggggaaaaggaagactgatgtatttataaatcaattgtttaatgacagttacatgctgagtgcattaaatgtgttacctcttcaattgcaagatatttataagtaaccataaaatacgggcttcataggtccattttatagttaaataggttcagagatactaagtaatttgcccagggacatacagatagcacaatttggaatagaacccaaatctgtctgagtctctcgtgtagaccaatctctttccatcactttaggacagaagcagccttcgcatggtccattatggatgactat

SEQ ID NO: 569932 - DNA, 571 bp, Homo sapiens
  misc_feature 534, 537, 538, 541, 550, 555, 571: n = A,T,C or G
cagtgaagaaaacctactgaatgggagaaaatatctgataagggacttgcattcaaaatatttgtcttactattcaataataaaaagataaataacccaattagaaacaggggaaagaatttgcataaacatttcagccaagacaaaatacaagtggycaataagcatatcaaaaggtcttaaacatcattagtcattagaaaagtgcaaatcaaaactgcagtaagataccagttcatactgactaggttggctataatcaaaagacagataataacaagtgttagggatgatgtggataaattgtgaccctcatatactgtgggaatgtaaaagggtgcagacacttttgaaaatagtttgagaattcctcaaaatattaaacatagatttaccatatgaccccataattccacttctaggtatatatccaagataaataaaaacacacaaaaacttctacatggatgtccattacagaattatgaataatagctcaaactgaaagccatgcaaatgtctatcatgattaancgnnggnaaaaaaaanaaaanaaaaccccccaaaaan

SEQ ID NO: 569933 - DNA, 571 bp, Homo sapiens
  misc_feature 534, 537, 538, 541, 550, 555, 571: n = A,T,C or G
cagtgaagaaaacctactgaatgggagaaaatatctgataagggacttgcattcaaaatatttgtcttactattcaataataaaaagataaataacccaattagaaacaggggaaagaatttgcataaacatttcagccaagacaaaatacaagtggccaataagcatatcaaaaggtcttaaacatcattagtcattagaaaagtgcaaatcaaaactgcagtaagataccagttcatactgactagrttggctataatcaaaagacagataataacaagtgttagggatgatgtggataaattgtgaccctcatatactgtgggaatgtaaaagggtgcagacacttttgaaaatagtttgagaattcctcaaaatattaaacatagatttaccatatgaccccataattccacttctaggtatatatccaagataaataaaaacacacaaaaacttctacatggatgtccattacagaattatgaataatagctcaaactgaaagccatgcaaatgtctatcatgattaancgnnggnaaaaaaaanaaaanaaaaccccccaaaaan

SEQ ID NO: 569934 - DNA, 571 bp, Homo sapiens
  misc_feature 534, 537, 538, 541, 550, 555, 571: n = A,T,C or G
cagtgaagaaaacctactgaatgggagaaaatatctgataagggacttgcattcaaaatatttgtcttactattcaataataaaaagataaataacccaattagaaacaggggaaagaatttgcataaacatttcagccaagacaaaatacaagtggccaataagcatatcaaaaggtcttaaacatcattagtcattagaaaagtgcaaatcaaaactgcagtaagataccagttcatactgactaggttggctataatcaaaagacagataataacaagtgttagggatgatgtggataaattgtgaccctcatatactgtgggaatgtaaaagggtgcagacacttttgaaaatagtttgagaattcctcaaaatattaaacatagatttaccatatgaccccataattccacttctaggtatatatccaagataaataaaaacacacaaaaacttctacatggatgtccattacagaattmtgaataatagctcaaactgaaagccatgcaaatgtctatcatgattaancgnnggnaaaaaaaanaaaanaaaaccccccaaaaan

SEQ ID NO: 569935 - DNA, 563 bp, Homo sapiens
aaacaactcagttatttgatagacaactcattaggaaaaacgagaattatatttttaattaagttatgacctgtgttagctacttatttatgacttataactgtattcaaagtagtaatcaaatataatcattttttccatayatattgaatgtttctgaaaatgaactttcataaatacaatgctttgtttttttacttttattttaagtttggggcacatgtacaggtttgttagataggtaaactttgtcatggggtattgtacagattattttatcacccacatattaagcctagtgaccattagttattgttcagaccctctacctccaaccacccacaactctccaataggcccaagtgtctgctcccctctatgtgtctatgcattctcatcatgtagctttcatttataagtgggaacaaacatgtggtatttgcttttctgtttctgcattagtttgctaagaataatggcctccagttccatccatgttcctgaaaaagatatgatcttattcgtttttatgtctgcagagtattccatggtgtatacgtacc

SEQ ID NO: 569936 - DNA, 482 bp, Homo sapiens
atcacagttattgatttgcatatgttgaaccaaccttgaatcttagggataaagcctacttgaatgtgatggatacgctttttgatgtgctgctggatttggtttgacagtattttgttgaggatttttgcttcaatattcatcatggatattggtctgttttttttttttttttttttttttctgttttgtctctgccaggttttggtatcaggatgacgctggcctcataraatgagttagggaggggtccttcctttcaatttttggaaatagtttcagtaggaatggtatcaactctcaactcttctcctttgtatatctgatagagttcaactctgaatccatctggtcctgggctttttttttttttttttttttaaggttggtaggccatttattactgcttcaattttggagttcattattggtctgatcagggattcagttttttcctgactcagtcttgggaggatgtatat

SEQ ID NO: 569937 - DNA, 591 bp, Homo sapiens
ttcttcttaagactgccttacctgtgtcccagagattctggttggttgtatctttgttctcattagtttcaaagaacttcttgatttctaccttaatttaattatttacttaaaagtcattcagaagcaggttattcaatttccatgtaattgtatggttttgaagaattttcttagtcttgatccctaattttattgtgctgttrtctgaaagaatagttgttatgatttcagttcttttgcatttgctgaggagtgttttgtgtctgattatgtgattgattttacaatatgtgccctgtggtgatgagaagaatgtatagtctgttattttgggttggagagttctgtagaatttctatcaggtccatttgatccagtactgagttcagttcttcaatatctttgttaattttttgccttgatgatctgtctaatactgtcaatggggtgttaaagtctcccattgttattgtgttggagtctaagtctctttgaaagtatcttaagaacttgctttataaatctgggtgctcctctgttgggcatgtatatatttaggatagttaggtcttcttgttgaattgaacc

SEQ ID NO: 569938 - DNA, 591 bp, Homo sapiens
ttcttcttaagactgccttacctgtgtcccagagattctggttggttgtatctttgttctcattagtttcaaagaacttcttgatttctaccttaatttaattatttacttaaaagtcattcagaagcaggttattcaatttccatgtaattgtatggttttgaagaattttcttagtcttgatccctaattttattgtgctgttgtctgaaakaatagttgttatgatttcagttcttttgcatttgctgaggagtgttttgtgtctgattatgtgattgattttacaatatgtgccctgtggtgatgagaagaatgtatagtctgttattttgggttggagagttctgtagaatttctatcaggtccatttgatccagtactgagttcagttcttcaatatctttgttaattttttgccttgatgatctgtctaatactgtcaatggggtgttaaagtctcccattgttattgtgttggagtctaagtctctttgaaagtatcttaagaacttgctttataaatctgggtgctcctctgttgggcatgtatatatttaggatagttaggtcttcttgttgaattgaacc

SEQ ID NO: 569939 - DNA, 529 bp, Homo sapiens
atgtaattgtatggttttgaagaattttcttagtcttgatccctaattttattgtgctgttgtctgaaagaatagttgttatgatttcagttcttttgcatttgctgaggagtgttttgtgtctgattatgtgattgattttacaatatgtgccctgtggtgatgagaagaatgtatagtctgttattttgggttggagagttctgtagaatttctatcaggtccatttratccagtactgagttcagttcttcaatatctttgttaattttttgccttgatgatctgtctaatactgtcaatggggtgttaaagtctcccattgttattgtgttggagtctaagtctctttgaaagtatcttaagaacttgctttataaatctgggtgctcctctgttgggcatgtatatatttaggatagttaggtcttcttgttgaattgaaccctttaccattatgtaatgcccttctttgtctttttaaattattgttggtttaaagtctgttttgtctaaaattagtattgca

SEQ ID NO: 569940 - DNA, 541 bp, Homo sapiens
ttaatttggccagatacgaagtgctgggttggaatttcttttctttaagaatgtcaaatggctaggcgtggtggctcatgcctataatcccagcactttgggaggccaaggtgggtggatcacctgagatcaggagttcaagaccagctggccaacatggtgaaagcccatctctactaagaatacaaaaaattagccaggcatagtggcatgtacctgtaatcycagctactcaggagactgaagcagtataattactggaacctgggaggcataggttggagttagccaagatcacgccactgtgcttcagcttgggtgacagaacaagactctgtctcaataaataaataaataaatagcaaaaaataaaaaaaagaatatttaatactggcccccaatctcttctggcttgtagggttctgctgagtggtcccctgttagtcttatgggcttccttttgtcgcttatctgacatttttctttagctgcctcaagagttttttctttcatttcaaccttggagaatctgatgactgtg

SEQ ID NO: 569941 - DNA, 543 bp, Homo sapiens
atgttcattcctatccatattctgaattttatttctgtcatttcagccacctcatcctggttcacaacttttgccggaggggtagygcagtcatttgaaggaaagaagacactcaggctttctgagttgtcagagttcttgagctggttctttcttatctttatgggctgatgtttcttcatgctttgaagtcgctgacgttttgatttattttcttttatcctatttgatgacctcgactgtttgatggtgctataaggtgggttcagccaactggctttatttctggagtattttaggggacaaacactcagctcccaactcctggattgtgttctgtaactctgggggacttttatcagccccaaactttgttctctgtctccttgagattaggaatccattgtgctgggggtgctgaggtgctcctggaccactgttcactatactccaatgggtagtgtcagcaaaagtgttttatagtgcagtggcagtgggatccatactcatttatacattccagcagcagcagcagcagcagca

SEQ ID NO: 569942 - DNA, 517 bp, Homo sapiens
gctacaaaaataatataaaaacactaattatacctcacactcaaatttaactgttgttaactttatgccatatktgtttcaagactatatatacaatttagaaataaaatgttatagttcagtcctgcttcaaatctctcttttgccttatttgcttttctcctttttcacaggtaaccaccattctagccactattgtatgtgccctttacatctacatttttaaactttgcataatatcgttatggggaatatcattaaaacaatgcataatattgtttggtatgtactaaaaatatacataaattatatttcattggctatatttatttacgaatgaattttctactgattaatatatttttgagatttatccatgtggatatgtttaacttgatgcaacacattagaaaatttattgattcttccctagatggtcagtttatttcactaagataaataatgttatagtgaacctacttgtacttgtatatgattaagtgttgggttgctagaa

SEQ ID NO: 569943 - DNA, 548 bp, Homo sapiens
catgtaataattcaaggtcaagtcaatgacaactgagtccagtatagagacagtccctgtgctacacatctccagaggtgaatttagtaatgtaaccagattgcctgtaatgtcaatcataatagctttggctatcaagtctatagaagccaatgatgataaaaaaaaaaacttaaaaattatgaagagaatatttcctctaggacccatgaaggcactttaagaaatgcctcatagttcattgagcagcatagatgtcatgaacataggaacaatttagagaatctataaggtcagcagagaagaaaagaatctgccaaaaatcagactcatctttaaggagtaacttttttwataaacatttcttttaagtttgatgtaatcccatgtatttatttgtgcatttgttgcctatgcttttgggccctatccaaaaatatcattgcccagaccaatatcatgggactttctctcttaagttttcttataatagttttaagatttcaggttttacatttaaatctttaatcccttttaagttgtttttg

SEQ ID NO: 569944 - DNA, 548 bp, Homo sapiens
catgtaataattcaaggtcaagtcaatgacaactgagtccagtatagagacagtccctgtgctacacatctccagaggtgaatttagtaatgtaaccagattgcctgtaatgtcaatcataatagctttggctatcaagtctatagaagccaatgatgataaaaaaaaaaacttaaaaattatgaagagaatatttcctctaggacccatgaaggcactttaagaaatgcctcatagttcattgagcagcatagatgtcatgaacataggaacaatttagagaatctataaggtcagcagagaagaaaagaatctgccaaaaatcagactcatctttaaggagtaactttttttataaacatttcttttaagtttgatgtaatcccatgtatttatttgtgcatttgttgcctatgcttttgggccctatccaaaaatatcattgcccaraccaatatcatgggactttctctcttaagttttcttataatagttttaagatttcaggttttacatttaaatctttaatcccttttaagttgtttttg

SEQ ID NO: 569945 - DNA, 516 bp, Homo sapiens
caccctttcttcctaaagagaggtctaaggaactgaagctgcttttttctttcttctcatcttaggggtatatatttgtaaggcttggttacagagtataattaatttgcatcaacttttatgttagagagtgagaatttcagtctttctccttttgcttcagataacacctcagataaaactacattgatcaaggtctcctcgtggccctatattgctgacagaagatgccctcttgtaagttaagaaagagatgtccctgttatctcaaaaatgtaatatgtatccctgaaaacttccaaagtagataatattatccttacctttctgcctatctaagaacccctctgggcatttcctcacaggaaatagtgattttcttttgcttcatctctgcgataaggctagtcaattcccaatctctgctggtagctcaggtgtgaragcataaacttgtttgactgagaaagactgagatgtccttaaggagccttagtccttaggtccgtagtgctt

SEQ ID NO: 569946 - DNA, 613 bp, Homo sapiens
atgaatacttagtatacaccaggcactttggatacatcagctcattgaatcttcacagcaacactggaagatagttgctattaatcggcacttaatattcatacaaactagatccagagaggttaaataacttgcttatgatcacataaatagtaagagacagagctttaattcaaagccaattcttttggcaccaatttgatactctttttactttgcctagtattaacaacaaagcattttagcaactttgggaccaccgaaaccattctcaacaaaaagctatggttaataaattttgtgtgtggtaggtacttaatcagacgcctgttttaacagtgaatgagtcttaaacaggagcaggtaatgtacaatcatgcagttacattgaccttaactatcttaaaactgttagacaacttaaattaccttttctgaatgatctggataataaaggtragaattattcattgtctaaaactttctcagtatacaaatattgacatataagataggccaaccaattttctgaattcgttaaatagcgttaaatgtttttaccattcatatggatacttaaattataataatgattatgttaaattgtgtgtgt

SEQ ID NO: 569947 - DNA, 577 bp, Homo sapiens
cgggtgaagaggtcattccctcttgcaaatgcattctcctcttcccatccttcttctgtctctctccctggcaaaatacagttatcagtattagtagcagtactagttctgttactagtactggtaatagctatgctggtaatagccaagacttatacaacatttactgtgtcgggtgttgtcccaagttctttatatatactaatttaatctttaagataaatctyttagaaaaactatattattagcccccttcaacaagtgataaaactaaggtacaaagagattaacttgactacttgcctgaggcaacatagcttgtaagtggtggaaccagaatttgacctatgcaatctggttccagagtctgtgctcttaaccactatgccttcttttttttttttcatggcagttctctcttttgctttttttttttattattatactttaagttttagggtacactatgcctttttaaccaaggaaactggatctgtaattgatagagtgatctaattatcaattacctatcatctattattttattaattacctttttctatatataaaaattatt

SEQ ID NO: 569948 - DNA, 577 bp, Homo sapiens
cgggtgaagaggtcattccctcttgcaaatgcattctcctcttcccatccttcttctgtctctctccctggcaaaatacagttatcagtattagtagcagtactagttctgttactagtactggtaatagctatgctggtaatagccaagacttatacaacatttactgtgtcgggtgttgtcccaagttctttatatatactaatttaatctttaagataaatcttttagaaaaactatattattagcccccttcaacaagtgataaaactaaggtacaaagagattaacttgactacttgcctgaggcaacatagcttgtaagtggtggaaccagaatttgacctatgcaatctggttccagagtctgtgctcttaaccactatgccttcttttttttttttcatggcagttctctcttttgctttttttttttattattatactttaagttttagggtacactatgcctttttaaccaaggaaactggatctgtaattgatagagtgatctaattatcaattayctatcatctattattttattaattacctttttctatatataaaaattatt

SEQ ID NO: 569949 - DNA, 580 bp, Homo sapiens
actatattttctcaggaagaccttactttatcaatttttcttctttcataaatatctctgttgagatgagattttagaaaaagctctattgttaggagtccagaaggttctaaaaaattacgagtgttttaactgaaattatgcaacttgtaaaaatatgaagtgagatgagtgatatggttttgctatgtccccacccaaatctcattttgaattataattccaataatctccacatgtcatgggagggacctggtgggaggtaactgaatcattggggtgtttttcccatgctgttctcttaatagtgaataagtctcataagatctgatggtttaataaagggcagtttctctactcacacactccattctgccaccctatgaagaaggtgccttgcttccccttagtattccaccataactgtaagttttctgaggcctccccagctatgctgaactgtgagtcaattaaacctctctcctttataaattacccgatctcgggtatttcctcatygtaatgtgagaatgaacaaatacagtaaattgatactgggtagctggagtgctgctgtaaa

SEQ ID NO: 569950 - DNA, 597 bp, Homo sapiens
caatactatcaagatgcagttcttgccctatagatttaacacaatcacaatcacaatactaaggtttgttttatttatttttatttttgttgatattaacaacttgattttaggttatacagagataaaaaagactcaaaacatgtaacataattttgaaggaaaaaaaagttggaagactgatactatccaaatttaaaacttataataaagttagcacaggacaaamgaatatacaaatagattaatgaaacaaaatagtcccaaaatagatccatatgaatatagtcaactgatttttcacaactaagcaatgatagtacaatgaagaaaagatagtctttcctacaaatagtgctggaaatctttatgcaaaaaaaaaaaaacatggaatctggataaagactgtattcttcacacaaaaaaataagtcaaaatggattatagaagtagacaaaaaattcattaaaatgaaaaatttatctcaggagaatgaaagaacaagccccagattgagaaaacaattgcaaagtaacaactcatttaagaacctttatccaaaatagacaaataactcgagactcatcagtaagaaaa

SEQ ID NO: 569951 - DNA, 537 bp, Homo sapiens
caaaagactttgaggttaatttaagtaaaattaaaactcatcaactaaacaagagctgtgacctttaccatctctataaagctaaagggagaagagtttaaataaacagcttaatttgagatctaatttcagttttaacgtgatgtttgttacagaggacttatgaaattataatgtatttcctatttggatgagaactacttttaagtgggtaaggaaaaggaggctcggraaaacagtatatcctagccagaatgtgaagcaatagagttagagggaattgtttattattagagtggtcaaatatttctgaacctgataaggttaacaaaccttgcaagccacatttcttgttaagtatctcactggtaactcctgctgtctttctcaggctcaccttcttccgttctttctagaaaaatgtaatgttttgagcacaactgattgtcaactaatccgtcacgatttttaaatttcaagtgattttaaattctaatttaatgaaaatcagtgaattatttggttttactaccagct

SEQ ID NO: 569952 - DNA, 540 bp, Homo sapiens
tttcaacctcttagctaaatgatcctgtaataaactcaaggtgattataatacttatctgtttcaattcattgttcctcagaatataattttaaagtttaaaacttttattctgacttataaaaatactatcttgaacttttatgatggtagattatggcttcacttattgtatcttgctgcttatacattgtatgttttcaactttttatattcccaggatcccaaagtaaaaaacacaatcaaatttcagggaagtaatcaygttcttttgctgctgtgatttcagaatgttcccaggagcacagtcattctaactgactctctcacatgcatgaggatatctcagactttgttatatttttattaatcataaaccatggtatcatttttaggcttcttgaaaatccaatttgtaatttttaccttattaagcctctcataactgcaattagaacaataactcctattagctcatgctgcttttcttgctatcagtaatcaaaataaaccaaaaacatttatagaatgctgtcattat

SEQ ID NO: 569953 - DNA, 476 bp, Homo sapiens
gtaggaggaaagccatgtaagacatgtagggctttatacaccatggcagaaagtttggagtttattctatgagcaatcattggcagccatgagagggatttaaacatcaaaatgttctatgctggtttgcatttttaaaaggccactccagctattctgtggagaatggtttgaaagggttaaaaagtagaaggagatcagtcaggagactatagcagtagggcaggagaaaaatactaayggtctgtaatagaatggtaattgctgataaaagaagagtaaatgggttccagatataaagatagggacttattgaaggaaaagaaaaaatcaaggatgactcctagggtttggctagggcacatgagtcaaaccctgcagtggtaccatatacagagatgtattaaacataagagaaacaggattgacactgtatattaagaagtctatttgcatataataatctaaataaccag

SEQ ID NO: 569954 - DNA, 476 bp, Homo sapiens
gtaggaggaaagccatgtaagacatgtagggctttatacaccatggcagaaagtttggagtttattctatgagcaatcattggcagccatgagagggatttaaacatcaaaatgttctatgctggtttgcatttttaaaaggccactccagctattctgtggagaatggtttgaaagggttaaaaagtagaaggagatcagtcaggagactatagcagtagggcaggagaaaaatactaatggtctgtaataraatggtaattgctgataaaagaagagtaaatgggttccagatataaagatagggacttattgaaggaaaagaaaaaatcaaggatgactcctagggtttggctagggcacatgagtcaaaccctgcagtggtaccatatacagagatgtattaaacataagagaaacaggattgacactgtatattaagaagtctatttgcatataataatctaaataaccag

SEQ ID NO: 569955 - DNA, 590 bp, Homo sapiens
ataatcttgttacttatagaatgaagacagaaacaaatactttgaaagatgaatacaaaaaatgattagttaggacagcagagctgaaaagagttgagagactggacagaaattagatgtttgcagtgacggtgtgataagggaaaatgggaaagttatagagaaaagcatccatggacttaccacaattgacaaaaaaaaaacagaaacaaaaacaaaaacaaaaaccaaccttgtgccagaaatccrtatagagaacaagataaataaatttttaaaaagcagcaatatatctttcagaacgtcttcaactatttaggatttactaatatccctaactagtaaaccaggacaatgttagttaatatgaatgtgctctagaagtctggggcttcaagaagctatttccaaggtgaagaaagaaaacacatgatagatttaagaggttagagtcaaaagatccctattatatagatgagaaaccaatattggtctgaaaatgggtaacaggaaatatgggttcatacaagaacttgccttcctgctaagtaccagaaaggaaaaacgttgtcctctcattttttcatacc

SEQ ID NO: 569956 - DNA, 503 bp, Homo sapiens
taccattacaaaacaacttaattcactttcactgaaactttctcaaatcttttcatgacagagcaaagaatactagatggcacgttctaaattctgagcatgaaattttgagcaatctttttaaatttctagtcacgttttagtgtaaccatgtcttttggtaaatactgccaaaagataaccaaatcctaaaaaaatagaaattatttatttaattataaattcattctaacttgttaattcaatggacacaaaccacattactgacasgtaaaatttcaaacatatgatttcttagatgagatttcttataatttatcacactacctcattttaagggctttattgcttttagattactgataaagatatttaattgtaactgagtataaatgaaagttttactaagaaaaattgttactcatggcataggtatgaaaaacctatagggcaaacaaagcaggagatgtaaaatgtaaacatttggtagtgattcttacttg

SEQ ID NO: 569957 - DNA, 602 bp, Homo sapiens
agctgtaccttcagaattgctaggagacagaacatagtaagaattcaaatctcttataagcagagttataaacatcatattccaatattgattctgctgctttgtctgtacatttggagagcagaggtagcagggaggtttaagagactgaaaaaagggagagggktgtatgaagtgtagatcagtaacaaacaccatcactcttgaaaagaaaaagtccaacagaggtcctagacctgtgttttagacaggtgggaggacagtaaattaatttttaaagacaaaataattatattgaatgaatttattgatcattttgttgaacagttagtataaggacatcccgtattatatttcagctttcataaactataagtgtttatgtcttatattttgtgttctttcaactttatcttaatttgcttctgttatttttaatgccatttttgtacatttgtttaatattactatattcatctttgttgtaattttttcctgtaataatgtaacataaataattataatattacaaagtttattaaatttcttccaatgataattaatatagtaggcttgtggtggaaaaatggatcaggtactgt

SEQ ID NO: 569958 - DNA, 447 bp, Homo sapiens
actgtaagcctcaactttcccatctatgcaataagaatcatttttacctcattagattgttatgaggattaaatgaagcagcatgtatatatgtgtatatatataygcatatatacatatagtatcttgtatataataagtatttattacatgcaatttcatcttttatgtagactttctagactctaaccttgccccaggaagataagtgacttttacattaagccatgttctctttttcctttatgacactcctcaatgcttaatgaagaactctggctacacaaaaaactaaagtaaaatgttgacagactgcttttttctacatctgggcttctttaattgaaagctgacatttaggccaagaattgttaggaattcctatttaggtttataccagttctcgcttatatacaagatgtatacttgtgtatacatgttatttac

SEQ ID NO: 569959 - DNA, 612 bp, Homo sapiens
gaatagtagcagaactcaatgtaaaaataatgattacattaataattatttgctcactttttcctgtatttggtattttgggaaagtgggcttgaaaaacagtggatacattgatgaaacatttcaattttcacttgcctgttgtgtttgctcatgttagacaaactataacttctcggtgtatagatatgatgtacacaaaattacacagaaattaagccatgtataataatgcatgactagaagaaagatatatctcccttgaacaaataacagttattttagtaaatttgtaacagagaaaataggcttgattaacaaaaatatgaaagatcttttaaataaatgaattttgaattttcagagtagcccagaattttatctaaaytcggattatttcattagctagaacatgaaaataggcatttattctactcacctacagcttctgtagtactaaatttatggaatgaggctttgtggtgctgccttcagagctcaatgatttgctttttctgaattttggaagtctgtctctaattgattgacacatatgaatgtagtgggaagaaatgagattaagcatacaagctttctttttcatttaaacat

SEQ ID NO: 569960 - DNA, 607 bp, Homo sapiens
ccaattacagccatctcagcactagagtatgctttaagcccaggttttctgagtcctgcaagggcaccaaggttgacacagctttctggcccagatggacctcgggaagacccaagggaggtasttgggctgcctgggaatgctgtccagacacctgaagccagaagactctcctagtggtcctgataggtatgcctcccaacaaatctctgcacagatgggataggtccctgactacaaagagagtggctggagttgagactgtgcgtctttggaatctactgtggaaaggaggctgattggctcacctcattggctcagattagcatgcatcacccaacaggtcccagtatctgggcagtttcttgactgcagcaagagggcttggagccaagactgggccccttcagtctctactgtggatatgcctgtcacatggttccagttgggcgtgtgtctcccagcaagtccctccatagatggaatgattccctgagtacagcaggagaggctggaggtgtgactgtgcccccttgggatttgctgtgggacagaggattgagagcctggtcttggctcagaggggtgtgcatcgccctgaatgttc

SEQ ID NO: 569961 - DNA, 607 bp, Homo sapiens
ccaattacagccatctcagcactagagtatgctttaagcccaggttttctgagtcctgcaagggcaccaaggttgacacagctttctggcccagatggacctcgggaagacccaagggaggtagttgggctgcctgggaatgctgtccagacacctgaagccagaagactctcctagtggtcctgataggtatgcctcccaacaaatctctgcacagatgggataggtccctgactacaaagagagtggctggagttgagactgtgcgtctttggaatctactgtggaaaggaggctgattggctcacctcattggctcagattrgcatgcatcacccaacaggtcccagtatctgggcagtttcttgactgcagcaagagggcttggagccaagactgggccccttcagtctctactgtggatatgcctgtcacatggttccagttgggcgtgtgtctcccagcaagtccctccatagatggaatgattccctgagtacagcaggagaggctggaggtgtgactgtgcccccttgggatttgctgtgggacagaggattgagagcctggtcttggctcagaggggtgtgcatcgccctgaatgttc

SEQ ID NO: 569962 - DNA, 620 bp, Homo sapiens
gtgaatggactgctccagctcctgagttaactgctactcagcctgaggttgcagactggtctgaaggtgtgcaggtgccctctgcgcctattcatcagttccctactgaagactggagtgctgagcctgccacggaaggctggtccacagctcccaatgctcaggccattgaatgggtaggagcaaacacygaaaggtcttaagctgttattgcacacgctcttaagcaacatggaaataaggttgacggaaaataaatgtcagtttaaaaaaaaaaaagtaatgcattcagcaaggttgacagataaaatatcaagatagaaaaatatattggatttttgagcaatattaatgggcaaattgaaaatgaagttatgaaacaatttcatttaaatatcttaaaaagaaataatgtacttaagtataaatataacaacagaagtgtggaacttatactctaaaaactacataacattgaaagacattaaaggaaactaaatggaaagacattaaatgttgatattttgaaaagatttaatatttttaggatggcagttctcccccaaattgatctaaaataaatttcctactaaaatcacagctaaattctttgcacaatt

SEQ ID NO: 569963 - DNA, 564 bp, Homo sapiens
aatagccagagcaataagatggcaggaacacttagtcacatgagcttygcaaggcttctcaaaccataagatgtgtatggaacactggggatcttgttacaatgtggattctgaattcagtaggtctcagggggactaggattatggatgccaacaagctcccagaagttgctactgctaatagttcttgaatcatctctcactatatccttcataacaccgtgagcatatccttcccaatacttcccccaattgtaattgcaccatttcggtattcattcatgttccccaccaagctttgaactccatgagaacagtagctgtgttttgtttacaacttggcctggctgcccagcccaatctggcaaaaaggaactgaatgaatatttttgaagactgaagaaaaaaatgacctattgccaattataaagccacaacacttgcatattaagactcttattacttgttgaaaaaggatgtttatcatgtatcttttcttgtctcaagtcacattatggtacctagttgtaacttccagctcccaaaataacataaccaaaagac

SEQ ID NO: 569964 - DNA, 564 bp, Homo sapiens
aatagccagagcaataagatggcaggaacacttagtcacatgagcttcgcaaggcttctcaaaccataagatgtgtatggaacactggggatcttgttacaatgtggattctgaattcagtaggtctcaggggsactaggattatggatgccaacaagctcccagaagttgctactgctaatagttcttgaatcatctctcactatatccttcataacaccgtgagcatatccttcccaatacttcccccaattgtaattgcaccatttcggtattcattcatgttccccaccaagctttgaactccatgagaacagtagctgtgttttgtttacaacttggcctggctgcccagcccaatctggcaaaaaggaactgaatgaatatttttgaagactgaagaaaaaaatgacctattgccaattataaagccacaacacttgcatattaagactcttattacttgttgaaaaaggatgtttatcatgtatcttttcttgtctcaagtcacattatggtacctagttgtaacttccagctcccaaaataacataaccaaaagac

SEQ ID NO: 569965 - DNA, 564 bp, Homo sapiens
aatagccagagcaataagatggcaggaacacttagtcacatgagcttcgcaaggcttctcaaaccataagatgtgtatggaacactggggatcttgttacaatgtggattctgaattcagtaggtctcagggggactaggattatggatgccaacaagctcccagaagttgctactgctaatagttcttgaatcatctctcactatatccttcataacaccgtgagcatatccttcccaatacttcccccaattgtaattgcaccatttcggtattcattcatgttccccaccaagctttgaactccatgagaacagtagctgtgttttgtttacaacttggcctggctgcccagcccaatctggcaaaaaggaactgaatgaatatttttgaagactgaagaaaaaaatgacctattgccaattataaagccacaacacttgcatattaagactcttattacttgttgaaaaaggatgtttatcatgtatcttttcttgtctcaagtcacattatggtacctagttgtaayttccagctcccaaaataacataaccaaaagac

SEQ ID NO: 569966 - DNA, 579 bp, Homo sapiens
tcaaaccaagtctaaaccaaaatcaagtgccaataaaggcactccatgggtgatcaggccacgcttgcactcaaacggagtgggcaagtttcaaagactagtcttatcaagttttagatgtccagactccaagtgcccattccttcctggwgttcagccactgcgttgatcctccacaggggcctgccacacactgctctggtgaggcgtcccactggggcaaatgcctacccgggagcgctctcaggatctgcgtcactcgggctggtaggagtcccccacagggatgttctacagggcaggcttaagccacctaaggagctgcctcaaccatctgccaatcacctcacttccagtcagtgaaccaagaaatgtagcaggacgagccacagacaaaactcctcagacaccgacttaaagaaggagggggtttattcagccgggagcattggcaggactcctgtctcaagaaccaagctccctgagtaagcaattcctgtcccttttaagggctcacaactctaagggggtgcacgtgagagggtcgtgatcgattgagcaagcaggtggtacgtgact

SEQ ID NO: 569967 - DNA, 584 bp, Homo sapiens
tcacattttcttcaagtgccttaggtcaagtaatgaggagccaagttaacctgagatactttttaattgacagtcattaaatttatttacctactaaatcattgggtacctactctatgccaggcatgtgtgcagtgctgaatattttctttgctattttatactttgagaggttactttattatttcagggttggaggaacactgtgtacttcaaataattatcatagctaatgttccacaagcaagctctttgcatattgagttttttgctttgggtatttattagttacatacttctttttataaaatatgccatttgggccacacttgacaagtcaaactttttgcaaattacagttgtcagcaccacaggagttccattaggtatttatttttccacctcacagtaatgttcatttcttaatttatttggtgtayattataacattactggctggagaacctgctgaaaaataatcttgaccagccaaagaaaagttgaactagtggcctttccaagaattacatcgaaggcagaatccaatcctttacttcattaagaccacagttgacagaagatgt

SEQ ID NO: 569968 - DNA, 572 bp, Homo sapiens
tcaaaagccctatgattgtttaccttccccttcccacaaatactctgacttttaatcatttgtaacaatccattgtaattccctagcataccatgggagtctttcatgccatgaagactttgcagatgctctcctctctgtcttggaatgcctccctctcaagccaagcagtgcctcagactctgtgtttctttaacatggcacaagttccctgattggggtggttagcccattctagtattactgtcagtcttctttcctagattgcaacctcctttgttttatatgatgcctggcataaaataaacaagatatatcatttatttttaatttttattttttgagacagggtctcactctgtggcccaggctggagtgcagtarcacgatctctgcccacttcaacctctgcctcccaggttcaagcgattctcatgcctcggcctcttgagtagctgggattacacgtgtgagccaccatgcccaggctacaagaattattagatgaatgaataaataaaatgacagtatattttgtagttcatacatgggaatttatgttatagataaca

SEQ ID NO: 569969 - DNA, 572 bp, Homo sapiens
tcaaaagccctatgattgtttaccttccccttcccacaaatactctgacttttaatcatttgtaacaatccattgtaattccctagcataccatgggagtctttcatgccatgaagactttgcagatgctctcctctctgtcttggaatgcctccctctcaagccaagcagtgcctcagactctgtgtttctttaacatggcacaagttccctgattggggtggttagcccattctagtattactgtcagtcttctttcctagattgcaacctcctttgttttatatgatgcctggcataaaataaacaagatatatcatttatttttaatttttattttttgagacagggtctcactctgtggcccaggctggagtgcagtaacacgatctctgcycacttcaacctctgcctcccaggttcaagcgattctcatgcctcggcctcttgagtagctgggattacacgtgtgagccaccatgcccaggctacaagaattattagatgaatgaataaataaaatgacagtatattttgtagttcatacatgggaatttatgttatagataaca

SEQ ID NO: 569970 - DNA, 590 bp, Homo sapiens
ctccctaggaaaaaagagaaaagtatcctcaaatgaacacatttataatactgattctttcaactcaatctaatatttccactataaaaagattgtgaacaaggtaagtcttccagggaatattccacacctatttgtaaccaatcaatgaaataaaatatttttctcccatttattttgaccactttctgtcaaaatcacaggcttttctctatgccaaacttgcctttctttytaaaacaaacagctcaaggaactttcatagtggccattcccttttcatgttatctgtagtaagtttatttatcaagtatctgcagtcatttcaatcatttttattggcattggtgaagctgctattcctctaacttgtactattggtgttaccaggaagtgagaatttgaagacatgaaaaaaggcaggtactgatcaaaaaaaaaaaaaaaaaaaggtatttttctttcctcaagatcctgtctgtcatgttttggttacttactaagacatcaaacatttaatttcctccacatttctgtattaataaaacaggttttaaaaactacctggaatttgtggtctgcattccaca

SEQ ID NO: 569971 - DNA, 413 bp, Homo sapiens
cacatgatcatgtataaattgtgcaaaacgtttgctaactgaaagaacacgtcagtgttattatcatagatttcttcaccagaacactattctcaggccaagctctgsaggagagggttgtgtggagtagagagaagctgaaatgagagcctggcagtccagtgaccctggtaacagtgtgggacacagggagatgatgataccaatgtatctcagtgtctggccctcactctgcctaaatttaactgttacatctttatttttgtatttactttgttaaatatttggacctttccatcttttctcaggctctgagtggtttacagattctgctattttcacttttgagtttgagagtaggacttagaaatagatgactcttcaatggattggtgagtaaaggatcctgaaac

SEQ ID NO: 569972 - DNA, 568 bp, Homo sapiens
tctgatgtcatatgaacacaacatggttttataaaaccaatgctttcatttttgtttataatttttgaataacattatagttttagtgatggacaactgtaagcttcatgagggaaagaatgattgtcattgatatcttagtgtccttttgtaattaatgaaataaaaccttgtgctctgctaatgggtaaactgtgggtaatgaggaaccatggaaggatctgaaaaattggaagcagaattgagatgaccagagagccacggtttaggaagatggatctgggagcagctcrgcagatgccctgcagcagggagacagtgtaagctgagggatccacctgtaggcagttgtgatggtccaggcattcgcagaaaagatggagaggaagagtctgattgcagaactctttgggggaccctaggatgctggagacgggtagctgggattcaaggaagagctggaatgcaatgaagtggaggctttgtgcttgggcaaatggaagtacggtcatgacagttttccaggtaaaattcaggaggagaaattaagaattgagtttgaggggcc

SEQ ID NO: 569973 - DNA, 586 bp, Homo sapiens
gatgtcatatgaacacaacatggttttataaaaccaatgctttcatttttgtttataatttttgaataacattatagttttagtgatggacaactgtaagcttcatgagggaaagaatgattgtcattgatatcttagtgtccttttgtaattaatgaaataaaaccttgtgctctgctaatgggtaaactgtgggtaatgaggaaccatggaaggatctgaaaaattggaagcagaattgagatgaccagagagccacggtttaggaagatggatctgggagcagctcggcagatgccctgcagcagggagacagtgtaagctgagggatccacctgtaggcagttgtgatggtccaggcattcgcagaaaagatggagaggaagagtctgattgcagaactctttgggggaccctrggatgctggagacgggtagctgggattcaaggaagagctggaatgcaatgaagtggaggctttgtgcttgggcaaatggaagtacggtcatgacagttttccaggtaaaattcaggaggagaaattaagaattgagtttgaggggcctgggcacatccagttgagatc

SEQ ID NO: 569974 - DNA, 577 bp, Homo sapiens
accagaaatcccttaagttccagattcttcaataccagaaaaaaaccctaaggttgtgaaagtaatagctaacatttattgagggttttttgttttgttttgttttttgtttttttttttactgtgtgcccagcagtgagctttgaatttgcaacccactcttatcctattttacaaatgagaaaactgaggctcaaagccaacaaacaattggcttaaaatcccatgctaagtagcacagactggaccagaacttagatacaaacttgatttaagaagcctctgatcttttttttatttttttatttttttaattatttatttatttatttattttttattttattttttttattgatcattcttgggtgtttctcgcagagggggatttggcagggtcacaggacaatagtggagggaaggtcagcagataaacaagtgaacaaaggtctctggttttcctaggcagaggaccctgyggccttccgcagtgtttgtgtccctgggtacttgagattagggagtggcgatgactcttaacgagcatgctgccttcaagcatctgtttaacaaagca

SEQ ID NO: 569975 - DNA, 533 bp, Homo sapiens
gtgacggtcagttttatgtttcaacttggctaggttacattctccagttgttcaaacaccaatctaggtgttgctgkgaagttattttgtagatgtgaataaagtgcatagtcacttaactttaaataaggtagcttatcctagaaaatctagatggatttggctcaattgttgaaaggctttaagagcagaaatgagctttcccaaaagaagaaattctgcttgtaattgtagctgcagcctatccctgagagttccaacatgcccttcctaatggcctcctctgcaaatttttgacttggttagctaggcaggtattgtctggctgcctagtatggttgtttcaaacgtgtaagccaattccttgcaacaaatgtcttaatatatgcttcctactggttttgtttttctggttgaaacttgactgatatgggaagaatggaaggtaactgaactagagagctatcatggccttgcattgttttaagatgagctaacacaccctttggctagatattgttctccaaattcaa

SEQ ID NO: 569976 - DNA, 444 bp, Homo sapiens
gttgagtttatttcctaaagggaataatttcattcccaaaactatcctataataaattaaaaactgaaaaatcacgttatgtttctgttccctccatttagaatagatgttcatcccttttgttgacataaccatacttcgcagcctagttcaaggcttagttctgtggccttggtttttcttcctcttatgaaatccccaaacaagccgtctgaacctttcttttggtgcttttggccttgggttttattttaamccttgatgcgagtttgttttgcctcttgtctgagtcctggattgtgtttgatttctctgtgtccttttctaacatgatatgagattctagtactgtgctgtccagtagggtgggcacatgtggctactgggcacctgaaatgtggcttattccagtttagatgagctataggtataataaatacacac

SEQ ID NO: 569977 - DNA, 596 bp, Homo sapiens
ttttgtctttaatctctgacctaatgatatatttctctaaatcagcagcagatggcaatgtgaaagtagagaattttaaaccctgtttccatttgctgtttccactgtaagagaatttctgttcattttttcctaatgcttaaattgttcttcaaaaaaaatcatttgttaggcaaaaaaagtgacttaagaatttatcacatagttgataacaatgctgtatatttcatacagcagtggctttggttgtacatgttatgaaaattattactcctccatcttgcccccacactcccaggctctgaggcttcctcatggaattagcatgcattaaagagcataaagtcctattttgaggatgaaacttgaaacttttcaagtatgycaggaataatctctgtgtgtttcaattccaatgtgttgtaaaatttgtgaacactgaaactcaatgtcaatgtagtttggtaacaacagagaagggtcatgccttatgctgtcagacattcatttgtaaaattagactcttaaaactgtttctatttttgaagtatctaagtatttctcattgggtgtacagacagcccaactattggatg

SEQ ID NO: 569978 - DNA, 614 bp, Homo sapiens
aggcaggctaagaaacctacctcgtatgggtcttgtgaggactaaatgatgtcaagcaagataacaataaaataaagagttgagttagatttcaattaataaaaatatctctcaccaccgtaattattggggacctgtgagttactgcttgctggcaaattattaatatttaccaccatggttgatttcttcacagttttatttcatcagtaggctcatagtatagggctcatggaatgtttgtgggataaataaatgggataataatgaacactggcactttcattctgttaccatttgaagtagagtatcaaattgaaaaaaaaagtgacaggaaattattacacagtctaaaatctcattcctgtatcatgagctctttagaaaaataagaacggttcagtctaatggtaacatttgtaagatgcaattctgtgcagaatcatatcctaagractttcatttgtctggaatgagctagatggcctctttagctagacagtgtgaccaagggaaagatcagacactgactagcaggcaggctctggggttagaccatgtgggttaaccttcttttatccacttgccagctgtgtgactgtaaacatgttttg

SEQ ID NO: 569979 - DNA, 585 bp, Homo sapiens
acctgtgagttactgcttgctggcaaattattaatatttaccaccatggttgatttcttcacagttttatttcatcagtaggctcatagtatagggctcatggaatgtttgtgggataaataaatgggataataatgaacactggcactttcattctgttaccatttgaagtagagtatcaaattgaaaaaaaaagtgacaggaaattattacacagtctaaaatctcattcctgtatcatgagctctttagaaaaataagaacggttcagtctaatggtaacatttgtaagatgcaattctgtgcagaatcatatcctaaggactttcatttgtctggaatgagctagatggcctctttagctagacagtgtgaccaagggaaagatcagacactgactagcaggcaggctctggggttagaccawgtgggttaaccttcttttatccacttgccagctgtgtgactgtaaacatgttttgtaacttctgtgttctcatttgtaaactgagcatcataatagcacccgtcttataggagtttgtgaagatgggtgacatagtgcaatgaatgctagctagcata

SEQ ID NO: 569980 - DNA, 394 bp, Homo sapiens
atccaaatgacaagctgtttactcttgttattcctttagtaatcaagagatgatcactgagggggaaaatataaaatataatttttaaatataaaagcattctggacatataaaagtggtttttcagttttcagatgaattttttaaagttatgtacagttcttatcaaaatttatgtggccaacatttcctgagttttttaggacatacagttgccaagttatcaaaagttgtaaatttacatatgcttcttgctggtaggtgggtaaccctggaaggtcaggcttttagatagcctgaagmacgtcagtagttattctggcaacaggatccaaactaatattttattcctgaggccaacccagtggcaacaaagtgattcatggttgaattg

SEQ ID NO: 569981 - DNA, 406 bp, Homo sapiens
cctgaaaataggtgacaacggcaaaccatccaccctggtgttgactgactttaacaaggttcagttcacagagattgagggcagaaaaaggaaatggcctaaaragggtaagtttgctgtgttgccctcacaccacttgattcatggtcctgatcctaaggatctcacctgatacttggttttataggaaggatgtgtaaaattcccagaacgctaggaaacagggactaaaacacttcaaagagaaagttaatgaacttgtttctgaccacagggcatccttcagcacatgctgtctggagtggcctcaaacaaggagtgtgtggtgaggtgctgagaatgcaatgggagcagggtcctgtccccacgctaaagaagctcacagtttaatgcaaatgagaagcca

SEQ ID NO: 569982 - DNA, 598 bp, Homo sapiens
ctcctagcaagacaagtttctctaggccaggwccccccttacattttacccccagaatctagagagctgtccccattctcagactttccactaatgctgggttcccaagcacctttcaaggggtgaggggaattaaaggagatgtgctcatgaaagtagttaaaaatctgtaaatcacaaagagactatatgttattataaaagttttatgtttttataaagcctccagaatagtagaaaacatgtattcttacaaatatttgttcaataatgaatcaatacatatattcaccatgagctgaaaatgcttcaaaacttttaaaaaatctaaaccgcaatcaaggtcttgtgatagcagcaacagagctctaatgcgatttgggtgactttggactacctatctttactaacatttaccaaactcagactcacatcttaagaaattagaaaatacactccatctttgctattcgctgattcaaggtttgtgaattcatctgcttactaaaatgtatttgtcactccaaagtcaatattcacagtgtttgtacagtccttgcagacatggatagagaggcaaaaaatttgagaaacccaa

SEQ ID NO: 569983 - DNA, 530 bp, Homo sapiens
aagattcagaatcttataatacccaacatttccaggtcttaactgaaaatcactcatcctaccaagaaccagctatttcttcaactraatttaaaaagacaatcaaaagaggaaaacactaagatgacataagactttagaattatgtgacaaggattttaaaacaaacatcataaaagtgcttcaagagcatatataaaatcacttaaatgagaaaatattaagtctcagcaaagaaatagaagatataaataagaaccaaatggacattttagaatcaaaaattataataaccaaaatacaaaaaaaaaactcaaagaggagactcaacagcagactggaaaagacagaggaaataattaattaactggaagaaagaacaatagaaattaaccaatcttaacgacagagagaaaatagactgaaaaaaatgaacagagcttcaaggacatgtgtggctatagtaaaagatctaatacttttgtcatggaagagtcagaagaagaagagaaagaaggtgaggctgaaaa

SEQ ID NO: 569984 - DNA, 530 bp, Homo sapiens
aagattcagaatcttataatacccaacatttccaggtcttaactgaaaatcactcatcctaccaagaaccagctatttcttcaactgaatttaaaaagacaatcaaaagaggaaaacactaagatgacataagactttagaattatgtgacaaggattttaaaacaaacatcataaaagtgcttcaagagcatatataaaatcacttaaatgagaaaatawtaagtctcagcaaagaaatagaagatataaataagaaccaaatggacattttagaatcaaaaattataataaccaaaatacaaaaaaaaaactcaaagaggagactcaacagcagactggaaaagacagaggaaataattaattaactggaagaaagaacaatagaaattaaccaatcttaacgacagagagaaaatagactgaaaaaaatgaacagagcttcaaggacatgtgtggctatagtaaaagatctaatacttttgtcatggaagagtcagaagaagaagagaaagaaggtgaggctgaaaa

SEQ ID NO: 569985 - DNA, 530 bp, Homo sapiens
aagattcagaatcttataatacccaacatttccaggtcttaactgaaaatcactcatcctaccaagaaccagctatttcttcaactgaatttaaaaagacaatcaaaagaggaaaacactaagatgacataagactttagaattatgtgacaaggattttaaaacaaacatcataaaagtgcttcaagagcatatataaaatcacttaaatgagaaaatattaagtctcagcaaagaaatagaagatataaataagaaccaaatggacattttagaatcaaaaattataataaccaaaatacaaaaaaaaaactcaaagaggagactcaacagcagactggaaaagacagaggaaataattaattaactggaagaaagaacaatagaaattaaccaatcttaacgacagagagaaaayagactgaaaaaaatgaacagagcttcaaggacatgtgtggctatagtaaaagatctaatacttttgtcatggaagagtcagaagaagaagagaaagaaggtgaggctgaaaa

SEQ ID NO: 569986 - DNA, 530 bp, Homo sapiens
aagattcagaatcttataatacccaacatttccaggtcttaactgaaaatcactcatcctaccaagaaccagctatttcttcaactgaatttaaaaagacaatcaaaagaggaaaacactaagatgacataagactttagaattatgtgacaaggattttaaaacaaacatcataaaagtgcttcaagagcatatataaaatcacttaaatgagaaaatattaagtctcagcaaagaaatagaagatataaataagaaccaaatggacattttagaatcaaaaattataataaccaaaatacaaaaaaaaaactcaaagaggagactcaacagcagactggaaaagacagaggaaataattaattaactggaagaaagaacaatagaaattaaccaatcttaacgacagagagaaaatagactgaaaaaaatkaacagagcttcaaggacatgtgtggctatagtaaaagatctaatacttttgtcatggaagagtcagaagaagaagagaaagaaggtgaggctgaaaa

SEQ ID NO: 569987 - DNA, 374 bp, Homo sapiens
atgagaacagcaccaaggggatggttgtaaaccattcatgaaagatccacccccatgatccagtcacctcccatcaaacctcacctccaacaytggggattacaattcgacatgaaattggagtggggacacagattcaaaccataccagccatcaaacctggttaatgtcatgactaattaaatgtaatactttagaaattcataccttataataaatgcaatattgtttttattaaagaatatgttttaccactcaatcattatttatatagatccttgtaatattagaaaagtaataattttctacatatatacatttttaattcccaaaatctccttcagtaaaacatgtggtctaacataagcaacatg

SEQ ID NO: 569988 - DNA, 395 bp, Homo sapiens
aagtacatttaatgagacatygggtgatgagagtaatttttgataggggaaaaaaggtgtaaaaaagtacctgtagataaaccttcttcacaccaggcacataatctgcaatccggccaaagagcagtcgtccaactcctgaagtgacgccaatgcacatgagaacaacctctttatttttttcatcttgaaatctttcatttacatgtttcatctataggccaaagagaaagaaaccacactgaatatggtagaaaaacttgacaaatttgaggctttgcatcaaatgcatttgcttctctgcaatgttatgggcttgcaactttttccaaatttcaatatttatgaaacttgtcctgtgataattttcatgaaaacatttgaaaaaaattaac

SEQ ID NO: 569989 - DNA, 395 bp, Homo sapiens
aagtacatttaatgagacatcgggtgatgagagtaatttttgataggggaaaaaaggtgtaaaaaagtacctgtagataaaccttcttcacaccaggcacataatctgcaatccggccaaagagcagtcgtccaactcctgaagtgacgccaatgcacatgagaacaacctctttatttttttcatcttgaaatctttcatttacatgtttcatctataggccaaagagaaagaaaccacactgaatatggtagaaaaacttgacaaatttgaggctttgcatcaaatgcatttgcttctctgcaatgttatrggcttgcaactttttccaaatttcaatatttatgaaacttgtcctgtgataattttcatgaaaacatttgaaaaaaattaac

SEQ ID NO: 569990 - DNA, 545 bp, Homo sapiens
gagctatgatggtgccactgcactccagcctgggtgacagagcaagaccttgcctctaaaataagaaataaataaaataatattgaggcctatctgtacccaaattctacccctagtaccccaatctcatttcttctgcttcattgtttttattgcatgtgtcccattccagcacactactcaaattacttattatgcttattattatctgamtgcttgaactagaatgtaagctccacaactgtatgaatcgtaatgaccattcacaaatctcaagagcctgaaatgatgcctagcagatgctaagaattcaacaaattatgttgaattaatgaatgaggaatttagcaaaactttcatttaagagtaatgtgcttccttttccttttagtagaatctaatttgcaatcctgtagccagtgtctttatgagttgggacagataataatagcccactggacctatggtggagagatttttttcccctgactcctgtgtgagcagtgtcaattatccatccattcaatcaacaaatatttattcag

SEQ ID NO: 569991 - DNA, 545 bp, Homo sapiens
gagctatgatggtgccactgcactccagcctgggtgacagagcaagaccttgcctctaaaataagaaataaataaaataatattgaggcctatctgtacccaaattctacccctagtaccccaatctcatttcttctgcttcattgtttttattgcatgtgtcccattccagcacactactcaaattacttattatgcttattattatctgactgcttgaactagaatgtaagctccacaactgtatgaatcgtaatgaccattcacaaatctcaagagcctgaaatgatgcctagcagatgctaagaattcaacaaattatgttgaattaatgaatgaggaatttagcaaaactttcatttaagagtaatgtgcttccttttccttttagtagaatctaatttgcaatcctgtagccagtgtctttatgagttgggacagatwataatagcccactggacctatggtggagagatttttttcccctgactcctgtgtgagcagtgtcaattatccatccattcaatcaacaaatatttattcag

SEQ ID NO: 569992 - DNA, 615 bp, Homo sapiens
tacaggctaatgtggcttttttaatgtagaaaagtttaaattacataatgcagcacatattatatgtctattggacagtgctataatagaatatgagtgaayttttgccttataccctctagaatctgagcatgagagcagataggataaaagaggggttaggtaaagaggtgagcttgaggtggcatcctaggagctagaaaaggtgagatccaggggcccagggcagtctggatgtgcccttttagtagtagaagtccccatgcgagaggatcacagagggaggagaagggggctaatgggaactaaagaaccattttgccaatgttcggagctaggccaaagtgttctcaggttcagctggcagcagaaagaagattttgataagcatcccaaacttgcagaagcatccttaattattagcatccttctaaatggcactcttgatatttgccaatcatacagaagaattctttggttttgttgccttttcagaatggcctctaggttgaatttattccaggcatccatatgctcaaaacatatggaaaagagaaaaaagaaatgttttccaaagtattattaaattttacttctaaagaaatattttcttat

SEQ ID NO: 569993 - DNA, 615 bp, Homo sapiens
tacaggctaatgtggcttttttaatgtagaaaagtttaaattacataatgcagcacatattatatgtctattggacagtgctataatagaatatgagtgaatttttgccttataccctctagaatctgagcatgagagcagataggataaaagaggggttaggtaaagaggtgagcttgaggtggcatcctaggagctagaaaaggtgagatccaggggcccagggcagtctggatgtgcccttttagtagtagaagtccccatgcgagaggatcacagagggaggagaagggggctaatgggaactaaagaaccattttgccaatgttcggagctaggccaaagtgttctcaggttcagctggcagcagaaagaagattttgataagcatcccaaacttgcagaagcatccttaattattagcatccttctaaatggcactcttgakatttgccaatcatacagaagaattctttggttttgttgccttttcagaatggcctctaggttgaatttattccaggcatccatatgctcaaaacatatggaaaagagaaaaaagaaatgttttccaaagtattattaaattttacttctaaagaaatattttcttat

SEQ ID NO: 569994 - DNA, 631 bp, Homo sapiens
aaatgcctatgagcagcagtgaaaataggtgagaacgtatgcaccaaactcatgctgtttacctgaatgctcttgaaggagtaaaacagaaaaggtgtttggtgctttaaaggagataaatttcagttatttgcaatagtcacttctagggaacactgtgaatctccgtgagaccaaattcacagatctacagaaaaacagacttcaagataatgttattggacatttctatcatatgggcactgaaccaggtcctaatatgttttatttcttgtaattcttacaacagcaccatgggatcggtgctattgttttcccaatttaacaggtgagaaactgaagatttaaaggggttagtttgcttgaaaatggtatagtctggattcaaatcratttccctaattcttgaagccatttctttaacttccaagataaagaagctcttgtgcatttctctgttaatgttttttaccccaaacatattaataaggttggtatatacaaattcagcctaaatagtcactcagtagtaactgtatgtgcaaaatgacaaaaaaaaacctgacattttttaaagttgcaaactttctattttatatttcttcaggaaaactgcattaataaatgatat

SEQ ID NO: 569995 - DNA, 631 bp, Homo sapiens
aaatgcctatgagcagcagtgaaaataggtgagaacgtatgcaccaaactcatgctgtttacctgaatgctcttgaaggagtaaaacagaaaaggtgtttggtgctttaaaggagataaatttcagttatttgcaatagtcacttctagggaacactgtgaatctccgtgagaccaaattcacagatctacagaaaaacagacttcaagataatgttattggacatttctatcatatgggcactgaaccaggtcctaatatgttttatttcttgtaattcttacaacagcaccatgggatcggtgctattgttttcccaatttaacaggtgagaaactgaagatttaaaggggttagtttgcttgaaaatggtatagtctggattcaaatcgatttccctaattcttgaagccatttctttaacttccaagataaagaagctcttgtgcatttctctgttaatgttttttaccccaaacatattaataaggttggtatatacaaattcagcctaaatagtcactcagtagtaactgtatgtgcaaaatgacaaaaaaaaacctgacattttttwaagttgcaaactttctattttatatttcttcaggaaaactgcattaataaatgatat

SEQ ID NO: 569996 - DNA, 609 bp, Homo sapiens
aatcatatgattagaaacgcagattccaaggtgaatattactggacatggtgagaatttgggattcaacatgtagatattatttaaagccatgaacctaaatgagaactccaagataaatgaatataagtagagaaggggtctgctcaatttcatttgtttttcttttgtgctggagactttttacatacaacacagtttaagagtctttactgtgagmtccaggacatgtaaatatttagagaatagaaagacgatgagtgagcagggatatagaccaaaacaaaacaaaacaaaacacaacaaaacaaaacaatgggtagtaagatagaagaaaagtcaagagaatatgatttcacaaaagtactatgagaggagcttttaaggaagaagacagtttttgaatgagtcagatgctagtgagaaagatcacatgaaatgaggtctgaagccactgaattttgaaaaaaaataaagtatatggtagatattgattagatcaattgaagctgagtaatgagaatgaaagccagattttttgtttttttattttatttatttatttattttgagagacagtcttgctctgttgcccaggctggagtgcagt

SEQ ID NO: 569997 - DNA, 515 bp, Homo sapiens
ggccacctaggttgtgttcaaatcttggctcttgtgaatagtgcttcaagaaacatgggggtgcagatatctcttcgacatactgatttcttttcttttggatatattcctagcagtttgattactggatcatatggttgttctatttttagttttttaaggaagctccatgctgttctccatagcagctgtactaacagtgtacaaggcttcccctttctccacacccttgccagcatttgttattgcctgtcttttgcataaaagccatttttactggggtgagataatatctaattgtagttttgatttgtatttctctgatgatcagttatgttgagtgcctttccatatgcctatttgccatttgtatatcttcttctgagaaatgtctattcagatcttttgctcatttttaaattagattattarattttttcctataaagttgtttaagttccttgtataatctggttattaatctctgtcatatggatagtttgcaagtattatct

SEQ ID NO: 569998 - DNA, 589 bp, Homo sapiens
aaaaatttcctctttttatttacttattttttatttattcaggagaggataccaagaggtatttaaaataaaacaaaaaatccaaactagaaatttatacttcacagtaagtatgttttttgacgcttcaaaatgccctgcaccccaaatgacttgtccatcctaataaaaatactcccatgctcttgctagtgacttaaagacatgcatatgtcttgttttggctaaagaaacataaaacacagctattatgcttattttaaaatgtttatttatcaaaattatgagagacaaggaaaaacagttaccttctgtttttggaggttactrtgttagatgtgatgtctggaactgatacagccaaattgggccatgagggtaagcagtgctaacatgccagcacacaggaccaattcactaagaattgtcagtgccgaaagaaagaaggaatctggttccctaatggcataattaagcccctgaaggactcaaggtaaaatgtgttcctttggctttttgttacatgtgacaaagattttttttttattctttaagttaatttgggttaaaatgtctattgatggaaacc

SEQ ID NO: 569999 - DNA, 563 bp, Homo sapiens
tttataggcgtgagccaccatgcccggcctagatgccttatttctctattttatggcaaatttctatgaaaaagtaatatgaaagtgtatttaaaataaaatatattaatttagttatgccagttttcaaaataaaagacatcattttaaagatcagtgaatttwattcattattttatttctttttgccgaaatgttacaataaccaatgtcagaaaacaaaatgagttttatcgaagttttgaaacatagtttctctaattctatgactattcgtgcttacttgaaaactgtgataagttaacctgaataatcagactaatttacttgtttacaaagtatatttttaaaagaaaatgtaattccccacgtgtgcacacacacacacttagcctgctactgcctctgtttaagtgtacacaaatgcttgaaaacctttcaacattataaggcattgtgggtagggcttgtgtctgtcttactcactgccatatccctagtcttctaatatagtgtggccacataataagagataagtacgtattgagataatacaggaatga

SEQ ID NO: 570000 - DNA, 563 bp, Homo sapiens
tttataggcgtgagccaccatgcccggcctagatgccttatttctctattttatggcaaatttctatgaaaaagtaatatgaaagtgtatttaaaataaaatatattaatttagttatgccagttttcaaaataaaagacatcattttaaagatcagtgaatttaattcattattttatttctttttgccgaaatgttacaataaccaatgtcagaaaacaaaatgarttttatcgaagttttgaaacatagtttctctaattctatgactattcgtgcttacttgaaaactgtgataagttaacctgaataatcagactaatttacttgtttacaaagtatatttttaaaagaaaatgtaattccccacgtgtgcacacacacacacttagcctgctactgcctctgtttaagtgtacacaaatgcttgaaaacctttcaacattataaggcattgtgggtagggcttgtgtctgtcttactcactgccatatccctagtcttctaatatagtgtggccacataataagagataagtacgtattgagataatacaggaatga

SEQ ID NO: 570001 - DNA, 527 bp, Homo sapiens
cttatttctctattttatggcaaatttctatgaaaaagtaatatgaaagtgtatttaaaataaaatatattaatttagttatgccagttttcaaaataaaagacatcattttaaagatcagtgaatttaattcattattttatttctttttgccgaaatgttacaataaccaatgtcagaaaacaaaatgagttttatcgaagttttgaaacatagtttctctaattctatgactattcgtgcttacttgaaaactgtgataagttaacctgaataatcagactaatttacttgtttacaaagtatatttttaaaagaaaatgtaattccccacgtgtgcacacacacacacttagcctgctactgcctctgtttaagtgyacacaaatgcttgaaaacctttcaacattataaggcattgtgggtagggcttgtgtctgtcttactcactgccatatccctagtcttctaatatagtgtggccacataataagagataagtacgtattgagataatacaggaatga

SEQ ID NO: 570002 - DNA, 563 bp, Homo sapiens
tttataggcgtgagccaccatgcccggcctagatgccttatttctctattttatggcaaatttctatgaaaaagtaatatgaaagtgtatttaaaataaaatatattaatttagttatgccagttttcaaaataaaagacatcattttaaagatcagtgaatttaattcattattttatttctttttgccgaaatgttacaataaccaatgtcagaaaacaaaatgagttttatcgaagttttgaaacatagtttctctaattctatgactattcgtgcttacttgaaaactgtgataagttaacctgaataatcagactaatttacttgtttacaaagtatatttttaaaagaaaatgtaattccccacgtgtgcacacacacacacttagcctgctactgcctctgtttaagtgtacacaaatgcttgaaaacctttcaacattataaggcattgtgggtagggctwgtgtctgtcttactcactgccatatccctagtcttctaatatagtgtggccacataataagagataagtacgtattgagataatacaggaatga

SEQ ID NO: 570003 - DNA, 608 bp, Homo sapiens
tctcaactccctgaactcggttcttgtgctgaatactgatggagtaggtagtttatttcattaatgccccccatcaatgtgcttatggaataacatgtcaaagtaaaattaagaaggaaacttaagtcagtaatatcttctgtcaaaacctgaacacattaattacatttactttcctattgcttgaacctgacttactttcctattccataaactttttcaaaatgtaaaaaccaagaccattttgtttttgttgttgctgacattgtagttattaggagtttagaaaatattttagatayggggcttctttgccaaaacattattctgattctaagtgcccgtaagttggaagacaaagtaagactgtttctctaagacattattactgatgcatgcagattttatagtttttggggggaacaaaattatttacaaaaaatagtttaaggcatttttgtaaatcttaaacatctctaatttagtctaacctgcgaatagcagaaagggggcaagctggcaaacatgctgacttgaattcacttccactactagagctttgtcctggccttagatgcctggtgtcaatggcatctttttgtggtatt

SEQ ID NO: 570004 - DNA, 627 bp, Homo sapiens
atatgagcacactttttcaggactgggagtacagaggtctcaggaaacttatttcattccctactactatgcccttctacacaggttttttttatttggttgtgcagttcagtctacattccagtaagtggcacttttgagtaagagctttggcaagagccaatgggtatgttatttgctcttttttacaggtaagggattgctgttgtcacaggttgttggctagtctatgaattacctcatgccatgagtttcctgttcaaccctggtttgagtggacaaagatgagcagaactggaccaccaagcttgtccttcaatactccagtgacaaatggaagcacctacattgataggaattgtaaggggagctcttggtgaattgcaccaaggtctctgccaggggaagaaagaggctgcaccagcttcacctcctaagaaggaaggaacatgatcttcactatcatacctttgtccccgggcttgtgamatgtcttttatctacaggctgtatgcaacagaggtccactgaaaatgccaatcctgtggctattacccacatggcctcagagtggaacctttttgctcagttcaaaagagatggctctgtgtcttgttgcactatgct

SEQ ID NO: 570005 - DNA, 561 bp, Homo sapiens
tgtctcaaaaaacaaattactttctattttatttagaaaaatagaaataaagagatcagtgcctttgaaaatatttgactttgaatcagtagcttggggtaaatatgtgtttagtattaagttcagatcaaatctgctgatgttctaaatgttcaaatattcagatttcttatttcagtattttactggccagaaastagtagattcagagttttgtaataatatttaaccaacacagaataaacattaaacatgagaacttcctaaattgatattaaaagccagatttgtctatcagagtgaacatacaaatgataagtaagaatattatgtttatatttgtaaacccctgaaactgtcaccaaatttagatgcaacaattggtgttttgttgatcctttaatatgtaagttaaatataacgtatgatatagttttatctcattttctatatttaaaactgagaaattattctgcaaagcatattcatattttaatgttttcccaaatttcactggtctaatgatattttttcatctgttttttcacaatcaatgaatat

SEQ ID NO: 570006 - DNA, 598 bp, Homo sapiens
ctatccctcctccctccctcaaccccgcaacagactggattaagaaaatgtggcacatatacaccatggaatactatgcagccataaaaaatgatgaggtcatgtcctttgtarggacatggatgaaacatggaaaccatcattctcaaacttttttttttaacctttctcttgatatgtaaacatctcaaaagatcaggacttgattatcttttctcagtagactgttcctccttctttatcttctcttagtattatatgtgagaaaaatttttaattatttaatatgattgcattaagataggttctagttatacccaatcaacaaatctacagttgcatacatggtgaattctttgcaacatcatagtccagtgtgctggtgtggctctcatggacaatgatcttctctttaactcctattcttgactctccatcacactgaacctgtgtgccttattttaaaatattgcaatccacatttcataatattgccatctataatatttcataattttgcctctatctatccttagttttatgctttatttgtgtgaaatttatagtatagtgtacaccttataattcctcttgattt

SEQ ID NO: 570007 - DNA, 598 bp, Homo sapiens
ctatccctcctccctccctcaaccccgcaacagactggattaagaaaatgtggcacatatacaccatggaatactatgcagccataaaaaatgatgaggtcatgtcctttgtagggacatggatgaaacatggaaaccatcattctcaaacttttttttttaacctttctcttgatatgtaaacatctcaaaagatcaggacttgattatcttttctcagtagactgttcctccttctttatcttctcttagtattatatgtgagaaaaatttttaattatttaatatgattgcattaagataggttctagttatacccaatcaacamatctacagttgcatacatggtgaattctttgcaacatcatagtccagtgtgctggtgtggctctcatggacaatgatcttctctttaactcctattcttgactctccatcacactgaacctgtgtgccttattttaaaatattgcaatccacatttcataatattgccatctataatatttcataattttgcctctatctatccttagttttatgctttatttgtgtgaaatttatagtatagtgtacaccttataattcctcttgattt

SEQ ID NO: 570008 - DNA, 598 bp, Homo sapiens
ctatccctcctccctccctcaaccccgcaacagactggattaagaaaatgtggcacatatacaccatggaatactatgcagccataaaaaatgatgaggtcatgtcctttgtagggacatggatgaaacatggaaaccatcattctcaaacttttttttttaacctttctcttgatatgtaaacatctcaaaagatcaggacttgattatcttttctcagtagactgttcctccttctttatcttctcttagtattatatgtgagaaaaatttttaattatttaatatgattgcattaagataggttctagttatacccaatcaacaaatctacagttgcatacrtggtgaattctttgcaacatcatagtccagtgtgctggtgtggctctcatggacaatgatcttctctttaactcctattcttgactctccatcacactgaacctgtgtgccttattttaaaatattgcaatccacatttcataatattgccatctataatatttcataattttgcctctatctatccttagttttatgctttatttgtgtgaaatttatagtatagtgtacaccttataattcctcttgattt

SEQ ID NO: 570009 - DNA, 512 bp, Homo sapiens
cccaaaagagaaggagagtaactagaaaaaaaaaaagaataaaccaaccccaaagctagcataagcaattaagtaactaaaattagagaagaacttaaaactgagatgaatattccattaaaaaagaaatgaaaccaagagttgtttcttcaaaaaattaacaaggttgatagactgctagctagattaacaaaaaagagaataagtaaatacaattttaaattacaaagataacatcacagctgatcccacagaaatgcaaaagagccacatagagataatgtgaacaacaccgtgaacacaaatttgagaatctagaagaaagggatacattcctggagacacacartctctcaacactgaataaagaagagactgaatccctaaataggccatgtttaagtccttcaatataatcagtaatttaaaaaatctgccaaccacgaaagctctggaccaggtgaattcacaggcaaattctattggacatataaaaaagaactggtatcaat

SEQ ID NO: 570010 - DNA, 543 bp, Homo sapiens
ttcttttgagaagtgttgtgttcatgtcctttgcccactttttaatgcggttgttttttttttttttttgtaaatttgtttaaattccttgtagactctggatattaggcctttgtcagatggatagattgcaaaagttttctcccattctgtaggttgtctgttgactctgatgatagttccattggctgtgcagaagctctttagtttatatacttgcattttgatagaaaggtagatataagctttctaasaagctgtaaccttgaagaaaatggacagtaggcaatcttagctggtatgtaagtaatcaatgctttttctgatcataactttaatgcacagtaatttaatggacagtactgctaatttagttttttccagcatcatttgtacaaagtctcctaaaatccatcacagttgagaacagtctagacagttattatgacacaatcaaaaggaaagctggcaaataaaaaaagaaaagtgaatagaagagctgattaaaataacagtatagtttataggaggcttctcttaaat

SEQ ID NO: 570011 - DNA, 524 bp, Homo sapiens
gcagatcacttgaggtcaggagtttgagaccagcctggccaacatggccatgaactaaaaatacaaaaattagctgggcatggtggcacgtgcctgtaatcccagctactgaggaggctgaggcaggagaattgcttgaaccgggaagtagaggttgcagtgagctgagattgtgccattgcattccagcctaggtgaagaagcaggactccatctcaaaaaaaaaaaaaaaaaaaaaaatcacaacataacacctttactttaaggccgcctacttttacacacagttatttgttgaatgtaggtgggaatcagactgtgttctttacctgctgtcattttggagagaatgcytgtgaaagagggttgatttacaaggaaaatgcataacaattcctatgcaaatctacttcccaaaaaaggttttagttgctaaaagtgtaggctatagattcagacagtcccaggttcaaatcctgaccttatcacctatcaactgtgtgacctattaacttaagttgctt

SEQ ID NO: 570012 - DNA, 524 bp, Homo sapiens
gcagatcacttgaggtcaggagtttgagaccagcctggccaacatggccatgaactaaaaatacaaaaattagctgggcatggtggcacgtgcctgtaatcccagctactgaggaggctgaggcaggagaattgcttgaaccgggaagtagaggttgcagtgagctgagattgtgccattgcattccagcctaggtgaagaagcaggactccatctcaaaaaaaaaaaaaaaaaaaaaaatcacaacataacacctttactttaaggccgcctacttttacacacagttatttgttgaatgtaggtgggaatcagactgtgttctttacctgctgtcattttggagagaatgcctgtgaaagagggttgatttacaaggaaaatgcataacaattcctatgcaaatctacttcccaaaaaaggttttagttgctaaaagtgtaggctatagattcagacagtcccaggttcaaatcctgaccttatcacctatmaactgtgtgacctattaacttaagttgctt

SEQ ID NO: 570013 - DNA, 626 bp, Homo sapiens
attgcttgaacccaggaggtggaggttgtagtgagctgagatcacaccagcgcactctagcctgggcagcaaagcaaaactcagtctcaacaacaacaacaacaaaaaaaaggttgcagattaaaaagagaaatagaattttaaaatcatgctggaagattttatcacacatcttttagtagaaaaatatttatcagagaagattgagaagagttaagcaacacaattaacaaatttgacttaactgacatagaatgwctccaagaactgcagagtatgcatttcttatcaagcatatataaagtatattctgggccctgtatccaatctcagtgaactttgaagtattgaaatcatacagagaacaacttcagagaacaatagtactacattggaaatcagtaataaatgggtactttttaaaatgtacctccatgtttctaagtgattagtaatcaaagaggaaatcataatgggattaaatacatgttgaactaaatataaataataaaacctggtctattaaaacttgcaaattttagctatggctagacttctattaagaactaaaaaattaggaccaggcaaggtagctcatgcctgtaatcccaccactttgtggaccc

SEQ ID NO: 570014 - DNA, 351 bp, Homo sapiens
attcttctgagagctattacctgagagtcttattatctgcttaataagaggacaatgtttatttgtagtaaatttcctctccttaccctccaatggtttgtcaccatcatcttccatgaactcctagcccctatacttttctgtatggtacagaaatttctgtcatctgtcccatttacaagtctcatattttatgtggcttccatatatatgtgcacatactacrcttctatgccttttctcttgttaatctgtctattgtcagtttgttttatagactcaaattattgagccttcaaagcgagagaagaaaatttcctcttcctgtacaccacaactgcttcctagatg

SEQ ID NO: 570015 - DNA, 508 bp, Homo sapiens
ttgtttttgttgctttcgctttagggttcttggtcataaaatctttgcctaagccaatgtctagaagggttttttccgatgttatcttctasaatttttatggtttcaggtcttagatttaagtatttgatccatcttgagttgatttttgtgtaaaatgagagatgacaatcaagtttcattattttagatggggcttgccaattatcccagcaccatttgttgaatagggtgtctttttcccaccttatgtttttgtttgctttgtcaaagaccaattggctgtaaatatttgggcttatttctgggtctgtattctgtttcattggtctatgtgtctatttttataccagtaccatgctattatggtgactatggccttataaaataatttgaaatcaggtaatgtgttgcctccagatttgttctttttgcttagtcttgctttggctatgtgggatatttttggctccatatgaattttagcactgttttttctagttctgta

SEQ ID NO: 570016 - DNA, 581 bp, Homo sapiens
aatcctaaagtaaaagaataaatctggaggcatcacattacctgacttcaaattattctacaaggctatagtaaccaaaacagcatggtactggcataaaaacatacatagaccaatggaacagaaaaagaacccagaaataaagccaagtacttacaaccaactgatctttgacaaagcatacaraaacattaactggggaaaggacaccctatttcccctattcaataaatggtgctgggaaaattggacagccgtatgtagaataatgaaactggatccctatctctaccacatacagaaattaagatggactaaagacttaaatctaagacctgaaaccataacaattctagaagaaaacaggaaaaactcttctggacattggcctaagcaaagaatttatgatgcaaaccccaaaagcaaaggcaacaacaaccaaaataaataaatggggtataattaaattaaaaagcttctgcatagcaaaagaaattatcatcagagtgaacagacaacctacagaataggagaaactgtttgcaaactatgcatcaacaaaggactaatatccagaatct

SEQ ID NO: 570017 - DNA, 581 bp, Homo sapiens
aatcctaaagtaaaagaataaatctggaggcatcacattacctgacttcaaattattctacaaggctatagtaaccaaaacagcatggtactggcataaaaacatacatagaccaatggaacagaaaaagaacccagaaataaagccaagtacttacaaccaactgatctttgacaaagcatacaaaaacattaactggggaaaggacaccctatttcccctattcaataaatggtgctgggaaaattggacagccrtatgtagaataatgaaactggatccctatctctaccacatacagaaattaagatggactaaagacttaaatctaagacctgaaaccataacaattctagaagaaaacaggaaaaactcttctggacattggcctaagcaaagaatttatgatgcaaaccccaaaagcaaaggcaacaacaaccaaaataaataaatggggtataattaaattaaaaagcttctgcatagcaaaagaaattatcatcagagtgaacagacaacctacagaataggagaaactgtttgcaaactatgcatcaacaaaggactaatatccagaatct

SEQ ID NO: 570018 - DNA, 581 bp, Homo sapiens
aatcctaaagtaaaagaataaatctggaggcatcacattacctgacttcaaattattctacaaggctatagtaaccaaaacagcatggtactggcataaaaacatacatagaccaatggaacagaaaaagaacccagaaataaagccaagtacttacaaccaactgatctttgacaaagcatacaaaaacattaactggggaaaggacaccctatttcccctattcaataaatggtgctgggaaaattggacagccgtatgtagaataatgaaactggatccctatctctaccacatacagaaattaagatggactaaagacttaaatctaagacctgaaaccataacaattctagaagaaaacaggaaaaactcttctggacattggcctaagcaaagaatttatgatgmaaaccccaaaagcaaaggcaacaacaaccaaaataaataaatggggtataattaaattaaaaagcttctgcatagcaaaagaaattatcatcagagtgaacagacaacctacagaataggagaaactgtttgcaaactatgcatcaacaaaggactaatatccagaatct

SEQ ID NO: 570019 - DNA, 511 bp, Homo sapiens
taggtgggtggatcacctgaggtcaggagttcgcgaccagcctggccaacatagtgaaaccccatctctactaaaaatacaaaaattagccaagtgcggtggtgggcacctgtaatcccagccacctgggaggctgatgcaggagaatcatttgaacctgggaggcggaggttgcagtaagccaagactgcaccattgtactctagcctgggaaacaagagcaaaaccccatctaaaaarcaaacaaacaaaaaaacaaaaacagaatgattgtgaagccgggggcatggtggctcatgcctgtaatcccaccaatttgggaggctaaggcaggagaatcacttgaggtcaggagtttgaaaccagcctggccaacatgataaaactccatctctactaaaaatacaaaaattagctgggcatagcggcaccacctgtaatcccagctactcgggaggctgagccacaagaatcacttgaacccaggaggcggaggtcacctgagctggga

SEQ ID NO: 570020 - DNA, 511 bp, Homo sapiens
taggtgggtggatcacctgaggtcaggagttcgcgaccagcctggccaacatagtgaaaccccatctctactaaaaatacaaaaattagccaagtgcggtggtgggcacctgtaatcccagccacctgggaggctgatgcaggagaatcatttgaacctgggaggcggaggttgcagtaagccaagactgcaccattgtactctagcctgggaaacaagagcaaaaccccatctaaaaaacaaacaaacaaaaaaacaaaaacagaatgattrtgaagccgggggcatggtggctcatgcctgtaatcccaccaatttgggaggctaaggcaggagaatcacttgaggtcaggagtttgaaaccagcctggccaacatgataaaactccatctctactaaaaatacaaaaattagctgggcatagcggcaccacctgtaatcccagctactcgggaggctgagccacaagaatcacttgaacccaggaggcggaggtcacctgagctggga

SEQ ID NO: 570021 - DNA, 605 bp, Homo sapiens
atttttcctctgcttttctcaagcagaagaaattttatcccgtagccaccacagctggtaatgtgctgagtctcacctgaagccagcaagtcttggaggctcacccaaggctacctcgatgtagtacctggatatcactgcttgttattcagggaccaagggctcttcagttagcaggagatgaatgctgccaggactgagttattctcttcaaagtagcagcatcccttctatcccaggatatgtctagaaatgtcatccgggargtagcacctggaataaggacctcatgatgctgaccgttgtctatcatgctgtggttgagctggtatcctagatgcaaggcaaagtcctccccactcttttctcgattggaataaaaaaagtgtcttttggagccacaagctgtgcagcctgaggttagaggagaggtgatgccattactcccttggctgccctagctggggtttcagtataccatgtgcccccttagtccactgtctttgggcctagttcagcacgaagaccctcctaagatttgcagttcttatgttgtagactgcctattgagtttacttggagacacagaatgctgcagccctcag

SEQ ID NO: 570022 - DNA, 550 bp, Homo sapiens
acaatgaatataagatatgcaatggatttacagtatacaatagaacataacttgccaataaaataaactacagctatatggaaaaacttggatttatatctcaaatataatattaaacaaaagaagccagatattcattggattattatactcataaaaacttcaaaaatatataaaactaatcaacgtggttagaagtcaaaatcaagattattttaatggttggagacaattgttaatcactaagagtggtgcgaggggaaagaaacttgatcatgagaagtgttaaaattttaatcttagaagtgtttatatagctgttctatgtcaaaatttactgttgctgtagaacaaatctatgcacttttatatgtcttatatgtcaagaaacagaaaatgagatatatagacagaatttgaaaactaaaagagataaatgataaaatttctcaaaacccaacttggagatttaaggagatctgaaaatagctaaattgaggttaagaaacagaaaaatcraaggagaaagcccaatatacttcttaaaagt

SEQ ID NO: 570023 - DNA, 603 bp, Homo sapiens
gaagacatttttcttttcccattgaatttatttggcatcatttaaaaaaactaataaactatagatatgcaactttatttcttagttctgtactctgttctactggtccatatgtctttacttatgccagtacaacattgctttgattactgtaactgggtagtaagttttgtaatagataagwatgagtccttaagttaatttaaacatctggtgaaatgcagaaattggcaaatttctgttgccttaatcagtactgagactcaagttacaggagcagaatattagatgattccactaaatttaattattttacctccaatgactttaggagaattctgaatataaaacagagcaaataggtatagctgaccttaaccatcagaactattatcttgcctaatttcccatattcatagcacacattgccttaaaatatcctatataataggcatgagcaatttgacaaaatgtgtaataaattaaaattaaattaaaactttggtacttaaaaattgatgaaattctacaccatggtcctccatttaaaataattaatatgatccaatgtaaattaaaagagaggcttcatggatttaaact

SEQ ID NO: 570024 - DNA, 614 bp, Homo sapiens
ctgcacttttatgtttatggcaacactattcacaatagccaaaattgggaagcaacccaaatgtccatcaacgcatgaatgaataaagaatatgtggtacatatacatagtaaagtactattcagccattaaaaaggagattctatcactcacaacaacatggatggaactggaagtcgtcwcattgaataaaataagccaggcacagaaacttcacgttttcacttatttgtcagagctaaaaattagagcagttgaagtcatgaagatgtggagtagaaggatagttaaagagcctgggaagaggagtggaggagtggaggaaaaatgaagattgttaatgggtacaaaaaatagagtgaacgagacctagtgtttgttagcacaacagtgtggctacagttaacaattatttaattgtacctttaaaaataacgagaagagtataattagattgtaatataaaggacaaatgcttgaggtgatggataccatttttaccctgatgtgattattatgtgttctgtaaatgtatagtagcaaaatatcgcatgtccctcataaatatataaacctactatgtactcataaaaattaaaaattgaaaaataatt

SEQ ID NO: 570025 - DNA, 453 bp, Homo sapiens
tgatttacatagggctcattgatttattggatcagctgtggtatytacatggtgcacggggaaggctggtcaccccaccctaatcttattatgcaaatggcattccagtttattggcaccatcttgtctgctccttcttctcctttttttttttttttttttttttgtggtggagtctggctgacaaagagaagggaagatggagctgccatcttgaacatgattggcacaactgccggtatctatgtctgcagatcgattttacaggctgctcttcgttaaaaaggaaaataatttggggctgcttttcattataaagaaaaaccttactgaggactcccatgcccttagcagctgccttaatttcttaactcctatatcaacatgaaacacataattatgaaaataaaaacctcagtaatatattatcaaaatatattaccacattcatcc

SEQ ID NO: 570026 - DNA, 582 bp, Homo sapiens
tgtggcttttccaggtgcatggtgcaagctctcaatggatctaccattctgggatctggaagatggtggccatcttctcacagctccactaggaagcagcaccccagtagggactctgcctcctcaaccccttccagactttgggcaccaacgagcatgggaaagagtccaagggggagctgaggacagctcggcattgcctgtagtgacttctcagcattaacagctgtgggcgccgtccacagcaggttgatggtgacaggaggcagacaggctyctgcgtggaaatgagtgggtccctagtaagcctcaccttcaagctggggatggcctgaagcatggaagcctgggttgtcagttccacggaccagagcgaggacttatggtgctttttctaggcctgtccatggccgcccatggaccaatcagcacaaactttctccaccagccaaagaggcttccagatagaaaagtgacaccccaaggatcctgtgacaaaatcacactaagcctttgtattggtctgtttttatgctgctgtgaagaaattctcaagactgggtaatttataaggaaagaagt

SEQ ID NO: 570027 - DNA, 559 bp, Homo sapiens
tttgtttacactgaaaacaaggtggtattggagtgttatagggtcatggagaagactttcgatgatcaattataggttttaatttaccctagcttttaaaggaataggatacactgttttttctttactacttccatctctctttctctctgactccttctttgtctgtctcttcctctctccttctctctttgactttctgtctgtctgtcttttcctctctctgtctctctctttctgtctttcccccacactctcttccctctcttttctttctgactccctctttgtctctgtcacttcctctctctctgtctctcactttctgtctctttctctctttcctttctgctggtctttccctgcctctgccagccacttatgctgcggccctcccctctccctccccttttgatggcttcagcgtataagactgccacctccttgggtttttgcactatgtrcaataactccgtggtttccttgtgatatttaatgggggttcccccagaagaagttctttccattttgcagcatgggcatgtaggattagataagc

SEQ ID NO: 570028 - DNA, 561 bp, Homo sapiens
tacaaccaataccacagaaatacaaaagattattcaaggctactatgaaaatctttacacacaaaaactaggaaacctagaggaaatgaataaattcctggaaatatacaactcttgtagattaaaccaggaaaaaatagaaactctgaacaaaccaataacgagcagtgagactgaaatggtaatttaaaaattgacaacaaaaagtccaggaccagatggattcaaagctgaattctatcagacattcaaagaagaattggtatcaatcctactgacacaagacagagcaagagggaaactttcctaaatcattccatgaagacagtatcaccctaataccaaaaccagaaaaggacaaaacaaaaaaagaaaactacagaccaatatctctgatgaacatagatgcaaaaatcctcaacaaaatactagctaactgaaatcagcagcatatcaaaaagataatgatcgagtgggtttcataccaaggatgcagggatggcttaatatatgsaagtcaataaatgtgatacaccacataaacagaattaaaaagaaaaa

SEQ ID NO: 570029 - DNA, 507 bp, Homo sapiens
aaaatattcatgtaagatgattcttaaatactcaaaactcattcatgtaagtgatgagacttgtcagttgcattgcgcctttgctcttgaagggcttttctcagtagggatcaaaccctactgaaatgctctacaaatggcttctctgaagggagcctctaaaccagagaagattgattcagtcccctgtagatctctgtcttctgacagatttctgaacgttttatgcaactgttagaaaactgatggctttgtgcaaccctttctcactatttgtacctggttagtctacgcattcttcttagccatgttcctgggcatgattattgcccagaaaaactcaagatgaagtggccaattgaaagtctgctgctataggtttacctgcagaagtggrtatttttggattatttagctgtctacagcatcagatttcctggacaatagccaaatctctgcttcacattatgctatggaactgaaactcaagagtaaaattacactgct

SEQ ID NO: 570030 - DNA, 609 bp, Homo sapiens
aaagttgtcagaagtctatatttaagagagtttgtcagggtccttttcatcctttcatgaacctccttgaagacacagtactgtaggattttgcttgcttgtctagttttcagagaaactgcatcagaattaagcagttaactgtggaaacaacttaaaatggttatagttaaagacatgattgacaaggaaatttggttatttctgtggcctgcaataacacagtaaccataattaagactgatagcatataccccgacataaagaattttagaatctcatataattttggaataaatcttaataaaaatataacacaaaggttaaatatcatttcttatttgacagtgcttcctatgtaatttaacagatcaaataatcatttttttctcttttgaataccgcaggggccctttgtagcatgccaaagttagaggtaaaaaaaaaagacttaattttgaagttgaaatttgattttgggaagcttgtcaagtgtgtygaagatttaaaatacttgaccaaaataggatcacatttatatatatgaatatatatatgaatatatatattatgaatatatattatgaatatatatattatgaatatata

SEQ ID NO: 570031 - DNA, 543 bp, Homo sapiens
ttttatttcttaattcagtatgtttggtatcaaaaactatttctaagttgttcttttcccattgtgatttctctcctagttttatrtgtgtgtgtgtgtgtgtgtgtgtgtgtgtgtgtaagaaaaagtcatagctttgatatcatagtacaaaaggaagtggaaatcttcacaaagcaattcagcatctgtggctatgcaggggaaatactatagataattgaagatattatctagatagcttgcaatcaaaatgtatgttcacctgaaattgctttgcacttaatggcactattctggcacttatgctactgaacatctatgttccagttctcttcttatagtcatgaaaatgttataagtagagccacaagttgaatttcatacgtcctagccagctcatttcttagccattatagctggactgtgaaaatatgctggtgccttggtcattttgacttcgttatgaaagcctaatggtacaacctaatagtacactgatactctgtgtaaggctagaagcatatagtctatttactgtat

SEQ ID NO: 570032 - DNA, 573 bp, Homo sapiens
tttctgtacactctattttccatgttttcttgagctgctgccacttcccatttatatccctacacattatcactgcctcaaatttctgtagaaaatactcaaactgtatttaaaggctttagagatggaatttcaacagccctgtcactttcattgtgtttcagccaagggtagattgctctaattacctacatctttttggctggagcagtttcaacttttctcaattcctacttatatctttctaatgaaataacaagaatacagcagctgaaaaatcatgtcttttaataaccccatctcataattttttatttcttaattcagtatgtttggtatcaaaaactatttctaagttgttcttttcccattgtgatttctctcctagttttatgtgtgtgtgtgtgtgtgtgtgtgtgtgtgtgtgtaaraaaaagtcatagctttgatatcatagtacaaaaggaagtggaaatcttcacaaagcaattcagcatctgtggctatgcaggggaaatactatagataattgaagatattatctagatagcttgcaatcaaaatgtatgttca

SEQ ID NO: 570033 - DNA, 491 bp, Homo sapiens
gttactgatttgaggtctttctaactttttgatgtgggcatttagtgctataaatttccctcttaacagtgctttagttgtataccagagatgctggtacattctttgctctcattagtacaaacaaacttcttgatttctgccttaatttcattattttcccaggagtccttcaggagcagattgctcaatttccatgtagttttgtggttttccgtgaatttcttaatctggagttctattttgattgtgctgtggtctgagggattgttatgatttcagttcttttgcatttgctgaggagtgttttacttcttattatgtgaccaattttggagtaagtatcatttggccatgagaagaatgtgtattttgttgtttgggggtggacagctctgcagatatttatcaggtctccttgatccagagctcagttcaggtcctgattatcttcrttaattttctgtctcaatgatctgtctagtattgtc

SEQ ID NO: 570034 - DNA, 491 bp, Homo sapiens
gttactgatttgaggtctttctaactttttgatgtgggcatttagtgctataaatttccctcttaacagtgctttagttgtataccagagatgctggtacattctttgctctcattagtacaaacaaacttcttgatttctgccttaatttcattattttcccaggagtccttcaggagcagattgctcaatttccatgtagttttgtggttttccgtgaatttcttaatctggagttctattttgattgtgctgtggtctgagggattgttatgatttcagttcttttgcatttgctgaggagtgttttacttcttattatgtgaccaattttggagtaagtatcatttggccatgagaagaatgtgtattttgttgtttgggggtggacagctctgcagatatttatcaggtctccttgatccagagctcagttcaggtcctgattatcttcgtkaattttctgtctcaatgatctgtctagtattgtc

SEQ ID NO: 570035 - DNA, 551 bp, Homo sapiens
gcttaagtgttagaaatacaaagtgagagaaaaaggcgggggttggaaagaactctactacaccagattacagagtctggcatcagtagacaattataggtacaaggaaatgcagtgaggtgtgagtgtttgatatagtttggatgtgtcctcccaatctcatattgagagttaatatccattgttggagttggggtcttgtgggaagtgactggatcatgggggcagatttctcaacaatggtttagcaccatccacttggtgctgtcctttcaatagcaagtgagatcttgtgagatctggttgttgaaaagtatgtggcacctccctcactctctctcttgctcttgcaatgtaatatgctggctctccttttgcctttgccatgattttaagcttcctgaggcctcaccagaagccaygcagttgcctggcaccttgcatcccatgcagcctgcagaaccatgcatcccatgcagcctgcagaaccatgagccaattaaaactctttcctttataaaatacccagtctcaggtattttgttatagca

SEQ ID NO: 570036 - DNA, 475 bp, Homo sapiens
ctgttaatatctgtcttttagttagtttatttgggtaattaacacttaatataattatttacattgaacataaaaggmttatgtctgccatctaagatgcctccaggcttcctaattgatgtgtcttaaaacttcaaaaagaaaagaaattattttattattttaataatttaatttggctctttttttattttaaacttttattttaggttcaggggtacatgtgcaagttttgttatataattaaaatcatttcacgggagtttgttgtacagattattttatcacccaggtactaggcctagtacccaatggttattttttctgatcctttccctcctcctgccttccatcctcaaggaggcccttgtcgttctgttgttcccctcacagggtccctgtgttctcatcatttagctcccacttacaagtgagaacatgtggcatttggttttctgtgtctgcattaatttgc

SEQ ID NO: 570037 - DNA, 511 bp, Homo sapiens
caccctagaaagctttctcatatccccttcaagtcaatctccactcttcatagccaacmgtgtttcagattttgattatcataaattattcttgctttgaacttaatatacataaaatcatagagtatgtattcttttgtgcctggtttattttgctcagcataatgtttatgaatgtcacatgcagtagtggttcattattcaaatataccataatttgtatattcattctcctgatgggtttttttttttcattttttggctattatgaaaaaagctatcagaaaaaatcttatacacatttgtttgtgaaaatatgtttatttctcatgggtgagtacttaagaataaagttactgaatcatagggtgcatgtaggcttaactttgtaagaaattagccattcctaaggtgattttattttacattgtcctctgcaatgtataaaagtttcagttgctccatatcccttccatcatttggtgtaaccagtctttagaaattttagcca

SEQ ID NO: 570038 - DNA, 595 bp, Homo sapiens
gggacttataatctacagaggagtacagaaaatagataagcaattataatataatacatgctttacctttgcagtgaagaatcttggcaccttattaagaacttaccaatattttaggttgttyactcttcgtgcagtttggagtatggctacaggttgacagaatgtgagacactgaccttatttagataaagtgcctgctacgtagtagatattcagccagtgtgctaaatcccggactgctttctacttgttgggtgggagacttgcagctgtttaaaaaaatttagcacctggctgggaatgatttattgatataacccaggaaatccatagacatttattttggttctatgatgtctgttattttgagagagaaataagaaaactacaagttatctaaaataatttttgtagaataatttctcaaagatttgactatgatcttgagcacttagtcatttttgcttctatttctctatagcactcagtatacaactccattagtgttaattgcagtgtgttaatcatctgattatatatcccaggtttggagaactatgagcacaccaggactctgagatgaatcccaaac

SEQ ID NO: 570039 - DNA, 635 bp, Homo sapiens
actacaccagtaaatttgaaaacttggacaaattttctatttcctatgaaagtatttatcaaatattacttaataacaaattaaatgtctgaatataccttaaccagaagttgaataaataaattttaaccaactctctctcctccataaaattctaagactttaggacttactggtaatttatgctaaacgtttacatgttttaacaagctcttccagagaacagaaaatgagaaaatcttcactaaattgttttataaggataaaaaaattagagaacaaaaaattataggtcaatttctcttataaaatagtgcatatatcctaaataaaatgttgtcaatccaaattaaaagatatataaatatagttcattataatcaagttgaatgtatattagagatgttaaaaatcaattagtataattttccactttaagtttgaagaagaaaacgatttagctgtctcaacagatgagttaaagcattcaataaaattaaacatctattcatrggaaaagttaaatctagaagggagcacatttaacctgataaaaacatatccataaaaatctatggtaagcaccataaatattgatggaaaaaacattttaaaaatctatatgctacaagtat

SEQ ID NO: 570040 - DNA, 546 bp, Homo sapiens
tcttaacttctgctagtagtcaaccaactgctgaaaaagcagagacttagaagccaaaagactggaaaagagttcacagaatgagccagactgtccastagcaaacaggctatagctagtggaggaggcagaatagaagcccctaccaaccactaaggggataccagtgcagaccacagaacatctgggaaaagctacagggagcttagaggtgggaattttccaaacctgaacgctggctatgatttaactacagttcttttcatctgattacatcccatgagagttttaccttttatctcttcctcccatggtgcttcccattttttcacacatcctttatataactcccacgattagcaggtaatacaattccttttgccttaactgccccagtagaacttgagttggtctggttgcttcaaaagtctatacctagagtagaatgcaagactgagaaatctatgggctcctgaaagattagcaagatggccattaaccctcctacaagctcttggaaatcagagctaccaggaaacccaaggg

SEQ ID NO: 570041 - DNA, 505 bp, Homo sapiens
acacttttccacagaacggcttatgtcagcagaagaaaaaagtaacatacttaagaaacttggtgagaggaaatttaatttaaggagttttatatccaggaaaaaaaatgaaatttaagtgtaaaagcacacgtgcatttgcctattgtaatcatttgtctgttgtaaaactaagatacctcagataaaacatttccagacattgaaatgatttaatatataaaacttattcccaagtaacatggtttcttgtcctggaaacattttttcattaacttccaaatttatgaacatkaaagaagtcaggaatttttgttcctatgacttccctaaaaagttaccagaaatactaacataagcattggtgatgagcattaaagatatagctaattgcagactttaagactaaatggataataagagtgaaaaaatatatttatgtactgtagtatgcactggctatatactataccaataatggtatagttcaactatttttttaaaa

SEQ ID NO: 570042 - DNA, 580 bp, Homo sapiens
aaaaatgtatgctgacaattctgaagacatttctaaactattataatttaccaattattttaaagctagcttatttattaaagattttatttgttacataaacttgaaaaataatttgactagtctttcttttttcctgataaagtatcagactcaaacacttattttcttaagccaattatttagagctcttttatatagtttcagtagtgaaacattgtgtacacaacacataaatgcatagctgtattaggcatgccaatggaagtacaacttatagttcataaagactttttttcctatcttagattttcagattcttgataatgtgtttcacaaacctatgcagttgtcagctaaatatccttaaacttgcatattaaagaaaactcaggtgaaatttaaatagcaatatttacatcataaggtgtagagaaactctgttggtgctagacgkagattaaagatggatgccaaatcacataatattatagaaatcagtcataggattgtataaggagaccaatttatttagatagggactacctatcttttaactggacttctgaactctgggaag

SEQ ID NO: 570043 - DNA, 580 bp, Homo sapiens
aaaaatgtatgctgacaattctgaagacatttctaaactattataatttaccaattattttaaagctagcttatttattaaagattttatttgttacataaacttgaaaaataatttgactagtctttcttttttcctgataaagtatcagactcaaacacttattttcttaagccaattatttagagctcttttatatagtttcagtagtgaaacattgtgtacacaacacataaatgcatagctgtattaggcatgccaatggaagtacaacttatagttcataaagactttttttcctatcttagattttcagattcttgataatgtgtttcacaaacctatgcagttgtcagctaaatatccttaaacttgcatattaaagaaaactcaggtgaaatttaaatagcaatatttacatcataaggtgtagagaaactctgttggtgctagacggagattaaagatggaygccaaatcacataatattatagaaatcagtcataggattgtataaggagaccaatttatttagatagggactacctatcttttaactggacttctgaactctgggaag

SEQ ID NO: 570044 - DNA, 585 bp, Homo sapiens
tagcctagaactacacaggcttagggtcataaatatcagtcttccaccttcacgtcttgtcccactgaaaggtcttcaggggcaataacatgcatggagctgtcatctcctatgataacatacctggaacggaatacctgctgaaaaacctgcctgaggctgctttacagtttacttggtttttgtaaatggaaggagtatrctctaaaataaccataaaaagcatagtgtgctaaatacataaaccagtaacacagtcgtttagcatcaagtcttttacactgtacataattatatgtgctatacttttatatgactggcagcatagtaggtttgtttatacaagcattaccacaagcactggagtaatatgttgcactatgacatccctaggcaataggaaattttcagctccattgcaatttatgagaccaccattatatatgcaattaattgttaaccaaaatgtcattaagtggcacatgactgtatatgctatctctttttatttttattttttattttacatatatgtgtgtgatatgtatgtatgaatatatatatatatatatttgagatggagtt

SEQ ID NO: 570045 - DNA, 183 bp, Homo sapiens
tattttgtccttgttaattaaaaaataacactgaaaacacagtcgtcttcctttamggtaaaaacctgtccaatagtaacaatctcaatgatggcagaatgaaatcagaatctgattagattaaaaaggagggaaagggtgtggctaaggtgggtggagagaccctctcgtataaaagcccat

SEQ ID NO: 570046 - DNA, 183 bp, Homo sapiens
tattttgtccttgttaattaaaaaataacactgaaaacacagtcgtcttcctttacggtaaaaacctgtccaatagtaacaatctcaatgatggcagaatgaaatcagaatctgattrgattaaaaaggagggaaagggtgtggctaaggtgggtggagagaccctctcgtataaaagcccat

SEQ ID NO: 570047 - DNA, 472 bp, Homo sapiens
ggggagaaactccagaaggagaggtgagttcaatctyttggaattcatttttacaaaaggcgtatgagagtctaggggaatgcaataatgtcttgattccacaagtgttgtctgaggccaactccatgacagacacactgtatttctggaggataatgggacctctgccctggtaacggttaggcaactcttagattttcaataccaaggcaagagacttgacaatctccatttgcttgaatttcatcagaatttggtagactttctgaaatgatggacagaggttcggtggctgcgttactcaacgtcaggttttcctatgggtttggtattgttttcctattctccccttcccacaacccctggcaaccatcattcttctcttattttctgattttttttttgttcagttttttgttccttttaattcagaaggagaaagggaaggaaatgaaaagcaaagtttgtttaa

SEQ ID NO: 570048 - DNA, 472 bp, Homo sapiens
ggggagaaactccagaaggagaggtgagttcaatctcwtggaattcatttttacaaaaggcgtatgagagtctaggggaatgcaataatgtcttgattccacaagtgttgtctgaggccaactccatgacagacacactgtatttctggaggataatgggacctctgccctggtaacggttaggcaactcttagattttcaataccaaggcaagagacttgacaatctccatttgcttgaatttcatcagaatttggtagactttctgaaatgatggacagaggttcggtggctgcgttactcaacgtcaggttttcctatgggtttggtattgttttcctattctccccttcccacaacccctggcaaccatcattcttctcttattttctgattttttttttgttcagttttttgttccttttaattcagaaggagaaagggaaggaaatgaaaagcaaagtttgtttaa

SEQ ID NO: 570049 - DNA, 626 bp, Homo sapiens
tgtccaaggtcacagagctgagaagctgagatctgaagccacattgtgaccaccacctccagattcaagctctaactacttggcatgcctactgcctaggggctgtgcagggagcttttcatattccacattgctgagaactgatgaaactaaatatgggggagggaagattgtctttttgctttatctatgcctcaagaaccacagagatgaaacatgtacaaaaatgggaaattctagaagcttttttttttaatgaaggatattacmgttcataagaacaaagctatcacaggaatcattttcaatggattcagttacctgatgaaggtactgaagggaaatgcagaatccaaattatctaacagataattcacaaaatatgattgacagtggactcactttctggaagttagagcaggctggtgctaaactgaatcataatggaatgatatattccctcaggtgaaatacagtctaaatcttcatgctgttcgtgcagcacatagcattaatagaacatagtaatgtggacatactttctaaagcagcaatacaaatgtatattggcaaattgtctctttaatatattgtttaacttctccatagcactcaacacaatgtgt

SEQ ID NO: 570050 - DNA, 601 bp, Homo sapiens
attgtaaatcagattgacttcttcatgggttctcaacttcatcattatttgtgtatacaaatgctactgatttttgcatgttgattttgtgttctgcaactttacttaattcattgatacaatcaaatagtcttttggaggagtctttaggattttataggtataagatcatattgtcagcaagcagagataatttgatttcctcttttccaatttggatgcgttttatttttttttctcttgactgaytgctctggctaggacttgcagtattgtattgatgaattcttcttatggaaaagtggaagttctgctatatcaaaaagaaaagggggctgggtgcggtagctcacgcctgcaaccccagcactttggaaggctggacagatcatttgaggtcaggagttcgagaccagcctggccaacatggtgaaaccccatctctactaaaaatacaaaaattaactgggcgtgatggtgcacacctgtggtcccacctacccaggaggctgaggcaggagaatctcttgaacccaggaggtggaggttgcagtgagccaagattgccccactgcactccagcctgggtgacagagcgaga

SEQ ID NO: 570051 - DNA, 601 bp, Homo sapiens
attgtaaatcagattgacttcttcatgggttctcaacttcatcattatttgtgtatacaaatgctactgatttttgcatgttgattttgtgttctgcaactttacttaattcattgatacaatcaaatagtcttttggaggagtctttaggattttataggtataagatcatattgtcagcaagcagagataatttgatttcctcttttccaatttggatgcgttttatttttttttctcttgactgattgctctggctaggacttgcagtattgtattgatgaattcttcttayggaaaagtggaagttctgctatatcaaaaagaaaagggggctgggtgcggtagctcacgcctgcaaccccagcactttggaaggctggacagatcatttgaggtcaggagttcgagaccagcctggccaacatggtgaaaccccatctctactaaaaatacaaaaattaactgggcgtgatggtgcacacctgtggtcccacctacccaggaggctgaggcaggagaatctcttgaacccaggaggtggaggttgcagtgagccaagattgccccactgcactccagcctgggtgacagagcgaga

SEQ ID NO: 570052 - DNA, 357 bp, Homo sapiens
gctcagtatcatgcaatatacccatgtaacaaacctgcacatgtaccccctgaatctaaactaaaaattaaaattattattkaaaaaaagaaatgagtacaaatggaacaatgtctttaggctggctcctttcaagagttgaatctctaatatccaaataggattttaactccaagaaattgaaatgtccaaaaaagacaggagcctcccctgtacttacttgtatgactcatctcacccatcacacccaaatccttgtccatttgaactttttgcattaatttttatttttttcaaatactgcactaaaatattattttgattaatgttatttttgcaaatattgcattaaaatat

SEQ ID NO: 570053 - DNA, 357 bp, Homo sapiens
gctcagtatcatgcaatatacccatgtaacaaacctgcacatgtaccccctgaatctaaactaaaaattaaaattattatttaaaaaaagaaatgagtacaaatggaacaatgtctttaggctggctcctttcaagrgttgaatctctaatatccaaataggattttaactccaagaaattgaaatgtccaaaaaagacaggagcctcccctgtacttacttgtatgactcatctcacccatcacacccaaatccttgtccatttgaactttttgcattaatttttatttttttcaaatactgcactaaaatattattttgattaatgttatttttgcaaatattgcattaaaatat

SEQ ID NO: 570054 - DNA, 448 bp, Homo sapiens
cctttataatttctagtgtgaatactaaacatttaatattgcatatgtagtttcatcataaattgtatatgtacttgggcagctctgacttagagtttgaaattccttatgttaacatagctgcgatggttacctcttattataaaccatttatctttaacactcccaaatgaaatcattataattcagaagcatatagactacctttattaaaataattaggtgtttttgctcaattaaatgatgcactgtttattctgaagtaatgaattagggcagaattatatttaactactgagcatgtaacttgttttatctttttgtcttaatattgtgaataaacctggtagtaaataaaatagcaaaatagtaccatgcatctatctatctatctatctatctatctatctatctatctatctatctatctayctacctatctatctat

SEQ ID NO: 570055 - DNA, 448 bp, Homo sapiens
cctttataatttctagtgtgaatactaaacatttaatattgcatatgtagtttcatcataaattgtatatgtacttgggcagctctgacttagagtttgaaattccttatgttaacatagctgcgatggttacctcttattataaaccatttatctttaacactcccaaatgaaatcattataattcagaagcatatagactacctttattaaaataattaggtgtttttgctcaattaaatgatgcactgtttattctgaagtaatgaattagggcagaattatatttaactactgagcatgtaacttgttttatctttttgtcttaatattgtgaataaacctggtagtaaataaaatagcaaaatagtaccatgcatctatctatctatctatctatctatctatctatctatctatctatctatctacctayctatctatctat

SEQ ID NO: 570056 - DNA, 388 bp, Homo sapiens
aacatttgtttgttcttttaaaattaacatttaaaaatggatccaaagttaagccctgtaaaccttgtttgattaactctggaacacaatgttatactttttcctgctgaggtgctcaaaggaatgtggcatacttgaatgtagaaaaaaaaaaamaaaacatgaaatctgaggagttgggctgaaacttgaaatcctccactttcaggttactgagttttagttttctcatcctcaagatgaaatactcgccagatgcgctggctcatgcatgtaatcccagcactttgggaggctgaggtgggcagactgcttcaactctggtgttccagaccagcctggacaagatggtgaaaccctgtatctacaaaaaaatgaaaaacttagc

SEQ ID NO: 570057 - DNA, 540 bp, Homo sapiens
ttctcagtagggagcagcacctcgccgaggtaggcagtgttttgctttctcagaacatccagcatggtttgggtggcttactgagagcatgacagtgatgacaccaaggcagtcctgtaccttttgttgaaagatagagtttcctttaagaattcggctttctacagtgacaggacctggtcactgatcttcccattgcatgaggctctcacacagtgaaatacctgctggcttccatttgccaagtgtcctggaacctcaggaagagaggacaatggcagctgcagagaaggttatatgtgcacaggtcacaggacacatatcaggaagcttttgatctcttgtgctctcccaaatgaaaacttctctagaacttcatttctcaacctagggtaaaaggtgagatgggttggatgctgacttgaagtaactgtaaagagacttagagcctgttcacattctcacactttgaagtatgggcagaaaatatytgtagtgtatgtaaaataacccattttctcaatgagaaaagagggagaa

SEQ ID NO: 570058 - DNA, 600 bp, Homo sapiens
  misc_feature 1, 2, 3, 4, 5, 6: n = A,T,C or G
nnnnnncttttgcgtcattgctgctgcgttggtagaaacgttttatattacttatccccagattccttggaaatttttccaggaactatctacagacccaaccagagcttgcaatgtgaagaactcatgctcataagacatggccctgtcacccggccacggctgattggcccaaaggaagacatctgacataagctgggccaatcagaatgttttcattcaaacgagtctctcaatgcactgtcatacaatgaaacactaccaataactcaaagctattggtagtgctcatttttctactttgttgcactggatgcaaagaagattaaactacactgaattgttataagaagcaaaaacagactgagagagagaactagaggctctccacagtgatttcgacccctttwtcttttttttttttgagatggagtcttgctccattgcccaggctggagtgcagtggcgtgatctcagctcactgcagcttctgcctcccgggttcaagcaattctctgcctcagcctctcgagtagctgggattacaggcacctgccaccacgcccagctaatttttgtatttttagtagagacggggtt

SEQ ID NO: 570059 - DNA, 586 bp, Homo sapiens
ataaatcccacttgatcatggtgtattatcttttggatgtactgttggattcagtttgctagtattttgttgaggattttcacacctatgttccatcagggatattgacctgcagttttatttttacttgcatccttgtctggttatggaatcaggataatactggcctcagagaatgagttagggagaattccttcctgtttaatttttaaaagaatttaaggagacttcttagttttctttgaaagtttggtaaaatttgacagtaaagccatctggtcttgaaattttcttttttgrgagactttttactactgattcaatttcattattcattactggtctgttcaggttttctattctttcttaattcaatcttggtaggtggtatgtgtccagaaatttattaatttcctctagatttttcagttttttagtgtatggttgttcataatagtctctgataatcttttctatttctgtggtatcggttgtaatatattttcttttttatttctgattttctttatttcagtctcttctctttttcttggttagtctagctagagctatatccattttatct

SEQ ID NO: 570060 - DNA, 574 bp, Homo sapiens
ccccctcttccctgctcaagttgggaacaaatagataaaaagacaagagcaattagataaccaaatataaggtttattgcatgtcaaagctggactggaggatatagtttagtgtgagagcaaaaatgagcactctaactccttatccttcaacctaagccttggaacctgagggaaagttaaatatgcagcatagacacttctacagaatggagagaggagaacaaaccaccacggcttttttctttttcttttgtcttatctctttttttctttctgaatctagaacrtaaggattctatagtagagtactgaaataaccaaattgtaggagatttttcactttacttgctcctttttctttttttttaaattagaattttccttttttaggtgattttgcacccagagtttctatcctccaccagtcccttactacccatggactatgaagagtttgttagaggttgtcatcttggagtatttccatcatactatgaaccctggggttatactccaggtatgtgtcatgtatagagtgtggaatgttttgaattttgttagtatattattt

SEQ ID NO: 570061 - DNA, 553 bp, Homo sapiens
caaaatcccatctctactaaaaatacaaaaaaattagccaagtatggtggtgcacgcctgtaattccagctactscagaggctgaggcactataatcacttgaacctgggaggcggaggaggcagtgagctgagatcgtgccactgcacacctgcctgggtgacagagcctcaggctgtctcataaaaaaaaaaagtagatttataaatagaattctgtcctttgcagcaacatggacgcagctggaggtcattatcttaagtgaattaatgcgggaacagataaccaaatactgcatgttcccacttataagtgggagctaaacattgaatacacatagacacaaagatgggaacaatagacatctggggactgcttgagtggggagtgggggaaggggcgtgggttgaaagactacctaccaggcactatgttaatcacctgggcgatgggatcatttgtacaccaagcctcagcagtatgaaatgtacccatctaacaaatgtgcacatgtaccccctgaacctaaactaaaagtggagaaaaaaaagta

SEQ ID NO: 570062 - DNA, 616 bp, Homo sapiens
taggggtggtttttaaagtcctagcaaatttttagttacatattttatttcctcgtttctccatttcatgcttctgtcttctaagaagcataatttaattcgtaaaagtatctgtttatatataacaatatctatttataggttttataatacttcagtatataaataattcacttgaaaaggatgttggcaccaaaatggatggtcttttttaaaacttagaatttatttggatttgtttgaagttaggtttcatgggaggaaatgctctcattatttgtataacatttttttgcaacctatcygtgagaggtctgagtgttaaataaaaaaaaattcggagttatttgtatatatgcatgtatttgtgtatgaaacaaataccagcaaatacttattgactataccaatctcatacatacccttgcattctcccatggctgtctaacttcaaacctgtgccttacaatgcatatccatctttgcttttaggtacagtttcaccacggtttttaatcatcaaaaaaacacaaacagataaacaataaaaaaaaagagggttttgtttttgttttgagacagagtctcactctgtcacccaggctggagtgcagtg

SEQ ID NO: 570063 - DNA, 582 bp, Homo sapiens
atgctctacaatatttcttacaaaagagaaagaagccaaagttcagtcacaggaccaataacttaaagccaaaatataaagtggcataccattttaaacataatactatatatgaactttatagtaattatatttttatttgccagatgtggtggctcacacctgtaatcccagcactttgggaggctgaggcrggcggatcatctgaggtcaggagttcgagatcagcctgaccaacatggagaaaccccatctctactaaaaatacaaaattagccgggcatggtagtgcatgcctgtaatcccagctactcaggaaggctgaagcaagagaatcacttgaagccgggaggcggaggttgtggtgagccgagatcatgccattacaccccagcctgggcaataagagtgaaactcagtctcaaaaaaaaaaaaaaatgtatgtatacatatgtgtatatgtttttatttgatatttgtaactttatggagaatgtattttattatataatgctgacattaaaaaattataggcaatgttagagaaatcaaatatttatatttttataaaaataatgaata

SEQ ID NO: 570064 - DNA, 643 bp, Homo sapiens
ttttgtattcattaaccaacctctcccaatcttctcctcccccctattctttctagccttaaataaccacaattctactctctacttctgtgagctaaaagtttgtatctcctacatatgagtgagaacatgtggtatttatctttccatgcctgatttactctacgtaacattatgtacttctgactcatccatgttggtgcaaataataggatttcattcttttcattcttttttttatgactgaatggtattcctctgtgtgtgtgtgtgtgtgtgtgtgtgtgtctgtgtgtgcttagctatttatctgttaatggacacaggttaattccatatcttggctattgtgaataatgctgcaataaacatgggggtgcagacgttacttcaatatactgatttcctttccattggagaaagacccagattgctgagtcatatggtagttatatttttagttttttaagggacmtccatactgtttccataatggctatactaatttacattcccaccaaaattgtataaacattagcctttccctgcatcctcactgtcatttgttattttttgtctttttaaataatagctattctaactagggtgagatgatattcattgtggttttgattttcatctt

SEQ ID NO: 570065 - DNA, 587 bp, Homo sapiens
tgaatcccatacaatgctattatatgaaaaaaagaagggccagaatgacagccctatagaaaatwaaagaatagccaaaaaaaaaaaaaaaaaaaaaaaaaggtgtgagttggctgaaagtaaaaataaataaataaataaaataaaaagaaagattaaaaactcaacacagtaagctaaaagatacttggaaaatgataaagtagattaaagaacaacataaaccaaagttagaacaactcagaaatgatgagagattttagaaaagaattatgacagaataaatcatttcagaaatgattatttaaactaaagaataaaagggggagcaaattttagatcaaaaagaaatgaagcaataaaaaggagtcaagtaaagacaaatgtagaaggcaaagactatccaacatacaaataacaggagtcaccataaggaagacacagtcagagaataaaacaaacattaaatttataatgtaataacttcttaaaactgtaaagtaagaaattgaaactacatatattagaaagacatattgtaaacctagaggaatcaaccaaaaatcaccaaaagcaggatataacaa

SEQ ID NO: 570066 - DNA, 574 bp, Homo sapiens
tgaacttaacagcagtgttttgggaaataaattaatttgtaaagtaaaggctaggtgtactagtttatccctcccactagactcgtaaattccatgtgtgactcatagttaacaccaaacaagatttcttgaataaaataaaattttaaaatattagttactattaacaaacttagttacttagcaaaagctattagctttggaaataagtggattataagtctaaaggcaaaggaactgcatgtaagcactgtactttagttagtaaagttgtttcccatgggagcatgggttgactattctgaaaccactatatgtatatactgaaattggataattaaacatagatggtggataatttcattaacaatttaactagtgccagctccctttttacatctgcagaagatgtgatttaggtggtgtaacaatctaagactgacaggacatagattgcacacccaaacaacattgttaagcagagttaatgaagagactatytatggtgatgaggccaggactgaaaaaaaataataataacagaagtagaaacaccaagaggctagcaacagca

SEQ ID NO: 570067 - DNA, 554 bp, Homo sapiens
ggtgactacagtcaacaataattcattgtacattttggaataactaaaagagcataattggattgtttgtaacataagaaaagcataaatgcttgagatgatggatactccatttaccctgatgtgtttatttcacattgcatgcctgtatcaaaacatctcacgtgccccataaatatatactcctactatgtggccacagaaattaaaaattttacattaaaaaaaaaagactgaaaaactgggacatatgagcacaaagcagcatttccagctctgacctgacattgtttgtacaaagccatcccaagggcatcaataggatgaatgtatgaaaaagctttttgtaaatttcaaagccagaaacacacataatacaagtacggattgaacattcctaatccaaaactctgaaatctgaaatgctccagaattagaaactttttgagtgctgagatgaagctgaaaagaaatgctcattggagcatttcargttttggagtttcagattagtaatgatcaaatgggaagtatagtgtaaatactccaccatt

SEQ ID NO: 570068 - DNA, 599 bp, Homo sapiens
tgtggataccaggcaagcaacttaatatcaccaagcctggatcaaatggctactttaatattagacacacacaggattgttgtgaaggttacatgaagcaactgtatgtgtaaatyacttggtacacatttagcaattgttattattgtgaaaaaaattaattattccttacttcctgatggcaagaatagtggcttaaatagtcctttattccttgtcatttttttttctgaattcaatgtattatgtaagactttaaacacagtagaggcacaactttttatatgtgggttccttgggcaggataataagttatatgtcctttcatcagaacaaccctgatcactttcttcctggttatcaatcagcccaagggtggaaaatggttgatctggagaaggtatcaggttgtaatctcaattacctagcataattttctggtcttctcctttggaacccactgggaacataaaatattatctctgttagtagcatagcatggtcccagagcagaagcctgataaagccaaatgtgcactagtgatacacatgtgactgtgggaagaatgcagctgcttgtcagcagggtggctacaatg

SEQ ID NO: 570069 - DNA, 599 bp, Homo sapiens
tgtggataccaggcaagcaacttaatatcaccaagcctggatcaaatggctactttaatattagacacacacaggattgttgtgaaggttacatgaagcaactgtatgtgtaaattacttggtacacatttagcaattgytattattgtgaaaaaaattaattattccttacttcctgatggcaagaatagtggcttaaatagtcctttattccttgtcatttttttttctgaattcaatgtattatgtaagactttaaacacagtagaggcacaactttttatatgtgggttccttgggcaggataataagttatatgtcctttcatcagaacaaccctgatcactttcttcctggttatcaatcagcccaagggtggaaaatggttgatctggagaaggtatcaggttgtaatctcaattacctagcataattttctggtcttctcctttggaacccactgggaacataaaatattatctctgttagtagcatagcatggtcccagagcagaagcctgataaagccaaatgtgcactagtgatacacatgtgactgtgggaagaatgcagctgcttgtcagcagggtggctacaatg

SEQ ID NO: 570070 - DNA, 605 bp, Homo sapiens
tccctatattttagtcaaaaaaaactcctggaacttaaaaagaaaaaatagtttgaccgagggcaatagattggttttgccctcaggtctgccagacaccacgagaacctgaccttttaaccatcatgttctgcctggtaaacgtgctcaaggakgggttctagaatacatgggaaggtcagcccctggctcatctggcaattaaaggcaaggcactttctcatggagctttgaattctccagctgtaaaattaatgggttagctctaagcccttgaattaaccaggtagccctgttttagtggtgagctccctgtccctggatgtaagcttgaagcatagctagggaaccacatggcaacaacatgacagaaggggttcaatcacaggacagcaagatgggtccacacgacctttactgttctttcttctatgagagtcttatgccaatttgtcttaaaaattgaaattttcaaattttcaaattgaaaaggccaatgcttgtgctccctaggacctgatcttgccaattttgaggctgctctatttgtctgctgcaatttgctatggtgactcagcaggaggcagggaggaggcacgacagcc

SEQ ID NO: 570071 - DNA, 427 bp, Homo sapiens
attgcaatcatggcccaattatcctccacctagtctctctcttgacatgtggggattatggggattataattcaagatgagatttgggtggggacacwaagcctaaccatatcaaatctaacataatatgaatagtataaaataagtaatatgtatcgaaaaaattaataccataagtaagcatattacaaagtcattgggcaaaccaaaggacaatttaaagtgcaaagcatgccgctggggaattgaaactaaccttgaagccacttgaaccaatcctagctctaattaaactaaatacaattcttactaataaagcaaggaaaactgtcactaataactataccaaattattccatatggtatggaacagagaaatctaatttagattttaaagagtataacaaagaaaaaataaaatacaaat

SEQ ID NO: 570072 - DNA, 625 bp, Homo sapiens
ctcaaaggttgatgactgatagagggtaggcaaagatttcttaaacagcacacaaaatgtgttaatcataaaaaaaacctaataaattggatggactacattaaatctagaaatttctatttatcaaaaaacaattaactgataaaagaaccaaagaatgcctaaataaatggggagatatactgtgtccatggatcagaagacccaacatagtaaagatgtccatttctccaaaactgatctataggtttaatgaaatttctatcaaaatcccaagggttttttgcagatatagacaagcttattttaatatatagaaactcataggttctaaaatagctaagacaatcttgacaaaaaaagaacaaagcagaagtaaccactctcctggtattaaggcctaatacatagctccagtaatgaagacatggactgatattggcagagggacagacacatgggccattggaacagaatagagaactcagaaatagacccacagcaatatgcctaactcattttttttttaattgatcattcttgrgtgtttctcgcagagggggatttggcagggtcataggacaatagtggagggaaggtcagcagataaacaagtgaacaaagg

SEQ ID NO: 570073 - DNA, 474 bp, Homo sapiens
ctactgtcacacagatacaaaatcaagggccaaatttcaaatataaggtctatacccaatgcaaatcagatctgaagattttgtttattccattttaagttctgaaccaaaatttaatgaataaaacatttacttatatttcatgaaatgccagattaggcaaccacaatggcaggcattcttattgttaattgcacaagaatcctttctttggttattcaaaatgcagattctctgacaccacctctagagaatttactcagttttaagcagggaccagtaatttrcatttctaacaatcaactcagttacttatgatcagccaagtagtataacatattgagaaagtctgacataagggtttgaaaacagaacccactatcaatatatagtgattatttactgagtatgcctgttatttttctaaagaattcatggttatagcacacagcagttaaagacaaataaattgtt

SEQ ID NO: 570074 - DNA, 576 bp, Homo sapiens
tgaaatagctgacttctattaaacttggactttctttatataaatagtgtaatcatttcccaaaatgtgtttaaggaaacttactcctaataatgtgctgtattctccataacattatcagaaaaaagtaataacttgtgctttaggaaatcacgtaagcaactttcacatttatttgtgaagaggcaagttggttcagaagggttaagggtcaaaccttcaactaagtgatgaaatatactgttaaaccaagaaaaagtttgggttgccaaaatgctttaatttgtttatgaaaagtaacctaacaaaagcatcttcaggtataattcctactattatcacaatckttttgtttgattctgcttatgttttctctgtttacttgcttttagataaaaacttctttgtgagtttctatttttccgatttttggatgtttgcatgttttgcttttgtattagtctgtttttatgttgccatgaagaaatacctgaaactgggtaatttataaagaaaagacgtttaattgacttacagtttcacatggctgtggaggccacaggaaacttaaaataa

SEQ ID NO: 570075 - DNA, 576 bp, Homo sapiens
tgaaatagctgacttctattaaacttggactttctttatataaatagtgtaatcatttcccaaaatgtgtttaaggaaacttactcctaataatgtgctgtattctccataacattatcagaaaaaagtaataacttgtgctttaggaaatcacgtaagcaactttcacatttatttgtgaagaggcaagttggttcagaagggttaagggtcaaaccttcaactaagtgatgaaatatactgttaaaccaagaaaaagtttgggttgccaaaatgctttaatttgtttatgaaaagtaacctaacaaaagcatcttcaggtataattcctactattatcacaatcgttttgtttgattctgcttatgttttctctgtttacttgcttttagataaaaacttctttgtgagtttctatttttcygatttttggatgtttgcatgttttgcttttgtattagtctgtttttatgttgccatgaagaaatacctgaaactgggtaatttataaagaaaagacgtttaattgacttacagtttcacatggctgtggaggccacaggaaacttaaaataa

SEQ ID NO: 570076 - DNA, 589 bp, Homo sapiens
aggagtgtggtttccagaattggtgaygtgcacttatgttgcacttgcaaaaaagtaactcattttcttccaagatgttgaatgagcttctactttatgcaataatatttctgctgtgtccctgacacattcactggagacatttgttggagaagtggctatcagaacatttgagttgtgtgcgtatgtatttgctgttttatcgcattatgtattttaacctttcttagttaaaaagttttctgagatataatgcttcatatgttatttatattgttaatgatactaccactaacattttctttattatttttctttccatgtaatgttttgaaagccatctctgaacttaaaatttaaaatatacccatgttctcttctatttcttttaatgtttaatgctaatatttaatttttcatacaatcctattgtagataaactattttccgagacaaacaactataatataatagcaagtatatttaatacttactcatcatttgctctgtttaaaagctttgcatgaattatctcattcaagcatgtcttaagtgattattattattagccctattttacaaacaatat

SEQ ID NO: 570077 - DNA, 522 bp, Homo sapiens
gtcttacacctttcccaaaaattaactcaaaatggatcatggacctaaatgtaaaatgcaaactgtagaagtcctggaagataacatagaaaatctagatgaccttaatttggtaatgactttttagatatgacaacaaaggtatgatcatgaaaaaaataataaactgatcttcattaaaattataaatttctcctctgtgacactgtcaggaaaaatgcaaaacaagtcatataccagaagaaaatatttgcaatcaagccatgaaaggtactggaggaaatttaaatgygcataactaagtgaaaaaggccaatctgaaaaggtgacaaaccctatgatgtcaactatatgacattctggaaaaggcgatactaaaaatatcagtggttgccagcatttaggagggagggtgagataaacagagcacagaatatttttgtttgttttcttcaacagttcagtgatacatgtgcaggatgtgtaggtttgttacataggtaaatgtgtaccatggtggtt

SEQ ID NO: 570078 - DNA, 522 bp, Homo sapiens
gtcttacacctttcccaaaaattaactcaaaatggatcatggacctaaatgtaaaatgcaaactgtagaagtcctggaagataacatagaaaatctagatgaccttaatttggtaatgactttttagatatgacaacaaaggtatgatcatgaaaaaaataataaactgatcttcattaaaattataaatttctcctctgtgacactgtcaggaaaaatgcaaaacaagtcatataccagaagaaaatatttgcaatcaagccatgaaaggtactggaggaaatttaaatgtgyataactaagtgaaaaaggccaatctgaaaaggtgacaaaccctatgatgtcaactatatgacattctggaaaaggcgatactaaaaatatcagtggttgccagcatttaggagggagggtgagataaacagagcacagaatatttttgtttgttttcttcaacagttcagtgatacatgtgcaggatgtgtaggtttgttacataggtaaatgtgtaccatggtggtt

SEQ ID NO: 570079 - DNA, 569 bp, Homo sapiens
ttatgacgtggatctcatttctcttgtgcatgtttctccttgatttggatmttttcatgaacattttagaaggaattgctcccaaagcactagtgttcacttgtttttttttttccttgctcatatccatttaaaatatgattggcttatgtcaatcacaatagcctcactgtttatatatgtcacagaatatgcaaaacggaggttgacacaggtagggtgctgggagactggcaacctcactgtgcagtcaagagggatgaaggcctaagggaagggtgttggtgatagaggatgttaatcaattgagcttctccagtggactggacctgaagtagtcagtggtatcctgtgtcttgattccacttctccctttattcccaaacatctgctatggtgtatgtctgtctgtggcatcttctttctgcctaggactttgcattctctcttccctaggataactgacattttccatcctctgtcaatacaaatttattggttcacctcttctgcactctgttggaagtagaccaattattgcagtttacccagtaacagaaaaaagcaca

SEQ ID NO: 570080 - DNA, 569 bp, Homo sapiens
ttatgacgtggatctcatttctcttgtgcatgtttctccttgatttggatcttttcatgaacattttagaaggaattgctcccaaagcactagtgttcacttgtttttttttttccttgctcatatccatttaaaatatgattggcttatgtcaatcacaatagcctcactgtttatatatgtcacagaatatgcaaaacggaggttgacacaggtagggtgctgggagactggcaacctcactgtgcagtcaagagggatgaaggcctaagggaagggtgttggtgatagaggatgttaatcaattgagcttctccagtggactggacctgaagtagtcagtggtatcctgtgtcttgattcyacttctccctttattcccaaacatctgctatggtgtatgtctgtctgtggcatcttctttctgcctaggactttgcattctctcttccctaggataactgacattttccatcctctgtcaatacaaatttattggttcacctcttctgcactctgttggaagtagaccaattattgcagtttacccagtaacagaaaaaagcaca

SEQ ID NO: 570081 - DNA, 361 bp, Homo sapiens
gtaaaataaagtgactcatctcttggaaatcaactatacccaaagatttgcttcctccaaaatcttctagttcacagtcaggaaacaagtgatcttcaggaaaatccaagaagtcaattttcctatatgcctgcttcatgtagataacttcctatggatgacttcaattttcttgctgataacttctatatctaaaaatgctgataacacatgtacacgtctagagaatacacacaaggtcacatacatattaaaaacaaagtcttcagcacaacctgtaattcactggtcacatgtagctgaatgtkcatcaatctatggatatttgttcctgtgtttgttgcagtgacagaaaggggaa

SEQ ID NO: 570082 - DNA, 474 bp, Homo sapiens
tctgtttcctccttggatgcataaaaacactttgaaatctattccacaaaaccagatctacargctatcaattagaaagacatggggggaagaaggggggttctttggtctaataaggtagatagactttgagtttaaaattaaacaagcttgccttaggaccacacttctgaatgcttttaatatgttcctgtcaatcttggggaaggggagatggaaggcagatgtactgcatatcttgaaaatattgtactatgaatttttttcttgcagttaacatgtcagtgaatagtactctctgactgctttgggaaatactggactccaaaatgatgtgttaggtgactatctagcctcaagattcactcagggcaacatcctaatacactgctctaatttcactgagacatttcaaacatattagagcaagtgttaaaaacaagcaagcaaggaaagaaactagcaaatccagca

SEQ ID NO: 570083 - DNA, 586 bp, Homo sapiens
ccaatacaatgtttgtgcagggagaaggggaatctaacattgatcaaatactacttatgtgccaagcattgtcatggatatttttgttataggaaagcggtcctgatccagacccccagagggggttcttggatcttgaacaagaaagaattcagggcaagtccrtagagtaaagtggaaataagtttattaggaaagtaaaggaataaagagtagctactccatagacagagcagccctgagagcttctggttgcccatttttatggttttttttgatgatatgctaaacaagggatggattattcatgcatccccttttcagatcatatagggtaactttctgaagttgccatggcatttgtaaattgtcatggtgcttgtgtgagtgtagcagtgaggaagaccagaggacactctcaacgccatcttggttttgatgggtcttggccagcttctttactgcaaactgttttaacagcaaggtctttatgacctgtatcttgtgctgacctcctatctcattctgtgacttagaatgccttaaccatctgggaatgcagcccagtaggtctcagcctcatttt

SEQ ID NO: 570084 - DNA, 577 bp, Homo sapiens
ggggcatgaactgtcagaacagtggcagacagacagaaggctggtgayctggtgagtaggaaggcgtcggatgctcattttggcagtagaggcatctctaccaaacatgacagtcaagtttctagcttgcctggtgacacacaccaagtctggagacccagatacttcgaaccttactcagccacacccaggagacacttactctcccaagcccagtagctaatgggcaatggtggaagagagccccaaggggtcatggggggtttgcactgggttcttatagaaagtccctgcttacagaaggggctgtttcacagtgacccaacttttaatccctttgccttacttttaaccagaagtgtgttccgaaagcttatttttatggcaggaattatggcattattttatattcattagtcctctgctcttagggctgaggataccacatggtatctgtcgtgagggccacgtctaacaaaagaatattcttcttttttttttgaaacggagtcttgctcttgtcacacatgctggagtgcaatggcacgatctctgctcactgcaacctctgtctcct

SEQ ID NO: 570085 - DNA, 577 bp, Homo sapiens
ggggcatgaactgtcagaacagtggcagacagacagaaggctggtgatctggtgagtaggaaggcgtcggatgctcattttggcagtagaggcatctctaccaaacatgacagtcaagtttctagcttgcctggtgacacayaccaagtctggagacccagatacttcgaaccttactcagccacacccaggagacacttactctcccaagcccagtagctaatgggcaatggtggaagagagccccaaggggtcatggggggtttgcactgggttcttatagaaagtccctgcttacagaaggggctgtttcacagtgacccaacttttaatccctttgccttacttttaaccagaagtgtgttccgaaagcttatttttatggcaggaattatggcattattttatattcattagtcctctgctcttagggctgaggataccacatggtatctgtcgtgagggccacgtctaacaaaagaatattcttcttttttttttgaaacggagtcttgctcttgtcacacatgctggagtgcaatggcacgatctctgctcactgcaacctctgtctcct

SEQ ID NO: 570086 - DNA, 629 bp, Homo sapiens
ttacaacctttttgccttggactcatgaattttactgagttgtgactataattatagctgcagaataatgcagcttatcctattagagcattttatacatgttaaaagacaaaaatctgtaatccaccaataagaattttagaggatatatcaatataaaatatccctctatgatgtaagttataatgattacaaaaccaaaccaaaccttattgggtcacagttctgaataagattgcatatccgtaatatcctcctatggcactcaagaaaaaactaggacttgaattttattgtaagtatagggaactttgggtaaattaaatcagttacaccttaggtagtatttgctacctacaaatcaattcagctacattaagtaaaaggaatgtgaatatgatacaaataacagscttgactgacttttccatttccaactctttcttaggatagttattaaaggagcctacttctcagcaagaaagtaaggaatcttagatccttaagatcattaagttatggtaaaggtttggttaattatttcatggagatagaaagtaacagatgtcctattttaaagtagctaagtgtaagaaatgcttaagatatacctataccagaaagagttt

SEQ ID NO: 570087 - DNA, 497 bp, Homo sapiens
tttagttaggatatggttttaaaataatattctgtgattcaaagtttcattcctctttagaaatatctactactgttaccaaaagtctaagtgccgttaaaacttccatgcaatttataaaccaagtttctaagcaatgcaagtcattttatatatttatctctcttkggcagttctaacagctgaagacttagcattagctatgaatttcattactgtaattttactcccattccaaatcattaatatgatgctaaataagtgatagtgttagccaaactcaataatattattctaaactgcttagaaaaggaagtacactctcagaatttttctcatggccttgcaaatgaggatgaactgaaatatgacagcagagctttacccagaggttgccatgttgccattctggttccccacatccctaatacatgtcacatttataaaaactagaaaactatgtcttatcactaaaggctcattttattcaaaaatag

SEQ ID NO: 570088 - DNA, 613 bp, Homo sapiens
aaacacaatcaaacttgcttagtaggacacctgtgttcatagaccacctgcctaaacaatttgccaagcaccgattatatttcctagaggtgcactgcatcttgtggccacctgctttatgggtctgtgagcagctcatcaagtgcattaggtgggaaagtcagaatttttaggaggagagtaataaaaaccacatcccccaatttgtagaaaattagacctttaaaatgacagaatatttgttgattgcaaaaaattcacttagcataacttgtggcttcagaagttcacaatcaattgcaatagtaattctgacctccttatactgagttttttccttttatttgtattggaataaacttttccttccagtggcaaaattgctatacattttgattgttttatttgcatgttatttcacagagattgaaaacataattatttccattttacagctgaaggagtgttggttgtgtgaggaaataatgaagatacattaaatagaaatagtttctggagtcccaccttaatgttttatccattaacatggttctcacttcagtatttcatcttcttctcyggcaggttttacagcaagcattctatcttgggc

SEQ ID NO: 570089 - DNA, 619 bp, Homo sapiens
ttacttgttttagttaggattatgagattaatacattgaaagtggttgatgcacttggtatttttaacctaaagctcccctcccttctttttatttttcttataattcaattgttgaaccaacaagrttgtttgatggaattttccagtctaattgccatctttttgtaacactcacggactcaacgtaaaggaatgaagaaaaatctatcacgcaaatggaaagcaaaaaagaggagtcatcatttttgtatcataaaaaatagagtttaaactaacaacagtataaaaggacaaagaagggcattacatagtgataaagtgttcgatacaacaagcagacttagttatcctaaacatatatgcacctatttatgcactaaacattggaacacctggattcataaaacaagtacttctagacttataaaaagggttaaacagccacacataatagtgggtactttgacaccccactaacgtgttagatagatcatgaaggcagaaaagtaacaaaaaaatactggacttaaatttgacacttgaccatttggacctaataggcatctacagaaaactgcactcgtcatcacgaaatatacattcttctggtctccaca

SEQ ID NO: 570090 - DNA, 619 bp, Homo sapiens
ttacttgttttagttaggattatgagattaatacattgaaagtggttgatgcacttggtatttttaacctaaagctcccctcccttctttttatttttcttataattcaattgttgaaccaacaaggttgtttgatggaattttccagtctaattgccatctttttgtaacactcacggactcaamgtaaaggaatgaagaaaaatctatcacgcaaatggaaagcaaaaaagaggagtcatcatttttgtatcataaaaaatagagtttaaactaacaacagtataaaaggacaaagaagggcattacatagtgataaagtgttcgatacaacaagcagacttagttatcctaaacatatatgcacctatttatgcactaaacattggaacacctggattcataaaacaagtacttctagacttataaaaagggttaaacagccacacataatagtgggtactttgacaccccactaacgtgttagatagatcatgaaggcagaaaagtaacaaaaaaatactggacttaaatttgacacttgaccatttggacctaataggcatctacagaaaactgcactcgtcatcacgaaatatacattcttctggtctccaca

SEQ ID NO: 570091 - DNA, 619 bp, Homo sapiens
ttacttgttttagttaggattatgagattaatacattgaaagtggttgatgcacttggtatttttaacctaaagctcccctcccttctttttatttttcttataattcaattgttgaaccaacaaggttgtttgatggaattttccagtctaattgccatctttttgtaacactcacggactcaacgtaaaggaatgaagaaaaatctatcacrcaaatggaaagcaaaaaagaggagtcatcatttttgtatcataaaaaatagagtttaaactaacaacagtataaaaggacaaagaagggcattacatagtgataaagtgttcgatacaacaagcagacttagttatcctaaacatatatgcacctatttatgcactaaacattggaacacctggattcataaaacaagtacttctagacttataaaaagggttaaacagccacacataatagtgggtactttgacaccccactaacgtgttagatagatcatgaaggcagaaaagtaacaaaaaaatactggacttaaatttgacacttgaccatttggacctaataggcatctacagaaaactgcactcgtcatcacgaaatatacattcttctggtctccaca

SEQ ID NO: 570092 - DNA, 619 bp, Homo sapiens
ttacttgttttagttaggattatgagattaatacattgaaagtggttgatgcacttggtatttttaacctaaagctcccctcccttctttttatttttcttataattcaattgttgaaccaacaaggttgtttgatggaattttccagtctaattgccatctttttgtaacactcacggactcaacgtaaaggaatgaagaaaaatctatcacgcaaatggaaagcaaaaaagaggagtcatcatttttgtatcataaaaaatagagtttaaactaacaacagtataaaaggacaaagaagggcattacatagtgataaagtgttcgatacaacaagcagacttagttatcctaaacatatatgcacctatttatgcactaaacattggaacacctggattcataaaacaagtacttctagacttataaaaaggsttaaacagccacacataatagtgggtactttgacaccccactaacgtgttagatagatcatgaaggcagaaaagtaacaaaaaaatactggacttaaatttgacacttgaccatttggacctaataggcatctacagaaaactgcactcgtcatcacgaaatatacattcttctggtctccaca

SEQ ID NO: 570093 - DNA, 501 bp, Homo sapiens
aactctaagctcacttaaacctttgacattttatgagtctattaaatcgagtacaaaaaatgctgagtccaaactgagcaaaacaaatcccatctccctatgcccagcctccttggattcagaaagccacactgcctggagagtaagcagagagagaattgtcattaacccaaagaccatctttgaaaacagactggctgcggctgagtgcggtggcacaygcctgtaaccccagccctttggaaggccgaggcaggaggatcacttgagcccaggagttcgagaccagcctgggcaacatggcaagaccctgtctctatctttctaagtaaaacaaaataaaaagctcagactggcagcacatggctctttccagctgttcccatgagcaggcttcaggacaagcccaggcaaaggcagggagaaatggggtggggacccccaggctcacccccttgtctgctgcgtaggtggagttggtcacaaaggtcacaggctggg

SEQ ID NO: 570094 - DNA, 501 bp, Homo sapiens
aactctaagctcacttaaacctttgacattttatgagtctattaaatcgagtacaaaaaatgctgagtccaaactgagcaaaacaaatcccatctccctatgcccagcctccttggattcagaaagccacactgcctggagagtaagcagagagagaattgtcattaacccaaagaccatctttgaaaacagactggctgcggctgagtgcggtggcacatgcctgtaaccccagccctttggaaggccgaggcaggaggatcacttgagcccaggagttcgagaccagcctgggcaacatggcaagaccctgtctctatctttctaagtaaaacaaaataaaaagctcagactggcagcacatggytctttccagctgttcccatgagcaggcttcaggacaagcccaggcaaaggcagggagaaatggggtggggacccccaggctcacccccttgtctgctgcgtaggtggagttggtcacaaaggtcacaggctggg

SEQ ID NO: 570095 - DNA, 572 bp, Homo sapiens
caccatcaagtgagacacagttgcaccatttccagcaagttctgcatctcagtcctgtgagagaaacttcgtgcagattgcctctttcttgtgtgctgggcacccagaaataggggtagaacccttctacctgtatctgctctatttaaattctttagaattttcttttcccctcaccagccagccccatattatagttagtaattcttatatttaactttccctgtctaatttactgtgtgatttctgtctcctaatggaacctgatttatacaaaagtattaaccatgtcataggatgtccatgaatagagggtttaagttataagcacggtagcatgtatatggtaaaagtgcttagtaaatkgtcgatgttaatattattaatgaaatttaatcctgacaatgacaagcactagtaagtcaaacgtagaactcacatttgcaaacacactccatgtttcctctttctctgtcttgctcatggctatacctcagcttagatgcttgaaccaatccttcaaaattacgaccttggaaaaatactaaaatttagcctagggttatgggtcc

SEQ ID NO: 570096 - DNA, 569 bp, Homo sapiens
tacattattagtgtctagcaaatattctacatagtaggtgatgaataaaaatttattgaatatttattttatgtttgttactgacagtaggaagcattttatcctgggagaaaaatatttatggacagttcaagaaatgagaagaagataactctcctacatttgtagtaaaatgtagtgcaagcatgcacacattattaatagtttgtagatatacacatataaacaaakagactaacacatatcaatgtctagctgttaagttatatttaatcagtctttggactatccagtaaatgtggaagtgggttgaacaagtgtggtttttgttagtagaaaagaggctaaaaataatctacgttcaaataattataattaaactacatgcaaggtgtagctcaaattcaagtcattttaatatgaaatacaatttgaatgctttatatatgtatacatttccatgtttagagaagcctctgctttgcattcttaaaaatatttccatcatttttaatgacctctaaaatttcaaggtcccgtctcttatcaaacatttcattcagatatta

SEQ ID NO: 570097 - DNA, 438 bp, Homo sapiens
agttagcatagttgatgtcatggttctagtgaccttctgtttacagtaaaactaagccagttagttgtgagaaaataattcggaaacaatgttgcaaaagcagaaaaattctgtgcacatttttttttatcagtaatacatttcgtttrgttaatgtagtgttagtataattgttgctattatattcaaagtagagataatttacatgaaaaaatgtgtttatatttttgaaatattgaaaagtaaaaactcattagattaatggagaactgcacacccttttgaaatggtaaatattctgatttcaaagtgtaggtttagagacagcagtatagtattggaaaaatatttaatataattcaaaataggcttgaatatttataaaataaaacacaccaggtatatatttaaaaaataaatacatttacttacaggtgg

SEQ ID NO: 570098 - DNA, 574 bp, Homo sapiens
atttctcacttgcattatcacaagtatctattccttttacagcttttctaacagcctctgcaaaattccttgcaaaatcttcaagatggttcaggatggagaatatagacatccaaattttcttcctgccaaatttctgagatcttagagagtctccattctgggcataaaacccttcctcagtgtcatatactaccagaatttcaagaaattgaaaatttatatkgtttcacccaaattggaataagctaaatatcaaagttgcatctgtcccacaaaatgtctgaaattacagagatgggagccaggtgatttttataatccatcattctgatgtgaaaaatatgatgatgttacctctcagttaaaattttcatttattcccctttattctcagaataaagataagcattttacatggctggctgtcgatgttctcccaccttcgctaacacgggctagctctaactcatcctttagtactccagctaaaatagctcttcctatgagaatttcgaaagtattagctatccccgctatggtgaattcatcttcgagtcatctatgtcctccc

SEQ ID NO: 570099 - DNA, 565 bp, Homo sapiens
atattttttatccaataacaaacctgcatccaccccctatgacccttcccagcctctggtaaccatccctctactctctatgtccatgagtttaattgttttcatttttaggtcccacaaataactcagaacatgtaattttttttttctttctgtgcctggcttattccacttaacataatgatccccagttccatccatgttgttgcaaatgactggatctcattcttttttaatggctgaatagtactccattgtgtatatgtaccacattttctttatgcatgtatctgttgatagacacatagattgtttccaaatgttagctattgtaaatagtgccacagcaaacataggaatgcagatagctcttcgatataccaatttccttttttaggggtattacccggtattgggattactggatcatttcatagcaaactttcacttttttgagaaaacttcaaaytgtttttcatagtggttgcactgatttaggttcctaccaacagcgtacaaggatttccttttcaccacatcctcaccagcatttgtaattgcttgt

SEQ ID NO: 570100 - DNA, 496 bp, Homo sapiens
gatctgggcccactgcaacttttaccttctgggttcaagcaattctcctgcctcaacctcccgagtacctgggatcacaagtgtgcaccaccatgcctgcctaatttttgtatttttagtagagatgaggtttcaacacgtyggccaggatggtctcaaactcctgacctcaggtgatctgcccactttgccctcccaaagtgctgggattacagacataagccactgcacccagcctatgtgttttaactccagcaccatgctgttttggttgctatagctctgtagtataatttgagtcaggtaatatgattcctccagtattattctttttacttaggatatcttttactattcttggtcttttgtggttccatataaattttagggtttttttttttctatttctgtgaagaatgtcatcagtattttgatcagagttgcactgtatctgtagattgttttgggtatagacagtttaacaatactgattctt

SEQ ID NO: 570101 - DNA, 626 bp, Homo sapiens
ttatttgttgctcattaatgttgttttctttctgattgaagtattcccttcagcatttcttacaggacaggtcatgttgatgaaatctggaagtcttcatttcactttcatgtttgaagaatatttttgatggatatactattctagggtacaagagtttagttttgttttgtattgttttgctttttcttcagcacattaaatatataatgcaacactctcccggcctggcctgtaaggtgttgackgataaatcttctgccagatgttttggagctccattgtatgttactggtttcttttctcttgctgcttttaggaacatttatttacccttgacctttgaaagtttgattattaaatgtcttgaggttgtcttcctttggctcatactgcttggtgttctataatcttcttgtacaggatcaaattcacacataacatattaactttaaatgtaaatgggctaaatgctccaattaaaagacacaactggcaattggataaagagtcaagacccatcactgtgctgtattcaggagacccatctcacatgcagagacacacttaggctcaaacagagggatggaggaagatctaccaagcaatggaaaacaaaaaaaggc

SEQ ID NO: 570102 - DNA, 626 bp, Homo sapiens
ttatttgttgctcattaatgttgttttctttctgattgaagtattcccttcagcatttcttacaggacaggtcatgttgatgaaatctggaagtcttcatttcactttcatgtttgaagaatatttttgatggatatactattctagggtacaagagtttagttttgttttgtattgttttgctttttcttcagcacattaaatatataatgcaacactctcccggcctggcctgtaaggtgttgacggataaatcttctgccagatgttttggagctccattgtatgttactggtttcttttctcttgctgcttttaggaacatttatttacccttgacctttgaaagtttgattattaaatgtcttgaggttgtcttcctttggctcatactgcttggtgttctataatcttcttgtacaggatcaaattcacacataacatattaactttaaatgtaaatgggctaaatgctccaattaaaagacacaactggcaattggataaagagtcaagacccatcactgtgctgtattcaggagacccatctcacrtgcagagacacacttaggctcaaacagagggatggaggaagatctaccaagcaatggaaaacaaaaaaaggc

SEQ ID NO: 570103 - DNA, 580 bp, Homo sapiens
agctaagctgtggttcttgcagattattcatagaagctctgccttgataatcttggacacgattcgggagaattctctggattaccaggcagagaattttrttctttctcgttactttttcccaagcatatagagtctctctctttctgctctgatccacctaaagctgaagataaaatggcaagagcacccctgtcaccaccaccattatgattgtgccaggttacaccagaagccagcacacagtgctgggtctcacatgaagcctactgtaaccactccttggcttcagcctatgtacactgaaggtccaggggctctacatcacatagtggcaaatacagccaggcctgtgtttttcccttcagagtagcaaggtctcccagacatgggtctagaagtgccatctggaagtcaggtactagagtcaaaaattaggagtttacctggtttctgttgtactgtggctgaactggcactcaagccacagggcgtagtctttcctattcttccctcctctttccaaaggcagaggagcctgaccccatattcactgccatcccaagccatgagaaatact

SEQ ID NO: 570104 - DNA, 580 bp, Homo sapiens
agctaagctgtggttcttgcagattattcatagaagctctgccttgataatcttggacacgattcgggagaattctctggattaccaggcagagaattttgttctttctcgttactttttcccaagcatatagagtctctctctttctgctctgatccacctaaagctgaagataaaatggcaagagcacccctgtcaccaccaccattatgattrtgccaggttacaccagaagccagcacacagtgctgggtctcacatgaagcctactgtaaccactccttggcttcagcctatgtacactgaaggtccaggggctctacatcacatagtggcaaatacagccaggcctgtgtttttcccttcagagtagcaaggtctcccagacatgggtctagaagtgccatctggaagtcaggtactagagtcaaaaattaggagtttacctggtttctgttgtactgtggctgaactggcactcaagccacagggcgtagtctttcctattcttccctcctctttccaaaggcagaggagcctgaccccatattcactgccatcccaagccatgagaaatact

SEQ ID NO: 570105 - DNA, 529 bp, Homo sapiens
gatacattattaggtctagcaaatattctacatagtaggtgatgaataaaaatttatgaatatttattttatgttgttactgacagtaggaagcattttatcctgggagaaaaatatttatggacagttcaagaaatgagaagaagataactctcctacattgtagtaaaagtagtgcaagcatgcacacattattaatagttgtagatatacacatataaacaaakagactaacacatatcaagtctagctgttaagttatatttaatcagtcttggactatccagtaaatgtggaagtgggttgaacaagtgtggttttgttagtagaaaagaggctaaaaataatctacgttcaaataattataattaaactacatgcaagggtagctcaaattcaagtcattttaatatgaaatacaattgaatgctttatatatgtatacatttccagtttagagaagcctcgcttgcattcttaaaaatatttccatcatttttaatgacctctaaaatttcaaggtcccgtc

SEQ ID NO: 570106 - DNA, 539 bp, Homo sapiens
ccatagcactgggggaaggtgatcatttaaatataccaccaaagtgtttatccttactgatgcacattagctgaatgtttattatgttaataatatcagcataaaaggcagtcaaagccatggatgtggtgaagaactactggcatcaaataagaaattaccattatgctgagcaccagtcttttatggtacgccagagaatctctacctattttctttatcattagctaatgcgctaatgagaaaaattatacagaaagtttcagcccaatccagtcattagaatgggcaaggttcacagtttcactacagcaaagcttcaaaggacaccatacaagtgacaggaatgaatgatgtcatgagcgttcagctagccttacaataacagccttgcagtgaaagctttcagccaacatctgctgctcttgacagctcaatctttctaacagaggctgtgccagcatkgagatttctacttctaaattgtttttgctgattcaagtttgtgaattttttaaacatttatatttgtattttta

SEQ ID NO: 570107 - DNA, 529 bp, Homo sapiens
tgcagtggcaagatcaaagctcactgcagcctttaactcctgggctcaggcaatgctcccacctcagtctcccgaatagctgggactgtaggcacatgccctcatgtctggctggctaatttttgtattttttttgtagagaaatagctccagaaatctgcacatgaccaaatcctaagctgtgcatgtttactgtgaaaatccacaaagccaggaaatagaacatctgtcagcagaagaacaactaccagctacatggtccagctaatttttgtatttttttgtaaagatgargtctttctttgttgtccaagctgctcacaaactcctgggctcaagcaatcctctcacctcagcctcccacagtgcctggattacaggtgtaaaccaccatgcctggctttcagtttcattgattagaaaacttattgttaagttattgattctcctcaattgttctatagattcaacaaaacccattaacattccaacaggactttttttttttttttttagaaactggcaagtt

SEQ ID NO: 570108 - DNA, 422 bp, Homo sapiens
aatttttctcacatttttggcgtaaatgtgagaatgaacaaatggctttctttctcattctttccaataattttacctattatttcattttctgkttttttttttccctttggttataatttcagcacatgctgaattgtagcagtgacaatgacaatatttgtcttgttcatggctttaaaggaccaatgaacatggttctaataattcttcgtttagtctaacatttactgtagatttctggccaacctggtgctgggcagacctggaacctgagtctgcagggggcagcctagagcctggggctgcagggcctgtcttggttctggggtgagcttcaagcctggggccaggggagcccgcctagcgtctggggccaaaggcctagactggagcctagagctggcctggcagcaggattc

SEQ ID NO: 570109 - DNA, 539 bp, Homo sapiens
  misc_feature 537, 538: n = A,T,C or G
ctactaaaaatacaaaaaaattagccgggccgggcatggtggctcacacctgtaatcccagcactttgggaggccaagccagatggatcagctgaggtcaggagttcaagaccagtccggccaacatggtgaaaccctgtctctactaaaactacaaaaattagccgggcacagtgcygcatgcctgattataattccagctacttgggaggctgaggcaggagaatggcttgaacccaggaggcagaggttgcagtgagctgagattgagattgtgccactgcattccagcctgggcaacagagtgagattctgtctcaaaaaaaaaaaaaaaaaaaaaaaaaaaaagccagacatggtggtgtagcacctgtagtcccagctactcaggaggttaaggcaggagaatcccttgaacctgagatgtggaggattgcagtgagctgagatggcaccattgcacttcagcctgggaaacacagtgactccgtctcaaaaaaacaaaaacaaaaccaaaaccaagactgtgactgttgnnt

SEQ ID NO: 570110 - DNA, 522 bp, Homo sapiens
atgccacagatgcagaatactgttttcttgctctatttacacagctgatatacctattctaacgaaggagggagaggagtaatgcacaagaaactcaggccaatgggggagcaagaagaaaacgaagaagtgcagtgcatgcgtcatcggtgtttaacagtcagaagcgaaacagttcagaacaaggcctgccctgtcaaaagaagagctaaagacagttatataaaaattaaggtgggctttcagactggctaacacaacaacattccatgagtagatggtaakttatttttgtttatccatttcgttgggagcaaggacaaaaatgtaaatctacaccttgcttatcaaaattgccgaaaaaagaatgctctgccttttaaaaaagtatcatgattttgtagaccttgttttccaatttaatatttggaaaaggtgtcattttcatattcccactcagatgccagtgttttgggtttttttccagggggagtttatttaaaacggttttgctcttttttt

SEQ ID NO: 570111 - DNA, 511 bp, Homo sapiens
ttcattcgaattatgataaataatacaggctctttacaaaaaattaatacataaaactataaagaagaaaataaaaatctacttggaattccaacttcagataaccaccacgaacaattttagtgactctcctttcttgtatttctttatgtatgaatacaaaaagatatatatttatcctgttatataagtggtataaaatcatacctatctttttaaatcacatctagttttatatagaaataaaaccttgggttttgttttgtttattgcaaacaaacaataacttttttttgtttattgcaataacaaaaaacaataactttgttttgtttattgcaaayaaacaataaactcctttctcatgctgttcaaacaccattccctctgacaaactcgccacaagtaagcaatattaacaagtcgctgcttatttcctcatacctttctttatgcacttataatcagatgtactctatgttactagttcactttcagagtagactcataa

SEQ ID NO: 570112 - DNA, 596 bp, Homo sapiens
  misc_feature 514: n = A,T,C or G
tatgttaagggatttgagctttatcctgaggtaaactgaacaagcaaggtggtattataataggatttgcctttaggaaccatcactcttaccataatgagcagaaagaattggaaagaagtgtcagtggatataaaaaaataaagttaggtgagagattcagttatcaaaatgggttataatgataacagcaatgataataatggtaataattgtcactgcaactaatactttcttgagctatgtgctggtccttcttctaagcccttcacatgtatgatcattaattttcacaatgctatgaggtttattatcatctctgtctacaggtgataaaactgaagcataaacagattaaatgacttattcacagttattatgaggtagagtgggagtatgaaccctggttccagggatagttctctcactgtctcatgataccatagttggatgagggtggtggctctacactgtctcactataccataatactctacactgtctcatgataccngtgattggataagggtgatggcaaaatggatgggcataggtagatgattcaagaaataygtagaaggtaaaataggatgtga

SEQ ID NO: 570113 - DNA, 454 bp, Homo sapiens
atggctgcatcaagtgtaatacagggggagaaaagagtaccatgatcagacatggcaggctcatagcatagtctggggaaggtgtaaagacaaatacaaattaaaaataagaggctaaattctccctgttaaaaagaagggaagagattttctgtctctccttttttcctagtacctaggtgaggggttgataggtgcagcaaactactatggcaaatgttacctatgtaacaaacctgcacatcatgcacatgtttcctagacgagaacttaaaatgaaataaaataaaattaaaattaaaaagacaaaaaagtaaaatttctaatgawaacactttctctttgaaatatataaaaattattttatcagcttcattaccaaggaatgtctttctcaaggacctgagagccatctctttgaactgcaagcatttttttaaaaaaaagggatttt

SEQ ID NO: 570114 - DNA, 592 bp, Homo sapiens
ctttagtggacatttaggttgcctgcctaacatttggttgcttaactcctgtaaactaaaaataaaattctaagcctcccaagtgactgaacagaccatgtctggccaaggggaccccagggtaaccttgaaaactaaattctcattcatgacaggatgccagggtcaaacaagccttattataccccttcctcaatattcaggattagcctttcttccctaagggctaaacggaaaccagcccttttgaaagattccaccmctaatatcaaccaaccacctgatattgcctctagttttttgcctgataagagatcaccacatggagtggttctggcccatctccagagaatgcacagtaagagttttcatgtcctctgcttcaccttttgatgtcagaggactgaaaactccaccctcggatcatgttaacactgccattttttgtatatgggacccatgaaggggcatgaagctccattgcgcatgcacacatttatcctttgataaatattcatgactcctcctatagcttattgaatacatatatttggccaccctgctcagcataaattcctgttctctttgcccc

SEQ ID NO: 570115 - DNA, 586 bp, Homo sapiens
agcaataacattctacgagtatacaacccagacttaagataatcagatttataggtaggcttggatttcgatatatgaagttgaggactgggggtgagaatttttatgataccattactaaatctaatttgaatgcttgaataactatgcattagtagagcctagggcagtgattctcagagtatgccttgcccstccaacagcatcagcagcatactgaacatttgttagaaatgcaaattctcagtctttcccaaatggaattaatggaaactcggggtgacgtctagaaatctgtattttaacaagcttttgaaacggttctgatacacactaaaatttgagaaccactagcctagggttaggagttcaggatcttaaataaaacattccctctttatatcccagctcaattcctgaatggctgggtggacttgggcaagacactttttctctaagttttaagttcctcatttatcaaatgtgggaaaatagcacaaacttcatagggctgtgtgagaatgaaaagagatatatctgtgttgccttagtcaaagttccccacaaaagacagcataaggcaaag

SEQ ID NO: 570116 - DNA, 586 bp, Homo sapiens
agcaataacattctacgagtatacaacccagacttaagataatcagatttataggtaggcttggatttcgatatatgaagttgaggactgggggtgagaatttttatgataccattactaaatctaatttgaatgcttgaataactatgcattagtagagcctagggcagtgattctcagagtatgccttgcccgtccaacagcatcagcagcatactgaacatttgttagaaatgcaaattctcagtctttcccaaatggaattaatggaaactcggggtgacgtctagaaatctgtattttaacaagcttttgaaacggttctgatacacactaaaatttgagaaccactagcctagggttaggagttcaggatcttaaataaarcattccctctttatatcccagctcaattcctgaatggctgggtggacttgggcaagacactttttctctaagttttaagttcctcatttatcaaatgtgggaaaatagcacaaacttcatagggctgtgtgagaatgaaaagagatatatctgtgttgccttagtcaaagttccccacaaaagacagcataaggcaaag

SEQ ID NO: 570117 - DNA, 584 bp, Homo sapiens
acatcttgaggcaaatcacacaatccaaaaagcaataacattctacgagtatacaacccagacttaagataatcagatttataggtaggcttggatttcgatatatgaagttgaggactgggggtgagaatttttatgataccattactaaatctaatttgaatgcttgaataactatgcattagtagagcctagggcagtgattctcagagtatgccttgcccgtccaacagcatcagcagcatactgaacatttgttagaaatgcaaattctcagtctttcccaaatggaattaatggaaactcggggtgacgtctagaaatctgtattttaacaagcttttgaaacggttctgatacacactaaaatttgagaaccactagcctagggttaggagttcaggatcttaaataaaacattccctctttatatcccagctcaattcctgaatggctgrgtggacttgggcaagacactttttctctaagttttaagttcctcatttatcaaatgtgggaaaatagcacaaacttcatagggctgtgtgagaatgaaaagagatatatctgtgttgccttagtca

SEQ ID NO: 570118 - DNA, 611 bp, Homo sapiens
tagtgtgggcaaaccattaaaaaataaaacctcgcccttatccaaggacaacaaatctcatataatagcatcttatgtaccaacaccaaatgaggatgattctttgaggacgggggcttctagaacattcagagtcttccctcaatatggtctgctttgcatactagtaaagctaatctttcttggttctccttaagcatattatgtacacttaagatgtaatttattgtaatcacatgcagtgcaataaaatctaaactactgccctggtttttccatagcaggcaggcatgatctgtttttatatgtgttagctatttattcacttatatagctaacttctatttaattatttattttttcatttatttatgtgtgtatacatttataccccattacatttccgaaatgtttgaagaaagttatgtagtagattatatgtcattagttgtagcagaatatcacgtttattatgtttattatgtgatattctgtaattatgtatttatgtaaaaatcatgtaattttttcattgataatctaataaaaggctggatgtacttgttttcaaattttgaagaataaartccttttagaatgattatttggct

SEQ ID NO: 570119 - DNA, 546 bp, Homo sapiens
tggttggggattggatcaaatgccaatatgatattcagtgaactatgaattactactgtgtaatccaagaaaagttgtttgcaaatgggaaaaggatgaagaagaatctctccatggttgcccacacatgcccactctcccaggtcaagwcaggatggcagactgggccattcatcattaaatggtcaccttttccctggccctgccttcaagaattggcctctatgccctgaaatgagctctctctctggcttctaggctctgttttggtttccctccagggatggaatctacaacttgtctctctgtctggtatagtttcttgcatctctttttgaaccttccttattctatagtcccatcacccccaaaacaataaatttctccaaggtgtttcccttcaagtattgtccattcaaagactatgtggctcaggaaagcaaatacaacaaagagtaaacatatttttgcaatttcagtcaactcctgtttttatgtctttctgatatctaacactgcaaaagcaacagtaaaataatattaatg

SEQ ID NO: 570120 - DNA, 555 bp, Homo sapiens
tgtggaatatcactctcttaatcatgcaacatttatttaatagtcatagtgctaaagatggcatgccctccaatgagcattgcactcttggttatgcatttatatgaatatgtatataggaatagtcatgataaaactactaattattataaaatttttggaaaaagcgtaactattaaaaatgaaattgtaacttaagactactcaatacatcagtaaaaatgaatgaactaagcaaaacatggatgaattyaaaaactgaaatttattttcattatttattaagaaagaaaatttgcactgttttcaagtctaataccaacagaactaaatggtatttctggataaacaattagaaaataaaattatgaaaaatgcaagaaaaaaattaccacaaagttgggatagaagttacattaagagatggcatggtcttatacaaagaaaaccctaaagactctgaaagactcctagacttggcaaatgactgcaataaagtttcagaatacaaagtcaatgtccaatagtcagtagtatttctatatagcaataata

SEQ ID NO: 570121 - DNA, 582 bp, Homo sapiens
gaacacttgaaatctactctcagtgattttcaagcactctatacaatacagtgctattaactatggtcrccacgttgtataacagatctctgagcttgttatcatcctcatgtaatgttaatacacgagaagataagtccaggatctgtcttttattacctttatgggtttccctatatagtgctatactactgttaacactagatttttcctatgcaatccaagaatagagattttctaaaacaattaatttagtgacttgaatgcaactggttggtaattctgtttctattgtcaaacgtgtagataactaattttaaataacatgagttcattctctttaatattggcctatgaattatttgtctatgattacataggccagtattaaagaaaatgacttcatattatttataaagtttctaatgtggagatacacaggaaaataaaacaatactaattgttaataataataaaaaacatgttctgagggattaatgcaaggttgttacagtgtgaacagcttcagatgcattagctattgtcatgcttagagcgacctaatgtgctagttactgtcag

SEQ ID NO: 570122 - DNA, 582 bp, Homo sapiens
gaacacttgaaatctactctcagtgattttcaagcactctatacaatacagtgctattaactatggtcgccacgttgtataacagatctctgagcttgttatcatcctcatgtaatgttaatacacgagaagataagtccaggatctgtcttttattacctttatgggtttccytatatagtgctatactactgttaacactagatttttcctatgcaatccaagaatagagattttctaaaacaattaatttagtgacttgaatgcaactggttggtaattctgtttctattgtcaaacgtgtagataactaattttaaataacatgagttcattctctttaatattggcctatgaattatttgtctatgattacataggccagtattaaagaaaatgacttcatattatttataaagtttctaatgtggagatacacaggaaaataaaacaatactaattgttaataataataaaaaacatgttctgagggattaatgcaaggttgttacagtgtgaacagcttcagatgcattagctattgtcatgcttagagcgacctaatgtgctagttactgtcag

SEQ ID NO: 570123 - DNA, 323 bp, Homo sapiens
ctgaggtagaggaaatttgcatctatggagaatcttcattaatgcagccatgcttcccctttctatgcctttccaggacctaggagtgattgagagtctgatacctttaaaggtctgaaaagaaacatttaccatctattctctctgagggccacctatgaggcttcatctacttaataagatccttggtctttcccccactcttatctgaactcaggcattcctttctatcgatttcaagactttagacgatagcataactctctcaaccaattgtcaactaaaggatccctaaaasccccttatgacgtacaagctcctac

SEQ ID NO: 570124 - DNA, 323 bp, Homo sapiens
ctgaggtagaggaaatttgcatctatggagaatcttcattaatgcagccatgcttcccctttctatgcctttccaggacctaggagtgattgagagtctgatacctttaaaggtctgaaaagaaacatttaccatctattctctctgagggccacctatgaggcttcatctacttaataagatccttggtctttcccccactcttatctgaactcaggcattcctttctatcgatttcaagactttagacgatagcataactctctcaaccaattgtcaactaaaggatccctaaaagccmcttatgacgtacaagctcctac

SEQ ID NO: 570125 - DNA, 697 bp, Homo sapiens
ggaatacataaactaacatggaattagcttttcagtttttgtttgttttttayttttattttttattttattttatttttttttgccagcacacttttatgtacactggagaaggatagaaaaatccatatcagaacttttaaaagcttgctatgtgaccttggctatttcaccttctttaggcacataggcttttacgtcagtgaaatgacaggacaggaattattttaagagctgcaaattcacttattaaaacaaacatttaagagacgctaataccaaaaagaggctgaaaaaaatgcggtagcatctgctgaatcaacactgggctcccacctgggcaggcttcccgttttcaaccctccctgacctcaggacagagcacagttcaaaaatcactttagataatctgacacactccttccatctttaggaaatcaccaaaggaaggtgaaaaatttaatcccactcctgattttcccagagcagccaacaatgcttagctgattataagtgcttgatcttggaaaaaaaaaaataactatagaattacagttgaaaagaagggacattcttgataagaaatggggtggtattattcatgatgctgacacaaaggacagcaccgcataatcaggagcaatgtggacctcctctaacctttcatgctgggtgaacaaagaaatagtgggagtct

SEQ ID NO: 570126 - DNA, 697 bp, Homo sapiens
ggaatacataaactaacatggaattagcttttcagtttttgtttgttttttacttttattttttattttattttatttttttttgccagcacacttttatgtacactggagaaggatagaaaaatccatatcagaacttttaaaagcttgctatgtgaccttggctatttcaccttctttaggcacataggcttttacgtcagtgaaatgacaggacrggaattattttaagagctgcaaattcacttattaaaacaaacatttaagagacgctaataccaaaaagaggctgaaaaaaatgcggtagcatctgctgaatcaacactgggctcccacctgggcaggcttcccgttttcaaccctccctgacctcaggacagagcacagttcaaaaatcactttagataatctgacacactccttccatctttaggaaatcaccaaaggaaggtgaaaaatttaatcccactcctgattttcccagagcagccaacaatgcttagctgattataagtgcttgatcttggaaaaaaaaaaataactatagaattacagttgaaaagaagggacattcttgataagaaatggggtggtattattcatgatgctgacacaaaggacagcaccgcataatcaggagcaatgtggacctcctctaacctttcatgctgggtgaacaaagaaatagtgggagtct

SEQ ID NO: 570127 - DNA, 555 bp, Homo sapiens
aggctgaggcaggagaatggcatgaacccaggaggcggagcttgcagtgagccaagattgctccactgcactccagcctgggcaacagagcgagactcggtcaaaaaaaaaaaaaaagaattagtcttatctgcctatataaatcaatgaatttatatattctctctcaggtagagaagtttaaagttgcaagtatccatagcaatgggtaccttttgttacacrtctaacaaaacatctaacacctacccccatgtatgtcagacatgagggtaggctccataactatcttatctcaccaaaaagaatatgatttttttctcagtcttaaaacatccctacaaataccattgctcattttaagattaggtcatagaacttcatttgaaagatgaagaaacgaaggctcaactaagcaatggaacatgcccaagctcacatagctaatcagcagaggagctagcattcaaagctgattccaaacctcatgtcctcaacacttaagaaactgtataaatggtcttatctacactggaattcaggatgctactttca

SEQ ID NO: 570128 - DNA, 555 bp, Homo sapiens
aggctgaggcaggagaatggcatgaacccaggaggcggagcttgcagtgagccaagattgctccactgcactccagcctgggcaacagagcgagactcggtcaaaaaaaaaaaaaaagaattagtcttatctgcctatataaatcaatgaatttatatattctctctcaggtagagaagtttaaagttgcaagtatccatagcaatgggtaccttttgttacacgtctaacaaaacatctaacacctacccccatgtatgtcagacatgagggtaggctccrtaactatcttatctcaccaaaaagaatatgatttttttctcagtcttaaaacatccctacaaataccattgctcattttaagattaggtcatagaacttcatttgaaagatgaagaaacgaaggctcaactaagcaatggaacatgcccaagctcacatagctaatcagcagaggagctagcattcaaagctgattccaaacctcatgtcctcaacacttaagaaactgtataaatggtcttatctacactggaattcaggatgctactttca

SEQ ID NO: 570129 - DNA, 555 bp, Homo sapiens
aggctgaggcaggagaatggcatgaacccaggaggcggagcttgcagtgagccaagattgctccactgcactccagcctgggcaacagagcgagactcggtcaaaaaaaaaaaaaaagaattagtcttatctgcctatataaatcaatgaatttatatattctctctcaggtagagaagtttaaagttgcaagtatccatagcaatgggtaccttttgttacacgtctaacaaaacatctaacacctacccccatgtatgtcagacatgagggtaggctccataactatcttatctcaccaaaaagaatatgatttttttctcagtcttaaaacatccctacaaatamcattgctcattttaagattaggtcatagaacttcatttgaaagatgaagaaacgaaggctcaactaagcaatggaacatgcccaagctcacatagctaatcagcagaggagctagcattcaaagctgattccaaacctcatgtcctcaacacttaagaaactgtataaatggtcttatctacactggaattcaggatgctactttca

SEQ ID NO: 570130 - DNA, 611 bp, Homo sapiens
tttacccaaccttagtgtaaaaacagcttgtatcttaagagcaaaaaccattataaaagatggtcggaatcttaaaaatgttattaaatgtatcaaaaacattccataaacaaaattaaagagcaaacagagaaaaatatatacctctggtggatattttgatttaaaaggtaatcagacattatatcaaaagcctccaaaagttattctactgacgcagcaacataacctctaggmatttttcctgaggagatcagaactgtgaagaaacattgatcaataaagtaatttacatcataaaagaaaaatgtggctgagtgcagcagctcatgcctgtaatcccagcatgactgggaggccaaggcaggaagataacttgagcccaggagttcaagaccagcttaggcaacatagtgagaccttgtctctaccaaaaatttaaaatattagccaggtatttttgtagcatgcacccgtagttccagctacatgagaggctgaggtgggaggatcatttgaccccaggaagctgaggctgcagtgagccatgaccataccatggcatttcagcctgagcaacacagtgagatcctgtctcaaaaacaaaaagc

SEQ ID NO: 570131 - DNA, 524 bp, Homo sapiens
caggactctggtctagcagctgagtaaggctcaggccttagaatggcttagcttgctccattgcaatgcatcatcctggatgttaaaatccagctgtctctctgaaaactaaatatgaaagactgagatttagtcaactttgctgagatttaatttacatataataaaatgaatcattttaactgtgcagttcagtaagttttgaaaaatgtctayacagattcatgtaactgccaccaaaattgagaaaggacacttccaccatctcaaaagattctgtgtgttcctttgtagtaagtctcttctaccccatccctagacaacagctgatgtgctgtcattgtacacatatattagctttgcctgtcctagaacttcatgttaatgggaagcatcctgtatgtactgttttgtgtctggcttcttcagtgtatttttgaaatttatccacattgttgtgtgtatccaaagtgtgttctttttcattgccaaataatgttctgctatatgaatatattacaaaa

SEQ ID NO: 570132 - DNA, 601 bp, Homo sapiens
gatcttggagttcccaacctctggaactgtaagccaataaatttttggtcattataaattacccagtcttaggtattctgttatagcagcgtaaaattgactaaggctaaaatatattctattcttagaaataagccattcaggattatatctcagatttttacagccaacaaaatttctgctctttggatcctgttcaacataaagcaagaaatgcaagatgaaaggggttagtatctgagtataataaatggtccagctttataaagtttaggtaaaaatctattgtgcactctgtcccttgtgaatagggcttaaaatttaacctctataactgaaytgagccaattcccactacctcatgtcattgaaaaaaatgtgggataacaaaactatactgttcattctctctccttgtctcctaacactctgaacagagatgctcagagaagctatattattacaaagacctctgactatatctacaaatattccctaggctatccaagctttcttatgtcaataacctaacaccctacttttctctgacctgaacagctctggcaggagtatagcaggatattgggaagagaatacactg

SEQ ID NO: 570133 - DNA, 364 bp, Homo sapiens
tttaacagatcctgcattaaggaaaattgtttaaccatttaacctaaagtttctctctcttcctttctccccttctctaaatatctaaatatgccccagtattccaaagaacatggttaagaagatgatgagcttgggaacttttaagacccctctgtctaatctctmattatgtctggttctatggcactggctcactgcaacctcagtgacaaccatagtgtgagggctatcctaactctctcctgatttccccaagacaagatatcatacctgatcattttattgtccatgtccaccctcccttccccagtagggtttacctgcacagtatcgcttctacctatcagcatatcagaaaaca

SEQ ID NO: 570134 - DNA, 628 bp, Homo sapiens
aggggctggtatggatttctatatccaccaagtacacactaggagaggtgaatacaaaatcaaaagcaattcccactttaacaaatgatgtgtttgttcacattatcacctgaacagaaaatgcctttggagagcccagctgtagtggcagcagcagtactgtaaccatgaaactctgaaaaagtttcttctatatagtaaagaaaaatacatcaaggctccacttttgtcaagtaygttatcgtatgtttaacttaggagaaaatacaggaagacacacttgcaaaatttttgtggtgtaaaatttagtgctacaaaatcaatattcacttgttcaaagaacagatggatcaaacttaagttgagtacatcaaggaagtgtctaaggcagcatgggaatgtgattaaaactctgagaaatgggtagatctttgaaaaaagaactgggaagggactataaagaagagaaatgatcagaatgaataaagactcatatccaataaagtatatattattttaggaaacattaacgagttgataagaatacaggaagaacatttttaaagtttctattgttctcatctccattacagtgatcagtcctatgggttgtattattgttaaaata

SEQ ID NO: 570135 - DNA, 628 bp, Homo sapiens
aggggctggtatggatttctatatccaccaagtacacactaggagaggtgaatacaaaatcaaaagcaattcccactttaacaaatgatgtgtttgttcacattatcacctgaacagaaaatgcctttggagagcccagctgtagtggcagcagcagtactgtaaccatgaaactctgaaaaagtttcttctatatagtaaagaaaaatacatcaaggctccacttttgtcaagtatgttatcgtatgtttaacttaggagaaaatacaggaagacacacttgcaaaatttttgtggtgyaaaatttagtgctacaaaatcaatattcacttgttcaaagaacagatggatcaaacttaagttgagtacatcaaggaagtgtctaaggcagcatgggaatgtgattaaaactctgagaaatgggtagatctttgaaaaaagaactgggaagggactataaagaagagaaatgatcagaatgaataaagactcatatccaataaagtatatattattttaggaaacattaacgagttgataagaatacaggaagaacatttttaaagtttctattgttctcatctccattacagtgatcagtcctatgggttgtattattgttaaaata

SEQ ID NO: 570136 - DNA, 529 bp, Homo sapiens
agtgtcatcttgaaaactttggctttccaaattctacaaattgcacatgcayacacacacacacacacacacacacacacacacataaccctacttttaaacagataattaaaagagggaaaaattgacactaaaataaaatgtcactcatatagtatagaaaatgcaaagcaaatcacaaaaatttattttaaaaaatactggactcctagtacaattaagtgtcccctgaggttcaggacaattggacctaggataaaaatgacttataacagagttgttttagtacctttaacagtctacttaagcatggaaggaggtgacatgctcttacacactgtttcccacctttcgctaaacccatgaaacaaagttttaaaaaacttttagaaaaaaatgttacccactagactggcaaagtagtaagaatgcttaccaaagttcagagcagtaagaaagggaaaaggatttaacaaaatgtatcaggagcccaatcctattctctgtgtgagtttaaaatctaattcac

SEQ ID NO: 570137 - DNA, 469 bp, Homo sapiens
ccaagaaccctctcttgagttctggatcaggaccgctttgctgtaacacggtgctgctccgtggccacgtgagccgacggatgcagagaccgacggcgggctcttcgttaccctggcccgcccaggctcccacggcccccagcccttctgttctcgtgctctgatggtggcgccgtgtggcctgccctgcgcgctaggcactgctcagctgctctgtgggtgggtcgtgggcacttgctgacactctacagrgaggggccttcctggagtcatgagacaggacactgagagcagccgccttgtctggagactgagtcccgtgtcagggacaagcagtgactgcctccctgacctctgcttcctccacgctggcaacaaaggcgggaagcaggaggccggcctgacaccaagaagcagatggcaggggccatgtttcatcccaatgcccaggagctgttcctgcgaattc

SEQ ID NO: 570138 - DNA, 487 bp, Homo sapiens
gtaccttcatggtcactggaggccaagactctccttcttcttagaggatttggatattcttaaaaaaaaaaatcaagcaatagcaaagggctcagtgtctttcctttattttttggattccaggagcatagccttgaattaatccgatccttgcttcgttcaggccaaattgtaatcatttgttgaaacaaactttatttgtttctctgtttagaactatatctgtgtatttattttaataatattataagcatccatggacctaccacccaaatygagagctagctctcttttttggtaactacatctgagcacatttaccacctgccttcctccacctgggtaaccatcagtccactttctacattcctcaacgctggctctacttttcaaaataatatttaggcacccatacatatccaaaaaaataaattttaagaatatttcattgtttttaacattttaaaaagagtgtaatgctgtatat

SEQ ID NO: 570139 - DNA, 487 bp, Homo sapiens
gtaccttcatggtcactggaggccaagactctccttcttcttagaggatttggatattcttaaaaaaaaaaatcaagcaatagcaaagggctcagtgtctttcctttattttttggattccaggagcatagccttgaattaatccgatccttgcttcgttcaggccaaattgtaatcatttgttgaaacaaactttatttgtttctctgtttagaactatatctgtgtatttattttaataatattataagcatccatggacctaccacccaaattgagagctagctctcttttttgrtaactacatctgagcacatttaccacctgccttcctccacctgggtaaccatcagtccactttctacattcctcaacgctggctctacttttcaaaataatatttaggcacccatacatatccaaaaaaataaattttaagaatatttcattgtttttaacattttaaaaagagtgtaatgctgtatat

SEQ ID NO: 570140 - DNA, 487 bp, Homo sapiens
gtaccttcatggtcactggaggccaagactctccttcttcttagaggatttggatattcttaaaaaaaaaaatcaagcaatagcaaagggctcagtgtctttcctttattttttggattccaggagcatagccttgaattaatccgatccttgcttcgttcaggccaaattgtaatcatttgttgaaacaaactttatttgtttctctgtttagaactatatctgtgtatttattttaataatattataagcatccatggacctaccacccaaattgagagctagctctcttttttggtaactacatctgagcacatttaccacctgycttcctccacctgggtaaccatcagtccactttctacattcctcaacgctggctctacttttcaaaataatatttaggcacccatacatatccaaaaaaataaattttaagaatatttcattgtttttaacattttaaaaagagtgtaatgctgtatat

SEQ ID NO: 570141 - DNA, 487 bp, Homo sapiens
gtaccttcatggtcactggaggccaagactctccttcttcttagaggatttggatattcttaaaaaaaaaaatcaagcaatagcaaagggctcagtgtctttcctttattttttggattccaggagcatagccttgaattaatccgatccttgcttcgttcaggccaaattgtaatcatttgttgaaacaaactttatttgtttctctgtttagaactatatctgtgtatttattttaataatattataagcatccatggacctaccacccaaattgagagctagctctcttttttggtaactacatctgagcacatttaccacctgccttcctccacctgggtaaccatcagtccactttctacattcctcaacgctkgctctacttttcaaaataatatttaggcacccatacatatccaaaaaaataaattttaagaatatttcattgtttttaacattttaaaaagagtgtaatgctgtatat

SEQ ID NO: 570142 - DNA, 605 bp, Homo sapiens
gcatactaaaatacctaaaccctttatcacacaatgaaattctgacagaatctatggcctgaatatgggtgggactgatggagttgagaaacctctttaaatatgtgaatgaaatttttttcagtcccataacatattaagggagtttagcctaagggctcagcagggttcccaaggcatgaatttggacaggaatttcctactgtagtacatccaacttgagccttgtggacccaaagcaccataggatccacaacatgctacagtataagaatggagatttctcaacccctctggcgaggacagggctgctaatgaacaagaatttgagacatgagccctttgactatttttctctgtcttctacccaggcctacctagtaaattttgggttgagaaatgtatggctgaaaatgccctaagatgtttgaagttctggttggtaagaccacaagctctacagagtatctgtattctgcaagtcagtagtgcatgaaaaggcattgtacttatttacagtgatattctcctatgtatagcyacagctgaccagtcagcagcttcatatgaaatggaaatgtctcagactggcttcagtgctcatt

SEQ ID NO: 570143 - DNA, 373 bp, Homo sapiens
ctttcagtatcaactctggaaagaaaatgactacatcaactgaccatctcaaacgaggcacaattctggtaaattaagacaagtgctatttttaccttttgctttccaaatgaataaaattgatatcaatctagaaataaccatctgaagaatttaaatatagatatttgataaaacggcaagaatactgatatgtatctctggacatttaaacaggactgcaatacatgtaaatttgctaccatcacatgtaatctcacttcttctgacatcagccaagtcaatgtttcgcttatcttgtggaaaccaacttttataaaagtaagtaaatacatagttctatgcactkattgaataatatcaataaatattc

SEQ ID NO: 570144 - DNA, 461 bp, Homo sapiens
aaacgtagttattttctttattcaatttatastttattatataaaattatttaacatattagggctagaagaaaatacaggaagaagttttagtaaaaataacacatggtcatcttatttaaaatttcaccctcaaactatgctgtggggtgagtgagaagctattgttacagaagacacagactgaattatgaaggggttatttgtcaggtcatctacctaagttttggcagagcacattttcactgccctatcttttctctcttactgtaaagtaagtgctttttctctctcttcaccccttatccaggaagagaatacagtggagttactaaggaagaatctggatatattcactggaaaataaatggtatacctcaagatttattatttgtacatccagagaatatcacaacatttacttccttaccttcatttactttgattataaaaataatgtg

SEQ ID NO: 570145 - DNA, 344 bp, Homo sapiens
gtgtagtatacctagataagggaatcttatttggctattaaaaagatgtgatagatccatgtaaactgaaaggaaaagatgtttatgttacagagtcacatgacaaagacatggtgaggagcagaatggaaacagcatcatctactcaaggcagaataatacagagggttagagcctgggctttggagccaggctgcctgggtttggacwtcaactctgcccttactgtgagacctcaagcaagttacttctttgtgcctcaattatgtcatctgaaaatgggaataatgttgacaatagtacctatcttgtaggattatgttaatatgtgtaaagcccataag

SEQ ID NO: 570146 - DNA, 592 bp, Homo sapiens
aaagacaagttaacatagtagtattattgtgtaggtagttttgacattgtgcgttgcctgaaagggacttgatgactcccaggcatctttggatgacattttgagaaccactgctctggcctttctctagcttagatggggtttactgttatctgtggctaactctttaagtaaactgactgtgaacgccacatgcatgatatccaggctcatttctaggtctttaaacagcatcttccacttagttccatattcactgccccatcaccacagcacatatgtcaggaaggctgatttctcatggaaacataaagagtatgagaaaaggtcattcatcaaggctgtttttgtttttaattgtatttgtgtttttattaaaatattactgatccttaaaatgcttaaatccaggcatggagacacawttgtgaatcttagttaatttataaatataaaagtatttatgattgtttcctatggagcccatgtcctaggcaatgtgattataagatttaatcaaatggtcctattgtgtcaaggagctcagtctttgaaatacaaagaggcaattaaaaattacatagttgtggaa

SEQ ID NO: 570147 - DNA, 385 bp, Homo sapiens
gtctttctgattgacctgctattaggaggccactgcattatagaccttcaaagctttagccataaaataatttcaaatgcagtgtcaagagaagtgttccaatatgtaataagtaaaacttagaagacgtataaaaattaaagggtgggtcaactggttcaaatggcacacaaatttaatgtgagtgtcacagtctaatggaaaaaacagcatctcaggatccaaagggggttcacatcaattccagctttgcccttcatatwacctcagccatgttacttcatcttactgtgcctcagtctcctcagctgcatgacgaagactgcgaattcattgattctcaaattacatgctacatatttctgaagtcacataatggcataca

SEQ ID NO: 570148 - DNA, 562 bp, Homo sapiens
cggaggttgcaatgagccgagatcgcgccattgcactccagcctgggcaacaagaacgaaactccgtctcaaaaacaaacaaccaaccaaacaaagtcagtgctccacaatgaacgaaggatggagggtgacagaaatgcccccatgttaaaatgacacaaatgctgctgtcttactgaagtttggtactttctgtgggatagatacttttcactttgttctgtggctttggtaaatttcagaagtctgaaatgattgattttagtgactttgcgagtgttttcatcattttgcagaggagacttggtttcttgtggtttgcattcatcaatgttagaagctgatctctctattcaatcttgcagttttaagtaatgcattgaacagtcacataacagaacgcggagcaggagaactaaatttctagtgtaatcagaatggcaggcactaaatgaattattttacaataagcctgtgtcctttttattaactgttcagtgragaagtttggagtctataaacttgtaataaatgtggcctgtaagaactacaaatactggaa

SEQ ID NO: 570149 - DNA, 508 bp, Homo sapiens
ttgaaatttatagggatgcatcccagagcaatttccagtgtttagccataaatattttcaagagagataaaagcagttactctaacactaactcccctgtacagactggcccctgggagcagagaagtgcagccagcaagggagtgtgggaagactaacccaacgggacagccacttatctttcctgtttgccccagggagggaggttggtggtgggggctggctgctgttagaagtgctgagcatcccccacccctcccaatttgtatttaatctccctagccctgtatgtttttttcattgccagacccagatctacgacaacagtttccatttcttcccatctcccaagcagtgagcaacaaaggaaagacattctaagagcccatgaaacgttttttttttttattgaaaccctgttctccagagagagattgaggaggcgatttaagcaamcttattacaaaataaaaatgtatcctcctactccatggcaggaaatgtgaga

SEQ ID NO: 570150 - DNA, 474 bp, Homo sapiens
tgccaccatgatcatgggagaacagattgagatcctgatttcacttcttttggatacrtacccggaagtgggattgctggattacatgataccactatttgagtttttcatgccaagcattcttgcattccttgtattaacaacacttgattacaatgttactttttatgcatggctggatttctatcttatttggaatttttttgcgtctatattcacaagttaaataggtctatgtttctttttccatgttgttcttatctgctgttggaaccaagattatattaggcttataaaacaagctggagtagggaaaatgtaagaaaagcctttagcatcttgtaatgccagaaaataaaagttctggagaaaggataggggcattgttgcagagggcacaggagccaaactgaaagagaccgcagtggccaaaactgaaacaacttgagcaacaaaatatttaacagcagtatt

SEQ ID NO: 570151 - DNA, 474 bp, Homo sapiens
tgccaccatgatcatgggagaacagattgagatcctgatttcacttcttttggatacgtacccggaagtgggattgctggattacakgataccactatttgagtttttcatgccaagcattcttgcattccttgtattaacaacacttgattacaatgttactttttatgcatggctggatttctatcttatttggaatttttttgcgtctatattcacaagttaaataggtctatgtttctttttccatgttgttcttatctgctgttggaaccaagattatattaggcttataaaacaagctggagtagggaaaatgtaagaaaagcctttagcatcttgtaatgccagaaaataaaagttctggagaaaggataggggcattgttgcagagggcacaggagccaaactgaaagagaccgcagtggccaaaactgaaacaacttgagcaacaaaatatttaacagcagtatt

SEQ ID NO: 570152 - DNA, 474 bp, Homo sapiens
tgccaccatgatcatgggagaacagattgagatcctgatttcacttcttttggatacgtacccggaagtgggattgctggattacatgataccactatttgagtttttcatgccaagcattcttgcattccttgtattaacaacacttgattacaatgttactttttatgcatggctggatttctatcttatttggaatttttttgcgtctatattcacaagttaaayaggtctatgtttctttttccatgttgttcttatctgctgttggaaccaagattatattaggcttataaaacaagctggagtagggaaaatgtaagaaaagcctttagcatcttgtaatgccagaaaataaaagttctggagaaaggataggggcattgttgcagagggcacaggagccaaactgaaagagaccgcagtggccaaaactgaaacaacttgagcaacaaaatatttaacagcagtatt

SEQ ID NO: 570153 - DNA, 540 bp, Homo sapiens
tctggtagacaatagtaagaaaaatgatagccatgctactgctatgaatcatgggtaagttctttcctttaataacatgatgacataagaattatcatggccattttaaagattaggaagctgaagttttgagacaagctgcaaagttagttggaaacaaatacaraggacttggttagtgttggtgaggatgggtcctctcatacgctgttggtagaggataaattggacacaggcttttgagagcgcttagacagcatttagtaaaattgctaattttacatcaaagtattgatcctggagaaatacttgcatatgtaatcaaaaaggcataaagaaggatgttcactgaacactccaaaaacttggatatgactcatatgtctacaaatgatagagcacttaagtgctaagtactggcatgtccatattgtggtaggttacttaatactttagtgtaacatgactgacatataacaagccatatacacacacacacacacacacacgctcacacttttttttttttttttttagaca

SEQ ID NO: 570154 - DNA, 540 bp, Homo sapiens
tctggtagacaatagtaagaaaaatgatagccatgctactgctatgaatcatgggtaagttctttcctttaataacatgatgacataagaattatcatggccattttaaagattaggaagctgaagttttgagacaagctgcaaagttagttggaaacaaatacaaaggacttggttagtgttggtgaggatgggtcctctcatacgctgttggtagaggataaattggacacaggcttttgagagcgcttagacagcatttagtaaaattgctaattttacatcaaagtattgatcctggagaaatacttgcatatgtaatcaaaaaggcataaagaaggatgttcactgaacactccaaaaacttggatatgactcatatgtctacaaatgatagagcacttaagtrctaagtactggcatgtccatattgtggtaggttacttaatactttagtgtaacatgactgacatataacaagccatatacacacacacacacacacacacgctcacacttttttttttttttttttagaca

SEQ ID NO: 570155 - DNA, 634 bp, Homo sapiens
aattttttctttcatatttactgttgttagcaaatattttttctacagacctaagcacattttaataagcaatttaaaggcaaattatcaatatttaaagtaagaattttaattccacagattagaataatatcttcaacaggagtttgggctctttaattactttctcaagatgggtacagccctttcctcacatgaatgacaattcctaaagaccaactgtttgtctmaaatgaattccttcatatttgttgaaaattttggtaatattatctgattttctttatagtaattacagtagactgatcataactgtggacttactttggacacataaacccccaaaataaagcctggaagctacctttttataaagaacctagatgactgcttttaggttttgatcttataatactagaccactgtattcatgagttgttgtgttttcacatttactatatgtcgtatttactaagttactttgaaaatgaaagcattaagtaagtacagatgagctgctgactcgaagctgcacagaggccaaaattaagggagctgaaacataagcatctcactgcataagttctatattggaggattctatatctgattttttgaaaatttttttatgatg

SEQ ID NO: 570156 - DNA, 605 bp, Homo sapiens
aaaaaaaaaaaaaaaaaaaagttactgtactgaatactgtaaataattgtaacacaatggtaattatttgtgtatctaaacatagaaaaggtagagtaaaaaacatggtatagcagataagaaataatgcatctgtatagagtacttaccatgaatggagcttgcagaactggaaggtgctctgtgtgagtgagtgagggagaggtgagtgattgtaaaggcctaggacattactgtacacaactgtaggctttataaatacagtacacttaggggacactgaatttatttttaaaaattctttcttcaatcataaattarccttactttactgtaactcttacactttataaacttttatattttttttttactttttgactcttgggtaataacattagcttaaaacatgaacacattttacagctatacaaaaatactttcttttttatatatccttatttcataagctttttctttcttcaatttttcaattttatttaatttttactttttaaacttgttggttaaaactaagacacaaaagcattcattagactaggtctacacagggtcagtatcatcagtatcactgtcttccacct

SEQ ID NO: 570157 - DNA, 586 bp, Homo sapiens
tagtgattccactgcacaatcatattgttagaattaattgaaaaaatacatagaaagctgcataacccagaatagtttaggctttgttgctgtaacaaacaacctgaccctctcagtggtcacatgcctacttaytgtgggttagcatagcactctgctccaaatttctgatactgacgaagattcccatattggcatacgctttcaatattgcagaagcaagggaaaccatggactagctctgaaacttcctgacaaatgaggaaggtcacttccaatgacattattatctaggaatttatgagctacatttgattgtggagactatatattaagatttggtattatttatgctgtatattgttagtatacaatgctatatattgaagggtactgtgtttagaaaattttggaagataaggtaaatacacgaaatacacataaaataatatgaagctttgagcaaagggcatagacttttatttcatcttatgactgcattaatcctattaatctgtctctttaccaagagataaatcatgcgcatctactctttgtatattgttaaaatgtgcttatttctgat

SEQ ID NO: 570158 - DNA, 419 bp, Homo sapiens
ggctggcgcagtcatttaaacacatcagtgacaatcccggtaacctcatcctcttgacgaacgtkgtaccaaatgcggacacctgcattttaatcagattcagggtatcatataggacctcaattttgatattggctgctgatggcttttaagcgtcaactcatcccactacccttttatccctcattctgggcaagctggtaagaaagtctgagtgcttctttgacacaagttataatttcaaaccacacatgctgcgtgtcatggcataggaagctgtacccagttccatccccttaacatcataaaaacctatgccagtcttctatccgtgcattctcggtgccattttcagacggcttaggtttatttgctgtaatgagactcagaagtctcactagtgagttacggaacttctc

SEQ ID NO: 570159 - DNA, 425 bp, Homo sapiens
acacatcagtgacaatcccggtaacctcatcctcttgacgaacgtggtaccaaatgcggacacctgcattttaatcagattcagkgtatcatataggacctcaattttgatattggctgctgatggcttttaagcgtcaactcatcccactacccttttatccctcattctgggcaagctggtaagaaagtctgagtgcttctttgacacaagttataatttcaaaccacacatgctgcgtgtcatggcataggaagctgtacccagttccatccccttaacatcataaaaacctatgccagtcttctatccgtgcattctcggtgccattttcagacggcttaggtttatttgctgtaatgagactcagaagtctcactagtgagttacggaacttctcgtatcctctcggttgcatgtgggtc

SEQ ID NO: 570160 - DNA, 594 bp, Homo sapiens
tctattcactaaatcatctacagaaacagtggaaatgtaaataattaggcaatgcttagataaataattgctcctctgagcaattgtctttcataaacccatcaaaagcaatgttttataaagtacataatgccataaattacatgaagatgataacttatgaaaaagcaagaaatatgtcatctgaaaaggttttaaatgtatacagagccaggcacagtaatagaaatttcacatcttcttacttatggggggtctgactcacagaccctgacccaacaacagatgaataaagtacactgacacacagatattctgctttgccagtccaactgagcgtccgggccccttaacagattccaagcagagtgctgtaaacagttgcaaccacagccctgaccagccagtgagactcacatttatttagtaaggattaattgacaaaggcttgagmcaaccccactagagggtaattgatattgcagacttccggagtagaaagcaattaagcacccgtggtagatcaaaggttagtcttaggaccacatgagtaaacaagctagttagacaaactccccacattcctttgtttct

SEQ ID NO: 570161 - DNA, 662 bp, Homo sapiens
cacccgtggtagatcaaaggttagtcttaggaccacatgagtaaacaagctagttagacaaactccccacattcctttgtttctactctaatttatttaattaaarggacaaggctgccttcagccaagtactatatgtaaaaactcccaggccttcctaaagggtttgtgtatattctctgtagctaaaatttttcccaccatcatgactgaacccccacaatcacttatttgttggagctaaaaattaaaacaattgaacccctggtgatagagagtggaatgatggttagggatggtcaatgggtacacaatataattaggaagaatgaataagatctaatatttgataacacaacagagtgactgcagtcaacaataacttactgtacatttaaaaataactaaaagagtataataggattgcatgtaacacaaagaatggacaaattcttgaggtaatggatactctatttacccagatgtgattattgtgcattgtacgcctgtataaaaatatctcatgtaccccataaatatgtatacctactatacccaccaaaattaaaaataaatatataaaataaaatatatgctgtgagatactgcagtatttattttatgtgactttaacttactctctttgcttatccatgtgttaa

SEQ ID NO: 570162 - DNA, 597 bp, Homo sapiens
aatagcacaatatagtaagtagtaggtctattttcatgctgtatcaactaatttgcaatcatagcagatcttaagatttcttcttccaagatgtcttaacctgccaggggttatattcattcaattaatgttgctgtgtgaattaattccatgtggtttgctaactcctattttactaaaagtctccttgaaccagagtgtcatgtgttgtttcttgacatctaatgagaggtcagaggaaatgatttctgagataccttcttaacctttcaaagtccaacatattttatgctactgtctcaaactaatttttttaaccaaggcattaaattgaaaataccacagagggttattatgaaaatatttacttttctcaaaacatgtgaaaatatgatgttttaaactttgtgggaaaggtattgtttacagcaggattgagaggaaagcaattagattttyaatcctgctctctcactccctttataaaattggaaaatttatttaaaaattttgtgcctcagtttcttcatcagcaaaactgttaacacatacaactctgtgtatgtacatgtatgtttataatcagtcacactaaat

SEQ ID NO: 570163 - DNA, 575 bp, Homo sapiens
atctgtaagtataaatattgtatcacagcttcaggaagcttccttaagagagagcaaaactgtgtcttttgctgtctttctgcawaacggtttcctttgcgtgcctccttgaaaaggaaagctgacatcttaaactacgagactgaggctacagaaggaagagcacagatgaaaggacctagcaccttggcatctaacaacaggaactggccactagctctatactgcctccaccaaattcacctgtgagaggaaggggaacaaatatatacattgtccacatcgtctacatgtataaatgccatttttacatttgtctatcatttttatataaccctgatatttattaatacaacatttctttcctggaagtagagtcctgccaatgctaatgattaaacagtggcattgccttaggaggtggtaagaagacggatttttcagttggaaagctatgatgtatttatccctttaatgcagtgataacatacccagtgagactgtcatctgtaataccacacaaatcagcctatattgcaactgaggcccaagcattaggaaaacctatagagaca

SEQ ID NO: 570164 - DNA, 584 bp, Homo sapiens
attttatattttggctcacccagcatcatgaattccttcccacttggggtgatattctcatggtgcattgattgctgtacaataggcccccacctgtgtctatggaaaactgtaggggagacacagacatttgctttccttttcttcctggcaactatattatgacaggatcaagttgagcattcagacttgtttctttgagctttgaaagagtgatgtgagaaggcagagtccaggyagtggtgacgcagatgtagacacaatgaagccagttgtgacctccttctcaggctgacgaagtagcacattaatggctgtgttggaagctgtagcctgaatttttcttgtcaattctctgcaattccaatatctttccattacattcactgtctgcataatttggtcagagacaatttctgcttttgtatcataaattttgtgtggtactctacctctctaattaaatttcacagtgctccctccttcttcactaacattcagcatcacaggcctatttcctgattcttgaacacagcacgcttctttcagtcacagaatcctggagaatgcttttattctgccaa

SEQ ID NO: 570165 - DNA, 583 bp, Homo sapiens
agttctacatgagtgaacatatttttcaaactgaaggggaaatgaaaacattctcaattaaaatattatatattttttatcagaagaccttcactataaggacagttacagcatgattttcaatctgaagaaaaatgaaaccagactgaaactcagctacataagatggttttacacacatacaaacacacacaacttttctgaatttcataatcttgtatataaccgtttatatcaaaaattttatgaaatttcattgaatttatacacatacacacattttagtaaaattaaaytaatgaatatatgttttgtgttgtgttacaccttaacaataataaaagttttataaataagaatatacatttaatgcctgaaattaccatttaacttaacttagttgtaacttaaacacccatctccccaaaacatacacacacacatacatatagatttcattaaaattattttaaaaataaattaataccaagaaggcagaaaaggaggatcacagaaagagaaatagaaaacaaataataaaactctagacctgctatatattatatgttaatattactaagtt

SEQ ID NO: 570166 - DNA, 583 bp, Homo sapiens
agcattaaatatgaatgaatggaactggcatggtgtctcacacctgtaatcccagcactttgagaggccaaggtgggcagatcacctgaagtcaggagttcgagaccagtctggccaacatggtgaaaccccatctctactaaaaatacaaaaattagccgggcatggtggtgggcacctgtaatcccagctacttgggaggctgaagcaggagaatcgctagaacctggaaagtggaggttgcagtgagctgagattgcaccactgcactccagcctgggcaacagagcaagactctgtctcaaaaaaaaaaaragaaaaggtgaatgctcagtggcctccttgatctgcagaagtgaggccactgcctcaggattttaggatttgagggctgccatgctggtcatttttaatttctgggtgacaatactctgaaatgcagaacttcattttgtgataactgtttgccctccatattcgtgggttccatattcatggattcaaataagcccagaacaataatactttaaaaaagtttttaaaagatggttgcatctgtactgaacatgtacagacgttttta

SEQ ID NO: 570167 - DNA, 583 bp, Homo sapiens
agcattaaatatgaatgaatggaactggcatggtgtctcacacctgtaatcccagcactttgagaggccaaggtgggcagatcacctgaagtcaggagttcgagaccagtctggccaacatggtgaaaccccatctctactaaaaatacaaaaattagccgggcatggtggtgggcacctgtaatcccagctacttgggaggctgaagcaggagaatcgctagaacctggaaagtggaggttgcagtgagctgagattgcaccactgcactccagcctgggcaacagagcaagactctgtctcaaaaaaaaaaaaagaaaaggtgaatgctcagtggcctccttgatctgcagaagtgaggccactgcctcaggattttaggatttgagggctgcyatgctggtcatttttaatttctgggtgacaatactctgaaatgcagaacttcattttgtgataactgtttgccctccatattcgtgggttccatattcatggattcaaataagcccagaacaataatactttaaaaaagtttttaaaagatggttgcatctgtactgaacatgtacagacgttttta

SEQ ID NO: 570168 - DNA, 625 bp, Homo sapiens
ctaatataaatgacgagttaacgggtgcagcacaccaacatggcacatgtatacatatgtaacaaacctgcacgttgtgcacaagtaccctagaacttaaagtataataaaataaataaataaataaataaataaataaatggtgacctattgagaacaaggacaaagaatagcttcaaaactctattttacaaaaagggttccgcttgagatatttcaagtgagtagatgtaacttaggaaaagtgaatgaaacattaaaatgaagcagatacaatactaaaaaaaattgaggtggggaagaaagtaatataatccrcttgatactaggatggtatttatggtatgactttagagaatcctaatttctttgaagtagaccaaaatagtgtttcccagtgtcccagcactcttcaggttacccagggatagaaacaagaatccatccatttattgagttggccagtcacttaggcaacaagaacatagaatgtgctgtgggcttagagtggggactggagaggcagtccttcagttacaggacaatctccttggagtgtgagatttttataaaaggcaaacctagagaatggcatgagacattgcttgcaactgtgtactaaaat

SEQ ID NO: 570169 - DNA, 601 bp, Homo sapiens
acagacggcatctaaggagctgtttctgtgataatcaaggttctgagacgtgaatatggttgctcaggaacctcccatgacgtagtacccaagggatctggtgaacaagctactcagttaaggccaacacagaatcaatactggcctcagcatcacacttatctactccgcctctcacctctcaaggtgaatgagtctgttgaaaaatcattcttcccaggaaatacactggttgtgatactatttccaaagagcattggtcttctcatatatgcaaaggtgatgcgacaggcacagcagagccacttcatctgttctagcaaggccagaagagaaagttgtgggytcaaccagagtggctacacacatactgtcacagtatctgtcgttctaatgaacttgaatacactcatgtctgtatattcagacatgggatccagattgtccattttaagatagaattatcttctaaaactattgctgtggggaccaaatgtctccacctgctgctctatttcctaaaggcattgggccatttaggtcaacattatgctcttttagaaacaactgagtcctcctctatctgggtctgacaggaaaa

SEQ ID NO: 570170 - DNA, 556 bp, Homo sapiens
ttttttggtgtcttctttcatcagtgttttatagatttcattatagagctctttcactttttttggtttattcctaggtacttaattttatgtgtggctattgtaaatgggattgcttcttttattctttttcacattgttcactgttggcatacagaaatgctactgatttttgtatgttgactttgtatactgcaaatttattgaatttgcttatcacttctgttttcttacagagtctttatgtttttccaaatataagatcatatcatctgcaaacaagggacatttgactttcttttcaatttggaagcattttgtgtctttctctggtctgattggtctagctagaaattccagtactattttgaataacagcagtgacactgggcatccttgtcatgwgccagctcttagaggaaaagcttctactttttcctcattcagtatgatactagctgtgggtctgttgtatatggtttttattatgtttagatatgttcattctatttccagttttttaaaagattttttataatgaagggatgttgacttc

SEQ ID NO: 570171 - DNA, 554 bp, Homo sapiens
cagacatgagccaccatgcccggcaatagcttacagaattttcagaggactagggaataagcttccgtgctgcaaagctagagggtggatgccggagagcattccctggccagagcttcctaggctgttctagataaaaataaatacctccatcacctaactagccagaaggctcatctccctcccgtaagtgttacctcattttcaccttctaagttttgcaggtggtggagtgcagtggctgatacctgtaatcccagcacttgggaagctgaactgggaagactccttgaggccaggagtttgagaccagcctgggcagcagaggaagaccctgtctctacaaaaaaaaaaatttaaaaatgagccagtttgggccaggcatgggggctcacacctgtaatcccagcacttgggcaactgaggctggtagatcgcttgagcccaggagttcaagaccagcctgagcaacacagtgagaccctgtctctamaaaaaaaaaaaaaaaaaaaaaaaagccgggcacagtggcacatgcctgtaatcccagctac

SEQ ID NO: 570172 - DNA, 574 bp, Homo sapiens
ctgtccattatataatgcatactaataagcaatttaaataaatgtcttaaggttctctagggtaattattagaagataaatatgtattcttagcaggtaatagaaacgcatataataataacaactcttctgttcataaatatcccttcaggtgatgacataagaagtcactacaatataaagaaaggggcccaaataaaggcaaatttttttgcacacatctgttcaatgaatcaaccatatgatgcttaattcaaccctttattcagttgctagtctagtctaaaagttcctggatggttcctggatgactgcttcatctatttttctaatcgccatataaaataaaagcaattygtttatttgtttgagtctccagacatcctggttgtttttcacccaagtatctgaaaactggagaaacattcatctgggtacccaccaaagtcatttcttgtgtaaggggaggagcaaacacaagaagactcaattttttacactgagatagaagcagaattaaccacttttgttaacctggcacaattctgctctggacatcctcaaatgtctcaaa

SEQ ID NO: 570173 - DNA, 431 bp, Homo sapiens
acagaagaatatttattttgaggaaacacattataaatataaagagagttgtagtacctttacgtgtatcacaggttttattgtacacattttgtactacaggaaaaccctgaggtagttgttccaactttgctcaacatcagggaatttatattgaagaataaccctgcaaatttaatgaatttggaaaaacattttttcaaaaactacagattataaaacacgaaagtttatactaaaatatatgtttgcagatgaagtaaatattaaraaattttaatccaaaattaagtaaatatcagagaattcacagtagaaatatctgtctcaaacttcagacattacacttaatcagattgctgagtataggaaaaaatccaaaactaaagttggtaaaaagaaaaattatttgtatgtaactttaaaagaag

SEQ ID NO: 570174 - DNA, 431 bp, Homo sapiens
acagaagaatatttattttgaggaaacacattataaatataaagagagttgtagtacctttacgtgtatcacaggttttattgtacacattttgtactacaggaaaaccctgaggtagttgttccaactttgctcaacatcagggaatttatattgaagaataaccctgcaaatttaatgaatttggaaaaacattttttcaaaaactacagattataaaacacgaaagtttatactaaaatatatgtttgcagatgaagtaaatattaaaaaattttaatmcaaaattaagtaaatatcagagaattcacagtagaaatatctgtctcaaacttcagacattacacttaatcagattgctgagtataggaaaaaatccaaaactaaagttggtaaaaagaaaaattatttgtatgtaactttaaaagaag

SEQ ID NO: 570175 - DNA, 431 bp, Homo sapiens
acagaagaatatttattttgaggaaacacattataaatataaagagagttgtagtacctttacgtgtatcacaggttttattgtacacattttgtactacaggaaaaccctgaggtagttgttccaactttgctcaacatcagggaatttatattgaagaataaccctgcaaatttaatgaatttggaaaaacattttttcaaaaactacagattataaaacacgaaagtttatactaaaatatatgtttgcagatgaagtaaatattaaaaaattttaatccaaaattaagtaaatatcagagaattcacagtagaaatatctgtctcaaacttcrgacattacacttaatcagattgctgagtataggaaaaaatccaaaactaaagttggtaaaaagaaaaattatttgtatgtaactttaaaagaag

SEQ ID NO: 570176 - DNA, 249 bp, Homo sapiens
ccattcgcagtaagaataacaacaatgccccttaaatatcctaattggagcccttgtgatcctayagagaagtggaaaagaagacactttccgatgtgcatattagaaagcttgcaaagaaccacaatcaatcatgttaattactctaacctgtccctgttaaatcagaaaccagataaaaatcccatggactttttgaaaaggctgagaaaaactttagtaaaacacacctccctgtgttctgattca

SEQ ID NO: 570177 - DNA, 390 bp, Homo sapiens
taaaggctgccctgccaacaaaaccataacgcaggaacaaacatcacaactatgccaaataatcaatcctacaatgtccaaaattttactttaaaactggaattwccagacttcctttctgcattaaccagtttaactagacagtaacgaaatattcctactttatgctgtgatagtttgtttgtttgtttatttatttatttatttatttaagacagagtttcgctcttgttgcccaggctggagtgcagtggcacgatctcagctcaccacaacctccgcctcccaggttcaagtgattctcctgcctcagcctcccgagtagctgggattacaggcatgtaccaccacgcccaggtaattttgtatttttagtagagacggggggtt

SEQ ID NO: 570178 - DNA, 368 bp, Homo sapiens
gctgccctgccaacaaaaccataacgcaggaacaaacatcacaactatgccaaataatcaatcctacaatgtccaaaattttactttaaaactggaatttccagacttcctttctgcattaaccagtttaactagacagtaacgaaatattcctactttatgctgtgatagtttgtttrtttgtttatttatttatttatttatttaagacagagtttcgctcttgttgcccaggctggagtgcagtggcacgatctcagctcaccacaacctccgcctcccaggttcaagtgattctcctgcctcagcctcccgagtagctgggattacaggcatgtaccaccacgcccaggtaattttgtattttt

SEQ ID NO: 570179 - DNA, 368 bp, Homo sapiens
gctgccctgccaacaaaaccataacgcaggaacaaacatcacaactatgccaaataatcaatcctacaatgtccaaaattttactttaaaactggaatttccagacttcctttctgcattaaccagtttaactagacagtaacgaaatattcctactttatgctgtgatagtttgtttgtttrtttatttatttatttatttatttaagacagagtttcgctcttgttgcccaggctggagtgcagtggcacgatctcagctcaccacaacctccgcctcccaggttcaagtgattctcctgcctcagcctcccgagtagctgggattacaggcatgtaccaccacgcccaggtaattttgtattttt

SEQ ID NO: 570180 - DNA, 380 bp, Homo sapiens
ccttaaaggctgccctgccaacaaaaccataacgcaggaacaaacatcacaactatgccaaataatcaatcctacaatgtccaaaattttactttaaaactggaatttccagacttcctttctgcattaaccagtttaactagacagtaacgaaatattcctactttatgctgtgatagtttgtttgtttgtttatttatttatttatttatttaagacagagtttcgctcttgttgcccaggctggagtgcagtggcacgatctcagctcaccacaacctccgcctcccaggttcaagygattctcctgcctcagcctcccgagtagctgggattacaggcatgtaccaccacgcccaggtaattttgtatttttagta

SEQ ID NO: 570181 - DNA, 391 bp, Homo sapiens
taaaggctgccctgccaacaaaaccataacgcaggaacaaacatcacaactatgccaaataatcaatcctacaatgtccaaaattttactttaaaactggaatttccagacttcctttctgcattaaccagtttaactagacagtaacgaaatattcctactttatgctgtgatagtttgtttgtttgtttatttatttatttatttatttaagacagagtttcgctcttgttgcccaggctggagtgcagtggcacgatctcagctcaccacaacctccgcctcccaggttcaagtgattctcctgcctcagcctcccgagtagctgggattacaggcatgtaccaccacgcccrggtaattttgtatttttagtagagacggggggttt

SEQ ID NO: 570182 - DNA, 574 bp, Homo sapiens
aaatgcaaaattaaccaggcatggtggtgcatgcctgcaatcccagctactcgggaggctgaggcaggagagtcrcttgaacccgggaggcagaggttgcagtgagccgagatcgtgccattgcactccagcctgggcaaaaagagcgaaattccatctcaaaataaataaataaataaataaataaataaataaaataaatcactttctatggcttttcactgctccaggaacaatgtccacagatcaaacgccgagcctctccttcacaccctggagcgcccatcctgcccactggtccgggctccaggctgccccctgcacctgtcagaagtccccctacaagggcagggtctcccttcctaggacatccactgcccttctccgagctgaagtcagaacgacctgagaatcagcttggagttctaccagactcagccaagcccacctctgcgacagcactcctttcaagggggcaccagctgcagggagtctgtcccttacagacccgtgaccccgtgacagatgaataaagtacagacacacagatattctgctctgccagtccagctga

SEQ ID NO: 570183 - DNA, 574 bp, Homo sapiens
aaatgcaaaattaaccaggcatggtggtgcatgcctgcaatcccagctactcgggaggctgaggcaggagagtcgcttgaacccgggaggcagaggttgcagtgagccgagatcgtgccattgcactccagcctgggcaaaaagagcgaaattccatctcaaaataaataaataaataaataaataaataaataaaataaatcactttctatggcttttcactgctccaggaacaatgtccacagatcaaacgccgagcctctccttcacaccctggagcgcccatcctgcccactggtccgggctccaggctgccccctgcacctgtcagaagtccccctacaagggcagggtctcccttcctrggacatccactgcccttctccgagctgaagtcagaacgacctgagaatcagcttggagttctaccagactcagccaagcccacctctgcgacagcactcctttcaagggggcaccagctgcagggagtctgtcccttacagacccgtgaccccgtgacagatgaataaagtacagacacacagatattctgctctgccagtccagctga

SEQ ID NO: 570184 - DNA, 574 bp, Homo sapiens
aaatgcaaaattaaccaggcatggtggtgcatgcctgcaatcccagctactcgggaggctgaggcaggagagtcgcttgaacccgggaggcagaggttgcagtgagccgagatcgtgccattgcactccagcctgggcaaaaagagcgaaattccatctcaaaataaataaataaataaataaataaataaataaaataaatcactttctatggcttttcactgctccaggaacaatgtccacagatcaaacgccgagcctctccttcacaccctggagcgcccatcctgcccactggtccgggctccaggctgccccctgcacctgtcagaagtccccctacaagggcagggtctcccttcctaggacatccactgcccttctccgagctgaagtcagaacgacctgagaatcagcttggagttctaccagactcagccaagcccacctctgcgacagcactcctttcaagggggcaccagctgcagggagtctgtcccttacagacccgtgaccccgtgacagatgaataaagtasagacacacagatattctgctctgccagtccagctga

SEQ ID NO: 570185 - DNA, 430 bp, Homo sapiens
tgcctttctagcactggcctcaggctgagttataagggaagttacacagcgagagggacaggcaaagatggaaaagagagagagtgagaaacagtgtcttcttcctggctggagagcccgtgtcatgaaaatggggacagggtaagggatctgaaaggagcagcatagaagctgggaggatgaggcctgtcttcctggcattgatgctgcagaactacaggaaagaatttcagaggtgtcattatttttcatataagcagatgaaagagaagaattctttgaaaaaagaaaagtaggtgaaaaagggagagayggagggatgccagcagtgaaagaagccaggactgagatacaagattgtgatgctgggagagctgcaagggctcatgctgtaggtgaggagtgaggctgcacagggagctcactggca

SEQ ID NO: 570186 - DNA, 430 bp, Homo sapiens
tgcctttctagcactggcctcaggctgagttataagggaagttacacagcgagagggacaggcaaagatggaaaagagagagagtgagaaacagtgtcttcttcctggctggagagcccgtgtcatgaaaatggggacagggtaagggatctgaaaggagcagcatagaagctgggaggatgaggcctgtcttcctggcattgatgctgcagaactacaggaaagaatttcagaggtgtcattatttttcatataagcagatgaaagagaagaattctttgaaaaaagaaaagtaggtgaaaaagggagagacggagggatgccagcagtgaaagaagccaggactgagatacaagattrtgatgctgggagagctgcaagggctcatgctgtaggtgaggagtgaggctgcacagggagctcactggca

SEQ ID NO: 570187 - DNA, 547 bp, Homo sapiens
gtgttgcaattgcagaaatggctttttccttttcagattacaactccggtcaatttttttttttctttttttgagacatcgtcttgctctgttgccccggctggagtgtagtggcacaatctcggcttaccccagcctccgcctcccaggttcaatcgattctcctgcctcagcctcctgagtagctgggactacaggtgtgcaccaccatgcctggcttaatttttttttttttttgtatttttaatagagatggggtttcactatgttggccaggctggtcttgaactcctracttcgtaatctgcccacctcagcctcccaaagtgctgggattacaagcatgagccactgtgcccggcctctccaatcaattctgacatgcctttggttacactgctttgctccccttgtctcttttaggcctgaaggtggaaactgtttcttgctggtgtggtccctggctgcttctgcatcccttgttagttttcttaattcttgcctcacctctgtaaactaatagtctctctatgaatttaacttcaaa

SEQ ID NO: 570188 - DNA, 547 bp, Homo sapiens
gtgttgcaattgcagaaatggctttttccttttcagattacaactccggtcaatttttttttttctttttttgagacatcgtcttgctctgttgccccggctggagtgtagtggcacaatctcggcttaccccagcctccgcctcccaggttcaatcgattctcctgcctcagcctcctgagtagctgggactacaggtgtgcaccaccatgcctggcttaatttttttttttttttgtatttttaatagagatggggtttcactatgttggccaggctggtcttgaactcctaacttcgtaatctgcccacctcagcctcccaaagtgctgggattacaagcatgagccacygtgcccggcctctccaatcaattctgacatgcctttggttacactgctttgctccccttgtctcttttaggcctgaaggtggaaactgtttcttgctggtgtggtccctggctgcttctgcatcccttgttagttttcttaattcttgcctcacctctgtaaactaatagtctctctatgaatttaacttcaaa

SEQ ID NO: 570189 - DNA, 545 bp, Homo sapiens
taaattaaatcaaagagaaaggttgagtttagtactagtcaacaccccctgccaacatttgctaaactctccttttaagagaagaataaactacaggaaataaccagtgtctaagtagacttaaataatttatttgttttcattgtgcttatttttgtggttactttctatttatgggaagtaatattgggtaattatttacagtttccatttataatatttatataaagaagtaaccctatttaaagagaattattaaatctagggaatatgtacattttgaaaaaattgtgaaggtgactgaagagagacatttggtaaacattctactattcaacattggattatttcaagtttatggtttcaaaggtgaaataatggcataccagatttatttataaaagctaataaattgtacactatgtaaatgagaaaaaataacaaattcacagtcctaaaataaagagtcaatgcatatgagtttaaaaagtaggaatttttgagaaagrattaagaaagaagtccttcggttaggactaggaatt

SEQ ID NO: 570190 - DNA, 572 bp, Homo sapiens
ctcacttataggtggtatcttaagaagtcaaattcacagaagcagagaacaatagaatgatggttgcctgggactgggggcaaaaggggggaggatgaggagawgttggttaaagtctacaagatatcagctcaacagtaggaataagcactgaacatctattgtacaacatgactactatagttaataataacatactgtatacttaaaatcactaagaaagtcaatcttaaatattctcactaccaaaaataataaggatgtgagctgatggacatgtgaagtagcttgatttaatcagtttgcaatccatacatatatccaaacattactataaatatacactattttatttgtcaattagaccttaataaagctgggggaaataatgctggaaattgaaattttaaaatttaatttcaaaataggaaatacataggaacaaatctgacaaagatataaaagatgtgtaccctaacatgtgtaaaacattgctgcacaacttaaagacctaaatgaatgggaagatatactatactgtgttcatgggtcagaagcttcaatatgattaa

SEQ ID NO: 570191 - DNA, 572 bp, Homo sapiens
ctcacttataggtggtatcttaagaagtcaaattcacagaagcagagaacaatagaatgatggttgcctgggactgggggcaaaaggggggaggatgaggagatgttggttaaagtctacaagatatcagctcaacagtaggaataagcactgaacatctattgtacaacatgactactatagttaataataacatactgtatacttaaaatcactaagaaagtcaatcttaaatattctcactaccaaaaataataaggatgtgagctgatggacatgtgaagtagcttgatttaatcagtttgcaatccatacatatatccaaacattactataaatatacactattttatttgtcaattagaccttaataaagctgggggaaataatgctggaaattgaaattttaaaatttaatttcaaaataggaaatacataggaacaaatctgacaaagatataaaagatgtgtaccctaacatgtgtaaaacattgctgcacaamttaaagacctaaatgaatgggaagatatactatactgtgttcatgggtcagaagcttcaatatgattaa

SEQ ID NO: 570192 - DNA, 572 bp, Homo sapiens
ctcacttataggtggtatcttaagaagtcaaattcacagaagcagagaacaatagaatgatggttgcctgggactgggggcaaaaggggggaggatgaggagatgttggttaaagtctacaagatatcagctcaacagtaggaataagcactgaacatctattgtacaacatgactactatagttaataataacatactgtatacttaaaatcactaagaaagtcaatcttaaatattctcactaccaaaaataataaggatgtgagctgatggacatgtgaagtagcttgatttaatcagtttgcaatccatacatatatccaaacattactataaatatacactattttatttgtcaattagaccttaataaagctgggggaaataatgctggaaattgaaattttaaaatttaatttcaaaataggaaatacataggaacaaatctgacaaagatataaaagatgtgtaccctaacatgtgtaaaacattgctgcacaacttaaagacctaaatgaatggraagatatactatactgtgttcatgggtcagaagcttcaatatgattaa

SEQ ID NO: 570193 - DNA, 613 bp, Homo sapiens
cacaccaatagaacaactagagaagctaaatcttgggaagagacccaattatgtctgacccaagggccacgtaccttatactgatgagtgagctgtggctcacattctaatgccatacaataataataattccaattataatagaattgttacgaaataatagataccatcttagtgtttccattgtgccagggataatgctgtgcactctacaagagtttwtctaatttagctctcctaacaattctaagaaattattctcctgtatattacaaataaaggaattgagtcatgtagagaggtcaagtcacctcaaatgaggctgcacagctgaggctagatttgggatttgttggaggactgagtctccagtctatgctctgtctcattctcaccccaaagcctcttgcctgagcctgtcttgtcaggcagccgttccttatgttgtcaagtggccaagtattatttgcacctgtgcaagcacagcgtgggcaaagctttttttttttttttttttccctttataaccaaggcctatgtgtccttcccagtctctttttattcttgtgttctttggtcactccagctaattccactgtcttcaaatatgccc

SEQ ID NO: 570194 - DNA, 645 bp, Homo sapiens
tattgacatgttttgctttgttctcaatgtgttctgggactgcagcctattcatttattattaagagaacggtaattatttccaggagctcctgagaatacactttgcttcccctttgcctgttctctgctgaatctgatataaccttcatatctctgaggacgtctgtgtcaggagatgacagacccccatgtgctggtggcgtacaccaaagactgtgctctggaaggagggcttgcagaccaccgcttttcaaastttaatgaaaataggagtcccctgggatcttgccaaagtgcagaatctgattctggagctctgagatgaggcctgagatttttttttttttctaataaactcccaggtgttgctgatgctgctggtctgtgaaccacattttgagtagcaaaatcatagaagatcagctacaccttctccattggtgaatgttgtagcagggctgaccagaaggttacctatatctcatttgtctgccttgctggactgtaaactcggtggagacagcatttgtttcttgcctacgactatattcccaatggcaggcacataaaaaaatctcaacaaatatttgccaaatagattcttcctaccccctcctttccatcagagattttcctaatccta

SEQ ID NO: 570195 - DNA, 595 bp, Homo sapiens
cataggccatatagacaccagggaacataaagaaagaaagtctttacaggaacaaaagaatgaggctggctttgaacctggtgggagagaattttatttttttaaactaataatcaccaagggccttctctttagacggcaatgctatgtttggggcacatcagacacagttttggaattacaatctggtttcttaacagagaagagagattcttcaattaacacgtyccagcaaaagatcactttcaaattttcctctttagtgtaagaaaagatttcgttgtcattcagaaatgaagtaatatgtgatgtctgtgttgaacctgagtcataccactctttgaagggaaattctagtggtttcattggggtggagccatatctcatcctttgattattgtatttttccagatagtctatggtatgctgcagtaataatgtaacctagaaattccagtgactcaacactgcaaaaatttctgtcttgtttatataacatgtcgatgccagttggcaaagtttctgctccatacagttcctcggggaccctggagaatcccatcctcttgtgatgccactgcttcaacacttgctt

SEQ ID NO: 570196 - DNA, 595 bp, Homo sapiens
cataggccatatagacaccagggaacataaagaaagaaagtctttacaggaacaaaagaatgaggctggctttgaacctggtgggagagaattttatttttttaaactaataatcaccaagggccttctctttagacggcaatgctatgtttggggcacatcagacacagttttggaattacaatctggtttcttaacagagaagagagattcttcaattaacacgttccagcaaaagatcactttcaaattttcctctttagtgtaagaaaagatttygttgtcattcagaaatgaagtaatatgtgatgtctgtgttgaacctgagtcataccactctttgaagggaaattctagtggtttcattggggtggagccatatctcatcctttgattattgtatttttccagatagtctatggtatgctgcagtaataatgtaacctagaaattccagtgactcaacactgcaaaaatttctgtcttgtttatataacatgtcgatgccagttggcaaagtttctgctccatacagttcctcggggaccctggagaatcccatcctcttgtgatgccactgcttcaacacttgctt

SEQ ID NO: 570197 - DNA, 519 bp, Homo sapiens
ttttgtgaaaggaaaagtccattgatgcagtaaaattcactgctgtcttcttttaggaaatgctcacagctatcccaacctttagcaaccactaccttgttcagtcagcagccaccaacactggcaagactctccactagcaaaaatattagcattctctggagattcagatgattgyctttttagcaatagagcacttttaaaataaggtatttttttagacatgatgcaattgttcacttagtagactacagtgtagtatatatatataacttttatatacaatggaaaaccaaaaaattcatgtgacttgttttattgcagaatttgccttattgtgtgatttagagctcatctgcagtatctccaaggtatgctctattttattcccctatttattattttcacagttatctttttattagttcaatttactttatttatttattttattttaactaaaaaagaatttgagttaattcaattttattttatctaaggcacttgtgttttgaaaaa

SEQ ID NO: 570198 - DNA, 519 bp, Homo sapiens
ttttgtgaaaggaaaagtccattgatgcagtaaaattcactgctgtcttcttttaggaaatgctcacagctatcccaacctttagcaaccactaccttgttcagtcagcagccaccaacactggcaagactctccactagcaaaaatattagcattctctggagattcagatgattgcctttttagcaatagagcacttttaaaataaggtatttttttagacatgatgcaattgttcacttagtagactacagtgtagtatatatatataacttttatatacaatggaaaaccaaaaaattcatgtgacttgttttattgcagaatttgccttattgtgtgatttagagctcatctgcagtatctccaaggtatgctctattttattcccctatttattattttcacagttatctttttattagttcaatttactttatttatttattttattttaactaaaaaaraatttgagttaattcaattttattttatctaaggcacttgtgttttgaaaaa

SEQ ID NO: 570199 - DNA, 597 bp, Homo sapiens
taagaagatgattctgaattctaaatatatatttcatatgtgttatatatgtaatatatataatatatgtaatatatatataaagttaaattcaactttaaaagtgattcaacagtccatttatatttttggcatctaattcttcaactaagctagaaaacaaagccatatcgaagattagttaccaaggtaaaatataatccattagtctgatttattcwcttaattagatttgcatttgaaagattgagcctttggtttcattttacttaaatactgcatttgcattatttcacacccacatttaggctctattcattgtataaatattaatagataatataatttatattctagattaacaacgatcataataaaactgacttgcattttagattttatacggaaatttagaggcccttaaatctaattttatgccaatatttctaataccttacaaccaacttctaaaatatccccctgaattaaggttgaccttgaatctctagcgcagatttattggaattagagttaccaaattcatcctatcattcttatagaattttaaatttttggaaaataccccaggcatgatta

SEQ ID NO: 570200 - DNA, 597 bp, Homo sapiens
taagaagatgattctgaattctaaatatatatttcatatgtgttatatatgtaatatatataatatatgtaatatatatataaagttaaattcaactttaaaagtgattcaacagtccatttatatttttggcatctaattcttcaactaagctagaaaacaaagccatatcgaagattagttaccaaggtaaaatataatccattagtctgatttattcacttaattagatttgcatttgaaagattgrgcctttggtttcattttacttaaatactgcatttgcattatttcacacccacatttaggctctattcattgtataaatattaatagataatataatttatattctagattaacaacgatcataataaaactgacttgcattttagattttatacggaaatttagaggcccttaaatctaattttatgccaatatttctaataccttacaaccaacttctaaaatatccccctgaattaaggttgaccttgaatctctagcgcagatttattggaattagagttaccaaattcatcctatcattcttatagaattttaaatttttggaaaataccccaggcatgatta

SEQ ID NO: 570201 - DNA, 559 bp, Homo sapiens
ctgtaattgttttgcattgattttaaacatcattggctattcttaaatatatttcaaatttttttaaatggccacaattattctatggaattccttgagattttatttcaaattgtgtttctttttggatgcacagttatttttaaagggttaatcatgcagaaatgtaagctgtgaatcaataataaccatgctggaaattaacctccaagggaaaggtaaatctactgagattgtacaagacagaactgcattaatgccagtcaattttatttagattgaatcacctacaactagagctgagttaaccagagcccgcaatttctttttttatttctttcctttagtagtggcctaggtgatttgatttcaattcacctggggttttgagaaacaaaatcctcccccataaaaactgcatggtgtttatgaccaccacagggatagtttaaaaaacatgaaaaaartgggcttatgaaaaataaagctggctaattacagcaaatgggcttaatttaaaaaccacaggtgcctcttttataaggtttggttgtgctct

SEQ ID NO: 570202 - DNA, 643 bp, Homo sapiens
aggagctcaaataactctgtaggaaaaaatctaataatttgatttaaaaatgagcaaaacatctgcatagcaatttctcaaaagaaaacacataaatggtaaacaaatacatgacaagtttataaaaggtgctcaatatcattgatcatcagagaaatgaaaatcaaaactacaatgatattcatctccccagaattaaaatgtcttttawctaaaagataggcgataacaaatgctggtgacgatatggagaaaagggaacccttgtacactgttggtgggaagaacagttgtgcaacagattagtgcaaccacatggatggagcacagtttggaagttcctcaaaaaactaaaatagagctaccatatgatcctgcaatcccactgctaggtatatacccaagagaaaggaaattagtatatcgaagagatatttacactcctatgtttattgcagcactattcacaatagccaagatttgaaagcaacctaagtgttcatcaacagatgaatgaagaaaatgtggttcatatacacaatggagtactattcagccctaaaaatgagtaagatccagtcatttgcagcaacatagaggtcattatattaagtgaaataagccaggcacagaaagacaaact

SEQ ID NO: 570203 - DNA, 567 bp, Homo sapiens
aggtctctgatggagatgagaaacatacgcagaatgggagaaaaggtggtcatttttacatggtagcatagaacctagctgcactgtgtccatgccctagggtgttttggaagattgaacttaagagtgaggacctagagtatccagcaaaagaaatttytaagcagcagagtattcaagaagtggtgttgatattttcaacagcttacaatcatgcttagtaacaaaagaatgccccaaaggtggtatttataattaaaagggaaacagcataaaaactggaaaaatgtgagaagaacataagttttgggccagagacaaaatgcaacagtaaggatattgcactcctccaaatctcatgttaaaatttgatccccagtgttagaggtggaacttaatgggaggtgtttgggtcatgtgggtggatcccacatgaatggcttggtgcagtccttgctgtaatgagtgagagctggttgttaaaaagagcctggcacctcctcttggtctttctcactttatctgtctgttgctttctctcttgccatgtgatttgcgtacatgctg

SEQ ID NO: 570204 - DNA, 475 bp, Homo sapiens
atgtaaaggaattgaatagaatcaacccgaatggaatggaatggaaaggaatggaatggaatggaatggaatggaatggaatggaatggaatggaatggaatggaatcaactcgagtggaacggaatggattggaatggaatgcaaaggaatgtaatgtaatggaatggaaccattccaagtggaagggaagggaatgtaatcgagtggaatggaatggaatggaatcaacccgagtgcaatggaatggaatgcaatggaatggaatggaatggaaactaccagaatggaatggaatggaatggaatggcatggaatggaatggaatgtacccgagtggaatggaatgtaatggaatcgtwtggcgtggaatgcaacgaaacggaatagaatggaatggaatcaaatcgcgtggaatggaatggaatggaactgaatcaaacagagtggaatgcaatggaatggaatggaatcac

SEQ ID NO: 570205 - DNA, 429 bp, Homo sapiens
gcattccattccattctactccattccattgtattccattccattcccctcgggttgattccattccattacattcccttccattgcattccattcgactgaattccactcgggtagattccattccatccamttcaattccagtccattccattccattccactcgggttgattccattccattccattcccttccattccattccattccattccattacactcgccttcattccgtaccattccattccattccatttccctccattctattcacttcaattccattccttttgggtagattccattccattccattgcattccattcgattccattccattcccttccattccattccatttttttatagtcttgttgattccatgccattccattccataccattccattcgactcggattgat

SEQ ID NO: 570206 - DNA, 429 bp, Homo sapiens
gcattccattccattctactccattccattgtattccattccattcccctcgggttgattccattccattacattcccttccattgcattccattcgactgaattccactcgggtagattccattccatccacttcaattccagtccattccattccattccactcgggttgattccattccattccattcccttccattccattccattccattccattacactcgccttcattccgtaccattccattccattccatttccctccattctattcacttcaattccattccttttgggtagattccattccattccattgcattccattcgattccattccattcccttccattccattccatttttttatastcttgttgattccatgccattccattccataccattccattcgactcggattgat

SEQ ID NO: 570207 - DNA, 445 bp, Homo sapiens
gaagtgtcaaaatgtccatgtaggcagatctaagacaagagtccatcacctgggtgatcagtgaagggatatgtactaatgtcccwtgtattcagtgcctagacaagagttgcctcacgtcagagatcagtgcagagatatgtcacaaagccttctgtaggcaaagcccatacaaggcttacatcacctaggtgatcaatacagtgatatgtcacaaaagtccctgtaaacagaggctagaaaagagttacatcacctggttgttcagtgcagatatttgacacaatgcccccatagacagaacctagacaggacttccatcacctgggtgatcagtgcagagatatgtcacaaatccccctgtaggcagagtatagagaagagtcccatcacctgggtgatcagtgcagtgatatttcacaaagcccctgtaggcagagtggtc

SEQ ID NO: 570208 - DNA, 445 bp, Homo sapiens
gaagtgtcaaaatgtccatgtaggcagatctaagacaagagtccatcacctgggtgatcagtgaagggatatgtactaatgtcccttgtaktcagtgcctagacaagagttgcctcacgtcagagatcagtgcagagatatgtcacaaagccttctgtaggcaaagcccatacaaggcttacatcacctaggtgatcaatacagtgatatgtcacaaaagtccctgtaaacagaggctagaaaagagttacatcacctggttgttcagtgcagatatttgacacaatgcccccatagacagaacctagacaggacttccatcacctgggtgatcagtgcagagatatgtcacaaatccccctgtaggcagagtatagagaagagtcccatcacctgggtgatcagtgcagtgatatttcacaaagcccctgtaggcagagtggtc

SEQ ID NO: 570209 - DNA, 445 bp, Homo sapiens
gaagtgtcaaaatgtccatgtaggcagatctaagacaagagtccatcacctgggtgatcagtgaagggatatgtactaatgtcccttgtattcagtgcctagacaagagttgcctcacgtcagagatcagtgcagagatatgtcacaaagccttctgtaggcaaagcccatacaaggcttacatcacctaggtgatcaatacagtgatatgtcacaaaagtccctgtaaacagaggctagaaaagagttacatcacctggttgttcagtgcagatatttgacacaatgcccccatagacagaacctagacaggacttccatcacctgggtgatcagtgcagagatatgtcacaaatccccctgtagrcagagtatagagaagagtcccatcacctgggtgatcagtgcagtgatatttcacaaagcccctgtaggcagagtggtc

SEQ ID NO: 570210 - DNA, 445 bp, Homo sapiens
gaagtgtcaaaatgtccatgtaggcagatctaagacaagagtccatcacctgggtgatcagtgaagggatatgtactaatgtcccttgtattcagtgcctagacaagagttgcctcacgtcagagatcagtgcagagatatgtcacaaagccttctgtaggcaaagcccatacaaggcttacatcacctaggtgatcaatacagtgatatgtcacaaaagtccctgtaaacagaggctagaaaagagttacatcacctggttgttcagtgcagatatttgacacaatgcccccatagacagaacctagacaggacttccatcacctgggtgatcagtgcagagatatgtcacaaatccccctgtaggcagagtatagagaagagtcccrtcacctgggtgatcagtgcagtgatatttcacaaagcccctgtaggcagagtggtc

SEQ ID NO: 570211 - DNA, 497 bp, Homo sapiens
tttcattaatgggaagcaaayccactaatggcattcaggaacagcgctcagagtgagaccaggggcctcactcttttctcttattctctatcccagggctctataaaaaagatagcagggccccctgctgcatcccttggagccccatttcttcttcctctgctcagccctggctggtcatcagggtatcctggagcaggagggagagaagagctccatcatatcaacattcctcacccaggagggcagagagcaaagtgaagataatatacagactttggaattgcacaggcttgccagttggagatgtgtaacctctctaagactcagtttcctcatatataacatgggtgtaataacagtaccagcctcataggatagttacaagatctttacatgtaaagttcttagaccagcgcttggcatgtacttactgctcaatataagttagctgctgccactgtgattattatctgctcctggccctcattggaatt

SEQ ID NO: 570212 - DNA, 406 bp, Homo sapiens
gaaggaaggagcttctacagtgtgagccaaatatagggccaacaggaacttgacagttaagtcaagaagagcagaaacgaagatggaagaaggacttcaaggaatgagtgagaaagcagagactagagtccatccccagagcataatatgaggttatgaaggccaagagaggagagagattaaggaggagctagcttgcaagattcagtgctgattgttgtaatggccagcctgtatttaagccctttgcatgagcaaggcatgttttgaggaacttttcatcaatgactttgtttaattctcacagcaagtctatgagatgggtgccactattattctcactctataaatgagttacctgaggctccaagaaascctacagcttattgaggtcatatggccagaa

SEQ ID NO: 570213 - DNA, 405 bp, Homo sapiens
ggagaattctctcccccttagaaagacctgagtgctgactaaccaggaaatggtctggaaaaataaagagggaaggttatttgagttcaattattcaggacatgtctgtcatctttgctgtttaaaagagctgagagctgagggtgtccctctaacaggaaacaaactgagtgggcagctcaggctggtggagctgacctttgaaacaggaaagggcagagtccatttctggctagctgagagctctaaagtttttcagaaaatgctggcataggtatagcatcctcccatcaagaacaggtagaaacactcttcacaggtcgcttgttagtgtatgtggttcaaataaaaacactagacagacaggagtgggtaggggratcccacgtgcctgagggatagagg

SEQ ID NO: 570214 - DNA, 593 bp, Homo sapiens
aacctagaagaaataaatgaattctgatataacatactgagactgaattgtgaaaaacaaaatctgaacagactgataagattaaatccatcatcaaaaaactctcaacacaaaaaagaccaagacctgacaatgtcacctgtgaattctaccaaacattttaagaagaattaatgtcaatcattctcaaactcttccaaaaacgtaaagcrgacagaacacttccaaacttattttatgaggccggcattaccctgataccaaaatcaggcaaggacactataagaaaataaaattacaggtcaatatccctgatgaacatagatgtaaaagtcctcaacagaatactagcaaaccaaattcagcagcacattaaaggtatcatacactgtgattaagtgcaatttatccctcagatgcaaggatagttcaacacacatgaatcaataaatgtgatacaccacattgacagaataaagagaaaaaatacatgaccatcttaatagatatagaaaaagcatttgacaaaattcaacatcattttattataaaactcaacaaattaggtatgaaatgaatgtatcaacataatt

SEQ ID NO: 570215 - DNA, 614 bp, Homo sapiens
gagtagttgccacagataatatatggcctgaatagcctaaaatatttattatcttgtcttttgaaggaaaagttttctgaccctgaactatgctattattttggaatgcactctgatgtcagtttgtggcacatcctaaggaaaacaccgagaagtaattcattggtatcatcacacttttagtcagttttaagctgttttctgcaggcctccgaattaagggagagctagatatgccgcagtgattggcaaactgtgcctcctgacaccctgggtttcctagggaggtcttggggagcagggcactgcagagtgagggaaggcccctgacacagggctcccagagcccggccccatttcacatttatctgtttacccagtgtattaaacrtgtggggctcatgggttgtgaagagagagacaactttgcttttgtctctcagtcttgttccaggagaatagcctttttccgcctctggatgcaaagtaaggcagtcacatgacttttctgttaattcttacatactggaaagtcctatagtcatcgtaagtcacaaacagttttaattgagagattaaagtgtggactatcaagtcacatttgaacaaagatg

SEQ ID NO: 570216 - DNA, 505 bp, Homo sapiens
ggacttatcctgccattttgttgtttatattctcattgttttgtgatcttctcttccttctttctttttctttctgttttccttttagcgaaggtgattttctctggctacataatttagtttcttttgctttttaatttttttgtgtattctttgtgtgttttctggcttgagtttaccgtgaggcttgcaaatactgtcttataacccattttttaaacctgataacatattgtttgcataaacaagcaagcaaaaagaaagctaataaaagctatatgctataactttattcccccactttttaactttttgttgtttctatttgtatcttattgtactatgttctgaaaatttattttagttattatttttgattgattagctgtttagcctttctacttaagataagggtagtttataccacagttacagtgttataatattctgtgtttttctttgtacttacwattaccagtgagttttgtaccttccggtgatttct

SEQ ID NO: 570217 - DNA, 561 bp, Homo sapiens
gttcacgtggagttgattagcatcatatggtattttaaggagatatacacaacacttgagctcaccacaatagcaacaggaggtggctccaaaattattacagtagcacagtatgatcacagttaattttatgcaactatgacttaacactgcatatttttatttgtttacatttctcttgactgctaatggcaccatgtatggyctgtaagtgtttgtgtgcataaattttaatcaattttaactttttataatagatttttatacattttatggtagtaaatgataaaatagtctccacatatattttatgcattcatgccatacctaactttttcttaattgttttatatttctaggctaagcagctcatcaatgagttttttttcaaattgtcacaaatctccaaaaaattttccaatatatttattgaaagatatctacatataaggggacccacacaatttaaacccatgttgttcaaagttcaactgtatatgcatattgttttatacaattgctgttaaactgtacctaagaaaagaaataaaaagaaatatt

SEQ ID NO: 570218 - DNA, 561 bp, Homo sapiens
gttcacgtggagttgattagcatcatatggtattttaaggagatatacacaacacttgagctcaccacaatagcaacaggaggtggctccaaaattattacagtagcacagtatgatcacagttaattttatgcaactatgacttaacactgcatatttttatttgtttacatttctcttgactgctaatggcaccatgtatggcctgtaagtgtttgtgtgcataaattttaatcaattttaactttttataatagatttttatacattttatggtagtaaatgataaaatagtctccacatatattttatgcattcatgccatacctaactttttcttaattgttttatatttctaggctaagcagctcatcratgagttttttttcaaattgtcacaaatctccaaaaaattttccaatatatttattgaaagatatctacatataaggggacccacacaatttaaacccatgttgttcaaagttcaactgtatatgcatattgttttatacaattgctgttaaactgtacctaagaaaagaaataaaaagaaatatt

SEQ ID NO: 570219 - DNA, 378 bp, Homo sapiens
agggcccaatggaagcacactcctttgatatggtgcttgacamacacatttaagaaaacctaagagaattgagcaggtggctgtgggctagaatactagatgcaggtggggtaaaaataaaaccacagatggtttataaaggtgactcatccttcccccaccgtaactcctttagttttcttttctttctttttataaaacattttgattgtgacatctccactaaaagtgcccaatctctaaattcttctagtcaaggcaagaaggttataccacaggaaatccatttctacagtctcttctcattgccatatctgattttaaagacttttttttctaatgtggaaatttttgcatggctctcccccaccccccaaa

SEQ ID NO: 570220 - DNA, 631 bp, Homo sapiens
gctggtctcaaactcctgacctcaggtgatccacttgcctcagcatcccaaagtgctgggattataggcgtgagccactgcacctggcctgattttccaaaacttctactaaaggcattgcagtctccctacaatagccaagtmtagagtctactgtggctttcctagagctatgataacactgacaacttattcttaattaaataaagaaggtcatgcccctaaatccaatcttatcagaattaaaacataagttcattaacatttcacttgggcttttgaagtgctaattcttgtcatgttttctgattatcacttagctttgttgaaacaacggatctgccacactcaacaggagcaatgactcatttttgtacatgggttctaaatactacaaaattatgataccatatgaaatcttttcaccaaaaagacttgtagcactactggacaatttcagagaaatatgaggtttttctttacatggttctttttccatttaagcaactgctatatattcccttaaaataaaaactgtctagaaaatgcccacaattaccatgaaatcatctggatttagacatttcatttaaaaatgaaaaagttaatgttaaaagctcttgtatcactc

SEQ ID NO: 570221 - DNA, 381 bp, Homo sapiens
caaaatcaataaaatagatctatgtgttcatgtatctgtaagaccatatgcaggccacatgaaaatattctggggagattactttctgaaaaagtgatgtttagactatgcatggtttatatttgtaagtgagaaattttggtttaggtttaactacttaggcaaattattgcttgtttaacccttttacctaaagtcccaggaaggggtgctgaagctgaaacagaaagagaagattgcttcaggccaatgacgtcctakaaaacatcacaagatatggagctaacctacatgtttgagtcatagtttcatgtggactactaagacatcctggcctgacgcatgggctcaagcccgtaatcccagcactttgggaggctg

SEQ ID NO: 570222 - DNA, 381 bp, Homo sapiens
caaaatcaataaaatagatctatgtgttcatgtatctgtaagaccatatgcaggccacatgaaaatattctggggagattactttctgaaaaagtgatgtttagactatgcatggtttatatttgtaagtgagaaattttggtttaggtttaactacttaggcaaattattgcttgtttaacccttttacctaaagtcccaggaaggggtgctgaagctgaaacagaaagagaagattgcttcaggccaatgacgtcctataaaacatcacaagatatggagctaacctacatgtttgagtcatagtttcatgtggactactaagacatcctggcctgacgcakgggctcaagcccgtaatcccagcactttgggaggctg

SEQ ID NO: 570223 - DNA, 618 bp, Homo sapiens
tctgctgcccaggctggagtgcagtggtgcaatcttggctcactgtagcctctgtctcctgtgttcaagtgattgtcatgcctcagcctttcaagtagctgggaccacacatgtgcatcagcatgccctgctaactttctgtatttttagtagagatggggtttcaccatgttgcgcaggctggtcttgaactcctgagctcaggcaatccgcccacctcagcctcccaaagtgtaaaattacattttctatttgttgctggtatatagaaatgaagtagatttatttacattggttttatttctagcaacactgctaaactcttatatatcctaatatttttctatatattctktgggttttatgtgtaaactttcaactgtatcatctaaagaattatagtatttgttctcaattttaaatacttaattctttgacttattttttccttatcttactaccctgtctataatctccagaacaatgttgcacagaaattgtgataggaataataatttttcctgattctaaagagaatgtttatattcttttagaaaaatgatagcaataaggcctttgtagattccctttttcatgttatgcacattcaattctacc

SEQ ID NO: 570224 - DNA, 695 bp, Homo sapiens
tgaaaataataaactttcatgagcgtgtttcaattttcacttgtgtttatggccaaaggtgttttttattttaataatcgctgctggaacaagggcaagccacatgctgctaacttgttaaagagaagaggaaggaggagagagaaagaaagagtgaatgagagtgagagtctgtgttcagctgtaaatttcccaacagcctgctctaatccttccagttttgaatcccacccttaaaaccttaatgacagagaaagggataaaatattatctggaccatgttctgttgacggtttgtcctgggctcattttagccatgataattcagtgatttttgcgcgygtgtgtgtgtgtgtgtgtgtgtgtgttttaagggagagacatcagcattctgtggtaccatttcataatgtagagtgtgtaaaagggaaggaatttggaagaatcaggctccttccagttggacatcaacttgaccgttgttttcagctcacttttatctggcagagtttctgtttgcttttaaatgtcagaaaaggttaagaaacgtttgaaatctgcaaaagattttctagacgtatgaagaggatgtccaccctataaaagcataaattaatcacccctctccacttttgaaattgccttttaaagggaatatatctgaggaatcaaatgaaagacaaaagaattcaaat

SEQ ID NO: 570225 - DNA, 695 bp, Homo sapiens
tgaaaataataaactttcatgagcgtgtttcaattttcacttgtgtttatggccaaaggtgttttttattttaataatcgctgctggaacaagggcaagccacatgctgctaacttgttaaagagaagaggaaggaggagagagaaagaaagagtgaatgagagtgagagtctgtgttcagctgtaaatttcccaacagcctgctctaatccttccagttttgaatcccacccttaaaaccttaatgacagagaaagggataaaatattatctggaccatgttctgttgacggtttgtcctgggctcattttagccatgataattcagtgatttttgcgcgtgygtgtgtgtgtgtgtgtgtgtgtgttttaagggagagacatcagcattctgtggtaccatttcataatgtagagtgtgtaaaagggaaggaatttggaagaatcaggctccttccagttggacatcaacttgaccgttgttttcagctcacttttatctggcagagtttctgtttgcttttaaatgtcagaaaaggttaagaaacgtttgaaatctgcaaaagattttctagacgtatgaagaggatgtccaccctataaaagcataaattaatcacccctctccacttttgaaattgccttttaaagggaatatatctgaggaatcaaatgaaagacaaaagaattcaaat

SEQ ID NO: 570226 - DNA, 489 bp, Homo sapiens
gccagagggtgaaaagcaatatatttatttctttttggctttactgaggtataattgacaaatattatatacatttaaggtgtataatgtgatgttttgatatacacatatattgtgattaccaccgtcaagctaattaacacatctccatcatyttacagttactttttttggtgatgacttaagatctactctcttagcaaattttaagcatacaatccagtattattaactatggtcaccatggtgtacatgagctctctagaacataatatgagccggcacaaagttgcagttatacaggatgaaaagcaacatatttcttaggccaacggcccaggggtttatcccaggtcatgatgtgtacagcagtggggtaatcggatgctttgcctggctcagtacagctgagccttcccacagtgtatgctctcctattcattgattttctttctcctctcagcattgcaaatgagttttcctttactg

SEQ ID NO: 570227 - DNA, 494 bp, Homo sapiens
aagtgtcatttgtgctgttcttcaaatatccagtgctagagaatttactatctttattttacctaaaaataggtctggctatgagatcaaattttactcaattaaacaaaatttgactatctccttagatttttttaaatatatttaccactggggtcattgcatttctcttaaaggtgatagttctttaagtaatatgtttgcaaaccatttataattttatagttctatatcctgctgttttcacttaaaattatattgtgaacattttcctatgtcactatatttctcaaaaatatgaactgtaatggctgtaaagaattctataccattatgttagctatttctttctttttgaacatttagattctttatagtttttwaaaaattataatgttacaacagcaaactcaaaactatgatttaatctctcattaccttagactatcttagatgtgagagtactgggttaaaatggatgaatgttttcaagg

SEQ ID NO: 570228 - DNA, 459 bp, Homo sapiens
cactttttaatgaaaatagttttattaaaatatgttatgaacagatatgatcttatactttggttttagagcagcaaagccatggttttattaaaatatgatgagcacattgaactcacttgcactatttgcatacttgtaatatttgtggattattaatttcaaaataaatcaaatagttggttatgcaacttaaaagatagataataacaaagaaataacacaatggaatccacaatggagttaagtttaccaagtgattttacttatattggatacaccatcccttaaaagagaaaagaactaatgtgtcaagtagaaaacatgcatttcactacatagtagctctctgaacatgggcaacttacctaaattctaaacttcagcttctttaaatargggttcattgcaacctctgcctcctgggttcaagcgattcttgtgcctcagactcccaag

SEQ ID NO: 570229 - DNA, 564 bp, Homo sapiens
cctaactgacagcagttccttgaaactcctgcaatcaaygctccatttaagcatcaaaaccttatcaattaggcctcaatgtacagggatcacgtggccggccggtcacgctgagccggccgctgaggagtaccagaggcctcattagggccttgagcttttgtaaaattcctgaataagcagcccatggagtgtctgcagaagggctgcattttatttttttattttttttatttttttttcacccagctttaacaactgcttttacggacaatttaacactgtgggttgccagctgtgttaatacctgacccccttccttcatgatgtcgcgccttgtgaaatggctgtcagatgcggagcccacgccccccttcctgagaaatctatgcttttcttttttttttttttctttttttttacttttttttttattattatactttaagttttagggtatatgtgcacattgtgcaggttagttacatatgtatacatgtgccatgctggtgtgctgcacccactaactcgtcatctagcattaggtttatctcccaatgctat

SEQ ID NO: 570230 - DNA, 535 bp, Homo sapiens
ggactggctggaagcccttggaaaagttagttaacctttgggcctcagttttgtcacctttgaaacagaagttcaattatagtctctctaactctggagtccatgcctcttatctatcttctctctcttgatttgaagtttgcttgtgtctgggtacaagtgagcatgtgaaaaaaaaatttttttttgcaatgaaataaaatagtaagtactcaataaatttttgttgactgataccttggtttaggcttagtcaaaggagaccattcaaaacakgaggaaagccacatcttaaaagctaggagcttcccaaaccttggctcacttcagagtctaacatgaaagccgttatttaagttgtgcttctgaagtgggctgaaggccaaggcagtggcttacacatcacaggactgctgcaggccaataaatgctctgctagcgatgctcattgcttgaaagaggtttcccctgtgtggctttatcaaaggccacaggccggcagccggacacgcagaactgttcctgtgtggataca

SEQ ID NO: 570231 - DNA, 535 bp, Homo sapiens
ggactggctggaagcccttggaaaagttagttaacctttgggcctcagttttgtcacctttgaaacagaagttcaattatagtctctctaactctggagtccatgcctcttatctatcttctctctcttgatttgaagtttgcttgtgtctgggtacaagtgagcatgtgaaaaaaaaatttttttttgcaatgaaataaaatagtaagtactcaataaatttttgttgactgataccttggtttaggcttagtcaaaggagaccattcaaaacatgaggaaagccacatcttaaaagctaggagcttcccaaaccttggctcacttcagagtctaacatgaaagccgttatttaagttgtgcttctgaagtgggctgraggccaaggcagtggcttacacatcacaggactgctgcaggccaataaatgctctgctagcgatgctcattgcttgaaagaggtttcccctgtgtggctttatcaaaggccacaggccggcagccggacacgcagaactgttcctgtgtggataca

SEQ ID NO: 570232 - DNA, 545 bp, Homo sapiens
tttcccccatgctgttcttgtggtagtgagtcctcacgggatctgatggtttaaaagcrtgtggcagttacccccttgttctctgtctcttgctgccatggaagacatgccttgcttcctttttgccttccgctatgattgtaagcttcctgaggcctccccagccacatggaacagtgagtccattaaacttttctttataaattaccccgtctcaggtagttctttatagcagtgtgaaaatgaactaatacaagaaggaaggaccacctcattataccccttcctttggagtctatgcgcaattgaccagcattaatattaaaatacagatcataagactaacaaaacagactctgggaataagacaccaaatgccaacctgactctggttagcatcacaggacagacagcagaccctgaaggaaataaaaatattttaccccaaaatgtatttctttgacatattttgaaatggtcctgcaaaactgtcttttaggggaggacatttgtatctgtagagaatctccattaatgcggacagg

SEQ ID NO: 570233 - DNA, 607 bp, Homo sapiens
tcaaaatgtgcccatcaataaataaatagataaataaaatgtggtatatatacacaatggaatactatttgctatggaaagaaacaaaatactgtcatctgtagcaatatgtgtgagcctagataatataatgttcaatgaaataaaccatagattgaaagacaaatattgcatgagctcactaataagtggaatatagggaagttgatcttgcagaarttaagcacagactggtggttaccagagtctggggaggggtctgggaagaaaaagattaagggaggtcattcactgggttcaaagctacagtgagatagaaaaaataagttctggtgttctattacacagttgggtgactataacaactatggtataataacaacatatatattttataatagctagaaaacagtaacttgaaagttattaccatgaagaaatgataatggtttgagatgatgaacatgctaattacccgaattttatcataacacaatgtacatatattttaaaacattatgctataccctataaatatgtgaaattatgtgtcagttatagaataactaacctaaataaataaatttaccaatgccaaaaatttcaa

SEQ ID NO: 570234 - DNA, 592 bp, Homo sapiens
tgatctctgttggtgtttttattgaaaattaataagcatgtgatacattttttatcattcttcctcatgatttctttactatatgattcttctcatatgtggtacttaagagtagttaaagtcatagaaaacaccaagtaggagagtgtttcccaggggctacagggagaataaggagttgtttaatgggtacagtttcagtttcaaaaaatggaatatgctttttatatatggaaatgatggtagcaaaataatgagtgtacttaattcatctcaatggaaacctttaaaatggttaaaatagttaattttatgtgtattttaacataatgtataaaattattttaaatttttatattattttttaagagacagagtcttgctctgttacccagacgggagtgcaggagtgcaatcattgcttcctgtagccttgaacttatgggctcaactgatctttctgcctcagtcttctgagtagctggaatagcagrcacatgccaccgtgcctggctaatttttaatttttttgtagagagagggtctcactctattgcccaggctggtctaaaattcccagccacaagtgatc

SEQ ID NO: 570235 - DNA, 551 bp, Homo sapiens
gaatgttcagtttgtccagatcttgtgggactgtttcatgacatgatagaagattagtatagatttaaggcaaaaatatgaaygaatattattgtccaatccatgtcaatgtgaactgtttcttttctaattgaaatggtaaataatgagtgtgtttgccaaatcaatgactacgcagtaactaatctgttctgacaataataacacgtcatgctgaaattaggctaattgttggttgagtccctggtggtctacattcattctttgggattcatccaatttctttaagttaaatagaacagtctgggtctgttatcccatcattttgggaggtaaggcaggcaaatcacttgagcccaggagttcaagaccagcttgggaaacttggtgaaatctcatctctgctaaaaatacaaaaattagctgggtgtggtggtgcatgcctgtcgtcctaagatactctggaggtggaagtaagaggatcgtttgagcctgggaggccaagcctgcagtgactgcaccactgcagtccagactgggcaacagaggga

SEQ ID NO: 570236 - DNA, 542 bp, Homo sapiens
tgagtacccaatgtttagctctcacttataagtgagaacatgtgatatttacttttttattatctgcctccgccttaagattttgtgttatgttaacacttacacttacatttgattttatctttacctatccatttgtttttaacatttctaatccatggacrtttatataactcaggaaagtgaagtttatgttgcagtcattactacaccatgactatgaccttgtgataattactccctgtttttaaatcacaactttggaaacaatttatttagaaataatatttatttatttacctatcaaaatatccaaaaaataagctttggatattgtaatagattttgtcagttgcctggccctcagtcttctccatgctgttttccacaactgaggttgaaaatgaaagctgtttttctagaatactgttgaccaagggatggtgatgtcaggctgttctggccaatgatataggagaagaatccttctaaggacttttgggaaagcttttgatttactgatgaactgtataataacaaac

SEQ ID NO: 570237 - DNA, 542 bp, Homo sapiens
tgagtacccaatgtttagctctcacttataagtgagaacatgtgatatttacttttttattatctgcctccgccttaagattttgtgttatgttaacacttacacttacatttgattttatctttacctatccatttgtttttaacatttctaatccatggacatttatataactcaggaaagtgaagtttatgttgcagtcattactacaccatgactatgaccttgtgataattactccctgtttttaaatcacaactttggaaacaatttatttagaaataatatttatttatttacctatcaaaatatccaaaaaataagctttggatattgtratagattttgtcagttgcctggccctcagtcttctccatgctgttttccacaactgaggttgaaaatgaaagctgtttttctagaatactgttgaccaagggatggtgatgtcaggctgttctggccaatgatataggagaagaatccttctaaggacttttgggaaagcttttgatttactgatgaactgtataataacaaac

SEQ ID NO: 570238 - DNA, 609 bp, Homo sapiens
gggaaaaaagaacccagagttttcttcactggttttatagctgctgaagtgtaaaacaaaatcacattcatatcccagattatttaactgccttgctgtcactcgaatctacacgtttgggcatttcctcaggaaaaagaatgtgaaaggtatggccaaataaaactacaagttgaatgccaccactctgtcactcatcagttaaattactgcattggttkagaatgctgttcaaactagacttcactaggactccacaaccataattactggttatttttcttctccgtctttagatactaatagtcagataccttacgtatcttctgttggtctccacactcctccatagccctttctttcccaaagacctacctacttgggcatgggtggtagtgggaaagacaattttccaaccctcagactaattccagtgtcttaaatgaagataaaacttgacaccaagaacatctcttttgcattttaaacaactggtcacaggaaatctgtcttccataatcactcatcctaaaattctgctgcatagaagatagccgccctcactcaggaagtcttccaacttttaaacactatacccccaaaagcaaa

SEQ ID NO: 570239 - DNA, 538 bp, Homo sapiens
tttgatgctcacaaaatgggtaattgtgtaagtatgaatgagaacagggctatggaatgaagacaacatctgatatggtttggctgtatccccatccagatctcatcttgaatttccaagagttgtgggagggactcagtgggaggtaattgaatcatgggggcaaaagtttcccatgctgttctcatgataggaataagtctcaggagatctgatggttttaaaaagaggagaagttcccctgcacaagctctccctctttgcctgctgccatccatgtaagacatgacttgctcttctttgctttctgccatgattgggaggcttccccagtcacgtggaactgtaagtccatattaaacctctttcttttgtaaattgcccattctcaggcatctccttatcarcagcgtgaaaatggaccaatacaacatcatagaggcaagtaattatgaaattagtggcctgccctcactatggaaatatagatatttctattccagtgcaaattttcactaatttggatgtaatctgatgt

SEQ ID NO: 570240 - DNA, 619 bp, Homo sapiens
tagatgacagattctgaatccaaagagaatttgataggctgaaaataygatacaatgaatcaaacaagatggcatttcacagggtaagagttgaaagaactgaggatgttttgactagagaaaagatgtcttagaatggacaagataatggtcttcaaatatctgagggattttcattataaaaagggaattctaaagagaactgtaacaaaaggtaaataagactataagattcaaattaagaaattacttcctaacaaatggagctgttaaacaaaaagacggccactgtcatttgtccatttattccataaatatttattgagcacacctgctatgtgccaagtactatgtgctagcagggaacaaggcaatcatgctcagctcccctctcagggtgcccacattttagccagagacacaactgaaacaaaacaatcaaatacaccaattaaaactcacaggccaggcacagtggctcacatctataatcccagcactatgggaggccgaggcagatggatcccttgaggtcaggagttcaacaccagcctggccaacatgatgaaaccccgtctctactaaaaatacaaaacaattagccaggcgttgtgtcaca

SEQ ID NO: 570241 - DNA, 589 bp, Homo sapiens
ggagatccactgctctcttcagagccagcaggcaggaatatttaagtctgctgaagctgcgcccacagttgccccttcccccaggtgttctgtcccagcaagatgggagttttatctataaacccctgacggggctgctgcccttctttcagatatgccctgcccagagaggaggaatctggagagcaatttagtgtacttctaaaacacctctttggaacttgcctggaaagtctcagtatattcttttggatttcctcaataatggcaaaattacgaccttcagaawgaggggttttgttgtgttttgttgttgttgttgttgttttgagacagggtcttgctctgttgcccaggctggagtgcagtggcatgatcttggctcactgcaaccttcttccaggctcaagacatcctcccacctcagcttcccaagtagctgagactacaggggcgtgccaccattcctggctaattttgtgtgtgtttttgtgaagacggggtttcgccatggaggctggtctcagactcctgggctcaagagacccacccacctcagccttccgaactgtgtggactacaggtgtga

SEQ ID NO: 570242 - DNA, 535 bp, Homo sapiens
gtcacccaagctggagtgcagtggcatgatcatagttcaccacagcctgaaactcctaggttccggggatccttctgcctcagcctccccgagaagctgggactacacgagggtggtgscacacctggctattttttctttttttttttttttttgagacacggggggtctcgctatgttgcccaggctggtctcacactcctggcctcaaacaatcctccttccaaagcctcccaatgtgctgggaatacatgcctgagccaccacacagagattcttagtgattagtattagcaggtttctaaataaacaggtgaattataactcctcctccctgtaagataatcaggcttgtttgttttactctgcagtgtccttaataacccctatcacagtttttaattgtatatttgtctgtgagattacctgatagggggctctttcccttgcatgaaatgaaaagttcagtgaatgctagtgacctggtcctagcacctcacctcatcacgtagtgcaaggctgtgccaagaaggtg

SEQ ID NO: 570243 - DNA, 547 bp, Homo sapiens
gacatggacctcatttcacgggcatggtaaccagtctgatttttttcctaagtgaaatgggacttggctaggtgtggtggctcatgtccataatcccgccactttggaaggctgaggtgggaagattgcttgagctcagcagatcaaggccagcctggacaacatgatgaaaccccatctttacaaaacatacagaaattggtcaggtgtggtggtgtgtgctcgcagtcccagctacttgggaggctgaggtgtgaggctccctttagcctgggaggttgatgctgcactgagctatgatcacaccactgcactccagcctgggcaacagagtgagaccctgtctcagataaaaagaagaaagaaggaagaaggaagaagaaggaggaagaagaaggagaagatggagaagaaggagaaggaaaataagaaataggatcccgctgaaacatcttaagggggaaggggactgacatgacagatttatgaatttccaaggtcactatggctgctgtgcagagaawaggtgagaagaaacaagagcagt

SEQ ID NO: 570244 - DNA, 553 bp, Homo sapiens
agagtgaaagcagccatagacaatacgtaaatgaataaggctgtgtttctgtcaataaaatctacaaaaacaggtgtcaggctggatttggctctcaggccttagtttgcagccctctagtgaattagtttcctagggctgcagtaacaacttatcaaaaactgtggcttgaaacaaaagaaatgtattctctgtcagttctggaggccagaaatcctaaagcaaggtactggcggggtcgcactccctccaaagactgcatgggagggtctttcttgttccttccagtttctggtggtcctggcatccttggcttgtggctgcatcactcttagctctagtttggtcttcacgtggccttctcctctgagtctctgtgttttcaaatctccctcyatttctcttattgaaacaccagccactggacttagggtccactctaagtccaggatgatttcacctagagatccttaatgagtgacatccgtaaaaatcctattttcagccaggtgtggtggctcacacctgtaatcccagcactttggtaggcaga

SEQ ID NO: 570245 - DNA, 453 bp, Homo sapiens
tttctttttaactggaggagggtattcagaaaccaagatctggatgctgggtgtgctcattgctactggggtgttactgcttctagaccctctaagtgtgtagagttaggaaatgcatgcatgtataccaacccatgtgtgcacacgtgtcagtaagtcatgctaaaatagttctgtaayccccaagtctcctgtgtggcccgttagagtaaaccatatcctactccctccactactgtcaaccattgctctgttttccattcttacagttccaccttttcccaagccccacataaatgtaatcgtacaataattgtacctttaggagtgtggattattttactgagtaaactccaattaggactcttctatgttgctgcataaatcaaccattgcctccttgtgttgctgattaatactgcatattattcgtacactaggatctgttcatcc

SEQ ID NO: 570246 - DNA, 549 bp, Homo sapiens
gaagcaagcatctcagccatccagcactgttaggagcatgtgctgctggtggaaatgtaaattaataggaccattttagggaaccattggcattaattacccagtgatgacaaagacgtttagcctataaccaacccactgcagtctgaagtatatgacttaaagaaactctcacatttacattaacattttataatataaaagtgcaaatatattcattatttcaagtaggtctctgaaaaacaccttatgggtgaatatttacattcccaatttcgtagataggaacattactcccatgctaaggagtaatgggcaatggcctcacataaagatttttgactcraaggctaaacatctccctgataccacactgcccaccaccccaaaagaccctctgtgtgtgcccttgaccctgctcgcctaagagggctgtgagcaaaagataaatcaggtgacttctcctcatccctgtggcctctttaaaaataaatgccgaatgctgacaagcaaagctgagagcaacatccagatactttgactgctgaa

SEQ ID NO: 570247 - DNA, 530 bp, Homo sapiens
tatatagatttgggaactatattgtatatctgttttctgtagctatattgtataaatatattgtacaactgttttgtgagctatatggtatacaataggcactccatataatttagatattgtctcctgtagcctattcagattgaatatcccaagcttttctctatttcattcctttcctgattttagcccraggtcaaaaatgacatccttctctatttaggcagaggtgttaagagggtatacctagcctgccagtggattaaaaacatttgttttttacccaggaataaatgttgcatattttgtgacaagcaataatgattacaacatagatatcttaacataaattaaaatgccttaagataccaaaatgcaaatcacccccaaaaataaaaaattcagcacccaaaggtatatatttctaataagaatcccaaattagttatggctaatctgaccacagacttgctggcagaatcagaacttttcctagcaagtacaagtttgtcatttaagaagacagacac

SEQ ID NO: 570248 - DNA, 629 bp, Homo sapiens
aatataagtgaccatggcctgaggaacacagcctcaagaggttctgacaaagtgtgcataggtggtcaggttacagtttgtttttatacattccagggagataggaattacaggtaacatcacgtcaatacatggaaggtatacgttagtttggcctgaaaaggtatgtcatctcgaagtggaggcttacaggttataggtgaattcagacattctttaatttgcaattggttaaaagagtgaagcattgttaaagactacaagtcggtacaaaggaacacttaggttaagataaggggtgtgctatctgttgtgtgatgctataccagagtcaggttggaaataagccataacagattaacaataggttaaccagtttaatgagattttatgctttgtaagctgtgatgtaacccttgccttgcaaggccttaagtcttatttacaatttggtatcttattgtcacaaagagtccattctgtcagtctcacgatcgctatttcacattaatgctggtcagttgtgtctaaactccaaaaatgaagtttgtctaagytgcgttacctttatgacttttcagatttctctgagattcccttggccaaagagttcagttgaggccaggcac

SEQ ID NO: 570249 - DNA, 568 bp, Homo sapiens
tgggagaagtttccattagcccaggagggtaaaggtcactgcaggacacagaagacaggtcaatctgaaaatcatctccttaaccagctgtggaaccactagagagggcaaaagagggtgttgtgggttaaatttttccccccacccaaaagatatgttcatcctaacccccaggacctatgaatgtgaacttatttggaaacaagctcttgcagatatatttaagttaagatcattagggtgggttctaatccaatatgactgygtccttataagaaagggaaatttagatacagaaagacaggcacccacagggggaagaccatgcagaaacacccaccgagaacaccatgtgatgccaaaggcagtgtgttagtccgttctcacgctgctaataaagacatacccaagactgggtaatttataaaggaggaaggtttaattgactcacggttttgaagggctgaggaggcctcaggaaacttacaaccatggcagaagaggaagcaaacatgtccttcgtcacatggcagcaggaaggagaagtgctgagcaaaagggggaaaag

SEQ ID NO: 570250 - DNA, 564 bp, Homo sapiens
tgggactacaggtgcccaccaccacgcctggctaatttttttttttgtattttggtagagatggggtttcactatgttggccaggctggtcttgaactcctgacctcgtgatccacccacctcagcctcccaaagtgctgggattacatrgatgagccaccacacccagcctctttgttaacctttaaccagaaatttctcctaaggaagagacagaaaccaactccagaaaacaaaaagatgactcattcttttatcacctttagccaataatgtgaggtcttgaccaaactctcccatcctctttgcagttttgacacgatagctcaccaatttcacatcacatcccttcctaaaaactgaccaccagggtttcctctttcggctttggagccccctccctctgtctctgtacggggtagcttcttccttctgtcttctcccttccttcttgtctattaaacgctccactccttaaaactaaaaaataaaaaataaattttaaaaactgaccaccatctccagacagacattggccaactcacagaggatgcacagtgaggg

SEQ ID NO: 570251 - DNA, 396 bp, Homo sapiens
aaaaaaaaaaaaaagaatggactttcccaggccagctgtggtggctcacgactgtaatcccagcactgtggcaggccaaggcgggcagatcacctgagatcaggagttcaagaccagcctgaccaacacggagaaaccccgtctctactaaaaataaaaaaaattagctgggcgtggtggtgcatgcctgtaatcccagctacttgggaggctgagrcaggagaattgcttgaacccaggaggcagaggttgttgtgagctgagattgcaccattgcactccagcctgggcaacaagagggaaactccatcaaaaaaaaaaaaaaaaaaaaggactttctcaaagaaaatgtatttaaatgtctgcaccaataattccagcatgtgtatgaataaa

SEQ ID NO: 570252 - DNA, 547 bp, Homo sapiens
gatcgcgccactgtactccagactgggtgacagagcaagaccccstccggaaaaaaaaaaaaagggtggcctggttgaagccagtcttctacagggaatgtgctgttgctactctgggtcagtagtgtccggattgggacgtgacgcgcccaagatttgttactactttggatgaagtggggaccgccccactcttcctctccctccttttctttttccgttccctccctccctctccctttcttcccccctctggtattttttaaccaaatagaaggagtcaagtttaaaccatcattaactaactttgcctaatttcctaaagttaagaattactttttttttttgcgctacttatggctctgattaatcttttaatttcagatgtcagttgcttagtttcaaaactgttgagccacatgtatgttattcaccaattagaagttgaactgtagtcgggtagtgaaaaatatttctttcaaaatttaggtgggggctgctgcagtgccagttggcagtgtgccagcaaggagcccttaagccctcc

SEQ ID NO: 570253 - DNA, 472 bp, Homo sapiens
caagtaatcagggacacaaacactgcggaaggccgcagggtcctctgcctaggaaaaccagagacctttgttcacttgtttatctgctgaccttccctccactattgtcctatgaccctgccaaatccccctctgtgagaaacacccaagaattatcaataaaaaaataaattaaaaaaaaaaaaagaatggactttcccaggccagctgtggtggctcacgactgtaatcccagcactgtggcaggccaaggcgggcagatcacctgagatcaggagttcaagaccagcctgaccaacacggagaaaccccgtctctactaaaaataaaaaaaattrgctgggcgtggtggtgcatgcctgtagtcccagctacttgggaggctgaggcaggagaattgcttgaacccaggaggcagaggttgttgtgagctgagattgcaccattgcactccagcctgggcaacaagagg

SEQ ID NO: 570254 - DNA, 472 bp, Homo sapiens
caagtaatcagggacacaaacactgcggaaggccgcagggtcctctgcctaggaaaaccagagacctttgttcacttgtttatctgctgaccttccctccactattgtcctatgaccctgccaaatccccctctgtgagaaacacccaagaattatcaataaaaaaataaattaaaaaaaaaaaaagaatggactttcccaggccagctgtggtggctcacgactgtaatcccagcactgtggcaggccaaggcgggcagatcacctgagatcaggagttcaagaccagcctgaccaacacggagaaaccccgtctctactaaaaataaaaaaaattggctgggcgtggtggtgcatgcctgtartcccagctacttgggaggctgaggcaggagaattgcttgaacccaggaggcagaggttgttgtgagctgagattgcaccattgcactccagcctgggcaacaagagg

SEQ ID NO: 570255 - DNA, 470 bp, Homo sapiens
tgtaatcccagctactcgggaggctgaggcagcagaatcccttgaacctgggaggcggaggttgtggtgagccgagatcgcaccattgcactccagcctgggcaacaagagcaaaaactccttctcaaaaaaagaaagaaaaaaaagaaaattgaacattataatatatcacattaatagaacgagggaaaaaccccacttsatcatctcaattgatgcagaaaagagatctcacaaaatctaacaccctttcatggtaaacatactcaataaactaggactagaccagaaattcctcaacacagcaaagggtgtttatgaaaaacccacagataacatactcagtggaaaaagatggaaagccttcctctaagatcaggaacaagacaaggacgcctgctttcacaacggctactcaacattgtactggaagtgctaaccagaacaattagacaagaaaaaagtgaccc

SEQ ID NO: 570256 - DNA, 502 bp, Homo sapiens
attcacaagtaagctaaatattaataatatttaataatatttaataataatattaggtgacatgcgttttgtgcagaatctgtataaacactacctcctttgtcctgaccagtaaattcctgccaatgtagccctagattacgtaagttttgttgccaaccacatcacaaaccaactcacattgaaattactgttaagtaagctattttatttttctcaagagtttttattaaatggaacattctcctatctagtattcattcagttgacgaattataaayaaaatgtaaaacactgtagacagatgcatgtgaatattaaaatgctttttatataacaatttttaacattagaactaatgctttataaatttaattaggaaaaacgtcaagagaatgttatgacggatatgtaagacagaggtttctatgtttgaccttgagctcctgcatttgtgttacttttacacagcagattctatcatagctatgggaaataaatg

SEQ ID NO: 570257 - DNA, 591 bp, Homo sapiens
gagaaatcaaatgcttcattyagataatatcaactataatccaattcaaaagcctcttttgaatacttaattgctctttaaaaaagtaaagaaaacctaaactaaccaagaaacgataatatacaaaatcgtggcatccttcaaaaatgccagattatctattcagacaatattgattacatattgtggtgggcaatgctgcttgctgcattacaatcattccttgtattccttaatggatcacacttgcatttggctttaggaatctgtaaacttcaagagagattggcaacttccaaacctcagggataaacatttattaatctaagccagtcatgtaatattaatcctactctaattactggtgattaagttaggattggacaggtgacaagatttttactaattagtactgtgggatatatctgttacaagcattcttgtaaatctttaataatttaaaaaatggagagaaggaactattgtacttgtttttcaatttctggttacccaaccccttaccccaaggggataattcttggagtttcatgaagccaacttgtcattatgagggaacaagtttggaagtag

SEQ ID NO: 570258 - DNA, 233 bp, Homo sapiens
cccctgaacctaatacaaaagtgaaaagaaagcaagagttcatgtctcatgttttcagtacagatacacacacacacggtaacatgtcagactactcatagttcatttttttaatgacaagaaaaattgtatatatttttggcatacaaaatgtgtgtgtatatatgtgtatatatatatatggatgtttgtatatatatayacacataaatatggtagaataataaaatcaa

SEQ ID NO: 570259 - DNA, 562 bp, Homo sapiens
tgcaaactatgcatctgacaaaggtctaatatccagcatctacaaggaacttatatatatgtgtgtgtgtgtgtgtgtatatatatatatatatatatatatatawtatatatataacaattccattaaaaagtgagcaaagaacatgaacagacacttctcaaaagaagacatatatatagcttacatataaagcatatgaaaaaccctcaatatcactaataattagcaaaatgaaaatcaaaagtacaataagataccatctcacactagtcagaatggctgttattaaaaagtcaaaaataacagaggttgggctgggcacggtggctcatgcctgtaatcccagcactttgggaagatcacttgaggcaaggagttcgagaccaacctggccaacatgcaaaactacatttctactaaaaataaaaataataaaaaaaaaaaaaattagctgagcatggtggtgtgtgcctgtagtcccagctacttgggaggctgaacctgagaggtggaggttgcagagctgagatcgggccactgcacttcagcttgggtgaca

SEQ ID NO: 570260 - DNA, 562 bp, Homo sapiens
tgcaaactatgcatctgacaaaggtctaatatccagcatctacaaggaacttatatatatgtgtgtgtgtgtgtgtgtatatatatatatatatatatatatataawatatatataacaattccattaaaaagtgagcaaagaacatgaacagacacttctcaaaagaagacatatatatagcttacatataaagcatatgaaaaaccctcaatatcactaataattagcaaaatgaaaatcaaaagtacaataagataccatctcacactagtcagaatggctgttattaaaaagtcaaaaataacagaggttgggctgggcacggtggctcatgcctgtaatcccagcactttgggaagatcacttgaggcaaggagttcgagaccaacctggccaacatgcaaaactacatttctactaaaaataaaaataataaaaaaaaaaaaaattagctgagcatggtggtgtgtgcctgtagtcccagctacttgggaggctgaacctgagaggtggaggttgcagagctgagatcgggccactgcacttcagcttgggtgaca

SEQ ID NO: 570261 - DNA, 644 bp, Homo sapiens
atttaaaaaatgtagactttcagaaaacaaaccaaactttaagggataattttgatttgtctttgaagtgtgacaaaacagaaaaatgactaataaaaaccaagaaatgagatactttgaagaaggacatagtaaatcatgaaattctgcagagacaggaatacagaggcagaagaaagattacttattctgttataagaaaatcgtgggtaatattagtgtaatttcattaaagtggcatgtaagttaaataaagtttgtgtgggaggaagaaagaagcatgtgaaaacagggccagcacggtggctcacaactctaatcccagaactttgggaggctgagatgggtggatcacctgttgtcaggagttgagaccagcctgaccaacatagcgaaaccccatctctacyaaaaatacaaaattagccaggcatgcataatccaacctacttgggagtctggggcaggagaatcacttgaactcgggaggcggaggttgcagtgagctgagagcgcatcaatgcactccagcctgggtaacaagagcaaaactccatctcaaataaataaataaataaataaataaataaataaataaatagatagatagaagcatggaaaaacaaagttgaatgctgaaatca

SEQ ID NO: 570262 - DNA, 629 bp, Homo sapiens
attttgatttgtctttgaagtgtgacaaaacagaaaaatgactaataaaaaccaagaaatgagatactttgaagaaggacatagtaaatcatgaaattctgcagagacaggaatacagaggcagaagaaagattacttattctgttataagaaaatcgtgggtaatattagtgtaatttcattaaagtggcatgtaagttaaataaagtttgtgtgggaggaagaaagaagcatgtgaaaacagggccagcacggtggctcacaactctaatcccagaactttgggaggctgagatgggtggatcacctgttgtcaggagttgagaccagcctgaccaacatagcgaaaccccatctctaccaaaaatacaaaattagccaggcatgcataatccaacctacttgggagtctggggcaggagaatcacttgaacycgggaggcggaggttgcagtgagctgagagcgcatcaatgcactccagcctgggtaacaagagcaaaactccatctcaaataaataaataaataaataaataaataaataaataaatagatagatagaagcatggaaaaacaaagttgaatgctgaaatcatcttagcccccagaaatgtcaacatgctatcag

SEQ ID NO: 570263 - DNA, 614 bp, Homo sapiens
tgtttgagttccttgtcgattctggatattagacctttgtcagatgcatagtttgggaatattttctcccacattgtgagttgtctgtttactctgctgattatttattttgctgtgcagaaattttttagtttaattaggtcccatctatttatctttgtttttgttgcctttgtttttgagttcttggtcatgaactctttgccaaagccaatacctagaagagtttttccaatgttrtcttctagaatttttatgatttcaggtcttagatttaagtccttggtccatcttgagttgatttttgtagagaggtgagagatgagagatgcggtgagagatgaggatccaggttcattctcctacatgtggcttgccaaatatcccagcaccatttgttgaatagggtgtcctttccccagtttatgtttttgtttgctttgtcaaagaccagttggctgtaagtattgggctttatttctgggttctctattctgtgtcattggtttatgtgcctatttttataccactaccatgctattttggtaactacaggcttgtagtatagtttgaagtcgggtaatgtgatgcctctagatttgttctttttgttt

SEQ ID NO: 570264 - DNA, 568 bp, Homo sapiens
gaattctttgtttacatttatggttggttttatggttggtagaactgatgactatttaattggtgcagtaagagatcaccccgcttcaaacccattgggtccatatgattgcatcagcaggtattgggtatgaccgcttcgagctctgttgcctggtttgtgagaccctggcttcaagacactcctgttaaaaggcaaatatccttgaagagtcctattagataatttcctagggaggggcctggccattccattgcctttggagtcagatgaacatggattcccattctggctcttctacttacgaggtgaatgacctacaaagtctttgagcctcagtgtccttttctgtaaaaacagacataacaaaacctacttcattggattgttctcacygttcagtgagggctctggaagggtattgttatgacaaagtgctatgtaaagggcagtaaattgtccctctttttgtttcttcctcttgccttaaccttcttgagtgtgtgtgtagaggggggcctcgctggcatccaggacatacaataaataaagagacaggatggctata

SEQ ID NO: 570265 - DNA, 604 bp, Homo sapiens
aagcttgatctttttgtatctcagtgaccatgatgggaagaactttccccaggcagctgttatccactcagcttaggcccagaatgaacacgcttgcctacagctcaacctataggctggagctaaggacaggttggcgttaagcacagccgaactgtagccttgctcagcctagagccrctgaaccacagtcagtcttgcagacctgtagacgtgagactaaattcttgtgttgttgttgttgttgtttttgagacagagtttcgctcttgttgcccaggctggagtgcaatggcgtgatcttggcacactgcaatgtctgcctcccaggttcaagtgattctcctgcctcagctcccgagtagctggtactacagccatgcaccaccatgcccagctaatttgtattttcagtagagatggagtttctccatgttggtcaggctggtcttgaactactgacctcaggtgatctgcccaccttgacctcccaaagtgctgggattacaggcatgagccaccatacccagcgaaatccttgttgttttaagccattggatttttaggtggtttcttatacagtattaatgaggatagattattg

SEQ ID NO: 570266 - DNA, 604 bp, Homo sapiens
aagcttgatctttttgtatctcagtgaccatgatgggaagaactttccccaggcagctgttatccactcagcttaggcccagaatgaacacgcttgcctacagctcaacctataggctggagctaaggacaggttggcgttaagcacagccgaactgtagccttgctcagcctagagccgctgaaccacagtcagtcttgcagacctgtagacgtgagactaaattcttgtgttgttgttgttgttgtttttgagacagagtttcgctcttgttgcccaggctggagtgcaatggcgtgatcttggcacactgcaatgtctgcctcccaggttcaagtgattctcctgcctyagctcccgagtagctggtactacagccatgcaccaccatgcccagctaatttgtattttcagtagagatggagtttctccatgttggtcaggctggtcttgaactactgacctcaggtgatctgcccaccttgacctcccaaagtgctgggattacaggcatgagccaccatacccagcgaaatccttgttgttttaagccattggatttttaggtggtttcttatacagtattaatgaggatagattattg

SEQ ID NO: 570267 - DNA, 604 bp, Homo sapiens
aagcttgatctttttgtatctcagtgaccatgatgggaagaactttccccaggcagctgttatccactcagcttaggcccagaatgaacacgcttgcctacagctcaacctataggctggagctaaggacaggttggcgttaagcacagccgaactgtagccttgctcagcctagagccgctgaaccacagtcagtcttgcagacctgtagacgtgagactaaattcttgtgttgttgttgttgttgtttttgagacagagtttcgctcttgttgcccaggctggagtgcaatggcgtgatcttggcacactgcaatgtctgcctcccaggttcaagtgattctcctgcctcagctcccgagtagctggtactacagccatgcaccaccatgcccagctaatttgtattttcagtagagatgragtttctccatgttggtcaggctggtcttgaactactgacctcaggtgatctgcccaccttgacctcccaaagtgctgggattacaggcatgagccaccatacccagcgaaatccttgttgttttaagccattggatttttaggtggtttcttatacagtattaatgaggatagattattg

SEQ ID NO: 570268 - DNA, 604 bp, Homo sapiens
aagcttgatctttttgtatctcagtgaccatgatgggaagaactttccccaggcagctgttatccactcagcttaggcccagaatgaacacgcttgcctacagctcaacctataggctggagctaaggacaggttggcgttaagcacagccgaactgtagccttgctcagcctagagccgctgaaccacagtcagtcttgcagacctgtagacgtgagactaaattcttgtgttgttgttgttgttgtttttgagacagagtttcgctcttgttgcccaggctggagtgcaatggcgtgatcttggcacactgcaatgtctgcctcccaggttcaagtgattctcctgcctcagctcccgagtagctggtactacagccatgcaccaccatgcccagctaatttgtattttcagtagagatggagtttctccatgttggtcaggctggtcttgaactactgacctcaggtgatctgcccaccttgacctcccaaagtgctgggattacaggcatgagccaccatacccagcgaaatccttgttgttttaagccaytggatttttaggtggtttcttatacagtattaatgaggatagattattg

SEQ ID NO: 570269 - DNA, 525 bp, Homo sapiens
tgtctcagcctcccgagtagctgggattacaggtgtctgccaccatgcctggctaatttttgtatttttagtagagacagggtttcacagtgttggccaggctggtctcaaactcctgacctcaaaagatccgcatacctcagcctcccaaagtgctgggattataagtgtgagacatcacccagcctatctatagtgttttgaatgtatttcttttttagcatttgtatttctttgtatagcacttttagtgattgctctaagtattccattgtgtatccataacctatttcagtcaactgatrttcttttttatcctttgagtgaagtatagaactctttccccccataacacccttttatcttcccctgtttatagtataattgtcttaaatatttcttctacatacattgagaaccacatcagatagtgttataagttttgcttcaaccatcaaatacaatttggaaaactcttgaggagaaataaagcctattgtgtttgccaatatttttgcttaccat

SEQ ID NO: 570270 - DNA, 492 bp, Homo sapiens
agcaatgggaacagagcagtaaatctatgctcatatcttctgagatagctcttaatattacaatttctctctgtgtattgaacttrtattactttccctataacttctatgtactgagtggattctgcccttcttgtccatctagatctttcacaagacagcccttcaaatatatgaaacatgtcatcctccactcttctctcctctaggctaaatatcctgtttcttcagcttctcctctaggctaaatatcctcagctgtcccacatgtggtgtgatttttcagttccttcattaccttggatgcccttctcggaagacatcactgctctggttctataaacccacacggctaacatggaaggggagcagtttctggaatggaaggttattgacatattaagcgatctcccccaaaaatggttccaaagtctgggactaaaccagaaccctgtaatgctctttgccacaaactgattggtgaccaagtca

SEQ ID NO: 570271 - DNA, 279 bp, Homo sapiens
gcatagcctgcctttgctggtgtgtggcgattaggcctggtggaactgccatcaataaatcaagcgtgatcagggtgaggaacaggaaagaaggaaatatggggaaatgggtgaatgtcaggtggatcagagagatacagtcatgggggtcaggtgtggtatcaggaataatgtgggaggccagattgaagtcygggccaggaacaatggtaattgtgggacttaacaaagagtgagtacagctgaaggatccggggagcagaaagtatatgcatcagg

SEQ ID NO: 570272 - DNA, 279 bp, Homo sapiens
gcatagcctgcctttgctggtgtgtggcgattaggcctggtggaactgccatcaataaatcaagcgtgatcagggtgaggaacaggaaagaaggaaatatggggaaatgggtgaatgtcaggtggatcagagagatacagtcatgggggtcaggtgtggtatcaggaataatgtgggaggccagattgaagtccgsgccaggaacaatggtaattgtgggacttaacaaagagtgagtacagctgaaggatccggggagcagaaagtatatgcatcagg

SEQ ID NO: 570273 - DNA, 579 bp, Homo sapiens
tttctgggttttcttttggattggggttcccatttctgggccattttgcttctctctcactctcscctcttctttttggtcactagatttttaggccatatttttcattgtagggggagctgggtaaatttttagaagttggcagtgacagagtggcaattaattagaagttggatttagccaactataaatttgtctcatttacatttttctaaattaagtctaataagtgaggaattttccctaagctgtgaattggaattaattatggttcctcacagaaaggtaagaatagtaggagtactaatgttgaaaatgtggccttgtgctgtaaatttcttaacagctctttctcatgtttctttaccaagagaatcatggttctttctttctataagaatttatagaatgtgctgtcttttacagtgtgcttggaagtataaaacattaagtgcagctttatctgttggcatgctttgctcaaagtggttttgccctactcctgagagagagccagatttgtccccattggccttttgtgcattacacacctgagaataaataataaaaagaaaataa

SEQ ID NO: 570274 - DNA, 579 bp, Homo sapiens
tttctgggttttcttttggattggggttcccatttctgggccattttgcttctctctcactctcgcctcttctttttggtcactagatttttaggccatatttttcattgtagggggagctgggtaaatttttagaagttggcagtgacagagtggcaattaattagaagttggatttagccaactataaatttgtctcatttacatttttctaaattaagtctaataagygaggaattttccctaagctgtgaattggaattaattatggttcctcacagaaaggtaagaatagtaggagtactaatgttgaaaatgtggccttgtgctgtaaatttcttaacagctctttctcatgtttctttaccaagagaatcatggttctttctttctataagaatttatagaatgtgctgtcttttacagtgtgcttggaagtataaaacattaagtgcagctttatctgttggcatgctttgctcaaagtggttttgccctactcctgagagagagccagatttgtccccattggccttttgtgcattacacacctgagaataaataataaaaagaaaataa

SEQ ID NO: 570275 - DNA, 579 bp, Homo sapiens
tttctgggttttcttttggattggggttcccatttctgggccattttgcttctctctcactctcgcctcttctttttggtcactagatttttaggccatatttttcattgtagggggagctgggtaaatttttagaagttggcagtgacagagtggcaattaattagaagttggatttagccaactataaatttgtctcatttacatttttctaaattaagtctaataagtgaggaattttccctaagctgtgaattggaattaattatggttcctcacagaaaggtaagaatagtaggagtactaatgttgaaaatgtggccttgtgctgtaaatttyttaacagctctttctcatgtttctttaccaagagaatcatggttctttctttctataagaatttatagaatgtgctgtcttttacagtgtgcttggaagtataaaacattaagtgcagctttatctgttggcatgctttgctcaaagtggttttgccctactcctgagagagagccagatttgtccccattggccttttgtgcattacacacctgagaataaataataaaaagaaaataa

SEQ ID NO: 570276 - DNA, 385 bp, Homo sapiens
cagatattgatatatatattgcaatatgkgttaaatgtaattttgtatattgtctttggaatctcataacctgtataacattgattcattaggagaattggcttcaagtcttaaccaatttacaaatgaactatttgttttttaaaaaaaatcctgaggaggaaacaatccatagttttttgtttgtttgttgagacgaagtttcattcttgtcacccagtctagagtacagtggcttgatctcggctcactacaacctctgcctcccgggttcaagtgattctcctgcctcagcctcccgagtagctgagactgcaggcccgcaccaccacgcccagctaatttttgtatttttggtagagacggggtttcactacgttggcca

SEQ ID NO: 570277 - DNA, 401 bp, Homo sapiens
cagatattgatatatatattgcaatatgggttaaatgtaattttgyatattgtctttggaatctcataacctgtataacattgattcattaggagaattggcttcaagtcttaaccaatttacaaatgaactatttgttttttaaaaaaaatcctgaggaggaaacaatccatagttttttgtttgtttgttgagacgaagtttcattcttgtcacccagtctagagtacagtggcttgatctcggctcactacaacctctgcctcccgggttcaagtgattctcctgcctcagcctcccgagtagctgagactgcaggcccgcaccaccacgcccagctaatttttgtatttttggtagagacggggtttcactacgttggccaggctagtctcgaattc

SEQ ID NO: 570278 - DNA, 604 bp, Homo sapiens
ccagtttgataaggatttttttttcattaagggatgtcaaattttattgaattctctttcagcatctattgaaataatgacatggtttttgtacttggttctggtttttcttttttsttttttttattatactttttttctgggatacatatgcagaacgtgcaggtttattacatagctatacacgtgccatggtggtttgctgcacccaccaaccctgcatctacattaggtatttctcctaatgctatctctgcctttgccccctaccccctgacatgccccaatgtgtgatgttctccctatgtccatgtgttctaattgttcaactcccacttatgagtgagaacatgtagtgtttggttttttgttcctgtgttattttgctgagaataatggtttccagcttcatccatgtccccacacaggacatgaactcattcttttttatggctgcatagtattccatggttgtatatgtgccacattttctttatccagtctatcattgatgggcatttgggttagttccaagtcttttctattgtgaatagtgctacaataaatatacgtgtgcatgtgtctttatagtaggatgatttat

SEQ ID NO: 570279 - DNA, 604 bp, Homo sapiens
ccagtttgataaggatttttttttcattaagggatgtcaaattttattgaattctctttcagcatctattgaaataatgacatggtttttgtacttggttctggtttttcttttttcttttttttattatactttttttctgggatacatatgcagaacgtgcaggtttattacatagctatacacgtgccatggtggtttgctgcacccaccaaccctgcatctacattaggtatttctcctaatgctatctctgyctttgccccctaccccctgacatgccccaatgtgtgatgttctccctatgtccatgtgttctaattgttcaactcccacttatgagtgagaacatgtagtgtttggttttttgttcctgtgttattttgctgagaataatggtttccagcttcatccatgtccccacacaggacatgaactcattcttttttatggctgcatagtattccatggttgtatatgtgccacattttctttatccagtctatcattgatgggcatttgggttagttccaagtcttttctattgtgaatagtgctacaataaatatacgtgtgcatgtgtctttatagtaggatgatttat

SEQ ID NO: 570280 - DNA, 604 bp, Homo sapiens
ccagtttgataaggatttttttttcattaagggatgtcaaattttattgaattctctttcagcatctattgaaataatgacatggtttttgtacttggttctggtttttcttttttcttttttttattatactttttttctgggatacatatgcagaacgtgcaggtttattacatagctatacacgtgccatggtggtttgctgcacccaccaaccctgcatctacattaggtatttctcctaatgctatctctgccyttgccccctaccccctgacatgccccaatgtgtgatgttctccctatgtccatgtgttctaattgttcaactcccacttatgagtgagaacatgtagtgtttggttttttgttcctgtgttattttgctgagaataatggtttccagcttcatccatgtccccacacaggacatgaactcattcttttttatggctgcatagtattccatggttgtatatgtgccacattttctttatccagtctatcattgatgggcatttgggttagttccaagtcttttctattgtgaatagtgctacaataaatatacgtgtgcatgtgtctttatagtaggatgatttat

SEQ ID NO: 570281 - DNA, 537 bp, Homo sapiens
ctcatatatatgtatatacaaaaatgtacactcgtatatatacacacacacatacatatacactcatgtcttatccacctctttcaccaaaacaactttgaaatttaacatctcagcagattgcttatattttaaggatggcaaggtggggtagcatttaaagcaaggcaaatctgagtgtgaatctcatttttaccagatatttggtgtataaccttggctgaggtaaaggttgtacaaggccccatacaggtatctttcagggagctacagacgctataaacatcatggtttacaaagaaccrtgtgttaaatgcttaatgtcatgataagcagatagtatttatctcttcctatgataggctcagtggtatgaagagtgatcatggattttggaattataatagttgtatcaagtctagatttttgccattccatagatatgtgacctagaacattttaaataccacattaatatttttagataatctgtaaaatggagatacacaaatacaattatatactgcaattaagatt

SEQ ID NO: 570282 - DNA, 486 bp, Homo sapiens
aaggaaataaccaatatcagagcagaactaaataaaattgaagcaaaaatataaaaaagagaaatgaaacaaaaaaatagatmtttgaaaagataaataaaattgatagatcattagcaagattaaccaagaaaagaaaacagaaaatccaagtatgctcaattagaaatgaaatgggagatattacaattgacaccacagaaacacaaaagattattttggctgctatgaacttctttctgcacataaaccagaaaacctagagatggataaattcctgaaaagatacaaccttcctaacttaaatcaagaagaattagataccctaaacagaccaatagcaagcagcaaggttgaaatggtaataaaaaaaataccaaccaagaaaagtccagaaccagatgaattcacagcagaattctaccagacattcaaagaattggtaccaatcttattgacactattccacagacagagaaggaggga

SEQ ID NO: 570283 - DNA, 552 bp, Homo sapiens
aagttggagccttgtggggagaagtcaaaaggtattcctgtctttctttgctagggtagtgaaagccaaaactcccacacctgcctagaagcaaggaacccagctatgccccttatgcatcaaaggaggctgagaggggaaactggactctaccaccagctggcagtaaagtagtagtgctcctttgcctacctgaggagaactcacgttaccttcatggtaaaacaaatagaatgaccacagttttctcaacagaaacagaggaagctacaagaaagtgacacaatatttttcaagtgctgaaagaaaagatcatgctgtacattagatctctagaatgtattcatctcataactaaaagtytataccacacatacacacgaatggtgactatgggtggtggtgaatgtgtttattaatttgattgtagcaatcattatacaatgtatatgtatattggatcatcatgtcataaacctcaaatgtatacaatttttgttagttaaatattttaaaataaaaaaaaattaacagaaaaacagtcaaaccaaa

SEQ ID NO: 570284 - DNA, 412 bp, Homo sapiens
cttctttcctgaaacctcacacagccacctcttctagtttcaaatttttcttttaaaatttccttacttctcccagttttcacagaatttaagagagttagggccttgctctggattaggctttggcttaaaggaatactactgctagtttaatctatccagactgttaaagctttctccctattgtgtccagaattggtsggttcttggtctcactgactgcaagaattaagctgtggacccacgcggtgagtgttacagttcttaaaggaggcgtgtccggagtttgttccttctgatgttcagatgtgttcggagtttcttccttctggtgggttcgtgatctcgctagctcaggagtgaagctgcagaccttcgcggtgagtgttacagctcttaaggcggcaggtct

SEQ ID NO: 570285 - DNA, 541 bp, Homo sapiens
attagtcacccaacccacagacttgtgagaagaagaaaatacagttgttctaagccaccagttttgtggtgttttattattcaacaaaagctacatagatgcagactacatgttaagatagttactcttacatcatataggatatagagtcaaaatcgtctatatttctagggccaagtttattttagcctgtgcaggtgacgagggtaagataggtcaaaacattttgggggttcttatttcaggaaaaatatcaattacaaactaagaataaaaattaatgatattttgtgcccagttgtttctttattgggtcatagcaccctactcaaaatgtgcccatatctgaaagcaagtaacaggagtatattaagaagtccaagaataaggytgggcgtggtggctcacgcctgtaatcccagcactttgggaggccgaggccggcggatcacctgaggtcaggagttcgagactagcctggagaacatagtgaaaccccatctctactaaaaatattaaaattagccgggcatggcgtgaa

SEQ ID NO: 570286 - DNA, 598 bp, Homo sapiens
atcttcacatggttatagaggactacctgagagtgagtaatttatagagaaaagaggtttaatggaatcacagttccacaggctgtacaggaagcatggctgagaggcctcaggaaacttamaatcatggtggaaagcagaggggatgcaagcacatatttatactgcaggaaagagagagagagtaaagggggaggtgctacacacttttaaaccatcagatctcaggagaactcgctcactattacgagaatagcaagggggaaatccacctcgatgattcaatcacctcccaccaggtctctccctcaacattaggaattacaattcaatatgagatttgagtgggggcaaaaatcaagccatatcattccgctcctagaccctcccgaatctcacgttcttcttacatttcaaaacactatcatgccttcccaacagtccccgaagtcttaactcattccagcattaactcaaaattctacagtccaaagtctcatctgagaaaaggcaagtcccttctgcctattagcctgtaaaataaaaataataataataaaagttatttacctccaagatacagtgggggtacaggcat

SEQ ID NO: 570287 - DNA, 598 bp, Homo sapiens
atcttcacatggttatagaggactacctgagagtgagtaatttatagagaaaagaggtttaatggaatcacagttccacaggctgtacaggaagcatggctgagaggcctcaggaaacttacaatcatggtggaaagcagaggggatgcaagcacatmtttatactgcaggaaagagagagagagtaaagggggaggtgctacacacttttaaaccatcagatctcaggagaactcgctcactattacgagaatagcaagggggaaatccacctcgatgattcaatcacctcccaccaggtctctccctcaacattaggaattacaattcaatatgagatttgagtgggggcaaaaatcaagccatatcattccgctcctagaccctcccgaatctcacgttcttcttacatttcaaaacactatcatgccttcccaacagtccccgaagtcttaactcattccagcattaactcaaaattctacagtccaaagtctcatctgagaaaaggcaagtcccttctgcctattagcctgtaaaataaaaataataataataaaagttatttacctccaagatacagtgggggtacaggcat

SEQ ID NO: 570288 - DNA, 598 bp, Homo sapiens
atcttcacatggttatagaggactacctgagagtgagtaatttatagagaaaagaggtttaatggaatcacagttccacaggctgtacaggaagcatggctgagaggcctcaggaaacttacaatcatggtggaaagcagaggggatgcaagcacatatttatactgcaggaaagagagagagagtaaagggggaggtgctacacacttttaaaccatcagatctcaggagaactcgctcactattacgagaatagcaagggggaaatccacctcgatgattcaatcacctcccaccaggtctctccytcaacattaggaattacaattcaatatgagatttgagtgggggcaaaaatcaagccatatcattccgctcctagaccctcccgaatctcacgttcttcttacatttcaaaacactatcatgccttcccaacagtccccgaagtcttaactcattccagcattaactcaaaattctacagtccaaagtctcatctgagaaaaggcaagtcccttctgcctattagcctgtaaaataaaaataataataataaaagttatttacctccaagatacagtgggggtacaggcat

SEQ ID NO: 570289 - DNA, 510 bp, Homo sapiens
gttattaaaaagagctcaagaaaggggtgaaaatggaaatttatgttttgaagcatcacattaagtgttatgttcatgataaatggaagaaacacctaaatggaacattcagtacaagtaagggttatggattatgagaggaaacgaaaccaccctgattcttctaacacaacaaagagaaagagttgggctggtgtgatatattcaaaggagctgtcaatgcaggactatataaagaataatttgtgaaaatagaaataatattctgcaaaacctargccctcccttccatttcaatctcttttcctaccagttttcttttgattatgcctctgacttactgtttctgcttcttgaacaaacctagtttacccatgcttcagagactttgaaacttatcttccctttgcctgagaggatctttatctttgcatggttggctatttcagttcatgtcttagctcagatgtctctctttccagaaagctttttcaggctatccctcctttt

SEQ ID NO: 570290 - DNA, 610 bp, Homo sapiens
tgattgattttgtattggtatttgacaaaatatgaggctagactagccacttgttttcatagataaagtttaatagggatccactggataagtctatttgtttacctgttttrtatggttgctctgagctccaacaacagttgaattgtagcagaaatttatggccatcaaagcctaaaataattactatctggatcattaggaaaactactgcttatccctgattttgatagtggaatatatgatctaagcctttgcacttaacataaccagttcccaaatgtactgaaatataatctgatatcattgattgtgcactataccagtagaattttaaaaaggtcataaaataaatgaaaagttttatttatttagagatagacaaaacaatttcatgtttgcatttactactgtcattatgtgatttatccttcttaactcctccattccaagggtttgctttttaattttgatgaggggcaacttataaatttttcttatatcagtcctgctttgggatttgtacctaaaatctttgccttacctgaagtaacaaacattttctactatgtttttttcttagaagttttattgtttaaatttagtccta

SEQ ID NO: 570291 - DNA, 610 bp, Homo sapiens
tgattgattttgtattggtatttgacaaaatatgaggctagactagccacttgttttcatagataaagtttaatagggatccactggataagtctatttgtttacctgttttatatggttgctctgagctccaacaacagttgaattgtagcagaaatttatggccatcaaagcctaaaataattactatctggatcattaggaaaactactgcttatccctgattttgatagtggaatatatgatctaagcctttgyacttaacataaccagttcccaaatgtactgaaatataatctgatatcattgattgtgcactataccagtagaattttaaaaaggtcataaaataaatgaaaagttttatttatttagagatagacaaaacaatttcatgtttgcatttactactgtcattatgtgatttatccttcttaactcctccattccaagggtttgctttttaattttgatgaggggcaacttataaatttttcttatatcagtcctgctttgggatttgtacctaaaatctttgccttacctgaagtaacaaacattttctactatgtttttttcttagaagttttattgtttaaatttagtccta

SEQ ID NO: 570292 - DNA, 440 bp, Homo sapiens
cctcaaacaagaaatcaaatataaggrtggagggaggaaataaacaaatgaagcatctgttacttacaagtacatagatctggacttgttttagaatgtgtggaaggaactagaaaagagacagataaggtctgggattcctaaatgtcagtgtttggtgtgagtgagacagaataagaagttatttcttgagaagtgaaagagaaaataaaaatggaaagaaaaaaaagaaagaaagaaaaagggaatttaaaaagttcatccaggaaaagagagagaaaaagacgagaaaacatcatcagtaaaataaacactaaggcaaaaggcagctgaatagttgagcatcccttctgggtgttgtaacctgaatttcgtgcttaataatgattgaaatagtgcaccctatgcggtgccaagcagtctatccactgaaattacca

SEQ ID NO: 570293 - DNA, 567 bp, Homo sapiens
aggtgcctgctaatttttgtagtttttagaagagatggggtttcaccatgttggccaggctggtcttgaactcttaacctcagggtgatccacctgcctcagcctcccaaagtgttgggattacaggcgtgagccaccgtacctggcaataaacagatattttaatattaatgaagcctaatttaactattttgtcctttttgagtgctgctttccatgactaacgtaagaaaccttcacctattgccatgaccagataccttctgtgcttttctctgaagttttataattttagcatttgcatttggatctatgcttcattttgaattaaatttggtgtataaagtcaaatacagtattttttttcgtgtgggtttgagacattccaacaccrttggttgaaaaagcatcctatccccattggattactttgtctcattttaaaagtgtcatatgaatgcatatatatgttagcagaaaaaccaaactctgtaaaatttttaaagagctttattctgagtcaatatgcatgaccaggacctagagaaaacacaaactcaagaagct

SEQ ID NO: 570294 - DNA, 543 bp, Homo sapiens
ggcttctttcacttactaatgattggcttctttcacttaytaaagtattccaataatacaacatcttggaaaaggtaaaacactatggagacaataaaatgttcagtggtggccaggagctaggagtgaggaagggatgaataggatagaggatttttaggacaatggaaatcctctgtgtgttgctataatggtaagtacatgtcattatacgtttatccaaacccatataatgcacctaatgtaaagtgtggacttggggtgatgatgatgtgtcaaggtaggttcatccatgtgataaatgtacaactctggtagtgggtactgaaaatggaaaggctatgcatgtcgggggaaggtagggggcttagaagaactctgtaccttctgctcaattttgtcataaacctaaaactagttttaaaaaataaagtctagggctgggcacattggctcacgcctgtatttctagcactttgggatgccgaggcgggtggatcacctgaggtcaggagttcgagaccagcctggccaacacggtga

SEQ ID NO: 570295 - DNA, 478 bp, Homo sapiens
gtcctccaggaaaaaaatttttttttaactcatcttatgaaatagtaaaaatcatccaggatggaaaagctccaccccagttttttcctacgttgaccrggtatactcatattcgtaagtatttttaaagttatgttaaaatatccatactacccaaaagcaacctacggattcaatgcaacattcttcacagaaacagaaaaaaaaaaaaccctaaaatttatatggaaccacaaaagacccaaatagccaaggccatcctgaccaaaaggacaaaacagaggaatcacattactggcttcaaattatactacagagttattgtaaccaaaacagcatggtactggcataaaaacagacacattaaccaatggaacagaatagagaacccagaaataaattcatacatctacagtgaactcactgttcaacaaaggtgccaagaacatgcattggggaaaggacagtctcttcaata

SEQ ID NO: 570296 - DNA, 478 bp, Homo sapiens
gtcctccaggaaaaaaatttttttttaactcatcttatgaaatagtaaaaatcatccaggatggaaaagctccaccccagttttttcctacgttgaccaggtatactcatattcgtaagtatttttaaagttatgttaaaatatccatactacccaaaagcaacctacrgattcaatgcaacattcttcacagaaacagaaaaaaaaaaaaccctaaaatttatatggaaccacaaaagacccaaatagccaaggccatcctgaccaaaaggacaaaacagaggaatcacattactggcttcaaattatactacagagttattgtaaccaaaacagcatggtactggcataaaaacagacacattaaccaatggaacagaatagagaacccagaaataaattcatacatctacagtgaactcactgttcaacaaaggtgccaagaacatgcattggggaaaggacagtctcttcaata

SEQ ID NO: 570297 - DNA, 574 bp, Homo sapiens
gggagaatgtgatgagtaagaacagaataaatktttatgtctttctaaaataaatatttatatgtctttctaaaataaatatttataaccatggttaatattaataatggagaaataaatcatgctctgcctcattgatgtctttatcatgcctccttaggtgtgtatcgctgcttattccaacatttggtcattgccaacatttttaggttgacttgatttacagcatcttccgtaattaaataatttctgtactctagccaagcattataagatttatctcatgcctacctggactctaaatttattctggaaattagctggcatgaatttattttctctattctcatttgataatttttcagatacatcaactgttttgccaatattttattaagatatatccactcttttttcctttggattttcatgaatttgatggcttttctgcaaagttttctagaaccatattttattctaaaaacattgtaactatagctcatctggaagaaaactcagagttaattattcataaatttgaatgttgcttctattgaccttgtaaatgattata

SEQ ID NO: 570298 - DNA, 574 bp, Homo sapiens
gggagaatgtgatgagtaagaacagaataaatgtttatgtctttctaaaataaatatttatatgtctttctaaaataaatatttataaccatggttaatattaataatggagaaataaatcatgctctgcctcattgatgtctttatcatgcctccttaggtgtgtatcgctgcttattccaacatttggtcattgccaacatttttaggttgacttgatttacagcatcttcygtaattaaataatttctgtactctagccaagcattataagatttatctcatgcctacctggactctaaatttattctggaaattagctggcatgaatttattttctctattctcatttgataatttttcagatacatcaactgttttgccaatattttattaagatatatccactcttttttcctttggattttcatgaatttgatggcttttctgcaaagttttctagaaccatattttattctaaaaacattgtaactatagctcatctggaagaaaactcagagttaattattcataaatttgaatgttgcttctattgaccttgtaaatgattata

SEQ ID NO: 570299 - DNA, 574 bp, Homo sapiens
gggagaatgtgatgagtaagaacagaataaatgtttatgtctttctaaaataaatatttatatgtctttctaaaataaatatttataaccatggttaatattaataatggagaaataaatcatgctctgcctcattgatgtctttatcatgcctccttaggtgtgtatcgctgcttattccaacatttggtcattgccaacatttttaggttgacttgatttacagcatcttccgtaattaaataatttctgtactctagccaagcattataagatttatctcatgcctacctggactctaaatttattctggaaattagctggcatgaatttattttctctattctcatttgataatttttcagatacatcaactgttttgccartattttattaagatatatccactcttttttcctttggattttcatgaatttgatggcttttctgcaaagttttctagaaccatattttattctaaaaacattgtaactatagctcatctggaagaaaactcagagttaattattcataaatttgaatgttgcttctattgaccttgtaaatgattata

SEQ ID NO: 570300 - DNA, 574 bp, Homo sapiens
gggagaatgtgatgagtaagaacagaataaatgtttatgtctttctaaaataaatatttatatgtctttctaaaataaatatttataaccatggttaatattaataatggagaaataaatcatgctctgcctcattgatgtctttatcatgcctccttaggtgtgtatcgctgcttattccaacatttggtcattgccaacatttttaggttgacttgatttacagcatcttccgtaattaaataatttctgtactctagccaagcattataagatttatctcatgcctacctggactctaaatttattctggaaattagctggcatgaatttattttctctattctcatttgataatttttcagatacatcaactgttttgccaatattttattaagatatatccactcttttttcctttggattttcatgaatytgatggcttttctgcaaagttttctagaaccatattttattctaaaaacattgtaactatagctcatctggaagaaaactcagagttaattattcataaatttgaatgttgcttctattgaccttgtaaatgattata

SEQ ID NO: 570301 - DNA, 520 bp, Homo sapiens
tcacatgcatcatttctattcctaaaatcacatggcacagcaggtattagttccctcagtttttaggcctacgtaggcaacatttctcctttgttcacaagtttttccccccaccattggtttctactaagaacaatgactaacctagaatattaaaggttatttgttttttcataatcaaaaagatataaaccttaactttctggaagagatttttctgtrtcagcatttgcttccatttttgtgatatataaatccacataatcaaggtatatatcatttcttgcatatgttacggaaaaaatataaagaaagcaggcactcttttagaaaatatgatgtgtgtgtgtgtgtgtgtgtgtgtgtgtgtgtgtattattttaggagatatcatgtgcatgcaaacaggtatacctgtaagtattttgctttactactaatcatttttttaaaaatgtggggcctaattgaattagcaaaatacatatttaaaatatttgagaagcaacattcagaagtc

SEQ ID NO: 570302 - DNA, 520 bp, Homo sapiens
tcacatgcatcatttctattcctaaaatcacatggcacagcaggtattagttccctcagtttttaggcctacgtaggcaacatttctcctttgttcacaagtttttccccccaccattggtttctactaagaacaatgactaacctagaatattaaaggttatttgttttttcataatcaaaaagatataaaccttaactttctggaagagatttttctgtatcagcatttgcttccatttttgtgatatataaatccacataatcaaggtatatatcatttcttgcatatgttacggaaaaaatataaagaaagcaggcactcttttagaaaatatgatgtgtgtgtgtgtgtgtgtgtgtgtgtgtgtgtgtattattttaggagatatcatgtgcmtgcaaacaggtatacctgtaagtattttgctttactactaatcatttttttaaaaatgtggggcctaattgaattagcaaaatacatatttaaaatatttgagaagcaacattcagaagtc

SEQ ID NO: 570303 - DNA, 510 bp, Homo sapiens
ttagttctaactcatgtactgattcaaggtcaatttttattgactgcctttatggtaattatggcttaatgtttcctttcatatctaatatttttgcacattcaaatatactttcaaccagtcattaatgaattgtagatttaagaaacttttgattcaatttttttttctggagagtggtgatttttcatctrcctgatagttaccttgactgtcaccttctctgtggtgggtagcagctaaaatcttttctcagttgttttcaaggttttggtcttctggcttttcctttttctcttagaatctggtattctctcctacctatgtgtgacttttcccacatgagcagctttggaaatgcctaactttgttactaataaacaacatgactgctttttgctggatttccattttgtctatagtgtgtaaatcggcatttgtctttaggcaaaaaaatcatataaatgtaaatcttccatagtatacttccattcttttaaggatttattc

SEQ ID NO: 570304 - DNA, 510 bp, Homo sapiens
ttagttctaactcatgtactgattcaaggtcaatttttattgactgcctttatggtaattatggcttaatgtttcctttcatatctaatatttttgcacattcaaatatactttcaaccagtcattaatgaattgtagatttaagaaacttttgattcaatttttttttctggagagtggtgatttttcatctgcctgatagttaccttgactgtcaccttctctgtggtgggtagcagctaaaatcttttctcagttgttttcaaggttttggtcttctggcttttcctttttctcttagaatctggtattctctccyacctatgtgtgacttttcccacatgagcagctttggaaatgcctaactttgttactaataaacaacatgactgctttttgctggatttccattttgtctatagtgtgtaaatcggcatttgtctttaggcaaaaaaatcatataaatgtaaatcttccatagtatacttccattcttttaaggatttattc

SEQ ID NO: 570305 - DNA, 534 bp, Homo sapiens
tacacctggctaatttgggtttcaccmtgttggtcaggctggtctcaaactcctgatctcaaatgattcactcacctcagcctaccaaagtgctgggattacaggcgtgagccactgcacccagccccagctaatttttaaatttcttgtagggacagagtgagaccttgtctcaacaacaacaatacaatgacttaaaaaacacacagtataacaactatttacatagcatttacgttatattagatactataagcaatctagagatgatttaaagtatccaggacgttgcgcacaagttttgtgcaaatactacgccatttttaataaggaacttgagcagtcctggattttggtacctgagggggagcgtagaacccatccccaatggatatggagggatgacagtgacagcaacagggggcagcctaggcagacaggggcaggtccccggtgaaaccccacctaaagccaaaaacagcctgaaggctgaaagattggactgctggtcctggatgaaactgcaacccagaa

SEQ ID NO: 570306 - DNA, 606 bp, Homo sapiens
ttgcttgtaacctccaagccatccttgtttattcctgggtataggttgaactaactttgggaataacttagtttatagtttaaaacaaagacaataacagccctttcccaaaacaaaccctcttcttgccttggggatagactgcctttgtatgactaacaaattagctaaaagattaaaaattacagtttaggagtcatgcagcaggaggctacaagattctgaccttctcctggggataacatctttattgtaagactaagatcagtgcttgagatattttgcagaccttgcacttgatggatcagctggcaccacccagatcgataaactggctcatccaatgttgtggcggtcacacaggaagtgactcagcgaaagtggacagcgtctaatttctataatttcatctctgacctgaccaatcagcactccygacttactgcccccaccacccgacccaccaaatgaaccttaaaaactctgatcccccagtgctcgaggagaccgatttgagtaataataggatttgagtaacaacagccggctgtgcatgaattactttctctattgcaaatctcctctgtctctgcagcaggcaaggtg

SEQ ID NO: 570307 - DNA, 556 bp, Homo sapiens
ctctgaaccaccgtttccctttttgttccctttaaataaagaacagctcctctcctattccgcgcaccccacccaccctgtccaacctccttcctttttcattgtctggttgctttgtgtacaacgtcccagcgatgaaacaccckccagccgcttcccttttcaaccttgccagttcctgcagaaaccaagatgaaagtttcaaaatcctgacctacaccagaacgttttgtttagaaaattgacagctaattaaactgcttctgtcactgcaattcatgtctgctttaactgcaccccgctcaattgctaacacaaacttgatgctggttattgagttttctcaattaactatttcacccaatcaatggccttcaaatattagcctctgcttttgaaactttggaagtagaagccagcgaattaattctcagtagtagaaagaaatcaaaactgaagttgaccccttctgccgatttaaaagggctggagctctgctgacactggaattcgcagataactgactctggcataacacaattttttgcatttagcg

SEQ ID NO: 570308 - DNA, 621 bp, Homo sapiens
tggctcatacctataatcccagcacttcgataggccaaggcaaaaggatcacttgagcccaggagttcgagacaagcctgggcaatagagcgagacctcgtctttactaaaacttctaaaaattagcctggcgtggtggtgtacacctgtggtcccagccactggggagcctaaggcaggaggatcatttgagcccaggagtttgaggcttcagtgagccttggtgacaaagtgagatcctgtctcaaaaaatataaataaataaaaaattttaaattagctttatattgttttatatttaaatcacaaagttctcacaaggatggaggttgttttctctttaatggaaaacaaagcttattttgaggatttattcattcatcaaacattaacttggaattgataactagcatagtgttgggagtgtggtgggggaggggttrcagaaagcagaagacagtttccactttcaagtttatgatctacttagagaacaaagtatatacataaaatcactcataggaaattttgatcaccaccataagacagggggagaaaagcaaaataagataaataaaaaagaaaaaagattttaaagaaaattttgaggccagacatggt

SEQ ID NO: 570309 - DNA, 515 bp, Homo sapiens
gcgcctggccttagtttccttyatctcttaaccatttaaagctgacctgtttatctgattaactggttgtcacattaggagtaagaaaaatttgaattaatggcatctatatttcaggctggaatagtgagacaagaatatcaacaacaatacaatctgaacgaccaggggccatttttagggtgtgagctgaggagggcagggtttgggtgttgagttgcaagaaggagagtgcctggtggcggtgcaccaaagaagctggagtggcacaggagctttatgtagtgaaatgtattccccaaggctgctccttctctaacgccttttaggctaagaacgtttgggttggaagcaatgtacattattaggatggtgcaagtcactgtggtctaagatattaaatatttttttcctctaaggattcattactttttttgagctaatcacaacattacatttttagtactgtgacctttaaatgcatatcttatgatgaattataaatttgcattaaa

SEQ ID NO: 570310 - DNA, 576 bp, Homo sapiens
cgtgcgtttgtatattctgacagcagaagaattccctgtccccattattgattagggaggcaagaacataaaaatggtaaaatagaaatttaaacatgattaacaaacttatttcatataaatataattgtaattttttgttttttaataattgtagtcttaatttaggaaatatacatattttagagttatatgaactattataaaaatctatgttgtattagttcataagactagttgctacacaatacatagaatcagcaaaatcctagctatgttgtcaaaccataaaataaataattaatatttagcaacaaagaggaaaataccaacaacacgttagaaattaaagctacatgtacactaaacaatttatggtttaagaataactaacgttatagattyatcgggtattttaaactaaatgataccatgggtactatattttaaaatgttcaacagagtaatttagaaaaagtaaaacgcaattatccaaattaataaaggagatcataaagataataaaataggtatatgaaaaataaaaatattaatgtgaaaattttgtcctctgaa

SEQ ID NO: 570311 - DNA, 370 bp, Homo sapiens
tttcttttttaacagatttagcactgataggactgcttgccttaggcwgcactaccagtaattgaatctgcatgctgaagtggtaaaccctaagaatttttagaggaaggaaacatgacatataaaatgaagtaaaggcaggctgatggagaagggaaaattcagtgttgggcaacttcctgactccagtgtgtgaattgtggaataatcgaacattatagcatgtactgaacattaattctgtcaaagtttccagggtaaagaataaaacttgtagtctactcatctctctcatctccaatttatgtttgttacataatcattgccattattatcctcattcatgggtcaattttattatatagttgga

SEQ ID NO: 570312 - DNA, 370 bp, Homo sapiens
tttcttttttaacagatttagcactgataggactgcttgccttaggctgcactaccagtaattgaatctgcatgctgaagtggtaaaccctaagaatttttagaggaaggaaacmtgacatataaaatgaagtaaaggcaggctgatggagaagggaaaattcagtgttgggcaacttcctgactccagtgtgtgaattgtggaataatcgaacattatagcatgtactgaacattaattctgtcaaagtttccagggtaaagaataaaacttgtagtctactcatctctctcatctccaatttatgtttgttacataatcattgccattattatcctcattcatgggtcaattttattatatagttgga

SEQ ID NO: 570313 - DNA, 370 bp, Homo sapiens
tttcttttttaacagatttagcactgataggactgcttgccttaggctgcactaccagtaattgaatctgcatgctgaagtggtaaaccctaagaatttttagaggaaggaaacatgacatataaaatgragtaaaggcaggctgatggagaagggaaaattcagtgttgggcaacttcctgactccagtgtgtgaattgtggaataatcgaacattatagcatgtactgaacattaattctgtcaaagtttccagggtaaagaataaaacttgtagtctactcatctctctcatctccaatttatgtttgttacataatcattgccattattatcctcattcatgggtcaattttattatatagttgga

SEQ ID NO: 570314 - DNA, 370 bp, Homo sapiens
tttcttttttaacagatttagcactgataggactgcttgccttaggctgcactaccagtaattgaatctgcatgctgaagtggtaaaccctaagaatttttagaggaaggaaacatgacatataaaatgaagtaaaggcaggctgatggagaagggaaaattcagtgttgggcaacttcctgactccagtgtgtgaattgtggaataatcgaacattatagcatgtactgaacattaattctgtcaaagtttccagrgtaaagaataaaacttgtagtctactcatctctctcatctccaatttatgtttgttacataatcattgccattattatcctcattcatgggtcaattttattatatagttgga

SEQ ID NO: 570315 - DNA, 540 bp, Homo sapiens
agaaaagaaaatgttaagaaaattgtaaggaagagagaatatatttactattcattaatcggaagtggatcgtcataaagtcctgtatcttcatcttcatgttgcaaaagctgagaaggaaggagaaaaggaggggttggtcttgctgtctcaggggtggccaaggcagaaggaaatctgtgtacaagtggaactgtgcaattcaaacccatggtgttcaaggctcaactgtaatatggccctttagaatgaatgtcaagaacacatatcagagagaacggggtttggaatatgtccaacactataagtctcccttgagagcagataaaaaataaaggagctagaataggcttagacctcggcaagagggattgctaacctgaacccagtactttccaggaaasctacatatcataaactcagccttacaacaatgcgtaaaagagcatgtgggtcatcaaaattttaaagttatctttatcataaaatagaatttaaaaaatgaaaaggcatgtcagagtaagagaaagtatgcattac

SEQ ID NO: 570316 - DNA, 623 bp, Homo sapiens
agccagagaagtaacagggaagctacaggttacaacagatttgtgaactcagccaagcacagtggtggcagggcctagctgctacaaagaagacatgttttagacaaatactcatgtgtatgggcaaaaaactcgaggactgtatttgtgactaattgtataacaggttattttagtttctgttctgtggaaagtgtaaagcattccaacaaagsgttttaatgtagatttttttttgcacccatgctgttgattgctaaatgtaatagtctgatcgtgacactgaataaatgtctttttttttaatgtgctgtgtaaagttagtctactctgaagccatcttggtaaatttccccaacagtgtgaagttagaattccttcagggtgatgccaggttctatttggaatttatatacaacctgcttgggtgaagaagccattgtcttcggaaaccttggtgtagttgaactgatagttactgttgtgacctgaagttcaccattaaaagggattatccaagcaaaatcatggaattattggttataaaagtgattgttggtacatcctatgcaatatatctaaattgaataatggtaccagataaaattatagatgggaatgaa

SEQ ID NO: 570317 - DNA, 594 bp, Homo sapiens
taattattcaatagttaagaggcacaggtgaagcaaggttttcaggccccccaaggtgattccccacacctttcttytctcactggatacactctagttcaagtcaacagatgagttataaagatatctcagctagaaaggaggagtattttacaactcaaaatttcatactcatatagttgcgcagcttttgtaacatttttcaagaagtcattatcaatacatttatatattccagacttttttctcccttaaacaatttctgaaagccaggtacattctgctaaaacactactgaaaaaaaaaataaatctgctataaataaaataaaataagcatatttaaaaggaggttagactggatcactttccttcttttgtttctaggagtagtccccactacaatccttctccaggtaataggtataaataaagactcgttactttaaccctttatttcatgacactgttcatacttttattcaattaagatatgtttgggatatgtttatcatcagaacatacataagtaacactttttaaaatggctagtttgccaattatatatgaaaatattactctttaatatattcta

SEQ ID NO: 570318 - DNA, 508 bp, Homo sapiens
taaaatatgttttatctatggaatattttgaaccaaaggaggacgtcccaaccaaaaaacatatagaaagtattcccatatttttttaaaaatgagggcacaaaataagcattaattagaagaatatttccaatatgcaggctgatagtttttaaaattttcacctcaattcaacttcaataaatagaaaaagaactttcaatgacaattgaaattgaaattagaagactttgtaaggcaagatataaaataatttaattataagtagtgtagattagcaagacttgactatatcaaagacaaagaaagttttaaaccccagactataagagaaaatacatacttgtgccacagtttaaaatgtagctaacaagataaagcacatctaaaattaatggcaaaatgtcacttaaaatcatattttaaatatggcagttctatgatcattcttattgtagctttggagtccccarttttgcattttcccaagcaattttaatgtgaacat

SEQ ID NO: 570319 - DNA, 196 bp, Homo sapiens
ccatcaccctggaagtggagcccagtgacaccatcgaaaatgtgaaggccaagatccaagataaagaaggcatcccccccgaccagcagaggctcatctttgcaggcaagcagctggaagatggccgcagtctttctgactacaacatccagaargagtcgaccctgcatctggtcctgcgtctgagaggtggtat

SEQ ID NO: 570320 - DNA, 536 bp, Homo sapiens
ctttgcaatgtgtaatttcacctcacagagttaaacctttcttttgattcagcaggttaaaaacactctttttggctgggcatggtggctcatgcctgtaatcccagcactctgggaggccgaggctggtggatcacgaagtcaagagatcaagaccatcctggccaacatggtgaaaaccctgtctctactaaatatacaaaaaattagccaggtgtggtggcaggcatctgtagtcccagctactcagkaggctgaggcaggagaatggcatgaacccgggaggtggagcttgcagtgagccaagatcacaccactgcactccagcctgggcaaaaaagagcgagactcattctcaaaaatgaaacaaaacaaaacaaaacaaacaaacaaacaaacaaaaaaacactctttttgtagaatatatgataggacatttcagagcaaactgaggcatatagtgataaaccaaatatactgtgataaaaactagaaacaaggtatctgtaaaaatgctttgtgatgtgtagattcat

SEQ ID NO: 570321 - DNA, 558 bp, Homo sapiens
aacactctttttgtagaatatacaaagggacattttggagcccatggaagagtatattgagacaccaaatatcctgcaataaaaactcaagcaaaatatctgttaaaatgctttgcattgtgtgaatttgtctcacagacttaaacaattattttaattcagcaggttggaaatactctttttgcagaatctactaagggccatttcaaagcccattgaggcctacaatgaaagacaaattataccataataaaaactagaaacaagctatctatgaaaatgctttgtgatgtgtagattaatctcamagaattaaatctttgttataattcagtaggttggaaaatctcttttagtacaatctatgaagaaacatttcaaagcccattgaagcctgtagtgaaaaacaaaatatctggagatataaactagaaacaagctacctgtgaaaatgctttgggatgtgtggattcatttcacagagttaaatctttgttttgattaagcaggttggaaacagtctgtttttggatctacaagaagactttttggtgtgct

SEQ ID NO: 570322 - DNA, 243 bp, Homo sapiens
gggacagaatgaagtgtcatccttaactggccatmcaatgtcatcagcatgaacaggaggactttataggatattatctgatgttttctgaatattaccttacaaatgctgctttatttataacttaagaatagggaccctgtcttttaaagctttatacatcctcaagtaaaggtttttcatattaaatccattaataatatctaaaggccaacctggaaattccatttctaggtatttatc

SEQ ID NO: 570323 - DNA, 243 bp, Homo sapiens
gggacagaatgaagtgtcatccttaactggccatacaatgtcatcagcawgaacaggaggactttataggatattatctgatgttttctgaatattaccttacaaatgctgctttatttataacttaagaatagggaccctgtcttttaaagctttatacatcctcaagtaaaggtttttcatattaaatccattaataatatctaaaggccaacctggaaattccatttctaggtatttatc

SEQ ID NO: 570324 - DNA, 243 bp, Homo sapiens
gggacagaatgaagtgtcatccttaactggccatacaatgtcatcagcatgaacaggaggactttataggatattatctgatgttttctgaatattaccttacaaatgctgctttayttataacttaagaatagggaccctgtcttttaaagctttatacatcctcaagtaaaggtttttcatattaaatccattaataatatctaaaggccaacctggaaattccatttctaggtatttatc

SEQ ID NO: 570325 - DNA, 243 bp, Homo sapiens
gggacagaatgaagtgtcatccttaactggccatacaatgtcatcagcatgaacaggaggactttataggatattatctgatgttttctgaatattaccttacaaatgctgctttatttataacttaagaatagggaccctgtcttttaaagctttatacatcctcaagtaaaggtttttcatattaaatccattaataatatctaaaggccracctggaaattccatttctaggtatttatc

SEQ ID NO: 570326 - DNA, 376 bp, Homo sapiens
acatggtgaaaccccatctctactaaataaaaaaaattagctgggtgtggtggcacatgcctctaatcccagctacttgggaggctgaggcaggagaatcacttgaacttgggaggcggaggttgcagtgagctgagatcatgccattgcacwccagcctgggcaacaagagcgaaactctgtccccccccccaaaaaaaaagaaagaaagaaaaatcactgccccatcaactttttcacataggatgattaaggattccagagcccatgctacctctaggggctcctacccctgccacaccacacatatatcttgacagggcctgttacagagaagaaaaggcccagtaaattaatatcacaatcatcaccacat

SEQ ID NO: 570327 - DNA, 601 bp, Homo sapiens
gatctgcctgccttaggcttccaaagtgctgcagttacaggcatgagccactgyacctggcctatagatacactttcagagaaaaaaagagattattttggtatgagatgatgaatcaaaggattctttgtaaaaagtttagaatttgataacagcagacacatatcagatgaaaaaatattttatgtgcaagggatattgtgagttaaatcagtggggtgggaagaatttaacgtgtggcttttaacgtaagaataataaacaatttgtaagtattttatataatccagcatactctgtatgaaatggagaaaactttttctatcaaaatgctgtaagaggaaaaatattagagcaactattttcactaatatgcttaatcacataatattaaaaattttggaagaaagtttccatcctacatttccattaaaactaaaataataaatttcaatgaaaataattcctacttgagttttgcaaaggagaaacttgagtcttattactataattttcatcattttaatatacaattttaatggttttttaaataaactttcttcaccagatactaaatattttatcttacttttttctcatt

SEQ ID NO: 570328 - DNA, 591 bp, Homo sapiens
tgtaagtgatgctggtcctttaagattttaagtttcttttaagttttcaaactttaagtgtcttttaaattttcaaattaagttaagacacttaaggtgtcttttaagttttcaaacttgacatagttttaatgtaaaacacttttctggtgctatatttcttcgaatattggtaatctgttacttagctggaatatttggtcggttggattaccacacctttaaccatctatatataactttcttgatttttttttttttttgagattgagtcttttgctgtttcccaggctggagtgcaatagtgtgatcatagctcactgcagcctcaaacttctgggttcaagtggtcctcttacttcagcctcctaagtcgctgagactgctacaagcatatgccaccacaccaagctaacttttttattttttattttttagagacaagggtctctctctgttgcccaggccagtctcaaacttttggcttcaagtgatcctcctgcctcagcctcccaaagtgctggaattatagtcatgagccatcgtgctggtccataacttcctttatyccccaaaatgagtttaaagtcc

SEQ ID NO: 570329 - DNA, 588 bp, Homo sapiens
agaacgagaactaacaagacccctgatgtagccattattattaggtatctgggcttaattctctgggaagctatgwggaacatgcctcagaattacatcactgaatccagggagattcttcttagttaccctcaccttttcttcccacttcatgcccagtaacaagctcccgtgctgctagagaaagtcctcagctagaaacaggtgcaagttctggagatgagaccttgtagagtgttaagattccttttcttcccagcagctacaagtaaggaataggggctgggctattaatacatctgctacaaatcaatataccccttatgctccttttggtgatcgacaatgtatttaaaaatattagatgatcaagaagggctgcagaaaggaggaaacagaaacaaacagcacacctcttggtttatttttattcatttcatcagtttcaaggaaaatgtgttgggagttcctggcatagagaatgtcacaaagacatgttttccatagtggtgctatccctagggcagagaagacccagagaaagcccaagtggctgctggaacaaagtcagacaccgtgccacctgtc

SEQ ID NO: 570330 - DNA, 588 bp, Homo sapiens
agaacgagaactaacaagacccctgatgtagccattattattaggtatctgggcttaattctctgggaagctatgaggaacatgcctcagaattacatcactgaatccagggagattcttcttagttaccctcaccttttcttcccacttcatgcccagtaacaagctcccgtgctgctagagaaagtcctcagctagaaacaggtgcaagttctggagatgagaccttgtagagtgttaagattccttttcttcccagcagctacaagtaaggaataggggctgggctattaatacatctgctacaaatcaatataccccttatgctccttttggtgatcracaatgtatttaaaaatattagatgatcaagaagggctgcagaaaggaggaaacagaaacaaacagcacacctcttggtttatttttattcatttcatcagtttcaaggaaaatgtgttgggagttcctggcatagagaatgtcacaaagacatgttttccatagtggtgctatccctagggcagagaagacccagagaaagcccaagtggctgctggaacaaagtcagacaccgtgccacctgtc

SEQ ID NO: 570331 - DNA, 229 bp, Homo sapiens
cgtgccacctgtccacactcmttggctctgccatcatgctgaagatcggttgaaaggactggcttccctccccccaaaattaaaagagcacaaactgagaaactgaatgtgggagacagcagtggattatgctgttctcaggggtcacctcaggtttggaagcattctttcaaattaacccatctcaggccatctgcagagaagaaaggtggcacctaactttttttct

SEQ ID NO: 570332 - DNA, 229 bp, Homo sapiens
cgtgccacctgtccacactcattggctctgccatcatgctgaagatcggttkaaaggactggcttccctccccccaaaattaaaagagcacaaactgagaaactgaatgtgggagacagcagtggattatgctgttctcaggggtcacctcaggtttggaagcattctttcaaattaacccatctcaggccatctgcagagaagaaaggtggcacctaactttttttct

SEQ ID NO: 570333 - DNA, 531 bp, Homo sapiens
tgtagtacaaaggtttgtaacctaggagagagaggctataccatataacctagacgtggtaggctgtacaatctaggtgtttgtaatattctctgtgatgtttgcaaaatgaagaaattgcctatggatgcatctcttagaacgtatccctatcattcagtgatgtgtgactgtactaaaatgctcaatgtaagtttcaatgccctccataaaattgttgtactgtgaaatacaaatctctcacccatggcctgaatatgtttgcaaactaagcagatcatgggaaggagaatgtgctggcatcgctgggatgattttctcacactacatgaataatatctccagacttcgcraatatgagccacttgcatagagttaaagtaggcatctctttgctgggaaatttatcaaatggcagtatgaagtgtttttaaaagatacttgtttgtttgtagctggtaggcctacagtggctcatggcaatggatgaggttgctaagatttggtggaaggaggtaaaatgaaatggcc

SEQ ID NO: 570334 - DNA, 171 bp, Homo sapiens
atagaaaattttaaggaatccactgaaygatagaactagtaaattatttcagcaatattacagcatacaagataaatatacaaaaatcaattgcacacatctacaatgaaaaccccaaaatgaaattaagaaaacacttcaatttacaatagcatcaaaaaaagaaataat

SEQ ID NO: 570335 - DNA, 171 bp, Homo sapiens
atagaaaattttaaggaatccactgaatgatagaactagtaaattatttcagcaatattacagcatacaagataaatatacaaaaatcaattgcacacatctacaatgaaaaccccaaaatgaaattaagaaaacacttcaatttamaatagcatcaaaaaaagaaataat

SEQ ID NO: 570336 - DNA, 580 bp, Homo sapiens
attataggcgtgagccaccgcgcttggtgaaacagttgtttttaaattgctctgaaaaaatatgtggtctctcattctcatgtatgagagcaaactgatataaggtatgrctattaaaaaggaagtatggaaactatctgtcagttgagtcattctttaactttcagtgaggacagagaccacattttctaatgagattcctttgctttaatgactttttcagtgtctccccaaggagcatacaaaattttgtcaattcttcaaaatgatctacaaattgataaacctcatgaataattgcaattgtagttaaattcaacttccttttgattgtgtacaataaattttttgcatacatctttaaaattttttcccttaatttagcagcagactttgaggataggaaacatattatagctgaccttttttaactgatcattgcccttttcctcagagttcctactgactcaactctgtgctaggtgtctgctctctctgcccttgtcaagcctctaatagtcaaacatctgaaattcctcttttccagtgaagatgctgcagagtacttggaagagaaaag

SEQ ID NO: 570337 - DNA, 580 bp, Homo sapiens
attataggcgtgagccaccgcgcttggtgaaacagttgtttttaaattgctctgaaaaaatatgtggtctctcattctcatgtatgagagcaaactgatataaggtatggctattaaaaaggaagtatggaaactatctgtcagttgagtcattctttaactttcagtgaggacagagaccacattttctaatgagattcctttgctttaatgactttttcagtgtctccccaaggagcatacaaaattttgtcaattcttcaaaatgatstacaaattgataaacctcatgaataattgcaattgtagttaaattcaacttccttttgattgtgtacaataaattttttgcatacatctttaaaattttttcccttaatttagcagcagactttgaggataggaaacatattatagctgaccttttttaactgatcattgcccttttcctcagagttcctactgactcaactctgtgctaggtgtctgctctctctgcccttgtcaagcctctaatagtcaaacatctgaaattcctcttttccagtgaagatgctgcagagtacttggaagagaaaag

SEQ ID NO: 570338 - DNA, 580 bp, Homo sapiens
attataggcgtgagccaccgcgcttggtgaaacagttgtttttaaattgctctgaaaaaatatgtggtctctcattctcatgtatgagagcaaactgatataaggtatggctattaaaaaggaagtatggaaactatctgtcagttgagtcattctttaactttcagtgaggacagagaccacattttctaatgagattcctttgctttaatgactttttcagtgtctccccaaggagcatacaaaattttgtcaattcttcaaaatgatctacaaattgataaacctcatgaataattgcaattgtagttaaattmaacttccttttgattgtgtacaataaattttttgcatacatctttaaaattttttcccttaatttagcagcagactttgaggataggaaacatattatagctgaccttttttaactgatcattgcccttttcctcagagttcctactgactcaactctgtgctaggtgtctgctctctctgcccttgtcaagcctctaatagtcaaacatctgaaattcctcttttccagtgaagatgctgcagagtacttggaagagaaaag

SEQ ID NO: 570339 - DNA, 580 bp, Homo sapiens
attataggcgtgagccaccgcgcttggtgaaacagttgtttttaaattgctctgaaaaaatatgtggtctctcattctcatgtatgagagcaaactgatataaggtatggctattaaaaaggaagtatggaaactatctgtcagttgagtcattctttaactttcagtgaggacagagaccacattttctaatgagattcctttgctttaatgactttttcagtgtctccccaaggagcatacaaaattttgtcaattcttcaaaatgatctacaaattgataaacctcatgaataattgcaattgtagttaaattcaacttccttttgattgygtacaataaattttttgcatacatctttaaaattttttcccttaatttagcagcagactttgaggataggaaacatattatagctgaccttttttaactgatcattgcccttttcctcagagttcctactgactcaactctgtgctaggtgtctgctctctctgcccttgtcaagcctctaatagtcaaacatctgaaattcctcttttccagtgaagatgctgcagagtacttggaagagaaaag

SEQ ID NO: 570340 - DNA, 500 bp, Homo sapiens
agatctggaattaaatcctgccttgcctccttatgagtctgagtaattacttacccagtctgagcctgtttgcttatttttaaaaggatcagtcattttttagtgagagttaaacgagatcgcttgtgtaaagcctctgtattcaatgaatgtccacctgtctgcttccctattttagaaatagtagattgactcacaaacactgagttgcccaaagacttgctcccggaagtgctggcattgaaatttgaacccaggtgtagagaaagtcccatgctcttctcactaaattgcactaattctagctgctgcagggttgygtctttctaaggacataattcctagttataccagctacatcccagagaacttggataagcagctctggagcagaggtggaatatgtagccctttgacccggccatataccaccaaaatataaacatcaatgcagaaattaatgccatctcctctttctgactctacaaatatttattagc

SEQ ID NO: 570341 - DNA, 321 bp, Homo sapiens
gtatgtatgcattttggtatatttcttgtgatgattgatattttatctcattttagaggcagattgtatagaataaattgaaatttgcytagtgatggtggaaagctttgcatctcttttaggggtgattagctatgcttacaataaaactgtgcatatatatatttggaacatccttataataaaaaaataagcaacctacatgtccaacaataaaatagtgtttatatgaattatggcataccatagaatattatgctgtgattaaacatggtattcccaaaatataaaatgaaaaaatgaggacataagactgtttaa

SEQ ID NO: 570342 - DNA, 321 bp, Homo sapiens
gtatgtatgcattttggtatatttcttgtgatgattgatattttatctcattttagaggcagattgtatagaataaattgaaatttgcctagtgatggyggaaagctttgcatctcttttaggggtgattagctatgcttacaataaaactgtgcatatatatatttggaacatccttataataaaaaaataagcaacctacatgtccaacaataaaatagtgtttatatgaattatggcataccatagaatattatgctgtgattaaacatggtattcccaaaatataaaatgaaaaaatgaggacataagactgtttaa

SEQ ID NO: 570343 - DNA, 321 bp, Homo sapiens
gtatgtatgcattttggtatatttcttgtgatgattgatattttatctcattttagaggcagattgtatagaataaattgaaatttgcctagtgatggtggaaagctttgcatctcttttaggggtgattagctatgcttacaataaaactgtgcatatatatatttggaacatccttataataaaaaaataagcaacctacatgtccaacaataaaatagtgtttatatgaattatggcataccatagaatattatgctgtgattaaacatggtattyccaaaatataaaatgaaaaaatgaggacataagactgtttaa

SEQ ID NO: 570344 - DNA, 506 bp, Homo sapiens
tttatatgaattatggcataccatagaatattatgctgtgattaaacatggtattcccaaaatataaaatgaaaaaatgaggacataagactgtttaatatgtatctggctgggtgcagcagctcatgcctgtaatcccagcaatttgggaggctaggcaggaggactgcttgagcccaaaagttggagaccagcctgggcaacatggcagaaccttaccaaaataatacaaaaattagccaggtgtgctggctcgtgcctgtggtcccagttactcgagaggctgaggtggaaggaccccttgagcccaggaggcagaggtgcattgagagccatgttcatgccactgcactccagcctgggtgacagagtgagaccctgtctcaaaaaaacaaaaaacaaaaactgtrtaatataaatctaactctgtaaagtttttaaaaatgtacttatgtaaatagagaaaacaactaagtaaagatattgaaatgttgacggtaattagt

SEQ ID NO: 570345 - DNA, 416 bp, Homo sapiens
ggtaattagtgatgggattataggtgacttttattttttaaacagtctttcatagatttttccaaaatgtctataaattaacaaatattatttttctataattaaaaaatactttaaaayacagtttctttaatggtggagtttaaatgatatccaaaatagacctgcccagttttattttggagcaaataaatttgacaattagaacaattgcaatgtatgtttttatttttattttatttttacttttattttttctaaagacaaggtcttgctctgtcactcaggctgcataatcatagctcactgcagcctcaaactcctgggctcaagcgatcctgctgccttaacctcccaagcagctaggactacaggcgcatgccaccaggcccagctacttttaaaaatttttgtag

SEQ ID NO: 570346 - DNA, 416 bp, Homo sapiens
ggtaattagtgatgggattataggtgacttttattttttaaacagtctttcatagatttttccaaaatgtctataaattaacaaatattatttttctataattaaaaaatactttaaaatacagtttctytaatggtggagtttaaatgatatccaaaatagacctgcccagttttattttggagcaaataaatttgacaattagaacaattgcaatgtatgtttttatttttattttatttttacttttattttttctaaagacaaggtcttgctctgtcactcaggctgcataatcatagctcactgcagcctcaaactcctgggctcaagcgatcctgctgccttaacctcccaagcagctaggactacaggcgcatgccaccaggcccagctacttttaaaaatttttgtag

SEQ ID NO: 570347 - DNA, 416 bp, Homo sapiens
ggtaattagtgatgggattataggtgacttttattttttaaacagtctttcatagatttttccaaaatgtctataaattaacaaatattatttttctataattaaaaaatactttaaaatacagtttctttaatggtggagtttaaatgrtatccaaaatagacctgcccagttttattttggagcaaataaatttgacaattagaacaattgcaatgtatgtttttatttttattttatttttacttttattttttctaaagacaaggtcttgctctgtcactcaggctgcataatcatagctcactgcagcctcaaactcctgggctcaagcgatcctgctgccttaacctcccaagcagctaggactacaggcgcatgccaccaggcccagctacttttaaaaatttttgtag

SEQ ID NO: 570348 - DNA, 608 bp, Homo sapiens
ccctgccaactccttgagcttggacttctaacctccagaattgtaagacaatagatttctgttgttttaagacaactcgtttttagtgtgttgttatagcagccctagaaaataatactgtgttgtgtgtgtgtgtgttttttttttctcatcatatggagtggagagaactagtgagagtatgcaggtttttttttttttttttgagagaagagtcacagtgagtctgatagcttttgaatcttggttttgagtcctttctgagacctaaatgcatgactgtcstttctgtgtattggttattcaatcttttcttggattacatgaactgattatcagtttttgtgagggtggagtgtctaagttgattgagttggatttctggcacttttctggcacttgcaatgagaaatagctaatgaatcctgagtatctaagcagcctaggaacgtgatattttctaatacaaatgacataaaacttttttaggtgttgtattacctgaaggccaaagttctccttttctaacactatgacacattggtatatttaattcctcacataaaacaggaaaaaattacttgaagaatatacagcttttattataa

SEQ ID NO: 570349 - DNA, 608 bp, Homo sapiens
ccctgccaactccttgagcttggacttctaacctccagaattgtaagacaatagatttctgttgttttaagacaactcgtttttagtgtgttgttatagcagccctagaaaataatactgtgttgtgtgtgtgtgtgttttttttttctcatcatatggagtggagagaactagtgagagtatgcaggtttttttttttttttttgagagaagagtcacagtgagtctgatagcttttgaatcttggttttgagtcctttctgagacctaaatgcatgactgtcctttctgtgtattggttattcaatcttttcttggattacatgaacygattatcagtttttgtgagggtggagtgtctaagttgattgagttggatttctggcacttttctggcacttgcaatgagaaatagctaatgaatcctgagtatctaagcagcctaggaacgtgatattttctaatacaaatgacataaaacttttttaggtgttgtattacctgaaggccaaagttctccttttctaacactatgacacattggtatatttaattcctcacataaaacaggaaaaaattacttgaagaatatacagcttttattataa

SEQ ID NO: 570350 - DNA, 608 bp, Homo sapiens
ccctgccaactccttgagcttggacttctaacctccagaattgtaagacaatagatttctgttgttttaagacaactcgtttttagtgtgttgttatagcagccctagaaaataatactgtgttgtgtgtgtgtgtgttttttttttctcatcatatggagtggagagaactagtgagagtatgcaggtttttttttttttttttgagagaagagtcacagtgagtctgatagcttttgaatcttggttttgagtcctttctgagacctaaatgcatgactgtcctttctgtgtattggttattcaatcttttcttggattacatgaactgattatcagtttttgtgagggtggagtgtctaagttgattgagttggatttctggcacttttctggcacttgcaatgagaaatagctaatgaatcctgagtatctaagcagcctaggaacgtgatattttctaatacaaatgacayaaaacttttttaggtgttgtattacctgaaggccaaagttctccttttctaacactatgacacattggtatatttaattcctcacataaaacaggaaaaaattacttgaagaatatacagcttttattataa

SEQ ID NO: 570351 - DNA, 608 bp, Homo sapiens
ccctgccaactccttgagcttggacttctaacctccagaattgtaagacaatagatttctgttgttttaagacaactcgtttttagtgtgttgttatagcagccctagaaaataatactgtgttgtgtgtgtgtgtgttttttttttctcatcatatggagtggagagaactagtgagagtatgcaggtttttttttttttttttgagagaagagtcacagtgagtctgatagcttttgaatcttggttttgagtcctttctgagacctaaatgcatgactgtcctttctgtgtattggttattcaatcttttcttggattacatgaactgattatcagtttttgtgagggtggagtgtctaagttgattgagttggatttctggcacttttctggcacttgcaatgagaaatagctaatgaatcctgagtatctaagcagcctaggaacgtgatattttctaatacaaatgacataaaacttttttaggtgttgtattacctgaaggccaaagttctccttttctaacactatgacacattgrtatatttaattcctcacataaaacaggaaaaaattacttgaagaatatacagcttttattataa

SEQ ID NO: 570352 - DNA, 539 bp, Homo sapiens
taggcagcccctattttgtattgatctattactctgacactactttaaacagacaaataagcaaacattctgattcctttaggggccttttatcagattttggtgggactcttkcaacaaatagctgatgtaactcagttagtttggaccctgctaaacttgtggaaatatctctgaggctagcaggcttctggccaccaggtacttttagaaactaagttgtaacactcagtgacagtgtttattcccatggaaataatgtaataattaaagattgaattccttggacagggatatttggccggatacttaatgatatcattaaataaaaaacacagcagcacaagtttctaaaccaataaaaaaaaaatagtaaaactgttttctagcttctttaaaatgggcttactatattgttactttgattttagcagggaccctaacgattgacaaaatgtactcatagtacatgaaaatacaactccactgtggtgtaaatttgctctaaaactgatatgctggtgataataaacattacg

SEQ ID NO: 570353 - DNA, 539 bp, Homo sapiens
taggcagcccctattttgtattgatctattactctgacactactttaaacagacaaataagcaaacattctgattcctttaggggccttttatcagattttggtgggactcttgcaacaaatagctgatgtaactcagttagtttggaccctgctaaacttgtggaaatatctctgaggctagcaggcttctggccaccaggtacttttagaaactaagttgtaacactcagtgacagtgtttattcccatggaaataatgtaataattaaagattgaattccttggacagggatatttggccggatacttaatgatatcattaaakaaaaaacacagcagcacaagtttctaaaccaataaaaaaaaaatagtaaaactgttttctagcttctttaaaatgggcttactatattgttactttgattttagcagggaccctaacgattgacaaaatgtactcatagtacatgaaaatacaactccactgtggtgtaaatttgctctaaaactgatatgctggtgataataaacattacg

SEQ ID NO: 570354 - DNA, 336 bp, Homo sapiens
ctccactgtggtgtaaatttgctctaaaactratatgctggtgataataaacattacgcatttaactaacaacaattttgcttcgtttgcagaatttagaaaagctttttggtagcattttggaaggctcagatttctttaagacatctgtctagggaaatttgaactaatttctcttctatttccctcttgtaaaaattcccattagcaagcaaatgcattcaaaaccattccattgatcttataactgtgttttataacaatagccatgagcttttcctttctatcctgtgggctgaaagcactgcagtggggtgtctgaatggcacacaggaa

SEQ ID NO: 570355 - DNA, 471 bp, Homo sapiens
cctcaggcctaaggaggcaagggaagggagcactgactggaccctagagagacttgtagtttagcagaggctgtctgacttaactgggmcctttggtagaggaaagcagccactgccaatctacagggggtgagctggagaataaataacacactcttttctttcatcctcttaatttctgctgatactttccattggccaaaccctaaaatgaaacagagaccaaggaaacccatatgatacaataatccatgaaggtcagcctcccaggccaaagagtcagcagagcagaggagggtggagagggctctggagggccacacaccaaaaaccttcagctccaaggaagaggatcacgttaatgccctagggatagacagtaccagaagattgtgttgaaatctgctttcttaagtctttattcatattaaagtcactattaattaattaaaatattataatgacatatat

SEQ ID NO: 570356 - DNA, 430 bp, Homo sapiens
ctgttgtctaacttagcctgcctcaaattcactcaggagacttatttaaaaaggaagatttcccagagagatttatttaagggaaagcagaattggcattcttctttcgacctagagcaccttgacaagctgttgccaggacacgcaagtgggatggtgtctcttgtgcaactgataaaaggaagtgacccttggattgaaggaagtagaaagattaaatcagaaagaatcaaggttcagagtctgcaaagccacaagccctctgtatgggccagcaaacccctgggcctgagaggcatcagtaattgtcacccgagttggattgaactgaaataaagaagtaaagatcctatataatctrttgaaatctttaaaagggttgcaagatatgcattactaatctatatattatcttaaaaacaaacaagac

SEQ ID NO: 570357 - DNA, 430 bp, Homo sapiens
ctgttgtctaacttagcctgcctcaaattcactcaggagacttatttaaaaaggaagatttcccagagagatttatttaagggaaagcagaattggcattcttctttcgacctagagcaccttgacaagctgttgccaggacacgcaagtgggatggtgtctcttgtgcaactgataaaaggaagtgacccttggattgaaggaagtagaaagattaaatcagaaagaatcaaggttcagagtctgcaaagccacaagccctctgtatgggccagcaaacccctgggcctgagaggcatcagtaattgtcacccgagttggattgaactgaaataaagaagtaaagatcctatataatctattgaaatctttaaaakggttgcaagatatgcattactaatctatatattatcttaaaaacaaacaagac

SEQ ID NO: 570358 - DNA, 435 bp, Homo sapiens
agaattcaggtattttgattttactttcatttcaattaacttcaacagagctttattgagaatctaccatgtaccaggcastatgttacatgctgaacatgcaaatataggaaataccactggcctcacggttctagtcttgtaggggactgggctatgcagaaacaagctgtattgtgatatatgcaataatgcaagtttgtacatattaccttctgagcaaagcagcaaagactgttctttttccataagttgttgactttctgtcatgtgaccctggtaagtaaccatgatcgaactgatcaagaatctgtaacttggccaaaggtaaccacaaagttgtgcaaaactacaggatacatagagtaaatattttgggggtttcattattacagatgacgttgaggagagaaaagttttacatttttacaatct

SEQ ID NO: 570359 - DNA, 435 bp, Homo sapiens
agaattcaggtattttgattttactttcatttcaattaacttcaacagagctttattgagaatctaccatgtaccaggcagtatgytacatgctgaacatgcaaatataggaaataccactggcctcacggttctagtcttgtaggggactgggctatgcagaaacaagctgtattgtgatatatgcaataatgcaagtttgtacatattaccttctgagcaaagcagcaaagactgttctttttccataagttgttgactttctgtcatgtgaccctggtaagtaaccatgatcgaactgatcaagaatctgtaacttggccaaaggtaaccacaaagttgtgcaaaactacaggatacatagagtaaatattttgggggtttcattattacagatgacgttgaggagagaaaagttttacatttttacaatct

SEQ ID NO: 570360 - DNA, 435 bp, Homo sapiens
agaattcaggtattttgattttactttcatttcaattaacttcaacagagctttattgagaatctaccatgtaccaggcagtatgttacatgctgaacatgcaaatataggaaataccactggcctcacggttmtagtcttgtaggggactgggctatgcagaaacaagctgtattgtgatatatgcaataatgcaagtttgtacatattaccttctgagcaaagcagcaaagactgttctttttccataagttgttgactttctgtcatgtgaccctggtaagtaaccatgatcgaactgatcaagaatctgtaacttggccaaaggtaaccacaaagttgtgcaaaactacaggatacatagagtaaatattttgggggtttcattattacagatgacgttgaggagagaaaagttttacatttttacaatct

SEQ ID NO: 570361 - DNA, 435 bp, Homo sapiens
attttactttcatttcaattaacttcaacagagctttattgagaatctaccatgtaccaggcagtatgttacatgctgaacatgcaaatataggaaataccactggcctcacggttctagtcttgtaggggactgggctatgcrgaaacaagctgtattgtgatatatgcaataatgcaagtttgtacatattaccttctgagcaaagcagcaaagactgttctttttccataagttgttgactttctgtcatgtgaccctggtaagtaaccatgatcgaactgatcaagaatctgtaacttggccaaaggtaaccacaaagttgtgcaaaactacaggatacatagagtaaatattttgggggtttcattattacagatgacgttgaggagagaaaagttttacatttttacaatcttaggtttaccaatgggc

SEQ ID NO: 570362 - DNA, 446 bp, Homo sapiens
tcaattaacttcaacagagctttattgagaatctaccatgtaccaggcagtatgttacatgctgaacatgcaaatataggaaataccactggcctcacggttctagtcttgtaggggactgggctatgcagaaacaagctgtattgtgatatatgcaataatgcaagtttgtacatattaccttctgagcaaagcagcaaagastgttctttttccataagttgttgactttctgtcatgtgaccctggtaagtaaccatgatcgaactgatcaagaatctgtaacttggccaaaggtaaccacaaagttgtgcaaaactacaggatacatagagtaaatattttgggggtttcattattacagatgacgttgaggagagaaaagttttacatttttacaatcttaggtttaccaatgggctctgggaggtctaatagcagaattc

SEQ ID NO: 570363 - DNA, 469 bp, Homo sapiens
actctgtcatgagacagtactagagggatgatgcaaaaccattagaaaccacccccrtgatcaaatcacctcctgccaggccccaccttcaacacgtggggattacaattccacataagatttgggtggggacacagagccaaaccatatcactagattatatggtaatcctagctttaattttttgaggaacctccatattgttttccataatggcaggatcattttgcattccaccaacagtgcgcaagcgctctaatttctccacattggtgctaacccttgctattttctgttttctttttaaatagtggccatcataatgggtgtgaggtgacatgtagattgattttaaagtacaaaccccctttgaaatggttaggggatctctgaactttcatgccttctggtaaactttgattttatcaaccagctgaaatcattcactgaagtatatgttattttgatc

SEQ ID NO: 570364 - DNA, 325 bp, Homo sapiens
gaagggctggttatgagtaatatgatacacttttttgagaggatgagattacaataacaatacctcctctcatagaatagccagcaagtctccactaaataasagtgccttgattttatagatgtttaatcatggatattgagataatgcgaacgatttgtagacacaggagtttattaaagaattatataatacctttcaagtgttgaaattaagcctgcatccccacaattttcagaggtgctgatgcctaataaactcaaccccttgcatgccaaaattggcttaaagcccacccattacccaagctacacttcaagcatca

SEQ ID NO: 570365 - DNA, 415 bp, Homo sapiens
attccctctttgaattgaagtgtttcaaagatatcttattttaaaataccaaaataggaatagaatatgaagggctggttatgagtaatatgatacacttttttgagaggatgagattacaataacaatacctcctctcatagaatagccagcaagtctccactaaataagagtgccttgattttataratgtttaatcatggatattgagataatgcgaacgatttgtagacacaggagtttattaaagaattatataatacctttcaagtgttgaaattaagcctgcatccccacaattttcagaggtgctgatgcctaataaactcaaccccttgcatgccaaaattggcttaaagcccacccattacccaagctacacttcaagcatcaaggttcaaaaatgtaattttaa

SEQ ID NO: 570366 - DNA, 590 bp, Homo sapiens
ggtttcagcttctctgattgtctcctctgtcgtctccacttttactcaatagagcccatccagttagatttttttwaaatttctgttactgtatttcatatttctgtaatttccatttgattcttcttcagtttctttgctgatgttttcagttctttgattgttgcaatagcatttgtagttgcttgttgaagcacttttatactgactgttataagtgatgagtcagatggttccaacatctgcctatgtaatttttttatttttgcaggcagtcttcctgtttaggtttagtctgtaggtcttggtctattttgtgggctgagattccaatggcaatttaatttcagagccttcatggtgttattttggtctgtttggcttatatgtatcactgggattctcccaccagtccctgctgttgcccacctgagggaacaggggagctgccccaggctgggccacctgctgcagctagatgggtggggaatggtggttgtcttggtgtgtggagctggttttcttgttgtggggaagatctcctttgatctgcggggactgagtctgcctgggttgccttctattgctac

SEQ ID NO: 570367 - DNA, 590 bp, Homo sapiens
ggtttcagcttctctgattgtctcctctgtcgtctccacttttactcaatagagcccatccagttagatttttttaaaatttctgttactgtatttcatatttctgtaatttccatttgattcttcttcagtttctttgctgatgttttcagttctttgattgttgcaatagcatttgtagttgcttgttgaagcacttttatactgactgttataagtgatgagtcagatggttccaacatctgcctatgtaatttttttatttttgcaggcagtcttcctgtttaggtttagtctgtaggtcttggtctaytttgtgggctgagattccaatggcaatttaatttcagagccttcatggtgttattttggtctgtttggcttatatgtatcactgggattctcccaccagtccctgctgttgcccacctgagggaacaggggagctgccccaggctgggccacctgctgcagctagatgggtggggaatggtggttgtcttggtgtgtggagctggttttcttgttgtggggaagatctcctttgatctgcggggactgagtctgcctgggttgccttctattgctac

SEQ ID NO: 570368 - DNA, 387 bp, Homo sapiens
ctagtcaaagtactgtttcctgattaagcattaacttagtggttgctagtctgtgttgacctttgaaaggcatgactagcctaactgaagtttttgcttcacaccatttacaatttaaaaytacccagagccttgtgagccattggaaaagactgaatgtttcactctgaaatgggagtccttggagggttttgagcagaagagagacattcaggtaatcagatcactttgccaagagatcagtctggtagagatcagtctggtggcacaaaccagagggctggcagtggagatgagacaaagagtcaaacctggatagagtttctttggaagctgggtcagtaggatttcctggtggactgaatgtggggtgtgtgagaggaaatg

SEQ ID NO: 570369 - DNA, 387 bp, Homo sapiens
ctagtcaaagtactgtttcctgattaagcattaacttagtggttgctagtctgtgttgacctttgaaaggcatgactagcctaactgaagtttttgcttcacaccatttacaatttaaaactacccagagccttgtgwgccattggaaaagactgaatgtttcactctgaaatgggagtccttggagggttttgagcagaagagagacattcaggtaatcagatcactttgccaagagatcagtctggtagagatcagtctggtggcacaaaccagagggctggcagtggagatgagacaaagagtcaaacctggatagagtttctttggaagctgggtcagtaggatttcctggtggactgaatgtggggtgtgtgagaggaaatg

SEQ ID NO: 570370 - DNA, 387 bp, Homo sapiens
ctagtcaaagtactgtttcctgattaagcattaacttagtggttgctagtctgtgttgacctttgaaaggcatgactagcctaactgaagtttttgcttcacaccatttacaatttaaaactacccagagccttgtgagccattggaaaagactgaatgtttcactctgaaatgggagtccttggagggttttgagcagargagagacattcaggtaatcagatcactttgccaagagatcagtctggtagagatcagtctggtggcacaaaccagagggctggcagtggagatgagacaaagagtcaaacctggatagagtttctttggaagctgggtcagtaggatttcctggtggactgaatgtggggtgtgtgagaggaaatg

SEQ ID NO: 570371 - DNA, 387 bp, Homo sapiens
ctagtcaaagtactgtttcctgattaagcattaacttagtggttgctagtctgtgttgacctttgaaaggcatgactagcctaactgaagtttttgcttcacaccatttacaatttaaaactacccagagccttgtgagccattggaaaagactgaatgtttcactctgaaatgggagtccttggagggttttgagcagaagagagacattcaggtaatcagatcactttgccaagagatcagtctggtagagatcagtctggtggcacaaaccagagggctggcagtggagatgagacaaagagtcaaacctggatagagtttmtttggaagctgggtcagtaggatttcctggtggactgaatgtggggtgtgtgagaggaaatg

SEQ ID NO: 570372 - DNA, 310 bp, Homo sapiens
ctgttccacatgcttgccaacaattggcctcttgagtttttttttttttttttargttttcagtgcctgcctggacttgtgttttcatttagattttggtttcttagaacttttgtttttctcttcacagcttaacaatgcatttgaaaagatttgttttcatgtggagtattcagttttgtaataagagggttgttcaaggcatcactctgccactctgctagaaacagaagtctcccaggcatttctttttatataaagtagttaatgaaattttgaaccatcttacatgaatttttattaaaataca

SEQ ID NO: 570373 - DNA, 310 bp, Homo sapiens
ctgttccacatgcttgccaacaattggcctcttgagtttttttttttttttttaagttttcagtgcctgcctggacttgtgttttcatttagattttggtttcttagaactttygtttttctcttcacagcttaacaatgcatttgaaaagatttgttttcatgtggagtattcagttttgtaataagagggttgttcaaggcatcactctgccactctgctagaaacagaagtctcccaggcatttctttttatataaagtagttaatgaaattttgaaccatcttacatgaatttttattaaaataca

SEQ ID NO: 570374 - DNA, 310 bp, Homo sapiens
ctgttccacatgcttgccaacaattggcctcttgagtttttttttttttttttaagttttcagtgcctgcctggacttgtgttttcatttagattttggtttcttagaacttttgttwttctcttcacagcttaacaatgcatttgaaaagatttgttttcatgtggagtattcagttttgtaataagagggttgttcaaggcatcactctgccactctgctagaaacagaagtctcccaggcatttctttttatataaagtagttaatgaaattttgaaccatcttacatgaatttttattaaaataca

SEQ ID NO: 570375 - DNA, 310 bp, Homo sapiens
ctgttccacatgcttgccaacaattggcctcttgagtttttttttttttttttaagttttcagtgcctgcctggacttgtgttttcatttagattttggtttcttagaacttttgtttttctcttcacagcttaacaatgcatttgaaaagatttgttttcatgtggagtattcagttttgtaataagagggttgttcaaggcatcactctgccactctgctagaaacagaaktctcccaggcatttctttttatataaagtagttaatgaaattttgaaccatcttacatgaatttttattaaaataca

SEQ ID NO: 570376 - DNA, 508 bp, Homo sapiens
ttttggtttcttagaacttttgtttttctcttcacagcttaacaatgcatttgaaaagatttgttttcatgtggagtattcagttttgtaataagagggttgttcaaggcatcactctgccactctgctagaaacagaagtctcccaggcatttctttttatataaagtagttaatgaaattttgaaccatcttacatgaatttttattaaaatacacttcyggatgtggtgcccattatccattctactcttttgtaacaagtagatttctctgaattcttgaatttgaaaacaactggggttcctaaacagagaatatggaatattattagggatgatgtctttaataatatatttcaagacaggagaaactttttctatatagttgactttaataaaaagcttagggcaaaactttcaatatattaacagtatttatgaggcagttaagaatttgggtcatctccatttctgctaaaaatacaaaaaattagccaggtgtggtgg

SEQ ID NO: 570377 - DNA, 508 bp, Homo sapiens
ttttggtttcttagaacttttgtttttctcttcacagcttaacaatgcatttgaaaagatttgttttcatgtggagtattcagttttgtaataagagggttgttcaaggcatcactctgccactctgctagaaacagaagtctcccaggcatttctttttatataaagtagttaatgaaattttgaaccatcttacatgaatttttattaaaatacacttctggatgtggtgcccattatccattctactcttttgtaacaagtagatttctctgaattcttgaatttgaaaacaactggggttcctaaacagagaatatggaatattattagggatgatgtctttaataatayatttcaagacaggagaaactttttctatatagttgactttaataaaaagcttagggcaaaactttcaatatattaacagtatttatgaggcagttaagaatttgggtcatctccatttctgctaaaaatacaaaaaattagccaggtgtggtgg

SEQ ID NO: 570378 - DNA, 508 bp, Homo sapiens
ttttggtttcttagaacttttgtttttctcttcacagcttaacaatgcatttgaaaagatttgttttcatgtggagtattcagttttgtaataagagggttgttcaaggcatcactctgccactctgctagaaacagaagtctcccaggcatttctttttatataaagtagttaatgaaattttgaaccatcttacatgaatttttattaaaatacacttctggatgtggtgcccattatccattctactcttttgtaacaagtagatttctctgaattcttgaatttgaaaacaactggggttcctaaacagagaatatggaatattattagggatgatgtctttaataatatatttcaagacaggagaaactttttctatatagttgactttaataaaaagcttagggcaaaactttcaatatattaacagtatttatgaggcagttaagaatttgggtcatctccatttctgctaaaaatacraaaaattagccaggtgtggtgg

SEQ ID NO: 570379 - DNA, 563 bp, Homo sapiens
agtaaacacagtacttcccaggtagagtaccatcctggccggttgaggtataaaaagatagccattcacttctctctcaaatacaaaagtttaaaaagttttccctctgcatgtccattgttgtttgtctctactgataagtgtctatactacttcagtatctcacagtatcttcatgttttaggttactgtttcacctcttttctttcatgcttcagctttcragcaaaatgactttggtggcacaccaccaacctattagggtgtaccttatttctctgtctctaggggaatctcctgaacacagaatataaggtgaagcctgtgtgctttcagccctatttttcctcaagggctgacttgtttggatgcctgggctttctttgtcaccaatcttaggtacagagtgagttgctggaactgcagctcctcagagatcaggaatgcttctggtggtcagacactagtcaattgctgaagttcaggtcaaaattaaacttagacataggcaaaagatcatttttaagtaatgataccttttcagcaatctattaaatataagt

SEQ ID NO: 570380 - DNA, 593 bp, Homo sapiens
ccattcaacaagtcttcaggaattcccaagtttccgacatctttctgtattctgagccctccaagtatctgggaagttccaaactttcccacactttcttatcttcytctgagcctttcaaaaagttccaacctctgtctattactcagttccaaatcacttccatatttttgggtatctttactgaagcaccccgctacctggtactaatttactatattagtctgttctcatgctgctaataaagatatacctgaggctaggtaatttgtaaaggaaagaggtttaattgactcaattccacatggctgagaggcatcacaatcatggcagaagagcaagggacatcttacatggcagcaggcaaggagagcttgtcaaggggaactcgtctttataaaaccatcagatctcatgagacttattggctatcatgagaacagcataggaaagaccctcctccataattcaattacctcccactgtgtccttccgacaacatgtagaaatggtgggagctacaattcaaaatgagacttgggtggggataaaatcaaaccatatatggtgtcatactgatgtttaaaaagttt

SEQ ID NO: 570381 - DNA, 593 bp, Homo sapiens
ccattcaacaagtcttcaggaattcccaagtttccgacatctttctgtattctgagccctccaagtatctgggaagttccaaactttcccacactttcttatcttcctctgagcctttcaaaaagttccaacctctgtctattactcagttccaaatcacttccatatttttgggtatctttactgaagcaccccrctacctggtactaatttactatattagtctgttctcatgctgctaataaagatatacctgaggctaggtaatttgtaaaggaaagaggtttaattgactcaattccacatggctgagaggcatcacaatcatggcagaagagcaagggacatcttacatggcagcaggcaaggagagcttgtcaaggggaactcgtctttataaaaccatcagatctcatgagacttattggctatcatgagaacagcataggaaagaccctcctccataattcaattacctcccactgtgtccttccgacaacatgtagaaatggtgggagctacaattcaaaatgagacttgggtggggataaaatcaaaccatatatggtgtcatactgatgtttaaaaagttt

SEQ ID NO: 570382 - DNA, 525 bp, Homo sapiens
ctgctttccttttaattatagattccatctttaagtcattttttctgccctcgtgtctcactgtacrcacttaaaactagctaaaaagcagactgagtgctttgctgcttaaatatttcttaggcagttctttgttcatcactcttaagttatgcattccaaaaagccctaggagataccataattttgccaggctctttgctactttataataatattgaccttaactccaggtttttataccttgtttctcatttccatcttagaccttatcataatggccttccactgtccatatttttactaacatactggtcatggccacttaggtaatctctaagaagattcagactttccctacagctctggtcatctgagccgtcaacagaatcaccattaaatgtctattgatgacaacacagcattttccatgctgcccctccagattcttctagcctcgacccattattcagttccaaagccactttcatattttagttatttgttatagcaacagccccactc

SEQ ID NO: 570383 - DNA, 525 bp, Homo sapiens
ctgctttccttttaattatagattccatctttaagtcattttttctgccctcgtgtctcactgtacacacttaaaactagctaaaaagcagactgagtgctttgctgcttaaatatttcttaggcagttctttgttcatcactcttaagttatgcattccaaaaagccctaggagayaccataattttgccaggctctttgctactttataataatattgaccttaactccaggtttttataccttgtttctcatttccatcttagaccttatcataatggccttccactgtccatatttttactaacatactggtcatggccacttaggtaatctctaagaagattcagactttccctacagctctggtcatctgagccgtcaacagaatcaccattaaatgtctattgatgacaacacagcattttccatgctgcccctccagattcttctagcctcgacccattattcagttccaaagccactttcatattttagttatttgttatagcaacagccccactc

SEQ ID NO: 570384 - DNA, 525 bp, Homo sapiens
ctgctttccttttaattatagattccatctttaagtcattttttctgccctcgtgtctcactgtacacacttaaaactagctaaaaagcagactgagtgctttgctgcttaaatatttcttaggcagttctttgttcatcactcttaagttatgcattccaaaaagccctaggagataycataattttgccaggctctttgctactttataataatattgaccttaactccaggtttttataccttgtttctcatttccatcttagaccttatcataatggccttccactgtccatatttttactaacatactggtcatggccacttaggtaatctctaagaagattcagactttccctacagctctggtcatctgagccgtcaacagaatcaccattaaatgtctattgatgacaacacagcattttccatgctgcccctccagattcttctagcctcgacccattattcagttccaaagccactttcatattttagttatttgttatagcaacagccccactc

SEQ ID NO: 570385 - DNA, 679 bp, Homo sapiens
ataatcttgcaaatgcattgctttggccacatcacttccatcttcaaatccttcaaaaatggtacttatttgcatataaaattcaaattattcatatacatttcaaatagactttatctgcacagacatataaaccatgatatctctcatctatcctcttttacttactgctttttgctgcttgatatgtccaaatatttaaaaataattttgtttatgttaatgttactttaaatatttttctcctttaaaaaaattgtctttgcttttcactaagtgatttcttaaaattctatgattcctgaatgtttacataagggaagaaasaaaggactctaatatttattgagtgcctgttatagacagcacaacaaacatgttgacttactacatgtctaagtcaaagtacgaagatttcataagctaggaattaaagacattctgatgaattctactttatatcatttttttaattcctgcaaactatttgactatcattttattgctgattttttttgcatttttattcttgataaatgagctaagtagtaaatgactatgcttttacttactatctcccacatgaatccactaatattttattttacattttactttattttagaaacagagtttcactctgtcacacaggctggagtaaagtggtgtgatcatagtt

SEQ ID NO: 570386 - DNA, 578 bp, Homo sapiens
aagtggaatgatatggtttggctctkccccacccaaatctcatcttgaattttagttcccataattcccacgtgttgtggaagggacctggtgggagataattgaatcatgggggcagtttcccccatactgttcttgtgatagtgaataaatctcacaagatctaatggttttataaggggattcccctttcacttggctctcattctttcttgcctgctgccatgtaagacatgcttttcaccttctgccatgattgtgaggcctcctgagccacatggaactgtgagtccattaaacctcttttctttataaattacgcagtctcaggtacctttttatcagctgcatgaaaacagactaatagagacagtttgacctttttgtttccaatttggatggctttttgtctttcttttggctaagtgctctggttaggacttccagaactatgttgaatagaagcagtacaagtggacattcttgtcttgttctagttcttagaggaaaggccttcagttgttctccattcagtatgatgttagctgtgggtttgtcatatatggtctttgttgagg

SEQ ID NO: 570387 - DNA, 481 bp, Homo sapiens
ccgttttatccttgaaaaacttttgctcgcctgttgtcttgcttgcattatttctgatgagatgtctcctgccattcttttctttgttcctttggacataatgtaccctttccccctctgggagctttcacagttgtctctttttaagtcatttgattatgatgggccttggcatggtttccttcattttgcctgtgtttagagtttgtttataattttcatcagtttgagaaattgtctcttcaaatatttttttctgtcccatgaccctttctctcctttagggatcccaataacgtgtattaggcttcttagagttgatgctgatgctctatttctcttaattcttttttttttttctgtgtaacatttggatagtttcctttgctttcttsaacttgtttaatcttttctgccatgtctattctgttaatgtttattacagtaaatttttcatttcacacattttttaatgaagtga

SEQ ID NO: 570388 - DNA, 523 bp, Homo sapiens
tcttaagcctatttttctttcattgcttttcttttcattatataaactcaaccctctaatataaaaaactaaaagttatcacacccagtctggttatggccttatcttactcctttccttcatagctggacttcttataatgtgaaccgttatatctatattttcttgcttcccaataatatcttcagttattgcagcctggtttcttcctccacttcacaaaactgatgttgctaagatggctaatcatctcttagttactgcatttaatattcaagtgtgcatcactgtcctactgaacctttgcatttaacactggatcactgtccttttggaaattctttgttcctgttgctactctgatacttctcttcaggttttcctattttttwaatcagtctttgctgtatgtttgttctctctgtagaagatttagtgtttatgtgatttttttttgtagtgctccttattttctgtagtgttcctttttggttttttccatttcactactcaccctaagccg

SEQ ID NO: 570389 - DNA, 499 bp, Homo sapiens
aagagttcttcagaacagagtttgacggagatgtggagacctaataataacctcagcaaagagaaaactgaatggcatgtggagaaaagcagcggaaagttacaggctgctatggcatctgtcattgtgcgtccatcttctagtacaaaaactgatagtatgccagcaatgcagttagcttctaaagatcgwgttagtgaaagatcttcagctggggcacataaaacagattgcctcaaactagcagaagccggagaaactggaagaatcattttgccaaatgtgaattcagacagtgttcacacaaaatctgaaaaaaactttcaggctgtctcacagggcagtgttcccagttcagtcatgtctgctgtaaatacgatgtgtaataccaaaacggatgtaatcacatctgctgccgatactaccagtgtttccagctggggtggttcagaagtaatttcctctttatcaaataccattttggcctctacatcatcag

SEQ ID NO: 570390 - DNA, 399 bp, Homo sapiens
agacgaggatccactggaatcagccaatacactatataacaatactattaaagtattttttcctggaatataattggtatatgtcttccactttccatcatgtatgtaaaatttcatagtaaaacttaccgatagtttcartaaagaaattatctgcaaaaaaaaaaaaacccaaacaaacaaaaacttccatacataaccatccatataccttttccataatatagggaattataaactgttttttctgtgctgttttttttttttttttctgagacacagtctcactctcccagcccgtagtgtactgggcacgatcttgactcactggaatcttcgcctcccaagttcaagcgattctcctgcctcagcttcctgagtagctgggattacaggcgc

SEQ ID NO: 570391 - DNA, 290 bp, Homo sapiens
ttgtccacttttagctggggcaatcttcgcatttcatacctgcacttgctcttaccacaagaagtcccctccccccaggtgattttcctccaagacacgaggacagaagcattgccagtggcttgaagtgacagcagtgggcagsaggtaccagagctgcacaaggagcagtgtctgcttttcactatctttgaaaggatacccgagacctcgatgaaaaaacagatcctaaaataagccacattttgtcttttatgcctcaagacacttaacattaagttatataatct

SEQ ID NO: 570392 - DNA, 290 bp, Homo sapiens
ttgtccacttttagctggggcaatcttcgcatttcatacctgcacttgctcttaccacaagaagtcccctccccccaggtgattttcctccaagacacgaggacagaagcattgccagtggcttgaagtgacagcagtgggcagcaggtaccagagctgcacaaggagcagtgtctgcttytcactatctttgaaaggatacccgagacctcgatgaaaaaacagatcctaaaataagccacattttgtcttttatgcctcaagacacttaacattaagttatataatct

SEQ ID NO: 570393 - DNA, 608 bp, Homo sapiens
tgcattattctaggcatgggaagagagcaatggaaaagataaatctcttacttcatcatgcttacgttccagtgggggttaaaagacaagcaaagtgagtaaattataaagcatattttaaggtgacaactgaaatggaggaaaataaagcaggaaagacgacagaaagttgggggacacaatttacagctttaaactagacctcaccaagaaggtgaaatttgaatgaagcctaaaaaagtgtaaagaagcaagtcttacagatacctgacagaaaaacgattccaagcaaaaaagattaagaagcacaaaaaccctgggggaggggggaaacatacttggtgtgtgtgaaagaagcaaagagggcaggatggctagagaggaactaggagagccatacgagatgaaggcagtgagacagagggggaagtgtggatatgtaaaccaacctaactttttaacaaggtcactttgagcctactaaaagaccactgttcccaaaaaagtagcagcagggasacaagtgtaagcatggaatctctttggggtaacaatgattgcatctggaaaaaaggaactgggggaaaaatgtgagatactgaattttc

SEQ ID NO: 570394 - DNA, 507 bp, Homo sapiens
tttctttaaatttattattattattattattattattattattatttagagacggggtctcactctcttgcacaggctggagtgcagtagtgagatcacagctcactgcagcctcgacctccacctcaaccttttgagtagctgggaacaagggtgtgcaccaccacacctggccaaatgtggaatttccagggagtggaggggagatcctgggcacagagcctgaaagggctggggcagcaggggttcctctgagggggttggtcctgcccgaaggttgtgagagggagaggaaggatggtatgaaactgggcacccracttgagacttggacttgaggagacattgttaagagaagggtgggaatgaatgggatctcatcatggatttccaataggatacaagcgccctaccagccactatcatcccacatcaacctagaacgaattctctctccagcttgccctgccccctgccctgcccagagtctgtccaagcagactctac

SEQ ID NO: 570395 - DNA, 507 bp, Homo sapiens
tttctttaaatttattattattattattattattattattattatttagagacggggtctcactctcttgcacaggctggagtgcagtagtgagatcacagctcactgcagcctcgacctccacctcaaccttttgagtagctgggaacaagggtgtgcaccaccacacctggccaaatgtggaatttccagggagtggaggggagatcctgggcacagagcctgaaagggctggggcagcaggggttcctctgagggggttggtcctgcccgaaggttgtgagagggagaggaaggatggtatgaaactgggcacccaacttgagacttggacttraggagacattgttaagagaagggtgggaatgaatgggatctcatcatggatttccaataggatacaagcgccctaccagccactatcatcccacatcaacctagaacgaattctctctccagcttgccctgccccctgccctgcccagagtctgtccaagcagactctac

SEQ ID NO: 570396 - DNA, 629 bp, Homo sapiens
ggcaatgtcatggtacatccatttcaagaaagtacagctgaactttactcagactggaattgggaactagaaagttaggaactcaagtcacatattccctttaaaccctctccagaatctcctttttttgacgggtttattctgctaactcatagataytgcttctcataacactagttttcatttgacttacgtgtgtcagtatcaattcacctacctgtccccgctcctttacaagaccttttaaatctaatatttatgttttctactaaaattacagatagatggcataggggaatgaaacgttgaaaagaagaaataaatataaggaagagaatatatggtagtaattttctgtggtaggcagagaaagtgaggtttagctcagctgtgacttggcatctaggttcacacagcttgtgatagtcaaaaaagaacctgtgttgggtatggtggatcacaactgtaatcctagcactttgggaggccgaggtgggaggattgcttgagctcaggcatttgagactgggtaacatgggagaacccctgtctacaaaaaaataaaattagcagggcatggtggtgcacgtgtatagtcccagctactggggaggctaaggcaggaggat

SEQ ID NO: 570397 - DNA, 440 bp, Homo sapiens
ctagatgcttgaaattttccaaaataaaatattgagaaaaaaattcgtgcaagaccaagttctctgccctcgaggcatttacagctgcaggccttgaggagtttctttggttcctgaagggctgcttgctcaccacgagcagtgtttgcacaaatagatgygcttcttgttgcctggctccatggctcctcctagagcattgttttcttattcaggttagttcagtgtctaattctaatgggaaaattgttttttctaggtttatttatgaaacagagcatcataatggcatagcagagttactggaaatattgggaaggtaagcctctgttatgggtagcaaacggctgtagatggaatttataccagagtgatccatttcattgagtccagctgcccgctttaaagcaaggcagtttaaaccattctctaaaagaatt

SEQ ID NO: 570398 - DNA, 517 bp, Homo sapiens
tgggaggcagaggtttcagtgagctgagattgcaccactgctccacaacctgggccgtagagtgagaytccatctcaaaaacaaaacaaaacaaaaaacaagaaataaacaaccaaaggagacctttccacaggtgttagttgacagaattataagccttgcacatctaggatgaaccagacaaggaatattttgcaaagattaaggcagcaaggaaatgttgtcattcttgcgtaagcaaagtctacgttattctgctataatcagagcattttgcatttgtgcaacaattcttgctcttatgggtacatcagagctcaagtgtgccatgaaaaggtaatggcaataaattccacaaaagaatgagtgacagtaattggaaggaatttgagcagaagggatatgaaaaagtagcttttgattattctcttcttttttataatataaatgatcattggtaacacatttaatttgacagtagtccaaggccttcaaaaatattcctacgaaccagtta

SEQ ID NO: 570399 - DNA, 458 bp, Homo sapiens
aatgggcaaactaccttaatagacatgtgtcmaaagcagacatacagatggccaacatgtatatgaaaaaatgctcaacatcagtaatcatcaagaaagtgcaaatcagaaccacgataaaataccacctcactccagttagcatggctattgttaaaaagagaaaataagggttggcaaggatgtggagaaagggaaacacattgttggtgggattgtaaattaaccattatggaaaagagtatggagatccttcaaaaaattaaaaataggactaccatacaatccagccattccattactaggtatatatccaaaagaaattactatgttgaagagaaaacttcaactcccatgtttattgcagcactgtttacaataactaagatacgtaatcaacctaagtgcccattaatgcaagaatgaatacagaaaatgtatatatacataatggaata

SEQ ID NO: 570400 - DNA, 458 bp, Homo sapiens
aatgggcaaactaccttaatagacatgtgtccaaagcagacatacagatggccaacatgtatatgaaaaaatgctcaacatcagtaatcatcaagaaagtgcaaatcagaaccacgataaaataccacctcactccagttagcatggctattgttaaaaagagaaaataagggttggcaaggatgtggagaaagggaaacacattgttggtgggattgtaaattarccattatggaaaagagtatggagatccttcaaaaaattaaaaataggactaccatacaatccagccattccattactaggtatatatccaaaagaaattactatgttgaagagaaaacttcaactcccatgtttattgcagcactgtttacaataactaagatacgtaatcaacctaagtgcccattaatgcaagaatgaatacagaaaatgtatatatacataatggaata

SEQ ID NO: 570401 - DNA, 364 bp, Homo sapiens
aagaacatataaaccaccgttatgtaatttgaaaccatcaatagcccccttttaaggttgtctttattgtgggaagtcaaggtaatgattttgtcgctgtctaatttcatcccaatgtatggcgttgcttttatagcctttcaaaggtaagtgaaaggcatcaatctagggccctttttctggccgattaacagtttaaactggttttctaaccctgtcacaactattgggctgataaacaggatttctgcggaggcattagcaagtctgtaaataaatcattaaaaaaaaaamacacacacacacacacacaccacctcaggcaattctaagttcctctgacaaaaataaaccataagtccac

SEQ ID NO: 570402 - DNA, 559 bp, Homo sapiens
acacagtaaacatgttcctggaactcttttttaaaaggagttggagcccaatcttcacaaccattcattttcctgccagattctttgcattgggcatttccttgtgtgcctgggaccttactgttgttgaagcagaagttctcatataggaaattttgcattactgaagaactctgctttagggcaaaggctgaaatgatacaggyttaggcatcccatgcctactgagtgagaggtcatcgcattaaatattttgagcatgctgacaaggtaaggaagatgcagaaactcctgaccagattcatgaaggctgaagacagaattctaagcagtcccttgttttgcatgaagcactgtgatattgaggaagaggaggcgttaagatcggaattgcccaaagtgtctacacaccttcatatttgttactaattatcaccccttttccacttctcgttgtgtttggccagccctgaatacctggagactgatccgagaactgtttgctttcgtttcttcccacatatttttattaacaacttgaactgatcctgcctaatcc

SEQ ID NO: 570403 - DNA, 559 bp, Homo sapiens
acacagtaaacatgttcctggaactcttttttaaaaggagttggagcccaatcttcacaaccattcattttcctgccagattctttgcattgggcatttccttgtgtgcctgggaccttactgttgttgaagcagaagttctcatataggaaattttgcattactgaagaactctgctttagggcaaaggctgaaatgatacaggtttaggcatcccatgcctactgagtgagwggtcatcgcattaaatattttgagcatgctgacaaggtaaggaagatgcagaaactcctgaccagattcatgaaggctgaagacagaattctaagcagtcccttgttttgcatgaagcactgtgatattgaggaagaggaggcgttaagatcggaattgcccaaagtgtctacacaccttcatatttgttactaattatcaccccttttccacttctcgttgtgtttggccagccctgaatacctggagactgatccgagaactgtttgctttcgtttcttcccacatatttttattaacaacttgaactgatcctgcctaatcc

SEQ ID NO: 570404 - DNA, 559 bp, Homo sapiens
acacagtaaacatgttcctggaactcttttttaaaaggagttggagcccaatcttcacaaccattcattttcctgccagattctttgcattgggcatttccttgtgtgcctgggaccttactgttgttgaagcagaagttctcatataggaaattttgcattactgaagaactctgctttagggcaaaggctgaaatgatacaggtttaggcatcccatgcctactgagtgagaggtcatcscattaaatattttgagcatgctgacaaggtaaggaagatgcagaaactcctgaccagattcatgaaggctgaagacagaattctaagcagtcccttgttttgcatgaagcactgtgatattgaggaagaggaggcgttaagatcggaattgcccaaagtgtctacacaccttcatatttgttactaattatcaccccttttccacttctcgttgtgtttggccagccctgaatacctggagactgatccgagaactgtttgctttcgtttcttcccacatatttttattaacaacttgaactgatcctgcctaatcc

SEQ ID NO: 570405 - DNA, 624 bp, Homo sapiens
tttaaatcttgttttgagagacacattagacagtctctacatattatattatyttgcaagggaaaaaaggagaaagatcggaaagtgctgactttctgtgtcaaatgaatggattattggcttcattcttctttattttataaaggttttcttttcaagaaatgcagaactttaccaatacaatatatatcagtctaatcggcagtcataaaatgggtggcatgagggtggaatatggcagcagggagatctcagctggcagcaaagcatgaagtggtgattgtgtttttatggaaagcctgttttgtccagtggctgatgaaattcaaaatggtcccctaagcctatctctgaagccagcagttcagaagcagtagagctagcggctctcttaacatctgtaccctgccccctatttacccagcgacaccccagcccagagcacctccaaatgtaagacttaatataaccaaatggaagctgctaggaggtactcagttccaggatcaacagtttttgctttaaaaagaaggtagcagttcagccccttgtttgtttttgcctacgcatttccctaccagcgggagaccattacccgggacaatgttttattccattgtcatt

SEQ ID NO: 570406 - DNA, 646 bp, Homo sapiens
agtttgttcttgattctctagttacttgggaaatgatttctataattatctccactctacagataaggaattttatttgtccaagattgtatagctattaaaagttgaatcagagacagtctcaagcaaacatttagagaatgtactcctagactttcagactgtacactaagttgtctgtagagctattgagaggattaaatgaaataatgtgttcatttaatcagtgcttggcatatagcaaaagctcartatagtgagctgccatttttatttctcttgaagaaatctctagtgaaatgtttgaaaatatggtaggatcattaaaagttgtgagctgtggagtatatcacaatttcagtgttgatttctggattattaatgtgacagtgcttctatgagatacagaaggagagacttctttatctgtttggagacttgcagtagtccagttgagtgtaaagagagatcctccatcactagagcagcctcacagagaagggaattttaagataactttgatagccaagcagtaacatttatggaacacctgaagtgcacagataactgctggttactgtgagaaagaaagaaaactaacattccctgagcgctgatgacaggtgccattacctttttttttctt

SEQ ID NO: 570407 - DNA, 592 bp, Homo sapiens
catgacacttataagaaacagtcacctctttatttgaatgaaaacaaagcattccaggggagattaaaaaatatattactttaatttttagaggaaaagaattctttaaagagaattgtcaacgatcaaaactggttgataaatcatatatgtaactatgtaattaaacatctccattttcagagacctgcaattagagctcttcgtctagttacccataatgattcattcttgctaatatgctaaggatgaagggagttaggaagagaaattttaatttgaacttttccctaatttggatccagacacagtggaaatacgtctaggctggaaygcaggaaaactgggttctagttgtcccagttctatttctcattaactctggagctttggccaaatcactaagtctatctgagcctttgtttcctcagctataaaacagaataataatatctacttcagggtattgttgtgaatccttaatgaaacaatggttattgtaatgtatttgtaaattttaaagcgttgtaaggtcttaataacattccagtatcatgctttctcttctttttcatagcaggccaggccctct

SEQ ID NO: 570408 - DNA, 615 bp, Homo sapiens
agatcaggtttataaggtaatattctgaagattattacttattgaaatttagttgtgtttatttttgtgttttatttttgtgattataaatgtaatacaactttgggaggccgaggcagtggatcacctgaggtcaggaattcgagaccagcctggccaatgtggcaaaaccccgtctctactaaaaatacagaaattatccaggcatgatggcgcactcctatagtcccagctacttgggaggctgagacaggataattgcttgaacctgggaggcagaggttgcagtgagctgagatcgtgccattgcactccagcctgggtgacagagcaagactccctctcaaaaaaaaaaaaaaaaaaaaaaaaaaaaagtaatatatgttaatgcctttggaaaattttataaaagtataaaaaagacaatataaaaatcactaacaatctcccaactcagagaaaaccactgttaatattttggtgtatttccttccaatmtgaaatttttacgaaaacagtataaaattaagatactctgtattgagggaagcttacatgtattgagtgtctactgtgctcaaaacagtgtgccagttgctgaagatatattaaatc

SEQ ID NO: 570409 - DNA, 482 bp, Homo sapiens
aatgcctttggaaaattttataaaagtataaaaaagacaatataaaaatcactaacaatctcccaactcagagaaaaccactgttaatattttggtgtatttccttccaatctgaaatttttacgaaaacagtataaaattaagatactctgtattgagggaagcttacatgtattgagtgtctactgtgctcaaaacagtgtgccagttgctgaagatatattaaatcacttaatccttacaacaaccctgtaaggcaggagtcacaacatggactacatactagaatcacccaaagcagtggtggggggtggtcttcagaagtctgaagcctgtgcctcagactaattatatcagaaattctaggggtggraccaaggcatcagtattttccaaaggttgttcagatgattacaatgcgcaatcaaggctaacaagttgctataacgtagagcagtggttcttaaactttagtgtgcatc

SEQ ID NO: 570410 - DNA, 531 bp, Homo sapiens
taattcagttagttgatctggtatcttttttttatcttttttctttttgagacggagtctgtctctgtcgcccaggctggaatgcagtggtgcgacctcggctcactccaacttttgcctggtatttatattttattttgtttctgaggccaggtctcctctgttgcccaggctggagtgcagtggcgtgaacatgrttcacctcagcctcgacctgtcaggctcaagcgatcctcccacctcagcctcccaagtagttaggacaacaggcacactaccatgcctggatgtttctaattttttgtagagacagggtttcactatgttgcccgggcctgtctcgaactcctgtgctcaagcaatcctcccaccttggcttcccaaagttttgggattatagatgtgagccaccatgtcgggcttggtatttcaaaatcatgattattttgggaggataatgtcaaaccagaaagtctgaaaaataatcccaggcatataactgttctcaccttgtttagaaaatatactgtc

SEQ ID NO: 570411 - DNA, 579 bp, Homo sapiens
agtctaccttcctccccagccagagacagcggcaaaaaaccaacatggtcacaccacttccttgtgtaaaacacgtcaacagcctctcacttgggataatgttcaaagttttccatgtggcccaatgggacaagcctggtccagccctgcccactctttccatcttaatttgccacatttgtccttgctgtctgtttcatatcagattcccttatgattctctgggctcttgcatggcttcagatgtctttgtgtatctccagggccccagaattccagcctgagaagccctggcctgggagctcctcgcctcctcttataccacttggccatggccttccctcttgccctccctttccccacccagctacagtgggctcttttcagtaagcacgctctgcctcagggcctttctgctctctgttccttctgcctggggtgctcttctccctcttcatctgattatcttgttttcattcctagcctctcatctkctcatacacccaatgttccctcctaccccagggcctttgctcaggccattcctactgtccaaaatgtccttccctcttccacctt

SEQ ID NO: 570412 - DNA, 426 bp, Homo sapiens
aagtagaaactgtagatgtagaattctcctccatccacctcttgtctctcctctccctcccagtcatgtctccaaccccataacctgccaggggtgtacaaaagaacccccagggcacatgtccagcgtgcctcacaggctcagctcttggcgctgaacaccctcatttccctaggaaataactcttgttcctttttaaaattcagtcttagctgggtgtagtggcctgtgcctgtggtcccagatattcagaaggctgaggcagaaggatcrcttgaacccaggagttcatagccagcctgagcaacataatgagactccatctcaaaaaaaaaaaaaaaaggttttaattcagtcttgttattctcaggcagaagtatgtatttttctttactattgtccattgaatcttgctccaattaaaca

SEQ ID NO: 570413 - DNA, 425 bp, Homo sapiens
gaggtcaggcattcgagaccagcctggccaacatggtgaaatcctgtytctattaaaaatacaaaaaaaattagccaggcctggtggtgcgcgactgtaatcccagctactggggaggctgaagtgggagaattgcttaaacccaggaggcagaggttgcagtgagccgagatcgcatcactgcactccagtctgggcaaagggagactccatctcaaaaaaaaaaaaaaaatcaatgtctggaaaagatctttttaacgttatttcacgggttcctcttgttggatggaatccttggtcatttgcatgtactgtgctttacatataaaaagagtaagattattttcgccactttcccaggtgggaggtgctatcccctttgaaaatgcatggccagccctgctcattctctgttgctctcacat

SEQ ID NO: 570414 - DNA, 577 bp, Homo sapiens
aaaacaaattttaataagataatgtaaatatacataccctccacacaccaagaattcatttgaagcacgtctgccagcagtccccaytggcatatcacctaaaggagagaaaagaacaatcagttcctgttataccatctgcttaaaaaaacacaaatttgttccaaaatgattattaggatttcatgcacgatgcaaaattaccattggcttatgttatgatttcatgtataagaaataatagatgacctcagaaaactacacctagctgaagacataggctgcaactctttggatgcccacttctataagcaaatttgaggtcttcttcaaaataaaatgccatatttattgcagtgtttacatatttcttccccattaaacatgcaaaaactgtgctgtttttatcaggttcctttttctgtgtcaatgacaaaagttctgagagttgtgccctttaatactatttgcacataactttattgcaaaattttgcaaagaacatgtatataacataatagaagaactgaccatataacaaactctagttccgtaaaatgtcggattaccccatcct

SEQ ID NO: 570415 - DNA, 426 bp, Homo sapiens
aaaccccatctctactaaaaatacaaaaattagccgggcatggtggcaggcacctgtaatcctagctacttgggaggctgaggcaggagaatcgcttgaacccaggaggcagaggttgcaatgaaccaaaatcacgccactgcactccagcctgggtgacaaagtgagactgtgtytcaaaaaaaaaaaaaaaagagagaaataaaattagcctacttactatcttctaatcaaagcatttgtggtaacttaaaatatactgtattgtaaagtatcatgctgtttcatttaggccattattctatttgaatctgtggctgtttctcttaataaatcaagtaatatggaatatattcatagcctctgaagagctctttatgtaagtatttatttaggatactttttgtaaaataagtgaatgaattc

SEQ ID NO: 570416 - DNA, 513 bp, Homo sapiens
acttgaggccaggagcttaagactagctgggccacatagcatgaccctgtctctataaaaattttaaaaattagcctggtgtagtggcatgcacctgtaatcacaaggctgaagtgggaggatcccttggcccaggtgttcgagactaaggcaagctgtgatcactccactgcactctggcctgggtgacagagcgagaccctgtcttttaagttaaaaaaaagttggtccagaaatatgaatttaattaaactggattaaacaaaaatctttatattataccaaaggcattttgaatctatgaaaagagacagtaaaaaaattttytaaaaagcaatagatagcaaggtttttcaatatttatatctcaaaatatttgttttaagtctttttatggaggttatcttgtaataaatatatctgtagtttttcttttaattttataatattttaagtatacatttatgaaaattatagattaaaatacgaattatatgtgtataagtttatttt

SEQ ID NO: 570417 - DNA, 476 bp, Homo sapiens
gcctaaaaaaagaaaaatgtgtttttttataaatacttaaaagwggggcctctctgaaaatgtaaaattttctagttttccattaacttccgacaatagattaccagttgtttaaacttaaaagttaaaacgtttaaaaataccaattctaatagctaacatttaccgagtgtttgctcagctaggcactgtgctttatgtgaattgtcacattccaccttcacaacaaccctatttttatctctttttttatggaaaaggcaattgaagttcagagagttcaagtgatttactcaaggccctatagctagtatgttgggagagtcagaacttgaacccaggaccagataactctagagactgtggcagacgttgggacatggctggttttcaaaaagcacctcatgatttgcctgattgggaaaaggcagattctctgaactaagacttgcgttcaagctggcctgggtttgcca

SEQ ID NO: 570418 - DNA, 502 bp, Homo sapiens
ccctgtggccgttattattgtcgttgatgatgttttaacgtttgaacttattacatgttattcacatttatggtgggaaaagcacaggtctaggaatcagatgactattacctcctgtcttgtgttcttaraaaattcacttccattttctgagcctcattatttcatctgtcaagtggcattatgctatgcacattacagggatattataagcataatacatcttttatgtaaggatcatatatgtaaattatgatgcactatacatacattagttattgttctgcatctgaggacaatttatcttcctagaaggaggattgctcggatataacctattgtgaacaagtgtgagaacttttaatacactaatagccttagacctcaaatcctggacagcttattagtgcttattagtgcccatgtagtaagtcctcactaactcctttgagcattttgtatgctataatactctttttttgtactgtttttagttatttct

SEQ ID NO: 570419 - DNA, 556 bp, Homo sapiens
ctaaggcacaagaaccacttgaacccatgaggtagaggttgcagtgagccgagatggcaccactgcactacagctggatgacagagccagactctgtctcaaaaataaataaataaataaataaataaataaataaataaataataaaattaaggaaataaggaaagaagactttcaatgagatagcaagatagtgtttttttcttcctctttctctccctctttcccttccttcctttcttcctttcttccttttttaaaagcagaacagtagtacagtacaggaacccaaaaggaaccaaaagcccaacctgagtcatagcatccttcagatatatatggttatacagcactrctttggggattctatatagtatatttactcctctccttcccttgacacctacatatttcttttctaatccttccacttactcctctgttgtttctttcctatctcagtacttcctaaccatttccctagccagaccacacacacaaacagactccttcagattgtcttgaagcctaattcctggcctctagtcaattcccc

SEQ ID NO: 570420 - DNA, 469 bp, Homo sapiens
tgctaaaacataacaagagtcacctttgctccagttcccaacaagttcctcatttccagctgctaccacctcagtctggacctggaccttattgtccatattgccatcagcattttgggcaaagccattcaacaagtctctaggaagttccaaactttcycacattttcctgtcttcttttgagccctccaaactgttccaatgtctgcctgatactcagttccaacatcgcttccacattttcaggtatcttttcagcagtgctcccactctattggtaccaatttactgtactaatccgtattcatgctgttgataaaatcatatccaagcctgggcaattaacaaaagaaggaggcttattggacttacagttccacgtggctggagaggtctcataatcatggcagaaggtgaaaggcacatctcacatggcagcagacaagagaagagagcttgtgcagggaaa

SEQ ID NO: 570421 - DNA, 503 bp, Homo sapiens
tatctttccatttttttgtgtcctctcctatttttttcagagttttatagtcttccttatatagatcttttactttgttagactgatttctagatattttatatttttgtaccttgtaaatgggattgctttcttgatttctgtttcagattgtttgctgttggtgtatataaatgctactgatttttgtgtgttaattttgtatcctgcaactttgctgaatttgtttatcagttccagtagttttttggtggggcctttaggtatttctaggtataaaatcaagtcatctatgaacaagaccaatttgatttatttctttccagtttggatgccctttagtttatgttcttgcctaattgctctggccaggacttccagtgttatgttgaataaccatastaaaagtgggcatccagccaggcacagtggctcacacctttaataccagcagtttgggaggctaaggcaggaggatcatttgagcacaggagtttgagacc

SEQ ID NO: 570422 - DNA, 658 bp, Homo sapiens
tgtagcatcttattgattccttggatggggttgcaactttctcctgaatctcaatgatcttcattcctatccattttctgaattctatgtctgtcatttcagccatttcaggctggctagggacgattgctagagaattagtgtggtggtttggaggtaagaagacactctggtttttgagttgccagagttctcacactagttctttctcatctgtgtgggctgatgttccttcaatttttgaagttgatgtgctttggagaggttttctgcttttatcttctttgatgatcttggtttgattgtggtatatggtgggtttggttgacwtgcttcatttctggaagattttagggggcccagactcagctcagcactcctgggctgcgtgctctaactctgggagggctggtgctgggcgcctggctgtgctatctgaaccctcaaggttaggaatctattctgctggaggggctgagttgttcccagtctgctggccacagcactgtgatggaagatgctagccaaagcacttggtcagggtggtgtcagtgagatctgtgcttactgatgtatggcagcagctgcagcagcatggcggggtgcacacgtgttagctggggaggggttccagcagaaatggggaggcggtgttcct

SEQ ID NO: 570423 - DNA, 592 bp, Homo sapiens
tgtatgttcttggcacttttgttaaaaatgagttcactgtaggtgtgtgggtttgtttctgggttctatattctgttccattggtctgtgtgtctgtttttatgccagtaccatgctgttttggttcctctagttttgctctttttgcttaggatagctttggtttttcttggtgttcttttaggattttttttttctatttctgtaaagaatatcattggtattttgatagggatagcattgaatctgyagattgctttggttagtatgaacatgttaacaatattgattattccaatctgtgaacattgaatatttttccaatatttctattttttgatgtcctcttcaatgtatttcatcagtgttttatagttttcattatagagttccttcacttctttgataattcctaggtatttaattttatgtgtgactattgtaaatgggttacttttaagatttcttattcagattgttcaccgttggcatatagatgtgctactgatttttgtttgttgattttgtatcctgaagctttactgaatttatcagttctaatagctttcttgtggagtctttaggtttttcc

SEQ ID NO: 570424 - DNA, 592 bp, Homo sapiens
tgtatgttcttggcacttttgttaaaaatgagttcactgtaggtgtgtgggtttgtttctgggttctatattctgttccattggtctgtgtgtctgtttttatgccagtaccatgctgttttggttcctctagttttgctctttttgcttaggatagctttggtttttcttggtgttcttttaggattttttttttctatttctgtaaagaatatcattggtattttgatagggatagcattgaatctgtagattgctttggttagtatgaacatgttaacaatattgattattccaatctgtgaacattgaatatttttccaatatttctattttttgatgtcctcttcaatktatttcatcagtgttttatagttttcattatagagttccttcacttctttgataattcctaggtatttaattttatgtgtgactattgtaaatgggttacttttaagatttcttattcagattgttcaccgttggcatatagatgtgctactgatttttgtttgttgattttgtatcctgaagctttactgaatttatcagttctaatagctttcttgtggagtctttaggtttttcc

SEQ ID NO: 570425 - DNA, 592 bp, Homo sapiens
tgtatgttcttggcacttttgttaaaaatgagttcactgtaggtgtgtgggtttgtttctgggttctatattctgttccattggtctgtgtgtctgtttttatgccagtaccatgctgttttggttcctctagttttgctctttttgcttaggatagctttggtttttcttggtgttcttttaggattttttttttctatttctgtaaagaatatcattggtattttgatagggatagcattgaatctgtagattgctttggttagtatgaacatgttaacaatattgattattccaatctgtgaacattgaatatttttccaatatttctattttttgatgtcctcttcaatgtatttcatcagtgttttatagttttcattatagagttcyttcacttctttgataattcctaggtatttaattttatgtgtgactattgtaaatgggttacttttaagatttcttattcagattgttcaccgttggcatatagatgtgctactgatttttgtttgttgattttgtatcctgaagctttactgaatttatcagttctaatagctttcttgtggagtctttaggtttttcc

SEQ ID NO: 570426 - DNA, 577 bp, Homo sapiens
taaatatttgttagatggatgaatcaaggaaataagtaagattggttatatggcatgacccagggttcaagctgatttatggaatggggtggacagaagaaaagaggaagataaattcatagtgtaaggacatctctgagaatgtagtagaaatatgtcttggacaaagatgccctctctcaccacttctattcagcatcgtatttgaagtccgagtcagaactmtcaggcaagagaaagaaataaaaggcatccaaataggaagagaagaagtcaaactaccctgtttgcagatgacatgattttctatgtagaaaatcgcatagtctctgtccaaaagctctttgaattgataaataactttagcaaagtttcaggacacaacatcaatgtacaaaaatcactagcattcttatacaccaacagtcaagctgaaagccaaatcaggaacacaatcccatccacaattgccacacacacatagacacacacacacacacacacacacacaaacacacaaatacctaggaatacagctaaccagggaggtgaaagatctccaaaatgaaaattataa

SEQ ID NO: 570427 - DNA, 582 bp, Homo sapiens
gaaccgcttgtgcgtcctcttattctttctctaagccccacattcactgttgtttcaactattccttatgggatatgggtactggacctcctcaccattcttgctccctcttcttagaatgtactcttgtttatcatcgctcccctaaygtaactattcctcccatctgctatgtctcagttttttattctatttgtaccaagtgcctattttctttatgtttaaagtgtctaggaattatacaatccaaaatattcagtaaggttaataaattagaagtagaaaactaggacaaaagaaaagaataaaaacataccaactcttaattacttaatgtaattgttttgtttaatcttacttactaagattcctggaggccaaggtgaaagggcaatagtaagttatagaggtctcatgatcagaatagaggaatcattccagttcttcagaagaggcagtattttccctgggggtgctaaattctgaaatgcatttctcacatggattctttagagcacataaaatataatgaaaatcacctctgcaatgtctgaaaacaaatgcaagagtggtgttcacatg

SEQ ID NO: 570428 - DNA, 573 bp, Homo sapiens
cctttatgcaggaaaaattaatattaagccataggtttgccctctttttgggctttctcagatatacatgttatggtcccaagagagcagctccacattctatgggaaattcaacattaaccacaccccmacacacatgcacacacttctttcactcacaccaaaataaaatcccaaaacaaaataaaactatgtaatggcctcctataagcatgcactgggttttttgtttcgttgcttaatgatgtgtgctttttatgaaaatatgtagaagattattccatattgagtgagtcccatgaggaagatacatattttaaggtataactcaatggaagagtcttcagataaataatgtgtagtaaaaagtaaaaagcatataaaagttgggggaaagatagggcccaagtatggaaacaagaagagtggcttatgtgggtagatggagatatgttaggaggtgtctctctgctcttcctaacgtggcagtgctaaatgacagctcttgggaaggtaaagaaggcctttccaaaaaaaaaaaaaaaaaaaaaaatcctgtctttcctcctcaag

SEQ ID NO: 570429 - DNA, 573 bp, Homo sapiens
cctttatgcaggaaaaattaatattaagccataggtttgccctctttttgggctttctcagatatacatgttatggtcccaagagagcagctccacattctatgggaaattcaacattaaccacacccccacacacrtgcacacacttctttcactcacaccaaaataaaatcccaaaacaaaataaaactatgtaatggcctcctataagcatgcactgggttttttgtttcgttgcttaatgatgtgtgctttttatgaaaatatgtagaagattattccatattgagtgagtcccatgaggaagatacatattttaaggtataactcaatggaagagtcttcagataaataatgtgtagtaaaaagtaaaaagcatataaaagttgggggaaagatagggcccaagtatggaaacaagaagagtggcttatgtgggtagatggagatatgttaggaggtgtctctctgctcttcctaacgtggcagtgctaaatgacagctcttgggaaggtaaagaaggcctttccaaaaaaaaaaaaaaaaaaaaaaatcctgtctttcctcctcaag

SEQ ID NO: 570430 - DNA, 573 bp, Homo sapiens
cctttatgcaggaaaaattaatattaagccataggtttgccctctttttgggctttctcagatatacatgttatggtcccaagagagcagctccacattctatgggaaattcaacattaaccacacccccacacacatgcacacacttctttcactcacaccaaaataaaatcccaaaacaaaataaaactatgtaatggcctcctataagcatgcactgggttttttgtttckttgcttaatgatgtgtgctttttatgaaaatatgtagaagattattccatattgagtgagtcccatgaggaagatacatattttaaggtataactcaatggaagagtcttcagataaataatgtgtagtaaaaagtaaaaagcatataaaagttgggggaaagatagggcccaagtatggaaacaagaagagtggcttatgtgggtagatggagatatgttaggaggtgtctctctgctcttcctaacgtggcagtgctaaatgacagctcttgggaaggtaaagaaggcctttccaaaaaaaaaaaaaaaaaaaaaaatcctgtctttcctcctcaag

SEQ ID NO: 570431 - DNA, 521 bp, Homo sapiens
agctgggcatgatggtgagcacttgtaatcccagctactcaggaggctgagatgggtgaatcgcttgaacccgggaggtggaatttgcagtgagccgagatcacgccattgcactccaaactgggctactgagcaagactctgtcttaaaacaacaacaacaaaaatttgttgggctaaagtagaataaaacaattgtaattcacagctttaagaatctcgatttcaatagagatcagtatatataaacttttactttcgaaagcaaagcattagaccagccgcggttcagaaaaatttctctcctatctcttacaaatactgtttatctgtrcaaagcacagttcctttcaggtagggttgacttcagtaacatttttcttatggataacaaaacttttcaaaattggcagtgcatgacattctaatttcaaagactcttattctgatgtgagtgccagttacttgaggctgattaatttataaaatttcaaatgtgtatttgaaaaaattgaattttat

SEQ ID NO: 570432 - DNA, 482 bp, Homo sapiens
gcaggtcctctcaatacctctgctgatttggatctaatctcatggcctctgactgtctgaagtttttctccaacctcaaaaatattaataaactgtgaaggaaatcaggacttttgtatatctattagtgaggtctttgccatcatttctccacatatcaattgttcatccagacacagattttctggatgggagaaatcactgggacgataggagcatactatstaatgggtctagcttcgggattagttgacatttataagatcaccttcagatataattctttgagaaaatgattttaaagcaaaattcgatatctgtaaaatgaacacttgccaatgcttgagagcaagaaggatttgtaagccaaatataatgctgtaagaaattgatataaattgatttttatttagtgtaaaaaagtcagagtacattgtagaaaatgcatttatgttaaaataaggaaataataataataatcc

SEQ ID NO: 570433 - DNA, 322 bp, Homo sapiens
tgtaacctagaaggtactcaayaaatattattgaattaataagtccataactttctgaacaatcttgggaaaggtgactgcctgttcttatcttaatagatcctgaacagcctgtggagaaaaggtggatagaaacatctgttttctttcaatactatatctatcaatctatctgtctgtctgtctgtctgtctgtctatctatctatctatctaatctatctatatctatatatttactacatttatttccttaagtcataatggaaaaagtctgggcacgagcaagacttcatttacaaggatctttgattaaaatttat

SEQ ID NO: 570434 - DNA, 570 bp, Homo sapiens
gagttacttagaaggaaaattctaaataaacacatggtagcattgtggcaatggagttagcctgatttttttcaggggtacatccatccattcctcaaaagatcaggagcaaattttgattggtctctgcaaatctctgtcatctcattccctttccagtgattggtttggaggaaaatgtaagccccagttacatccagtgactaaggggaagttagcaaaacagcttctaagaaaggatgtcttgctcttcacaaaggttcacatggaaaatatcagtccttttctttttcaggagatttttacacctatctgtgatgctatcttgtgaccatgaggagtgctaagctgaatcacaaatccaccatgctgaggacagcacaacaaagacttggggacttaatggtttcaaccagtcactgggttaacaaaccctggarcaatcccacctcaaaacttcaggtaatatgcgattacaattttttttattgtttaacccagttgatatggagttatctgttacttgaagacacttaactgattgcatgatgtcacttaactgattgcatg

SEQ ID NO: 570435 - DNA, 544 bp, Homo sapiens
ttgcattagagttccaaagctgaggaccatagctgttagctatctatccctacattctaatgtcagggccaagatacttccagccatcctctcagagcttagtaaaagactcctactcccattaccccaatcaatccataaagaagtaagttcactaaataaagatcttttgtgaagaagagaatatcttatatatattgttaaaaatttttgccatagtcaccctgttgtgctagcaaatactagttcatattcattctttctaactgctttattgtacccattaactatccccactccccccaaacccacccccactgcttttcccagcctctgataagcatccttttactctctatctcatactgcattttatttattcatttgtctgctgacggataaaggatgcttccaaatcttggctattgcgaatagtgatgcaataaacacargagtgcagataccccttccatatcctgatttattttctttgaggcacatacccagcagtgggattgctggattgaaggataactctacttat

SEQ ID NO: 570436 - DNA, 601 bp, Homo sapiens
agtctcagctagttctttatagaagtgtgaaagagactaacacaactatatacactacactatgtatattactatatatagagataatttaatcttaaataaatataatgtaaatacatatatatkttgtatgtacactgtgtgtgtatgtgtgtatatatataatatatatatatatatatactatatagagtgcaatggagatataggtatagatagtatatagagtgcaatggagaagttagagaaataattcagattactggaacaaaatattaagagtgtcatgacctagggattatgaaatcaatgaaaatataaatagggctcaggagaatctaagatgtttaggaaaagcaggaagtctcaaatcccatcctcaaaaagcaacagaatcagttagcagagcatagctactgtgagaacctttctgcatgttctacaaaacaacatctttttcaaactagggagaattgttttatcaaaataattggttgtgaataacttcctagataaaaattgtgagaaatggacccaaaatattaaagtaggtgtctttggacacacaagaatgaagggcactgagacagagcaagaaact

SEQ ID NO: 570437 - DNA, 601 bp, Homo sapiens
agtctcagctagttctttatagaagtgtgaaagagactaacacaactatatacactacactatgtatattactatatatagagataatttaatcttaaataaatataatgtaaatacatatatatgttgtatgtacactgtgtgtgtatgtgtgtatatatataatatatatatatatatatactatatagagtgcaatggagatataggtatagatagtatatagagtgcaatggagaagttagagaaataattcagattactggaacaaaatattaagagtgtcatgacctagggattatgaaatcaatgaaaatataaatagggctcaggagaatctaagatgtttaggaaaagcaggaagtctcaaatcccatcctcaaaaagcaacagaatcagttagcagagcatagctactgtgagaacctttctgcatgttctacaaaacaacatctttttcaaactagggagaattgttttatcaaaataattggttgtgaataacttcytagataaaaattgtgagaaatggacccaaaatattaaagtaggtgtctttggacacacaagaatgaagggcactgagacagagcaagaaact

SEQ ID NO: 570438 - DNA, 560 bp, Homo sapiens
agaaaatatttgcaaactatacatctgataagggtttaatctctttttttttgtcccctgattgccctgccttcccccacttaagggtataattttcaaaatatataaggaacttaactcaatagcaaaaaaaaaaaaaaaaaaaaaaaaaaaaaacgaaacccccawttataaaatgggcaaagtatttgactagacatttctcaaaagaagatacacaaatagttagcaggtacacacacaaaaatcactcaatatcactatcacaatcaactggaaaatataaattaaaagcacaataaaatatcacctcacagtattaatttaattaattaaattaagatgtctagaattttaaaaaaagtgttggagagaaacttgaaatactggagcccttgttcactgttgggattggaaactggtatagccattaggaaagtcaatgtggaggtccctcaaaaaattaaaaagagaactatcatataatccagcaattccactactaggtatatatccaaagaatacacaatcagtacctaaaaaatttctacacccctatg

SEQ ID NO: 570439 - DNA, 560 bp, Homo sapiens
agaaaatatttgcaaactatacatctgataagggtttaatctctttttttttgtcccctgattgccctgccttcccccacttaagggtataattttcaaaatatataaggaacttaactcaatagcaaaaaaaaaaaaaaaaaaaaaaaaaaaaaacgaaacccccatttataaaatgggcaaagtatttgactagacatttctcaaaagaagatacacaaayagttagcaggtacacacacaaaaatcactcaatatcactatcacaatcaactggaaaatataaattaaaagcacaataaaatatcacctcacagtattaatttaattaattaaattaagatgtctagaattttaaaaaaagtgttggagagaaacttgaaatactggagcccttgttcactgttgggattggaaactggtatagccattaggaaagtcaatgtggaggtccctcaaaaaattaaaaagagaactatcatataatccagcaattccactactaggtatatatccaaagaatacacaatcagtacctaaaaaatttctacacccctatg

SEQ ID NO: 570440 - DNA, 560 bp, Homo sapiens
agaaaatatttgcaaactatacatctgataagggtttaatctctttttttttgtcccctgattgccctgccttcccccacttaagggtataattttcaaaatatataaggaacttaactcaatagcaaaaaaaaaaaaaaaaaaaaaaaaaaaaaacgaaacccccatttataaaatgggcaaagtatttgactagacatttctcaaaagaagatacacaaatagtyagcaggtacacacacaaaaatcactcaatatcactatcacaatcaactggaaaatataaattaaaagcacaataaaatatcacctcacagtattaatttaattaattaaattaagatgtctagaattttaaaaaaagtgttggagagaaacttgaaatactggagcccttgttcactgttgggattggaaactggtatagccattaggaaagtcaatgtggaggtccctcaaaaaattaaaaagagaactatcatataatccagcaattccactactaggtatatatccaaagaatacacaatcagtacctaaaaaatttctacacccctatg

SEQ ID NO: 570441 - DNA, 658 bp, Homo sapiens
aaaaaccctgtctctactaaaaataaaaaattagcagggcatggtggcacatgcctgtaatcccagctactcgggagaattgcttgaacccgggaggcagaggttgcagcgagcagagatcgcaccattgcactccagcctggacaacaagagcaaaactgtctcaaaacaaaacaaaacaaaacaaaacaaaaattggtgggtcaatatgaatgaaatctaggatattatacaaatggtcataggagcttgggaaawtacttgtttttttctataaactgtgaatatctgagaatatgaagtcaacaaatttgacctttattcaaatacattgatttagataaaatcatgcataataggaatatagggataaaagagaaaatttggataaatgtatagtcaccttataattttgtaaaatttataattggggtgatgctattttcccgccctgagattttctttattttggatagaccaccatgagcataactctcccagtttccctctgccttcaaaagctgagagggaatgattcatgtgactagtaacttgagaagagtaactggctataatcaactaagttccttatttcttcttttgtagtaagatagcctcagagaaaggacttctgtgactctttatgccccagccctta

SEQ ID NO: 570442 - DNA, 603 bp, Homo sapiens
tcgcaccattgcactccagcctggacaacaagagcaaaactgtctcaaaacaaaacaaaacaaaacaaaacaaaaattggtgggtcaatatgaatgaaatctaggatattatacaaatggtcataggagcttgggaaaatacttgtttttttctataaactgtgaatatctgagaatatgaagtcaacaaatttgacctttattcaaatacattgatttagataaaatcatgcataataggaatatagggataaaagagaaartttggataaatgtatagtcaccttataattttgtaaaatttataattggggtgatgctattttcccgccctgagattttctttattttggatagaccaccatgagcataactctcccagtttccctctgccttcaaaagctgagagggaatgattcatgtgactagtaacttgagaagagtaactggctataatcaactaagttccttatttcttcttttgtagtaagatagcctcagagaaaggacttctgtgactctttatgccccagcccttaccttgcaggcattctacctgtggagacatgtctcgttcagtgttgcctgtgactggaaaattga

SEQ ID NO: 570443 - DNA, 620 bp, Homo sapiens
tattaaagagattgcctttttctcatgtatgttcttggctaatttattgaaaatggtttcgctgtaggtatattgatttgtttctgggttctctattctgttccatggtctatgtatctgtttttatgtcagtaccatactggtttggttactacagttctgtaatataatttgaagtcatgtaatgcaattcatccagttttgttctttttgcttaggatagtttttgctattcttggtcttttgtagttccataaaaatcttacgattgtattttctatttctgtgaagaatgtcattgatattttgatagagattgcattgaatctgtagagtgctttgtgtaatatggacattttaacaatattgattattccaaaccatgaacatagaatattktttccattattttgcgccctcttcaatttctttcaaccatggttttcagttttattacaaagatctttcacttgtttggttgagttaattctgaggtatttaattttatgtgtggctactgtaaaagggattacttttttttcttctttacattgttttctgttagaatatagaaatgctaccgatttttgtatgttgactttgtatcctgcaactttatt

SEQ ID NO: 570444 - DNA, 547 bp, Homo sapiens
ttgttttcagttgttgttgttgtttttggttttggtttttttttttttttttagtcagagtcttactctgttgcccaggctggagtgcagtggcacgatctcggttcactgcaaactccacctcccgggttcaaatgattctcctgcctcagcctcctgagtcactgggattacaggctcccgccaccacgctcggstaatttttgtatttttagtagagacggggtttcaccatgttggtcaggctggtctcgaactcctgacctcatgatctgcccacatctgccttccaaagtgctggtattacaggcatgagccaccgtgcccagccaatccacagagattttaattaattaacaaatcaatgaataactccacaagtgacgattcctgctacctaatgtcagacctatgtgagtcttttgacagtccagcattgccttcattggagaaatgactctttcccaaatcatgtcaatttgctatcaagctacttccccaacaacaggatgggctgctgacccaggttagctataaataacaatca

SEQ ID NO: 570445 - DNA, 525 bp, Homo sapiens
attttatgtactttttcctgaacatatactataaattaactaacaagtcttagaactaataacaaaaacagtattatttagtgaagcatatgtatttcatttaggctaggacctgccccatcatgtctgaatttttatctgtgcaagatatagatttcaaataaaaaataaattgtttaatatatcgtacactaaatcatctgaaaagtaaggcttatcaaacttacagggtatgatttcagatttttttgattcgtatttttttaattcacgaactatttgagacatctgtccttctgggtaaatggcaggataatagcaagccagttcccctaatgtaatattttacgtgaaagaaaagtaagctagtggcactggtcatttccaatgaacataggaaaagaggagattacaaaacaaaaagtmatagatacagtatagacaatggcagtatgctatccaactctcagatattagcatttgttcctcagatgctactttatcttttatttttttttcacatta

SEQ ID NO: 570446 - DNA, 345 bp, Homo sapiens
gcacttcagcctgggtgacagagtgagactccatctcaaaaaaaaaaatcatgaatgagctggaccccaccaccaccaccaatccagcatcctcatcagagcaccccagtcaaacaacggwctctcatccttccaactaggattcagtgccctgaactctaaaatctcaagcaggagtcccaaaaccccctcccctaacacacgatctgaaacttcctaccagaggttctggaccccggtttcccatgctgggacttccaatcacagatcttcttcaacatccagcatggagtcccgatttcataacattagactccaaacaggagatcccagttcatctctgtg

SEQ ID NO: 570447 - DNA, 327 bp, Homo sapiens
gggttcccagggtcctcttcctccrtttggctcttttcttctctggactctcccaccttcgaggattggactccttgcagggagcgcaaagcagagaacagaggaggcccatctgaggagagtgtgctggagcagatggggcacacagagagcccccaaacctgagcctcacctggagagtggctccctgcaagctgagcccctgtgtgcccagaagtgacataggcattcaggaaagggactgagggaggaaagaaggagccattcctcttcccaggggcgcctgccctgggttcctgagggaggctccatgtttacatctccaaa

SEQ ID NO: 570448 - DNA, 327 bp, Homo sapiens
gggttcccagggtcctcttcctccgtttggctcttttcttctctggactctcccaccttcgaggattggactccttgcagggagcgcaaagcagagaacagaggaggcccawctgaggagagtgtgctggagcagatggggcacacagagagcccccaaacctgagcctcacctggagagtggctccctgcaagctgagcccctgtgtgcccagaagtgacataggcattcaggaaagggactgagggaggaaagaaggagccattcctcttcccaggggcgcctgccctgggttcctgagggaggctccatgtttacatctccaaa

SEQ ID NO: 570449 - DNA, 392 bp, Homo sapiens
tgctgccaaagaccagtccaaagaagaattaggctgtaagctgctagtttataccgtctatgaaatcaatgacaatgcccaattttaggctaaccctaaaacacttgccattttatgactccatattctttcaatttacagaaaagtacaaactttttaaagaaagtaatcttatcagagcaatataatttaacaatacctataatagaaagctatcccagtaaattttttgaacaattgaacttttgtctcatgtagcttttaactttgatattttattcatcycaacaaaataaaactttattgaaacaaaagtgtatggtttaggaatatgctcttaataacaactgagcaaaattagaatgatgtggactataacagaatgaaggaag

SEQ ID NO: 570450 - DNA, 517 bp, Homo sapiens
ttgtagtgtttatcagctttgaaaaactagtttattgtgctttcttttctcgttctaaataactactcattttgtacatagtttggtattcactgtctttttaaaaaaakttttgagacagaatcttgctatagttgcccaggcagaactcaaactccggggctcaagcaacccttctgcctcagcttcctgaatagctaggattacaggtgtgtattaccacacctcgctactcactgtcttaaacaaggcctccaaagtagttttcactgcagacctcaaaaaagctggatctgctcctgatgatgacaatctctaagattgcttgttacacctattatgctatttttacacacttctttgcttgaacaggcatagaatatctctagaaggataagaaaaaaataatggttgcttctgtggaggagggctgggacatagcagtaatatttcactatatatcctttctagaacatcttcatatgttatctattaaaaatatttaattaaaaataaa

SEQ ID NO: 570451 - DNA, 529 bp, Homo sapiens
tgattttctttctttcttttgccttattgctctagctaggacttccagtactctgttgaataggagtggtggaaacaggcatccttgtcttattccagatcttagaggaagggctttctgcatgatgttagtggtgggtttgtcatatatggccttttttattttgaggtatgttcctcccatatctagtttgttgagagtttttaatcatgaagggatgttgaattttaattttattaaatgctttttctgcatctattgagatgatcatacttttgtattattatactttaagttctaggttaaatgtgcacaacgtggaggcttgttacatatgtatacatgtgccacattggtttgctgcaccaattaactcatcatttacattaggcatgtctcctaatgctatccctcccccagcccccacctcatgacaggccctggtgagtgatgttccccgccctgtgttctcattgttcaattcccacctatgagtgagaagatrcagtgtttagttttctgtccttta

SEQ ID NO: 570452 - DNA, 558 bp, Homo sapiens
tggtaaagggttcaattcaacaagaagatctaactatctcaaatatatatgtacccaacacaggagcacccaaattcataaagcaagttcttagagacctttgaagacacttagactcccacrcaataatagtgggactttaacatgccactgacaatattagacagatcaccaagatagaaaattaacaaagatattcaggaccagaactcagctctggatcatatatccacagaactctccaccaaaaaacaacagaatatacattcttctcatcgtcacatggcatatactctaaaatcaatcacatgatcagaagtaaaataatcatcagcaaatgcaaagactgaaatcataacaatctctcagaccacagtgtaatcaaattagaaatcgagaccaagaaattcactcaaaaccgcacaattacatggaaattgaataacctgttcctgaatgactcatgggtaaatcataaattaaagcagaaatcaagaaattctttgaaactaatgagaacacaaagacaacataccaaaatctctgcaacacagctaa

SEQ ID NO: 570453 - DNA, 540 bp, Homo sapiens
ttcaaaaattgaaggtaaataagcccacaaagatgagaaagaatcagcacaagaatgctgaaaactcaaaaatccacagtgccttctttcctccaatgactacatcacctccagcaagggtttggaaaaagacttagatggctgaaatgacagaaatagaattcagaatatggatagaaatgaaaatcattgagccacaggagttcattaaaatccaatgcaaggaagctaaaaatcatgatacarcaatgcaggagctgacagacaaaataaccaggatggagactacactgtatctgacctgatagagctgaaaaacacactacaagaatttcacaatgcaatcacaaatgttaatagcagaataaaccaacaagtaaaagaatctcagagcttgaaaactggctttctgaaataagacagacaggcaagaatagagaaaaaagaatgaaaaaggaatgaacaaaacctccaataaatatgagattatgtaacaagaccaaatctacaactcaggggtgtccctgaaggacatgaggg

SEQ ID NO: 570454 - DNA, 571 bp, Homo sapiens
acccactggggcactgcctagtggagctgtgagaagagggccatcgtcttccagaccccagaatagtagatccaccaacagcttgcactgtgtgcctggaaaagctgcagacactcaacaccagtgaaagcaggagggagttggggggctgtaacctgcaaagccacaggggtggagctgctcaaggccgtgggagcccaccccttgtatcagcatgacctgaaagtgagacatggagtcaaaggaaattatttcagagcttcaagacwtgactgctccattggattttggacttgcatgggacctgtatcccctttgttttggccaatttctctcatttggaatgggtatacttacccaatgcctgtatctaggaattacccaattccccttgtatctaggaagtaactaacttgcttttgattttacaggctcataggaggaagggacttgacttgtctcagatgagactttggactgtggacttttgagttaatgctgcaatgagttaagactttgggggactattgggaaggcatgattggttttgaaatgtgaggacatgagattt

SEQ ID NO: 570455 - DNA, 329 bp, Homo sapiens
catgtataacgttgtaaggcaaagattcacaaccaaaaacaaggttttattaactttygcctttaagaaccttcagtgtttagccctctttgattcctagtattactacctttggtatgaactctttttttaaactgatccactctagaagtttatgcattttgtatcatttttcaagccaacagaaatgtgtaaggcctataattctgacatttttagttatttttaaggctgtgagcatgtaagatagtgttcatatatggaagaatatgtataaataccactaggtagcttattttgaagagatagtatctaaatttttgtccaga

SEQ ID NO: 570456 - DNA, 329 bp, Homo sapiens
catgtataacgttgtaaggcaaagattcacaaccaaaaacaaggttttattaactttcgcctttaagaaccttcagtgtttagccctctttgattcctagtattactacctttggtatgaactcttttwttaaactgatccactctagaagtttatgcattttgtatcatttttcaagccaacagaaatgtgtaaggcctataattctgacatttttagttatttttaaggctgtgagcatgtaagatagtgttcatatatggaagaatatgtataaataccactaggtagcttattttgaagagatagtatctaaatttttgtccaga

SEQ ID NO: 570457 - DNA, 329 bp, Homo sapiens
catgtataacgttgtaaggcaaagattcacaaccaaaaacaaggttttattaactttcgcctttaagaaccttcagtgtttagccctctttgattcctagtattactacctttggtatgaactctttttttaaactgatccactctagaagtttatgcattttgtatcatttttcaagccaacagaaatgtgtaakgcctataattctgacatttttagttatttttaaggctgtgagcatgtaagatagtgttcatatatggaagaatatgtataaataccactaggtagcttattttgaagagatagtatctaaatttttgtccaga

SEQ ID NO: 570458 - DNA, 637 bp, Homo sapiens
tgcatggctattttattttaagacagagtctcactctgtcgcccaggctggagtgcaatggygcaatctgcaacctctgcctcccaggctccagagattttcttcccttagcctcctaagtagctgggattacaggtgcccaccaccatgcctgggtaatatttttttatttttatttttagtggaggcggggtttcaccatgtttgccaggctggtttcgaactcctgacttcaagtgatccacccgcctctgcctcccaaagtgctgggattacaggcatgagccaccatgcccagcttcatggatggctatttaaacacagattgctgaattgggatctctgagtttctaatgcaatagtttgggatggagccgcaaatatggattttgaacaagctctcatgcaaagatgatgcttatgtcaggggaccacactttagaaacactgtgataaagcctactttcataaagtgagacacatagacaagcagcatcaactagaaggctctaccctcctaccctatatctactaaatcagaagttataattctaacaagatctctaggtgattcatgtgcacattaaagttgagaagccctactttagaggagtttaaaatttcagagtgatggaaa

SEQ ID NO: 570459 - DNA, 447 bp, Homo sapiens
aagtactatctcagaccacagtggaataaaattggaaatcaactctgaaagaaacccttaaaaccatgcaaataaatggaaatttaaaaacctgcttttgaatgatcattgggtcaacaatgaaatcaagatgaaattaaaaaatcatttgaactgaatgataatactgacacaacctgtcaaaactgggatacagcaaaaacagtgctaagaggacatttcatagcattgaatgattgaatgcttatatcaataagtctgaaacagcacaaatagacaatctaaggtcacacctcacagaattggagaaacaaaaacaatccaaacccaaacccagtggaagaaaaaaaaatcaaaaataacagcagaactaaatgaaactgaaacaaacaaacaaacaaacaaamaaaacaaaaaccacaaaagataaatgaagcaaaaagctgg

SEQ ID NO: 570460 - DNA, 550 bp, Homo sapiens
aaacaaaaaaaacaaaaaccacaaaagataaatgaagcaaaaagctggttatttttaaaaataaaataatgttgattaaccattgggaagattaaccaagaaaaaaagagagaagatccaaataagctcaattagaaatgaaatggaagatattacaatggataccacagaaatataaaagattatgcaaggctactacgaacacttttacatacataaactagaaaacctagaggaggtggttaaattcctggaaatatacagcccttctagattaaaccaggaagacatagaatctctgaacagaccagtaacaagcagcaggattgaaatggtaataaaaaaaattgccaacaagaaaaagtccaggaccagatcaattcacagctgaatcctatcagacattaaaagaaaaattggkgctaatcctattgacactattccacaagatagagaaagatagagactccttcctaaattattctatgaagccagcatcaccctaataccaaaaccagggaaggacagatctaaaagagaaaactacaga

SEQ ID NO: 570461 - DNA, 528 bp, Homo sapiens
atagaagcaataaaaggagaaagatcaacttaatatttattttctgtttatagattttcttgaggctattttgtgaaatacaccaatatatttctaataaattaaccttttaccttatgatatttttacctgttataaagatattattttattatttatacagcttaaaatatttgctttttatattttagcctaaagcaattgaatttagaatttacatataaaattgatgagatgttactacagtaatgtgaagatctgtactaattagcataaacttaatacaggacccttcctggcatacattccatggagactgcttatcacatatgctttacagctaatctcttaaagatttttggagaatgtataaaccaccagaattattttctttggtatctgtcaaatatatgttagaatcataaaattactcagaaccttgaaaatgatatttccctgggagaccaattgttaattaatcctgtttttgttttagtrgatcaatattttaagttgataacagggtct

SEQ ID NO: 570462 - DNA, 550 bp, Homo sapiens
ctggctacattactacccatgattattttattgtctgctttctgcctcaatgcttatttgttgtcccctttttaatgctgtactcttaattaataactcctgaaacaattgtgatattggaatgttttgtcagacaaaaatacaaaaatatatttcttatgaatatagaacaggtattaattttctgtttggtcaatcagaatagagtaaatggactcataagatttcacacaaacttggtctctttagcagccagatacttaattcccctaagatgctatcaataataaaaaaaattgcttgttgccatggatttctgctctcatttttttttcttttctctgccttgccttttataagagttaaagccagtacagctgagaaacaagtgagttatttttsgttctttgacgagtgcttcatgaactccttcctttctttggcccaaggccaactagactatcgtggagattttgtaaaacagtatttgttttacaagtcatgttaaaatatatataacataaaatgtgccattttaaccatttttaag

SEQ ID NO: 570463 - DNA, 567 bp, Homo sapiens
aactaaaatttttctacaacaaactttctgtatttgccttggaagtctttaaattattactttgattaaattaacaatgatcatacacagtagcctgtgatcctattttgatccagtgtttcacatccttcatatttttgacatactttcagaaaccaaatttaaattaagtctttttttttaatctcaaattaaccttgagatttttcatgggtgctattggaaaaatcaaacaggtatctatctttgtgaaaagagagatattaagttaatttggcttatttgatatattaaattatgtgaaagcattgccaaataagtaagtccaaaccttctttgaattatatttgtgtagatgtgttattatgtattccagaaattacatgcctgtcttagaaatctgatcatactattgtaccaggtaagtattcccaaaaactctaatgaagagactgactgattcataaaactgmtaaccaaaaatcaagtagaataagagttaattaaataccaaggaaatgcgtagtcagatttttatgctaagtcagtcagtactgaaattgttat

SEQ ID NO: 570464 - DNA, 541 bp, Homo sapiens
  misc_feature 500: n = A,T,C or G
catccaaatacaagaagcacaaagaacacctgggaaattcattgaaaaaaatcatcacctaggtgcactgtcatcaggttacccaaaggtaagaccaaagaaagaatcttaagagctgtgagacagaagcaccaggtaacctataaaggaaaacctatcagattaacagcagatttctcagcagaaaccctataagctagaagggattggggccctatcttcagcctcctcaaacaaaacaatgatcagccaagaattttgcatccagtgaaactaagctccacatatgaaagaaagatactgtttttttcaaacaaacaaatgctaagagaattcactactaccaaaccacyactgtaagaaactgctaaaaggagctctaaatcttgaaacaaatcctggaaacgcatcaaaacagaaactctttaaagcataaatcatacaggacctataaaacaaaaatacaagttaaaaagcaaaaacaaacaaaaaaaacacanagtacacagacaacaaacagcgcgatgaatacaacagtacc

SEQ ID NO: 570465 - DNA, 479 bp, Homo sapiens
aagttgagagggcttaaatgaayaggccaaagtcaacccccaaatggtagcaccttaattttacctggaattttagtttgaaatctatatcaaatagatctataaaaagctaccagtggcaaggatacaatggcagaagcactctcagataatgccaaaggcactaaaatttaccacaaatattttggggaagaattctcacaatatatattaaaactttatcaattttcacacttaagcccaatgagtctacatgtgggaatctaagaacctaagaaaatccaactcagcaaaggaacagttatgcacagatgggcttcatatccatattcttagcgtcaaaaagggatgaacaaactgcctgtccaacaatgcaagtctatactcactgatggaatatgacatagctctgaaatagaagccatttagtaagtgaaaggatgatgaaaaaagcaataaaaagcagaatatgaaatcat

SEQ ID NO: 570466 - DNA, 442 bp, Homo sapiens
caagaaccctgttttgttcaagaccaggagtttgggtcttgccatactctccgggctcatcatgtaccacttcatttcttgctctcagaactctaggccataaaatttactttcaaaaatagaaatataccaaaatttctatcccctcgagaccttttaccttgctacttcctctatcagaaacactttgttctgccacccttggattagataacttcaactcagcctttggatttcaaattaagtatatttattcagggaggtcatctctttgaatgttttctccyacagcaacattcatcttagttgaattcgctagttcaatgtctagctttttcaccagagtataagatcaatgaaagcaactgctactgccttctaggcaacggtagtgtttgacataaaatataactcaataaatatttgtagaataaatgaatta

SEQ ID NO: 570467 - DNA, 478 bp, Homo sapiens
ttagtctaccagctgtgtaggattgggctcacagtctccttatatctaagacagggctcagatgacctacagcacagggtcagacccatcactatgtctggtgtcaggcacgctgtgagtgctcagaaactcacggcttcttttacccttagggaatacactgaagttgggaggttttttgtttgtttgtttgtttgtttgtttttgagacagagtttcacccttgttgcccaggctggagtgcaatggtgcgatctcrgcccactgcaacctccaccttctgggttcaagtgattctcctgcctcagcctcccaagtagatggcattacaggcatgcgccaccatgtttggctaattttgtgtttttagtagaggtggggtttcaccatgttggtcaggctggtctcaaactcctgacctgaggtgatccacctgactcggcctcccaaagtgctgggattacagatgtgagccacc

SEQ ID NO: 570468 - DNA, 571 bp, Homo sapiens
tgttagtgtttactttttatagggaatattccttagacagaggaattattattatttttttaaattctgtgtaacccaaagcctagcacagtgctagcacatgatgggcaaattataaatattcatcaaattgttcccaacatttgaaagcaaggaccttggataacacaactagcatttatttaaaaactagtatttatcaaactattagttactagttctaattatgacacaactgtatgccactttctatatggtatgtaaaatttaaatgctattttaacttgaattgtctcttttttctgtttattatatttccctttctattaaaaaattctggctgggtgcggtggctcacgcctgtaatcccagcactttgggaggctgaggtgggtggatcatgaggtcaagagatcaagaccaccctggccaacatggtgaaaccccatctctactaaaaatacaaaaattagctgggtgtgrtggcacaccacctgtagtcccagctactcagaaggctgaggcaagagaatcgcttgaacctgggagtcgaagattgcagtgagccgag

SEQ ID NO: 570469 - DNA, 626 bp, Homo sapiens
ggcaggcctgtagcctaaaataaccagagaaaacagcagtctttcttaaagaattcacagagaagacctagtttggagtaaaatttatgaaacagcaggtataggtcatggagaaaacagcagagtgttcattaattccattaagaacagcagagtagtcaatttcctcccttattcacttaacctactttatgtgtacaggtcatatrctggctaaaacttgaaaatgtgctcctgaaaaaaatgaggtatatgttagacatatttcagatatctgagcctaccagagaatctgaaaggcccttgaggtaatcatgcacctttacagtaggctgtgaggcaggaaaaatatacacggtgtccaagattcacttattataaatggctttctcctcttcaatcaagaaatgacttattttgtcaattcaacataaatcagaaatatgcattcagaagcttaaatctggtttaaacttgtgattcagaaattctgcttcgagaaggaatcagctctaagaataaagcaagaatatatttaagatttatttcctggggtagttgtgacaataatgctcaaaacaggaaatgatgctttcacagtaaagtattatgtaattataaaaata

SEQ ID NO: 570470 - DNA, 610 bp, Homo sapiens
ccaaggtattttattgtctttgtagcaattgtgaatgggagttcattcattatttggttctctgcttgtctactgttggtgtatagggatgcttgtgatttttgcacattgattttatatcctgagacattgctgaagttgcttattagcttaaggagtttgggggttttctawtatagaataatgtcatctgcaaacagacaaatatgacttcctctcttcctatttgaataccctttatttatttatcttgcctgattgccctggccataacttccaatactattttgaataggagtggtgagaaagggcatccttgtcttgtgccagttttcaaaggcaatgcctcctgtttttgtccgttcagtatgatattggctatggatttgccataaatagctttttttcgagatatgttccatcaatacctagtttattgagagtttttaacatgaagcgatgttgaattttattgaaggccttttctgcatctatttagataatcattttttttcattgattctgtttatatggtggattacgtttattgatttgcatatgctgaaccagccttgcattccaggaatgaggctgacttgatcgtggtgca

SEQ ID NO: 570471 - DNA, 627 bp, Homo sapiens
cattttttaagctacaacctccaaattcccagatagcctaaaaagtcttctaatctgtcttcctgtctgtgatttctcacctgtccattatatccccattctgctacccccaaatattgcgtaaaattcaatttaagatcctccccaatgatattctattgcaaatatatttctcaacacaatagcaacctgttaaattttatgcatttgtgtgtgtgtgtgtgtgtgtgtgwgagagagagagagagacagagacagagagagaataagtagcatagtttgcctgaaagtcttatattcacatggaaatcaaaatatctaaaccagaacttatccttttccttcagttttgtttttttctcctgtgttgtcttgttgagggcaggacagctctatactttctgcgctaaattcgaaatgtagcaacaattattatgtccttttacttctctttttatatttttcaatcaaaaagtcctaatgaatccactttctaaataattctgtaattaataggcgtcttcttgaatctacaattcaaatattccagacaaaatttgtcactactctggtctgacacaatagcattctaattgaagacattgcttgtgtttctcttagaataca

SEQ ID NO: 570472 - DNA, 389 bp, Homo sapiens
gaattctcttaggtgtccaggtcatttcattgtcgatggcctaccagagtctgttggtgtattcttttgcacatgtgttcctctcaatgtccagccactcatgtctatgtccactagggtcttggggtttttataggcacaagatgggggcatggaaggccagagtggtcttggaaaatgcaacatttatgcataacaacaggagtgcctgtcctcacctaggtccctgggcacaggccccagggtggagccctcgccaggtaccctgcctttctcctcccagcacttccctgmccccctcgcatatcactattactgacatccagcattagaatgttatatttgttagaattaatggatcaatattgatacattattattaactaata

SEQ ID NO: 570473 - DNA, 624 bp, Homo sapiens
tagtgttttgtctctggcttcttttacatagcatgacaatactgggatttatctctgttgtttgacacgttattactttgttcattttttattgtattactttgcatgggatataccatattttattttcccccaagctgatgtacaattgagttctttatactacttggctatccagagtagtattgacatatacattcacataaaaatctttttgtggatatatccttttttctctttttaggtaaattaacagaaatggcatgacttcatcatatggtaaatgtatgcataactttttaaggaattggaaagctgtttccaaagagggtaaacaattttgtaatcatactagtagtgtaagagggtcttagatactccatatgctcracagttagcatttgtatatattctattggatatgcggtgataacacactgtagttttaatttgcatttctcaaatgaccaaagatgtttagcaactttttatgagcctgttggccgttggtatacattgactcaaaatgtttactcattttttatgtgtctgtcttgttatagttttacaagcatcatattctagatagaggccctttgttaaatacagatttcaaaaacgtaa

SEQ ID NO: 570474 - DNA, 610 bp, Homo sapiens
attgcgtagaatgggaatcagaatggtatagtgtaccacttgttgaacaaggattctattcattaagaagagattagtagaagatgcatatgagtgaagatgaagatcagattgactatctatactgaaatatcaagtagagtccaatcctacacttgataaagtgagcttatgttaaatttcagagacacgactctaatgcccaagctcttaaatgttatacaaactgaatcaatattgagatacacaaatattaatgggacagaaggacaatcctatatataaaatgatttccccaatgatatttacatatatataatctctacatttccttgttgtcctgaaatgcttggataaaggatgtcaagaacatgtagccctgtttattggtatgrtgccttattctaatccagttttcagttatagtccgccaatttttcttgcaagcattagtagcatagaattatattaataagaattatattatcaagaatgccaaaatcacttattaaatgagtgaatgaaagaatgaataaatgactgacaaagtctcccttgtgcccctgttggtttttcgcagtgcctgccagaaagccatttcttctttcca

SEQ ID NO: 570475 - DNA, 610 bp, Homo sapiens
attgcgtagaatgggaatcagaatggtatagtgtaccacttgttgaacaaggattctattcattaagaagagattagtagaagatgcatatgagtgaagatgaagatcagattgactatctatactgaaatatcaagtagagtccaatcctacacttgataaagtgagcttatgttaaatttcagagacacgactctaatgcccaagctcttaaatgttatacaaactgaatcaatattgagatacacaaatattaatgggacagaaggacaatcctatatataaaatgatttccccaatgatatttacatatatataatctctacatttccttgttgtcctgaaatgcttggataaaggatgtcaagaacatgtagccctgtttattggtatggtgccttattctaatccagttttcagttatagtccrccaatttttcttgcaagcattagtagcatagaattatattaataagaattatattatcaagaatgccaaaatcacttattaaatgagtgaatgaaagaatgaataaatgactgacaaagtctcccttgtgcccctgttggtttttcgcagtgcctgccagaaagccatttcttctttcca

SEQ ID NO: 570476 - DNA, 610 bp, Homo sapiens
attgcgtagaatgggaatcagaatggtatagtgtaccacttgttgaacaaggattctattcattaagaagagattagtagaagatgcatatgagtgaagatgaagatcagattgactatctatactgaaatatcaagtagagtccaatcctacacttgataaagtgagcttatgttaaatttcagagacacgactctaatgcccaagctcttaaatgttatacaaactgaatcaatattgagatacacaaatattaatgggacagaaggacaatcctatatataaaatgatttccccaatgatatttacatatatataatctctacatttccttgttgtcctgaaatgcttggataaaggatgtcaagaacatgtagccctgtttattggtatggtgccttattctaatccagttttcagttatagtccgccaatttttcttgcaagcaytagtagcatagaattatattaataagaattatattatcaagaatgccaaaatcacttattaaatgagtgaatgaaagaatgaataaatgactgacaaagtctcccttgtgcccctgttggtttttcgcagtgcctgccagaaagccatttcttctttcca

SEQ ID NO: 570477 - DNA, 610 bp, Homo sapiens
attgcgtagaatgggaatcagaatggtatagtgtaccacttgttgaacaaggattctattcattaagaagagattagtagaagatgcatatgagtgaagatgaagatcagattgactatctatactgaaatatcaagtagagtccaatcctacacttgataaagtgagcttatgttaaatttcagagacacgactctaatgcccaagctcttaaatgttatacaaactgaatcaatattgagatacacaaatattaatgggacagaaggacaatcctatatataaaatgatttccccaatgatatttacatatatataatctctacatttccttgttgtcctgaaatgcttggataaaggatgtcaagaacatgtagccctgtttattggtatggtgccttattctaatccagttttcagttatagtccgccaatttttcttgcaagcattagtagcatagaattatattaataagaattatattatcaagaatgccaaaatcacttattaaatgagtgaatgaaagaatgaataaatgaytgacaaagtctcccttgtgcccctgttggtttttcgcagtgcctgccagaaagccatttcttctttcca

SEQ ID NO: 570478 - DNA, 507 bp, Homo sapiens
ctatttttaaaaaattcattctgaacttctgattcacacttaatactaatayctcttgttccactattagaatatgtcacttagcctccggtgtaaagtgtattttttgacacagcacagaaaaatacatctgattctttttcagtattttgctttatgccacattgagtgaatgcagcattcacaatgcataaagtggtcttctcactccagccttgtcatctaaacagaaattacagtgtcatcacctgctctctgaactctcattttagttgcaatagactggaacaaatgattgagagatgtaagtgtgtgtgtgtaattgaggggcctagtgtcagggttgataattaaacacatttcttagggttagatgaatttatggagtcagagagtgtcagtgaaagagaatttatttctatagacaaagttggcgattccccactactgaaattcctctttgtctaaaaacaacttcacagatctagacaaataaactagtctggt

SEQ ID NO: 570479 - DNA, 547 bp, Homo sapiens
gtctacactaaaaacagagttttgatctacctccttgagggtagagtagctacaaaaataataattcttctgtatgaaaatttctattttataccatatatttatttattcaattataaattcacatcaaatagaatcatatttatttatattacagctagaattataatccaatactattttattttttattatactataaattctgggatacatgtgcagaacgtgcaggtttgttacataggcatacaagtgccgtgatggtttgctgcacccatcaacccatcatccacattaggtatttctccttatgytatcccttccctattcccccatcctctgacaggccctggtatgtgatgttcccctttctgtgtccatgtgttctcattgttcaactcccacttatgagtgagaacatgtggtgtttggttttctgttcctgtgttagtttgctgagaatgatggtttccagcttcatccatgtccctgcaaaggacatgaactcatccttttttatggctgcatagtattccatggtgtatat

SEQ ID NO: 570480 - DNA, 358 bp, Homo sapiens
ctcaaattatgagcttacagtcaaggattgttttctgaaatcaatgcaactgaatattttggaaaaatattataaaacctaaacaccatgctgaattcacaagaataaaagaactaaggaaacaatgacaggcaatactttaaagcaattttaaaaaataagtctatccatgggtttttattctttgaagttctgatacttcaaaacatgaaatagacagttgcatatatcttgatgtaagttatagtatcatygtttaaaaatctattaccattttatttcactggttaaattaagggttttctgcttgttacactctattaatttcttttgtttgcaaatgttaaaaataatgtag

SEQ ID NO: 570481 - DNA, 566 bp, Homo sapiens
agtaagcaaagtaagcaaattgaccataccaaatgcctagaaagctgtacatctgagatgattagaaatgaaacaacatcttgttgatatggtcagtaaaattaatctgcacaaagaagaaaacaatattcaatgagccttaccttaagtaatcatttgatagggtgttaaatttctgataggtttatatttcatggttaatttaacttaatttattattttaaaccaggtttattttaatattcatctgtctccacttgataagaatgtttgcattgtgaccatggtaaacaaataaagcccatgatttcccccttataatcttcaaattagcaaagataatcataaccccccatacaatgtgcattctttcagtcaataatgcagatgtacctgtcagctggtacactatcattaatttgaaaagctgcccatgtaatgctctcatcaagaaatttgaatagtgcatgggactgagccaagtgttgcattaatggaggtttgacaagcatgtgatagttgagctaggcaaggaggcattcagtgcaagaaagrtttcacagtag

SEQ ID NO: 570482 - DNA, 484 bp, Homo sapiens
ctttcttaattcacaattaaaaaaattaaaaatgtatcagaaatgattaaaaccttactattaagttattacatatgctattaaaatgcacatatatttcatttaaaatccttggaatatatttaaaatgtagataatttaatatgtattttctaagacatagtcatttattaaaattttttcctcttgaaatatgattgttttctcatatcttcatatttcaaaggccagagcaaaagggaaaaacatggatagcctgttaagtaatcaataaaataaagaaacrttttgaattctgcaatgaaatatgagtaagctggggttacaattaatcttaaaaaattgtaagctttcttgtcagtagaagccttgagttttaatttcctaaagatctcacttttctcaggtgcatttttcttcataatcaaaatgccagcttagaatcccaccttaacagcaccaccaagcaaatcagcttgcaaaa

SEQ ID NO: 570483 - DNA, 484 bp, Homo sapiens
ctttcttaattcacaattaaaaaaattaaaaatgtatcagaaatgattaaaaccttactattaagttattacatatgctattaaaatgcacatatatttcatttaaaatccttggaatatatttaaaatgtagataatttaatatgtattttctaagacatagtcatttattaaaattttttcctcttgaaatatgattgttttctcatatcttcatatttcaaaggccagagcaaaagggaaaaacatggatagcctgttaagtaatcaataaaataaagaaacgttttgaattctgcaatgaaatatgagtaagctggggttacaattaatcttaaaaaattgtaagctktcttgtcagtagaagccttgagttttaatttcctaaagatctcacttttctcaggtgcatttttcttcataatcaaaatgccagcttagaatcccaccttaacagcaccaccaagcaaatcagcttgcaaaa

SEQ ID NO: 570484 - DNA, 484 bp, Homo sapiens
ctttcttaattcacaattaaaaaaattaaaaatgtatcagaaatgattaaaaccttactattaagttattacatatgctattaaaatgcacatatatttcatttaaaatccttggaatatatttaaaatgtagataatttaatatgtattttctaagacatagtcatttattaaaattttttcctcttgaaatatgattgttttctcatatcttcatatttcaaaggccagagcaaaagggaaaaacatggatagcctgttaagtaatcaataaaataaagaaacgttttgaattctgcaatgaaatatgagtaagctggggttacaattaatcttaaaaaattgtaagctttcttgtcagtagaagccttgagttttaatttcctwaagatctcacttttctcaggtgcatttttcttcataatcaaaatgccagcttagaatcccaccttaacagcaccaccaagcaaatcagcttgcaaaa

SEQ ID NO: 570485 - DNA, 645 bp, Homo sapiens
ggctcagcttatatttataaaggccatctatccatgtagaaatggaaaagatcataagcaatataaaatacagataacttgcagaagtttacatgagcagacagggcaggccaacatggatgttggaacactaagacaatgacaagtatgccactgctattcctagagtgcaaggagaaaatcaagacattaattatggtgctgggcacatagtaataattcatataggtctgtgtaaacttttacattgtgaattgttgagctatttctgtactttttccattcctatactatctgagactacaaataaactattagaattagtgagtgaattagttaaggtcagtttggaaataccaattttatttctatatgtaaggcacagacaaaaaacacaattttaaaagagrgcaatttaaaatagcattaaaacatataataaaatatgtgcaagaacttttccaaataaaccataaaatataatattcaaaaagtaattaacttaataaatagaaggttataccatatcctggtttcaatgaattcaaaatttgatattatattaataaggtctccaaaattaattcatagatataaaacgatttcattcataatgtcaggaagtatttattataaataaataag

SEQ ID NO: 570486 - DNA, 562 bp, Homo sapiens
tttactagtaaataacttgatagaatctctatttagcaaaggtgtagggatactagagaaaggatgttgtccatggagctggcatgcatcatctgactctcttatgtctcaaggggtaaaagaagacatccccactaagccagaaagaaaagggagccaagtggtagaagctctggctttgggtggtgtaacaaagtgccatcaagaacactgtggagaagaagtgaagggaatgatagctgaatatcagtcttccatcacttgatatcatgctagtgttcatcactagtctaacccagtgagaaaataatgggcaaactgcctactgaggtgggttagctattccaaactcttgacaggatgaagtatgggaaattgatttgaagtggcaaggaaaatcagtccatacattcccatatatacaattagtcatattacatttggcctaattgtttttcccatagagcaggaaaaaatcaccccattacaataaaggcagtatattccagaagtaaygctaaaatgttaactaaaaaataaatcaatagatgttttctataga

SEQ ID NO: 570487 - DNA, 548 bp, Homo sapiens
aggcaggagaatcgcttgaaccggggaggcagaggttgcagtgagccgagatcatgccactgaactccagcctgggcgacagagtgagactgcatctcaaaaaaaaaaaaaaaaaaaaaaaaaaatttaattgaagtctaaayttgtggtaaaaagagttgtaaaattgttccaaatacattgtttatttgcgcccatttagtatctaaatgcttgggctcatctcttaatatgtgataataacctaaaatgtttcaattcttaatagatgagggaatcaaaatgattaaaaaatgttattttttagaacattcttgttcattcaagcactaaaatgttatcattgccttattttcttactgaaatcatacatacttctaactctaagatataaacatctggttttctttgcacttcagtaagatcttgagaatgtttggagttgttttgagaaatgttgcaaattataacaactaaattaatatgtatcatgacttgtactaaacacctctgtatgatttatctcttttccctcaaaattactccac

SEQ ID NO: 570488 - DNA, 548 bp, Homo sapiens
aggcaggagaatcgcttgaaccggggaggcagaggttgcagtgagccgagatcatgccactgaactccagcctgggcgacagagtgagactgcatctcaaaaaaaaaaaaaaaaaaaaaaaaaaatttaattgaagtctaaacttgtggtaaaaagagttgtaaaattgttccaaatacattgtttatttgcgcccatttagtatctaaatgcttrggctcatctcttaatatgtgataataacctaaaatgtttcaattcttaatagatgagggaatcaaaatgattaaaaaatgttattttttagaacattcttgttcattcaagcactaaaatgttatcattgccttattttcttactgaaatcatacatacttctaactctaagatataaacatctggttttctttgcacttcagtaagatcttgagaatgtttggagttgttttgagaaatgttgcaaattataacaactaaattaatatgtatcatgacttgtactaaacacctctgtatgatttatctcttttccctcaaaattactccac

SEQ ID NO: 570489 - DNA, 548 bp, Homo sapiens
aggcaggagaatcgcttgaaccggggaggcagaggttgcagtgagccgagatcatgccactgaactccagcctgggcgacagagtgagactgcatctcaaaaaaaaaaaaaaaaaaaaaaaaaaatttaattgaagtctaaacttgtggtaaaaagagttgtaaaattgttccaaatacattgtttatttgcgcccatttagtatctaaatgcttgggctcatctcttaatatgtgataataacctaaaatgtttcaattcttaatagatgagggaatcaaaatgattaaaaaatgttattttttaraacattcttgttcattcaagcactaaaatgttatcattgccttattttcttactgaaatcatacatacttctaactctaagatataaacatctggttttctttgcacttcagtaagatcttgagaatgtttggagttgttttgagaaatgttgcaaattataacaactaaattaatatgtatcatgacttgtactaaacacctctgtatgatttatctcttttccctcaaaattactccac

SEQ ID NO: 570490 - DNA, 507 bp, Homo sapiens
gaaattatgtcaagtgttcttatcaccaaaactagtcataaataaagaggggagaaggcaacacttgaacgtgatgaatatgtttatggcattgattgtggtaatggcttcataggtgtatacttatctccaaactcattgagatgtatacattgaatatgtacagctttttgtaggccaatcatacctcagtaaagtggtttagaaaattgagacctaaaacaaagcagaaattaagctgaaaattcatatcacctttgtcagtgataaaggtgaaagtgagcgctgtggctaagytctcataaacaaataagcttgcttgcttttcaacgtgccacctgaggaaaaggttagtttactaggaaggataagagaattaatatgccagacttagggcattggatagagtagccacacccagttgagaattttttatcagtgattgtcttccaccaatcgtgtaactccttggatattccttaaatagtatatgtccaatgaacagag

SEQ ID NO: 570491 - DNA, 588 bp, Homo sapiens
atttaaacccgcaaagataaaaaaagacaaagaatgtcattacgtaatggtaaagggctcaattcaacaagatgacttaactatcctgcatatatacataccagacacaggaacacccagattcataaagcaagtaagagacctgtgaagagagttagataaccacacaataatggtgggagacttcaacacatcactgacattattagacagatcactgaggaagaaaactaacaaagatattctggacaagaacacagcggtaccaaatgggccaataaacatctacagaacactccactcggaaacaatagaatgtacattgttctcatctgcacatgrcacataccctaaaatcaacaacatacttggccataaaacagtcctcaacttattaaaaacaaaacaaaacaaaatcataccaaccacactgtggaaccacaatacaatgaaaacagaaaacaattctaagaaaattgcttaaaaccatataattacatggaaattaagtacctgctcttgaataactatgaagtaaataatgacattaagacagaagtcaagaaattctttaaaattagtgaatac

SEQ ID NO: 570492 - DNA, 595 bp, Homo sapiens
cggtaccaaatgggccaataaacatctacagaacactccactcggaaacaatagaatgtacattgttctcatctgcacatgacacataccctaaaatcaacaacatacttggccataaaacagtcctcaacttattaaaaacaaaacaaaacaaaatcataccaaccacactgtggaaccacaatacaatgaaaacagaaaacaattctaagaaaattgcttaaaaccatataattacatggaaattaagtacctgctcttgaataactatgaagtaaataatgacattaagacagaagtcaagaaattctttaaaattagtgaatacaaagatacaacacataccagaatctctgggacacaattaagccaaatagagaagttcatagcactaaacacccacatcaaaaagttagaaagatctcaaatcagtaacctagcatggtaactcaatgaactaaagaaataagagcagggtaacmcccaagctactagaagacaaaaaataaagctgaagtgaagtaaagtgagacgtaaaaaacatcccaaagtcaacaatccaggaggtgggttttttttttttttgaaaaaaaaa

SEQ ID NO: 570493 - DNA, 608 bp, Homo sapiens
ccccaccacatcaaaaaactaatccaccatgatcaagtaggctttatccctgggatgcaaggttggttcaacatatgcaaatcaatcaatgtgctttgtcacttaaacagaactgaaaacaaaaacctcatgattatttcaatagatgcagaaaaggcttttaataacattcaatatcccttcatgttaaaagtcctcaacaaacgaagcattgaaggaagacacttcaaaatattaagagccatttttttaatacataaaaatatatttttatagrtatagagagtacaagtgccattttgctacctggatacattgtgtagtgttgaagcctgagcttttagtgtaactatcatctgaatagtgtacattgtgctcacgaagtaatttctcatccctgacccccatcccaccatctcagtcatctgagtctctgatgtctgtatttccactctctaagtccgtgtgtgcacaatatatagctcccaactatacttaagatcatgcagtattcgactttctgtttctgagttatttcacttaagataatggcctctagtcccatccatgttgctgcaaaagacaagatttcattctttttatggctg

SEQ ID NO: 570494 - DNA, 608 bp, Homo sapiens
ccccaccacatcaaaaaactaatccaccatgatcaagtaggctttatccctgggatgcaaggttggttcaacatatgcaaatcaatcaatgtgctttgtcacttaaacagaactgaaaacaaaaacctcatgattatttcaatagatgcagaaaaggcttttaataacattcaatatcccttcatgttaaaagtcctcaacaaacgaagcattgaaggaagacacttcaaaatattaagagccatttttttaatacataaaaatatatttttatagatatagagagtacaagtgccattttgctacctggatacattgtgtagtgttgaagcctgagcttttagtgtaactatcatctgaatagtgtacattgtgctcacgaagtaatttctcatccctgacccccatcccaccatctcastcatctgagtctctgatgtctgtatttccactctctaagtccgtgtgtgcacaatatatagctcccaactatacttaagatcatgcagtattcgactttctgtttctgagttatttcacttaagataatggcctctagtcccatccatgttgctgcaaaagacaagatttcattctttttatggctg

SEQ ID NO: 570495 - DNA, 565 bp, Homo sapiens
agtgaatgtaaccatgattttaaaattagtgaagagaatgtcagagtggctacagtttaraaattaattaattactacaagatgaggtagattgttaggcaagaagcagttaatctagaactttattaactggaaaagcattggagggtttatgattttatgttttgaaaggatcatttccacttttctgtagaaaacagactatagatttttgtatgtatgggaaataaattatataaaaaatagagtcaatcaatgtcattgtgtgtgaggacacctaaataaagcattgttgtgtcggacttgctataatctcctcttcccacttctgcttttctaaaaatatccagcctcatttatatgcctcaactttatgtaataggagcttaaatattttataagaaaatggaaattaaatcacaaaatatgaaaaatattgacaggtgtacatctcagtaagaagatatctatattatatatagatatattatatatagattatatatataatatagatagataaaagatatctatcttcttactgatactatattcttactgagag

SEQ ID NO: 570496 - DNA, 576 bp, Homo sapiens
ggtgaaattaatagcattatctattatttttgagtgcacagtatgctagagcctacatctatgcatactggatttctgtgtctttaaaggttgttttcagagagaaatcttaatgagattatttgtgtgtggctgaccttagaaattatacttggtaaaatatgaaattgagtatcagacatctgtctttttagagatccctccctgatcctcttcttcaatctttttccatgtctttaggcccctcaaccagtctctcttccctgttaacattctcctacaatttctttttctttttcctaaaactattggtcagaattttggctatctcctaaagaagacttatttcrtcattagaaacaccactttctatcactttcaacatcattctcttcttcattttcatcttattcctctggcaaaactctggctgtgtttacatagaattatccattcctctgaacctgaacttgaacacctgaatcagttgaagaaaatgcatactctgaaggttgctctcctgctgaattcaaaattcctaagtcaatttgattgttacgctctctagaaactatt

SEQ ID NO: 570497 - DNA, 581 bp, Homo sapiens
ctaaaaacatgatgagaatttttatatttgggcttggtgaaattaatagcattatctattatttttgagtgcacagtatgctagagcctacatctatgcatactggatttctgtgtctttaaaggttgttttcagagagaaatcttaatgagattatttgtgtgtggctgaccttagaaattatacttggtaaaatatgaaattgagtatcagacatctgtctttttagagatccctccctgatcctcttcttcaatctttttccatgtctttaggcccctcaaccagtctctcttccctgttaacattctcctacaatttctttttctttttcctaaaactattggtcagaattttggctatctcctaaagaagacttatttcatcattagaaacaccactttctatcactttcaacatcattctcttcttcattttcatcttattcctctggcaaaactctggctgtgtttacrtagaattatccattcctctgaacctgaacttgaacacctgaatcagttgaagaaaatgcatactctgaaggttgctctcctgctgaattcaaaattcctaagtca

SEQ ID NO: 570498 - DNA, 534 bp, Homo sapiens
agaggatttaacaattttaaatacatatgcagccaacactggagcacccagatacataaagcaaaaagagagatagactccaatacaataatcgctggagacttcaacaccccacttttagcattagacarattttccagacaaaaccaacaaagaaacatcagacttaatctgcactgtggaacaaatggatctaatagatatatatagaacatttcatcaaagggctgcagaatacacattcttttcctaagcacatggattattgtcaagaatagaccatatattaggtcacaaaacaagtcttaaaacattccaaaaaactaaaatactatcaagcatcttttctgaccacaatggaataaaactaaaaattaataacaggaggaattttggaaacaatacaaatacatggaaattatacaacatgcacctgcatgaccactggcccaatgaagaaattaagaaagacattgaaaaaaatgttgaaacttaatgaaacacaacataccaaacctatgggataccgtgaaa

SEQ ID NO: 570499 - DNA, 552 bp, Homo sapiens
  misc_feature 427: n = A,T,C or G
cattgatttcatttccttggaatatatacccagtagtgggattgctggatcatgtggtagttctatttttcatttcttgaggaacctctatactgttttccatgactgtattaacttacatctccatcaacagtgtatgagagttcccttttctccacatcctcatcaayacttacttttcatttttttgataatagccatccttacaggtatgagatgataactcatcgcggttttaatttgcatttccctgataattagagatattgagcactttttcacacacttattggtaatttacatatcttcttttgggaaatgcctattgagttttttgtgttccttatatattttggatattaaccctgatcagatatatggcttacaaatatgttctcctattccatagggagccttttcattttgnttattgcttcttttgctgggcagatgctttttattttgatgcaatggcacttgtctatttttgaatttgctgcctgtgcttttgtgggcatatcccaaaaatgtactgcacagcaccaatgttaa

SEQ ID NO: 570500 - DNA, 552 bp, Homo sapiens
  misc_feature 427: n = A,T,C or G
cattgatttcatttccttggaatatatacccagtagtgggattgctggatcatgtggtagttctatttttcatttcttgaggaacctctatactgttttccatgactgtattaacttacatctccatcaacagtgtatgagagttcccttttctccacatcctcatcaatacttayttttcatttttttgataatagccatccttacaggtatgagatgataactcatcgcggttttaatttgcatttccctgataattagagatattgagcactttttcacacacttattggtaatttacatatcttcttttgggaaatgcctattgagttttttgtgttccttatatattttggatattaaccctgatcagatatatggcttacaaatatgttctcctattccatagggagccttttcattttgnttattgcttcttttgctgggcagatgctttttattttgatgcaatggcacttgtctatttttgaatttgctgcctgtgcttttgtgggcatatcccaaaaatgtactgcacagcaccaatgttaa

SEQ ID NO: 570501 - DNA, 552 bp, Homo sapiens
  misc_feature 427: n = A,T,C or G
cattgatttcatttccttggaatatatacccagtagtgggattgctggatcatgtggtagttctatttttcatttcttgaggaacctctatactgttttccatgactgtattaacttacatctccatcaacagtgtatgagagttcccttttctccacatcctcatcaatacttacttttcatttttttgataatagccatccttacaggtatgagatgataactcatcgcggttttaatttgcatttccctgataattagwgatattgagcactttttcacacacttattggtaatttacatatcttcttttgggaaatgcctattgagttttttgtgttccttatatattttggatattaaccctgatcagatatatggcttacaaatatgttctcctattccatagggagccttttcattttgnttattgcttcttttgctgggcagatgctttttattttgatgcaatggcacttgtctatttttgaatttgctgcctgtgcttttgtgggcatatcccaaaaatgtactgcacagcaccaatgttaa

SEQ ID NO: 570502 - DNA, 622 bp, Homo sapiens
gcttaaaacaatggattataaaatagtatttgcaagcctcatggtaacttcaaataaaaaaaaagtacagcaaatacacaaaaacaaaaagcaataaattaaatcataccaccagaggaaatcacctttactaaaaggaagacaagaaggaaggaaagaaggaagagaagactaaaacaaccagaaaacaaataacaaaatggcagaagtaagtctctattatcaatagtaacactgaaggtaaatgaactaagttctccaataaaaagacatagaaagactgaatgaatgaaaaacatgacccactgatctgtggtccatgagaaacacgcttcacctataaaggtatacatacatggaarataaaaggatggaaaaacatactacatgccaatggaaaccaaaaaagagcagaagtagctatacttatatcagatacaatagatttcaagacaaaaactgtaagaagaaacaaagatggccgctgtataatgataaaggagtcaattacctaagaggatatgattataaatatatattcagccaatacaggagcacccagatacaaaaagcaaatattattagagctaaagagagagagatagacctcaatacaataata

SEQ ID NO: 570503 - DNA, 574 bp, Homo sapiens
gtttgtttttgcaagctttgttgaagaccagatggttgtaggtgtgtggtcttatttctgggatctttattctattccattgtctatgtgtctgttacgagtactatacwgtttttgttatggtagccctgtagtatagtttgaagttgggtaacatgatgcctccagctttgttgttttgattaagattgccttggctatttgagctattttttggttccatatgaattttaaagtagttttttctacttctgtgaagaatgtggttgataatgtgatagaagtagcattgtatccgtaaattgctttgggcagtatagccattttaatgatattgattcttcctatccatgagcatggaatgtttttccatttgtttgtgtcatctctgacttcttgagcagtgttttataattctccttgtagagatctttcatttccccagtaagctgtagtcctaggtgctttattctttttttttttattttaatttttatttttttattgatcattcttgggtgtttctcgcagagggggatttggcagggtcataggacaatagtggagggaaggt

SEQ ID NO: 570504 - DNA, 574 bp, Homo sapiens
gtttgtttttgcaagctttgttgaagaccagatggttgtaggtgtgtggtcttatttctgggatctttattctattccattgtctatgtgtctgttacgagtactatacagtttttgttatggtagccctgtagtatagtttgaagttgggtaacatgatgcctccagctttgttgttttgattaagattgccttggctatttgagctattttttggttccatatgaattttaaagtagtttyttctacttctgtgaagaatgtggttgataatgtgatagaagtagcattgtatccgtaaattgctttgggcagtatagccattttaatgatattgattcttcctatccatgagcatggaatgtttttccatttgtttgtgtcatctctgacttcttgagcagtgttttataattctccttgtagagatctttcatttccccagtaagctgtagtcctaggtgctttattctttttttttttattttaatttttatttttttattgatcattcttgggtgtttctcgcagagggggatttggcagggtcataggacaatagtggagggaaggt

SEQ ID NO: 570505 - DNA, 574 bp, Homo sapiens
gtttgtttttgcaagctttgttgaagaccagatggttgtaggtgtgtggtcttatttctgggatctttattctattccattgtctatgtgtctgttacgagtactatacagtttttgttatggtagccctgtagtatagtttgaagttgggtaacatgatgcctccagctttgttgttttgattaagattgccttggctatttgagctattttttggttccatatgaattttaaagtagttttttctacttctgtgaagaatgtggttgataatgtgatagaagtagcattgtatcygtaaattgctttgggcagtatagccattttaatgatattgattcttcctatccatgagcatggaatgtttttccatttgtttgtgtcatctctgacttcttgagcagtgttttataattctccttgtagagatctttcatttccccagtaagctgtagtcctaggtgctttattctttttttttttattttaatttttatttttttattgatcattcttgggtgtttctcgcagagggggatttggcagggtcataggacaatagtggagggaaggt

SEQ ID NO: 570506 - DNA, 643 bp, Homo sapiens
tgagcgagtgttgacataacaatttcttccttttctctttgttcttttctcctcttggccttcaaaccataattcttattttataagtgtaaaatctgttaagtgaagttccactgtgatgggaaatggatataggcaaagggttatatctaaacttgaaagagctaaatccagtcacttcaataaggcagaagagctggctcatatactcattaccagcttagctctctacaaaggctgtgctgggagaaggagtgaatcacaaggtttttgttatcaataaatcaagtggttgatgctgctatagctttgtgattttttttctgttagtactttcaaaaaacaagccactgtacataaaatgtattatgtacattttattctttttaaagtatactgttgatagcagccactaactctgagcctatgatataaaaagctgatgcgattagcagtctctatgccatacacagygtctttttgttctttagtgttgctgctacttgcaatggctgttgttatttgtaaattgcatcttagctttacgatctacctgattgttttgcttccagaatcacttattgcatcagttagctttcgcagtagacaaagcatccaaaaaataagggcttaatactacaac

SEQ ID NO: 570507 - DNA, 624 bp, Homo sapiens
caagcatgaatctttctgtttgtcaggctccagacttcccagaattctcttcccacactctgcctaaggggcaacagtggagcagcttgcagatgttctagcatagcaagcctccaggatgaggccccagtctcttcttccaggggactcgtggtgtttaggacctcttacttgtcttggagaaatgcyacagcactacttaccacagcactgcttactgaaaatgtactagtcctatgcattctctgtttcaaaagattcttgaatgtctaatcttttccctatataagtggtaatgtgggggatggaatcaggaccactgagctacatttcaggaagtcctgcagaatttctttaaaatgtgggggtatcttagcatctagtggtcccaactttgaggctttagctgaaatctgagataagtctcattcaacattctgttgctaataatagtaataataataattgtaataataagaatattagctaactttaaaacagtgtgctgggcagtgctctacacactttaaatttattaaatggttaaccatctaacaatcatataaagttgggtccccattttacagatgcagaaactgaagcatagaaaacctaagtaactcg

SEQ ID NO: 570508 - DNA, 540 bp, Homo sapiens
gagggtttctctggagaatttggcaaaacttcataaaagggatggaacgtggctgagactattagctgtccttcaagatttgttttttttgcatcttctcgattttaggtgggtacaagggccctcagaataaaaatattttgccaggctcccttgtagatggggtggctatgtgaacataataggctatgcccagaagtgaagaaaataatttcatattcacttccctcttaatggagggggtatgttcttcctccttcctccaatctattgcttggaatttgggcgtggtgaggagccatccaggaccatgaagacagagaataccmtggagtggtggagctataagacagaagcatctgagaacctagacttttgcagagccctggatggcccacctctggactgttacatgagaaagaattttctatctcctttccgcaaaagctcttttgggtctctgttacacacagccaaatttttatatttgaattcatttgcctttaatacagtctttaatatatgctgtcagggagttta

SEQ ID NO: 570509 - DNA, 482 bp, Homo sapiens
cctgcaatcccagctactcaggaagttgaggcaggagaatctcttgacccccggaggyggaggttgcagtgagccgagattacaccatctcactccagcctgggcaacagagcaagactctgtctcaaaaaaaaaaaaaaaaaagaatattgtttttcaaactattgtatgtattataatcaagttcatgcttgccatatcatcagacctattggttcaccatgtatcaatgcaaaaagactaaggaggggacgttaataaaaaacttatcacttataaaactttaggtattctgaaaagattttatctggattacaaaacttgcatggccccatacattctcatcaatacactcataagcttcctcactcttccctgaacctctgttggattgtgttgggagagtgccaacatttggctgccaaacagttctttccatgaatgtccctcacaaacagggaagagaaaggaaaagcagaaac

SEQ ID NO: 570510 - DNA, 525 bp, Homo sapiens
aaccagtgggaaggaaagagctggcagttggaaggctccagctcatggtcccagttctaccactcactaggttgtgaccttggtgggaacatgaacattcttgggcctcatgggcttcaactgtataaaaggaaggggtcagagacagtgatttctatacttccttcccggtttaaaacatatgattcagttatgatcagaaatagacagaaaccacggagtatctcttcacatttttcagagttctgctgagaaaataaatctagaagtcscagcctgggaaataaaaggcagctgcttttacctgagtattctctctctctctctctctctctctcctctctctctctctctcacacacacacacacacacgccccattaagaaaataataatattgaaacagcaagctgtaagagtaaaaacaaacaaaggctgaaggagaagtgagcagtgtagcctgtctaggaaaccatctgattcacagactgaactttaacattttagactactggctaccaagaac

SEQ ID NO: 570511 - DNA, 544 bp, Homo sapiens
ggagaccagcccggccaacacagcgaaaccccgtctccaccaaaaaaatacaaaaaccagtgaggcgtggcgtcgcgtgcctgcaatagcaggcactgggcaggctgaggcaggagaatcaggcagggaggttgcagtgagccgagatggcagcagtacagtccagcttcggctcggcatcgggagagggagagggagagggagagggttttctatgtttcttctctagtgaatttttgaattaaattattatactttttaattccacaatgtttgtttctttattttgtaatctctatctcttcattaataatctctatttggtgagatattgttatcatacttcatatatggttttctttagctctttgaaactgtatctaagaaaatatttagagaaaacgttttagtgtctttgtctcataagtccaatgtctgggcttccttagggacaattaactgccttttttctctccatgtatagatcatcctttcttgyctcttgcatgtctcacaattttttgttgaaaattagataattaaa

SEQ ID NO: 570512 - DNA, 584 bp, Homo sapiens
actttggtacttccagtttccatcgttttaattgaaatatatttaatttgaaaactgtagtgtctgattctccaacaaatcatcctccgtgaggatagwtagggtttctcagatgtgctttaacgttcatcctggaaacacatggtagactgtggacaattatattgtagatgtaaagaataacttgagaagtgttagtctattcattcattcaccaaacactgcttcatatgctgagaatataaagacaaatgtgtaatggtcctggtcttcaagaagccaggtgaggggccagaagatactgattgtatttgcatggagaagtgggactgttgtcctgtgtcctttaaaaaccacccaattcagttctcaatttctggaaaccatcctggactggtatggttgtgtgtgtgtgtatacgcaatcatgatttgcttaatgatggggatacattctgagaaatgggtcattaggtgattttgtcattgtgcaaatatcgtaaagtgcccttacacaaatctagatggcgtagccaactacatacttagactgtataggatagccagttgctcctaggctaaaaa

SEQ ID NO: 570513 - DNA, 647 bp, Homo sapiens
tccatttccaaactatataataatttaaaattattaaataaattttaagatttgagagacaatttctttcttctagacatttaaaatataaattctcaccatgttaatatctttttaagtatcaaatgactttgttaagcatactaaagaagagaacaggaatatatgttaaactggctaaataaccatattatattgtatttgaggtattccaccaagatggtctaccaagaattcattataatcttttgtgcccttttgccatctggtttaaagtaagtttgaggccaaatcccaaagtacaaaatgccaggttsatattcaaaataagttcaagattttaaaagttatccaaaaacttatttgcctttgctttttccattctttgtttaatgagctgatattaaaatgacctgccattattaagataagggtttaaaaattgtaaacatatgtgctaattagcataaaattaaaccctgaaattaatggaaatccaaggaagactggctgccaggacatttatttttctgaagttttattttctttcctacgcttctgccagagaacatttactagtaactgaataaattgctctaacgatttcaggttttgttatgatacatgattttcaaaattccaagaaa

SEQ ID NO: 570514 - DNA, 533 bp, Homo sapiens
accatcctggccaacatggtgaaatcctgtctttactaaaaatacaaaaattagctgggtggtgcgcgcctagtcccagctactcaggagactgaggcgggagaatcacttgaaccygggagacggaggttgcagtgagccaagatcgcaccactgcactccagcctggcaacagagggaaactctgtctaaaaaaaaaaaaaaacaaaaaaaaaaactaactaattggggttctggaatgagaagagagcatggtgcaaacctaatgattgggcatttttcagaactaatgaaagatacaaatcaacacagattcaagaggcccaacacatttcagacaggatagataaaaagaagtccacacataaacataggatggtgaaaccgaataacattaaaggaaaacagcagatcttaaaagcagccagattgtgggatatatgagtgtatgcatttgtcaaaattcactgcccttatacaggtaaggtctgtgtacttcactgcatgcaacttttaccagagtaaaaaattaa

SEQ ID NO: 570515 - DNA, 587 bp, Homo sapiens
ctgttcatgtccttcgcccactttttgatggcattgtttgtttttttcttgtaaatttgtttgagttcattgtagattctggatgttagccctttgtcagatgagtaggttgcaaaaattttctcccattttgtaggttgcctgttcactctgatggtagtttcttttgctgtgcagaagctctttagtttatatttctttttcataaaattgtgtaccatgtagctctatgtctgagtttcctcatctgtaaagatatggttctgaaattgaaggtctctttagcaataaactctgtgcatgtgtgtgaactttagatatagatatagatatattagatagatgtaarcaactttagccctttataatctttagtactttatgacttaaatttgaggctttcaagaaatacattaatttatgtttttctttaattaatgatcatcttcactagtttacttattcagaacaacttattttccagagaaatttgatttcaaaatttttgaggcacttttctataatatgatggtggcaacttatcttgattattcaataacatttgctattcaacacaaagcacttca

SEQ ID NO: 570516 - DNA, 587 bp, Homo sapiens
ctgttcatgtccttcgcccactttttgatggcattgtttgtttttttcttgtaaatttgtttgagttcattgtagattctggatgttagccctttgtcagatgagtaggttgcaaaaattttctcccattttgtaggttgcctgttcactctgatggtagtttcttttgctgtgcagaagctctttagtttatatttctttttcataaaattgtgtaccatgtagctctatgtctgagtttcctcatctgtaaagatatggttctgaaattgaaggtctctttagcaataaactctgtgcatgtgtgtgaactttagatatagatatagatatattagatagatgtaaacaactttagccctttataatctttagtactttatgacttaaatttgaggctttcaagaaatacattaatttatgtttttctttaattaatgatcatcttcactagtttacttattcagaacaacttattttccagasaaatttgatttcaaaatttttgaggcacttttctataatatgatggtggcaacttatcttgattattcaataacatttgctattcaacacaaagcacttca

SEQ ID NO: 570517 - DNA, 587 bp, Homo sapiens
ctgttcatgtccttcgcccactttttgatggcattgtttgtttttttcttgtaaatttgtttgagttcattgtagattctggatgttagccctttgtcagatgagtaggttgcaaaaattttctcccattttgtaggttgcctgttcactctgatggtagtttcttttgctgtgcagaagctctttagtttatatttctttttcataaaattgtgtaccatgtagctctatgtctgagtttcctcatctgtaaagatatggttctgaaattgaaggtctctttagcaataaactctgtgcatgtgtgtgaactttagatatagatatagatatattagatagatgtaaacaactttagccctttataatctttagtactttatgacttaaatttgaggctttcaagaaatacattaatttatgtttttctttaattaatgatcatcttcactagtttacttattcagaacaacttattttccagagwaatttgatttcaaaatttttgaggcacttttctataatatgatggtggcaacttatcttgattattcaataacatttgctattcaacacaaagcacttca

SEQ ID NO: 570518 - DNA, 587 bp, Homo sapiens
ctgttcatgtccttcgcccactttttgatggcattgtttgtttttttcttgtaaatttgtttgagttcattgtagattctggatgttagccctttgtcagatgagtaggttgcaaaaattttctcccattttgtaggttgcctgttcactctgatggtagtttcttttgctgtgcagaagctctttagtttatatttctttttcataaaattgtgtaccatgtagctctatgtctgagtttcctcatctgtaaagatatggttctgaaattgaaggtctctttagcaataaactctgtgcatgtgtgtgaactttagatatagatatagatatattagatagatgtaaacaactttagccctttataatctttagtactttatgacttaaatttgaggctttcaagaaatacattaatttatgtttttctttaattaatgatcatcttcactagtttacttattcagaacaacttattttccagagaaatttgatttcaaaatttttgaggcacttttctataatatgatggtggcaactyatcttgattattcaataacatttgctattcaacacaaagcacttca

SEQ ID NO: 570519 - DNA, 614 bp, Homo sapiens
ctctttcttccatttttatactttttttgagaatcctcagtatttcctagcaagtctaaacgttcacacgacaggtggcagccacacaggaaaattacctggcctttccagaattctcttaacttgcgaaaagttctgtttctgtggcattctttggcatcgcccacagacactgttcattagtcacacaacagaatgcccacacattctttgtaaggtactgagtaaggagagcatttgagagcctgactctgagcacattgcatgcttttaatcagttgttgcayagaaatgtaattagtggtcaaataaactcgagattgaactttgtttttgtctgtttgtttgtttttgttgttgttttgagacagaggctcactctgttgcccgggctggagtgcagtggtgcaatctcagctcactgcagcctccaccttccgggttcaagcatttctcttgcctcagcctctcgagtagctgggactacaggaatgtgcaacaatgcccagctaatttttgtatttttagtagagatggggtttcaaccatgctgaccaggctgcctttgaactcctgacctcaagtaatccacctgcctaggcctcccaaagtgc

SEQ ID NO: 570520 - DNA, 418 bp, Homo sapiens
gaatgcaatcatcgaatggtctcgaatggaatcatcttcaaatggaaaggaatggaatcatcrcatagaatcgaatggaattatcatcgaatggacccgaatggaatcaacatcaaacggaatcaaacggaattatcgaatggaatcgaagagaatcatcgaatggccacgaatggaatcatctaatggaatggaatggaataatccatggacccgaatgcaatcatcatcgaatagaatcgaatggaatcatcgaatggactcgaatggaataatcattgaacgcaatcgaatggaatcatcgagtggaatcgaatggaatcatgatcaaatggaatcgaatgtaatcatcatcaaatggaatccaaaatcaccatcatcaattggtactgaatggaattgtcatcaaatggaattc

SEQ ID NO: 570521 - DNA, 418 bp, Homo sapiens
gaatgcaatcatcgaatggtctcgaatggaatcatcttcaaatggaaaggaatggaatcatcgcatagaatcgaatggaattatcatcgaatggacccgaatggaatcaacatcaaacggaatcaaacggaattatcgaatggaatcgaagagaatcatcgaatggccacgaatggaatcatctaatggaatggaatggaataatccatggacmcgaatgcaatcatcatcgaatagaatcgaatggaatcatcgaatggactcgaatggaataatcattgaacgcaatcgaatggaatcatcgagtggaatcgaatggaatcatgatcaaatggaatcgaatgtaatcatcatcaaatggaatccaaaatcaccatcatcaattggtactgaatggaattgtcatcaaatggaattc

SEQ ID NO: 570522 - DNA, 418 bp, Homo sapiens
gaatgcaatcatcgaatggtctcgaatggaatcatcttcaaatggaaaggaatggaatcatcgcatagaatcgaatggaattatcatcgaatggacccgaatggaatcaacatcaaacggaatcaaacggaattatcgaatggaatcgaagagaatcatcgaatggccacgaatggaatcatctaatggaatggaatggaataatccatggacccgaatgcaatcatcatcgaatagaatcgaatggaatcatcgaatggactcgaatggaataatcattgaacrcaatcgaatggaatcatcgagtggaatcgaatggaatcatgatcaaatggaatcgaatgtaatcatcatcaaatggaatccaaaatcaccatcatcaattggtactgaatggaattgtcatcaaatggaattc

SEQ ID NO: 570523 - DNA, 542 bp, Homo sapiens
tcgaatggaatggaatggacttgaatggagtagaatggaatggaatgtaaaggaaatgaatagaatggattggaatgcaatagaatggaattgaaggaaatggaatggaaaggaaccgaatcgaatcgaatggaatgacatggaattgaatcgaatggaaaggaaatgaatagaatggaatggaacggaatgcaatggaatggactcggatgtaatggaatgaaacgaaatggactcgaatggaatggactcaaatggaatgcaatcgaatggaatggaatggaatcgaaagaaatggaatggaatggaatgcaatgcaatggaatggaatggaatgcaatggaatggaatcaaaaggagtggactaaaatgaaatgcaatggaatcgaatggaatygaatggaatggatttgaatggaatggactcgaatggaatggattcgaatggaatgtaatcgaatggaatgaaattgaaaggaatggaatcgaatgggatggaatcgaatgaaatggaatagaattgaatgtactggaaaggaatg

SEQ ID NO: 570524 - DNA, 227 bp, Homo sapiens
gaatggaattcactcgattgtaaagtactggaatggaatggaatggactcaaaaagaatggactcgaatggaatggaaaggagtggaatggaatgcaatagaatggacttgaatgtaatggactggaatgtaatagaatggaaaggaatggactaaaatktaatggactccattggaatagactccaaaggaatgcaatcaatggaatcaaatggaatggaatggaa

SEQ ID NO: 570525 - DNA, 545 bp, Homo sapiens
ttgaaaactttaatggacttcaagtttcaagacggagatatgagctcacatgtttatctcacctccatcctagaaactcattatggtgaccaagaagatgcaaaataaaaagaatgtctacagcagcattgaaaaataagaaggggaagcagaacaagaaagggaatactagacaataagaagcatgtatcagtcagggctctccagagaaacagaaccagctggatggagatatatgttttatgattatgatgaattggctcacaaaattatggaggctaacaaatcccaagatcttcagggtgagtcagtaatctaaagatccaagacagccaatagtgcaattgcagtccaaaggccagtaggcacaagagccaggaacagctgatgcttccattcgagtcagaaggcaggagcaagccaatgatcaagtctgaaaacaggaaggagaaattctctcctattcgagggaaagtcagtcttttaattgtattttggccttcaactgactagatgtagtacayttgcattaggggagggcaatt

SEQ ID NO: 570526 - DNA, 469 bp, Homo sapiens
aagctattccctttactaccataggcctcaaagcgctccaaatctccacttgcacattccacaacaagagtgtttccaaactgctctatcaataggaatgttcaactctgtgaggtgaatgcaatcatcacaaagcagtttctgagaatgcttctatctagtatttaggtgaagatatttccttttccaccacaaaccacaaagccctccaaacgtccacttgcagattctagaaaaasagtgtttcatagctgctctttccaaaggaaagttcaactctgggagttgaatacaaacatcaccaaaaagttcctgagaatgcatctgtgtagtttttatgtgaagatgattccgtttccaacgaaatcttcaaagaggtctacatgtccccttgcagatgccacagaaagagagtttcaaaactgcgctctcaaaaggagtgttcaactccgtgagttgaatgcagtca

SEQ ID NO: 570527 - DNA, 524 bp, Homo sapiens
tagttcaggtttgaaacggtctttctgtagaaactgcaagtagatatttggacctctctgaggatttcgttggaaacgggataacccgcacagaactaaaacagaagcattctcagaaccctcttcgtgatgtttgcattcaactcacagtgctgaacctttctttgatagttcagctttgaaacactctttttgtagaaactgcaagtggatatttggtcctctctgaggatttcgttggaaacgggataaactgcacagacctaaacagaagcattctcagaaccttcttcgtgatgtctgcattcaactcacagtgtggaacctttctttgatagttcaggtttgaaacactctttttgtagaaactgcaaggggataattgcactctttgaggmgtaccgtagtaaaggaaataacttcctataaaaagaagacagaagctttctcagaaaattctttgggatgattgagttgaactcacagagctgagcattccttgcgatgtagcagtttagaaacac

SEQ ID NO: 570528 - DNA, 524 bp, Homo sapiens
tagttcaggtttgaaacggtctttctgtagaaactgcaagtagatatttggacctctctgaggatttcgttggaaacgggataacccgcacagaactaaaacagaagcattctcagaaccctcttcgtgatgtttgcattcaactcacagtgctgaacctttctttgatagttcagctttgaaacactctttttgtagaaactgcaagtggatatttggtcctctctgaggatttcgttggaaacgggataaactgcacagacctaaacagaagcattctcagaaccttcttcgtgatgtctgcattcaactcacagtgtggaacctttctttgatagttcaggtttgaaacactctttttgtagaaactgcaaggggataattgcactctttgaggastaccgtagtaaaggaaataacttcctataaaaagaagacagaagctttctcagaaaattctttgggatgattgagttgaactcacagagctgagcattccttgcgatgtagcagtttagaaacac

SEQ ID NO: 570529 - DNA, 472 bp, Homo sapiens
gtcttctttttataggaagttatttcctttactacggtackcctcaaagagtgcaattatccccttgcagtttctacaaaaagagtgtttcaaacctgaactgtcaaagaaaggttccacactgtgagttgaatgcagacatcacgaagaaggttctgagaatgcttctgtttagttctgtgcagtttatcccgtttccaacgaaatgctcagagaggaccaaatatccacttgcagtttctacaaaaagagtgtttcaaagctgaactatcaaagaaaggttcagcactgtgagttgaatgcaaacatcacgaagagggttctgagaatgcttctgttttagttctgtgcgggttatcccgtttccaacgaaatcctcagagaggtccaaatatctacttgcagtttctacagaaagaccgtttcaaacctgaactatcaaagaaaggttcaacactgtgagttgaatgca

SEQ ID NO: 570530 - DNA, 472 bp, Homo sapiens
gtcttctttttataggaagttatttcctttactacggtactcctcaaagagtgcaattatccccttgcagtttctacaaaaagagtgtttcaaacctgaactrtcaaagaaaggttccacactgtgagttgaatgcagacatcacgaagaaggttctgagaatgcttctgtttagttctgtgcagtttatcccgtttccaacgaaatgctcagagaggaccaaatatccacttgcagtttctacaaaaagagtgtttcaaagctgaactatcaaagaaaggttcagcactgtgagttgaatgcaaacatcacgaagagggttctgagaatgcttctgttttagttctgtgcgggttatcccgtttccaacgaaatcctcagagaggtccaaatatctacttgcagtttctacagaaagaccgtttcaaacctgaactatcaaagaaaggttcaacactgtgagttgaatgca

SEQ ID NO: 570531 - DNA, 547 bp, Homo sapiens
cccgtttccaacgaaatcttcaaaataggtccaaatatccacttgcagattccacacaaagagtgattggaaactgctstttgaaaaggaaccttcaactctgtgagttgaatgcaatcatcacaaagaagtttctgacaatgcttctctccagtttttatgtgaccataattcgttttccaccacaggcctgaaagcgctccaaatgtccacttgtagacactacgaaaagcatgtttcagaactactctatgaaaagcaatgtgaaactctgggagttgaacacaaacatcacagagaagtttctgagaatgcttctgtttagtttttatgtgaagatattcccgtttccaaagacatcttcggagaggtccacatatccacttgcagattccacaaaaagagagtttcaacactgctctatccataggagggttcaactctgtgagttgaatgcaatcatcacagagaagtttctgagaaggcttctgtctagattttatgtgaagatatacccgtttcgaacgaaggccacagagtggtccaa

SEQ ID NO: 570532 - DNA, 547 bp, Homo sapiens
cccgtttccaacgaaatcttcaaaataggtccaaatatccacttgcagattccacacaaagagtgattggaaactgctctttgaaaaggaaccttcaactctgtgagttgaatgcaatcatcacaaagaagtttctgacaatgcttctctccagtttttatgtgaccataattcgttttccaccacaggcctgaaagcgctccaaatgtccacttgyagacactacgaaaagcatgtttcagaactactctatgaaaagcaatgtgaaactctgggagttgaacacaaacatcacagagaagtttctgagaatgcttctgtttagtttttatgtgaagatattcccgtttccaaagacatcttcggagaggtccacatatccacttgcagattccacaaaaagagagtttcaacactgctctatccataggagggttcaactctgtgagttgaatgcaatcatcacagagaagtttctgagaaggcttctgtctagattttatgtgaagatatacccgtttcgaacgaaggccacagagtggtccaa

SEQ ID NO: 570533 - DNA, 553 bp, Homo sapiens
gaaactctctttttgtggaatctgcaagtggatatgtggacctctccgaagatgtctttggaaacgggaatatcttcacataaaaactaaacagaagcattctcagaaacttctctgtgatgtttgtgttcaactcccagagtttcacattgcttttcatagagtagttctgaaacatgcttttcgtagtgtctacaagtggacatttggagcgctttcaggcctgtggtggaaaacgaattatggtcacataaaaactggagagaagcattgtcagaaacttctttgtgatgattgcattcaactcacagagttgaaggttccttttcaaagagcagtttccaatcactctttgtgtggaatctgcaagtggatatttggacctattttgaagatttcgttggaaacgggagaatcttcacaggaaagctaaacagaagcattctcagaaacttctttgtgatgcttgcattcaactcasagagttgaactttcctttcgagagagaagctttgaaacactctttttccagaatctgcaagtggacatttgg

SEQ ID NO: 570534 - DNA, 492 bp, Homo sapiens
agcagtgtttctcagtgcattatcagaagaattaaacatacttacaggtacttgttaaaaatttaacttaaaaatttcagttcaagaagtctaccacagaccttgaagttcactcatttgatcattacataatttcttttttatttttaaagagatggggtctcactatgttgccccagctggtctccaactcctgagctcaagtcattctcctgccttagcctcccaaagtgctaggattacaggcatgagccactgcactggcctgattattacataattttaagcagctattctgtgacagttttaggtcttagygtaaaaccaaacaaaacctgtgccctataaaggtcacaccagttactgctaattgccaataacgtgagtaatctcaatgaaggataacatatgctttgacaaaggcattatagggagcccagagaaggagcctagaatgatgtgtcatcagaaaagacttctaagaaggaattc

SEQ ID NO: 570535 - DNA, 399 bp, Homo sapiens
cacgataaactagagctatccaagtgacggaggagtcgacaagcatttctccgagtaactatcaagagcataaacatgaaacagggcacacattgtttttactgaacatcaatcagtccatctctggaaatcttgtgggtaactgtataaatgacataatgagcatatgttaaaatgcacagaacttgtgttccgtttaatcacttgtgaccattatatacsccctgtaaccatccttccccaagtaaaatgaggaagatttccaggtcttcagaaatcctcccctgtttttttctactgctgcaaccactactggatttctatcatcatagattatttctgctgtcatttgtatgtcatcataaaacaaacagaatgtactattttatgtctgaattc

SEQ ID NO: 570536 - DNA, 373 bp, Homo sapiens
catccttgttctctgcctctgcctccattgacacttgcaggttccttctcactgtattccatccatgcattgggtattggcaatagtcaaagctaggtggacaccaggtaacccaggaaaaaagggaaagagaggaatggtgtgaacrtatctaagtcacatttatttttggaccttacaaagtcaattcacacaacggctctcccaagcaggtactatcacccagaggctacttagcttttcctataatcctgcagcttaggctgaggaaggtgatgttactctccttggcccatcaactttacctgtccttccctctgtcccatggctatcagtacccttgaaagagtcttgtctgtgatgaagaaatttt

SEQ ID NO: 570537 - DNA, 373 bp, Homo sapiens
catccttgttctctgcctctgcctccattgacacttgcaggttccttctcactgtattccatccatgcattgggtattggcaatagtcaaagctaggtggacaccaggtaacccaggaaaaaagggaaagagaggaatggtgtgaacgtatctaagtcacatttatttttggaccttacaaagtsaattcacacaacggctctcccaagcaggtactatcacccagaggctacttagcttttcctataatcctgcagcttaggctgaggaaggtgatgttactctccttggcccatcaactttacctgtccttccctctgtcccatggctatcagtacccttgaaagagtcttgtctgtgatgaagaaatttt

SEQ ID NO: 570538 - DNA, 548 bp, Homo sapiens
actgactcaaaataacgctggatactcactctctgaactctggacaatatgacaactacagccagggatatcctaccttctcccagtaggaggggctacacccaagctcagcttatcatacaaccaggggcttccacctccacacaagggatactttagtatcccacagcgcctgagggtctctgggggcctggagccaaggggtccacttatcyttcattgacaaggtaggctactgaagagaacggacccttgctaggaacacagagccacactgcaggatcaaggcagccaggtcctgccacacctttaggtgggatgtggaagattataggacccctggcttctcttctcattgttaaatcttgacatatgtaaatttcccaataaagccttttctctaggccatgcatgatatgtgacattgtggaatttttcctgaagtctattaatacatgcagactcagatgggatctaactggcatgaaaactaaggataatatctttaaaatgccaatatcaaattattttaccatgaaatttattgg

SEQ ID NO: 570539 - DNA, 601 bp, Homo sapiens
acaatcataaagaaaaaacttaaygggctcaactatgttaatattaagagcttctgctctatcaaaggactccaaataagagtgaaaaggccagcaagcaactgggagaatacgtgtgcaactcaagagaactggcaaaagatagtgcccagaatacacagaacttctccaaataaggagacgtctaattgcaaattaaaatattgagatatcatttcaaactcaacaaattgtcaaacaggcaaaagtctgacactgtcaagtgttgtccagaatgtgaaagaacaggaacaattcgatactggtagaacaaatgtaacaacaaaaattgtttgaaaaacaatttagtgttatctcgtgaagctgaggatataaatacctcatgagtcaactctacttgttagaatcaggcgcagcaggagacatatttaacaatattcatagcagaaattaatgataatagcaaaaaaagagaggatatcaatagtaagtggatagcaaattatagaataccaattcacaaataatgatggaaaagtgaaaataagataaacagatctagttatagcagcatggatgaatctcaggaacttaagctgag

SEQ ID NO: 570540 - DNA, 595 bp, Homo sapiens
aagggaataaaatcatctttaggcaattttgtttttgcatttttattattattaatctgtagcatgcgatctatgtaaaagcaatgtttcccaggcagatagcttccgagcaatgcccccagcctcccttccaccccgccgaggtcctggcagcactcagattgcttcagctacgtgcccaatgaaaatattaaactctggagctgtccggggtgggagggaggcactgagcctggtccagcaacagaatggggagcaggggacctctgagcgtccttgtttctaggagctcatatgataagggttttgctgcactmctgtcctggacaaggccggcgggataggtggatatcaggccactgcccccacagaatttactattctacttggtgtggggcgaggggagaaattgccctcacgtcatgtctcctaaagggaggacatctcacttggagtcacggaagataggtctagtcggtgcaccgagcagggccagggcattaaatgactgtgaatcacatagtaagaaatggattcctttttgcattctctttcagttcttctgtatacaaggagaaagtattctctctcaaac

SEQ ID NO: 570541 - DNA, 568 bp, Homo sapiens
accccgccgaggtcctggcagcactcagattgcttcagctacgtgcccaatgaaaatattaaactctggagctgtccggggtgggagggaggcactgagcctggtccagcaacagaatggggagcaggggacctctgagcgtccttgtttctaggagctcatatgataagggttttgctgcactcctgtcctggacaaggccggcgggataggtggatatcaggccactgcccccacagaatttactattctacttggtgtggggcgaggggagmaattgccctcacgtcatgtctcctaaagggaggacatctcacttggagtcacggaagataggtctagtcggtgcaccgagcagggccagggcattaaatgactgtgaatcacatagtaagaaatggattcctttttgcattctctttcagttcttctgtatacaaggagaaagtattctctctcaaacagtaaactcccttttatcacagagcaggctccaggctcaaagccctaggtaagcactggtatctaactggaatttataacattgtttcattttcattgtttagtt

SEQ ID NO: 570542 - DNA, 440 bp, Homo sapiens
taatcacgtattatgtgattcaatattatttaatcccctgtccttaagccacctactgttatcaagaaccatcagtagaaacgggattgaacttttctctctctccctcactcagcttctgaatttatgacatttccccatagctacacagagacactattccttccagagtagtttctactataattagacactaacagttatgtttaaacagcagaatttttttacctgaccattagcaagagagaaaagctggttttttacgtagtatctgtgaaatctccaagaaacaaggaaacaagagtcaatacagaaagtttyagcctgtgagaaattttgtgtaaagttcaagagatgatgtttaatgaatgtgtgtttctttcacaaaagtagtaatagaaaacatttctcaaagagatatatatttgtttaccacaagc

SEQ ID NO: 570543 - DNA, 620 bp, Homo sapiens
gaccattagcaagagagaaaagctggttttttacgtagtatctgtgaaatctccaagaaacaaggaaacaagagtcaatacagaaagttttagcctgtgagaaattttgtgtaaagttcaagagatgatgtttaatgaatgtgtgtttctttcacaaaagtagtaatagaaaacatttctcaaagagatatatatttgtttaccacaagccrtggggagtatgatggtatgtagaaatatgtcccttaatttgtgactttaatgaaggaaaacagctcaccaagcgcaaagttgaatcaaaatgttttctctcctgtggcttttggcctttcccctccagtatggtctcaactgggtagaaactcatatttttaaatacacaataaatatcatggcttagcaatctttttatcaaaatcaagtggaatgagagtataatgtttatttatcaagttagttttgcaatcccatgtagaatatggttaagtaacttattttagtgtctatttccatttcttaatcctttaagtttttctaaaacatttgaaaggaaatagagattatctgatatatgctgtaaaatgacaaacattgtctgactcaacatatttgagataacc

SEQ ID NO: 570544 - DNA, 565 bp, Homo sapiens
tttcttacagatggagataaagtattttgaggagggaggagagtgtatttcttcatttacacaaagatactcatatggagctgggggcagttcttccccaaaaggaaacattgaactcaaagttccatgtaagcaaggactgtggctgtcatgtctaccattgtatatcccagcacctagcactggacctagtataaattttgtgctaaattaatatttattgactgcatggatgaactctctattttatttatggttcttccaatttattgctatctgttttccattacttgccttctcttaccctgaaattatgcatctggaatgaagtattttartaaaattattgatgaacataatggaaatatggggcattatataaatattacatactattggttgatttgtgtgatgatgacatttgaagtttatttcagatgcttccttttattaatcatgtctttacagccggggtcttctctttggcagagcacttacaaaatatagtgcatgacacaccactaatgtttctctgaattatctgcctccttcttgtacagataca

SEQ ID NO: 570545 - DNA, 534 bp, Homo sapiens
acaaacatggctgtattccartaaaattgacccacacaaacaggtgaatggggcatagtttgctgactactgatccagattgctagcacactatcctttcattttctaaaatatcaccatgtacttagtatatgctggggattatcacacttagtccccagaacaaatttccaagaggacatgattataccctttttataggtaaggaaatttgtgcttagaaggctgatttgatcagcttcacctagccagtgggtcaagtagccttgtctgtccatatgacagccccatctcctttcagtggccactgtctctcacatgcagtgcttccattgtctcctaatttgcctccttgtttcccttcctcctacctacaattgactcttctagcagcatccagaatgatttcttaaaatgtaaattacatcatgtggcttccctactgaaaaccctacaatggcttctcttgcctttgaagttgaaaccaaactcctcaccctgcctacagagtctgacattgtgtggcccctgcct

SEQ ID NO: 570546 - DNA, 534 bp, Homo sapiens
acaaacatggctgtattccagtaaaattgacccacacaaacaggtgaatgggscatagtttgctgactactgatccagattgctagcacactatcctttcattttctaaaatatcaccatgtacttagtatatgctggggattatcacacttagtccccagaacaaatttccaagaggacatgattataccctttttataggtaaggaaatttgtgcttagaaggctgatttgatcagcttcacctagccagtgggtcaagtagccttgtctgtccatatgacagccccatctcctttcagtggccactgtctctcacatgcagtgcttccattgtctcctaatttgcctccttgtttcccttcctcctacctacaattgactcttctagcagcatccagaatgatttcttaaaatgtaaattacatcatgtggcttccctactgaaaaccctacaatggcttctcttgcctttgaagttgaaaccaaactcctcaccctgcctacagagtctgacattgtgtggcccctgcct

SEQ ID NO: 570547 - DNA, 534 bp, Homo sapiens
acaaacatggctgtattccagtaaaattgacccacacaaacaggtgaatggggcatagtttgctgactactgatccagattgctagcacactatcctttcattttctaaaatatcaccatgtacttagtatatgctggggattatcacacttagtccccagaacaaatttccaagaggacatgattataccctttttataggtaaggaaattygtgcttagaaggctgatttgatcagcttcacctagccagtgggtcaagtagccttgtctgtccatatgacagccccatctcctttcagtggccactgtctctcacatgcagtgcttccattgtctcctaatttgcctccttgtttcccttcctcctacctacaattgactcttctagcagcatccagaatgatttcttaaaatgtaaattacatcatgtggcttccctactgaaaaccctacaatggcttctcttgcctttgaagttgaaaccaaactcctcaccctgcctacagagtctgacattgtgtggcccctgcct

SEQ ID NO: 570548 - DNA, 632 bp, Homo sapiens
ggaatatttattaaatatccagtacatgctgagctttaggaatatttatcaaatacccaggacatgctgagcttcctaagcagaggggagagagagcatgaatcttagagtgtgtctacctgattctagtccaggctctacctccaactttctggtaagtaatatttttcaaagatttggttttcttatctgttgtaaaggaattggatttactctctgagcrtccttgaagagctgatagtagacacatagctgaatagaaggcctggctcttgcttcagaaggaatatcgctttgcccacactgagatgattgcacccatagtgcttgggaaggaacatgcctaattcggtgctccacaatatgtgcttggtgccctttgcaagagcatgatgagttgcccacaatggttttagatatttagatgcatcccacttagaaataaaacttgaggacattaggacatactggtcaatgagtgtcattcaccataaaactgtttctgattacacactgcacagcaaacttgagatgctctaaaatcttagagctcatgtatgaaataaaattgatagtggtttcccaaattagagaacaccttgaaactttatatggcatagtcaataataagt

SEQ ID NO: 570549 - DNA, 566 bp, Homo sapiens
catatgaagtaaaggtcttcaaatactgggtaaagtttttggtgtttaaaatttctacatgagttttctattaccgttatgacaaattaacacaaacctggtgacttaaaacaatatcagtgtattacctttcagttctgtaggatcaagtccaatgcaagtcttactgggctgaaatcaaggtaggagaatggtatcattcctttctgcagactctagggcagcagtccccaacctgtttggcaccagagactggtttcatgcaagataatttttccatggatggaggtgggtggggggttggttttgagatgaartggttccacctaagattctcaagcattccacctcggagtctcataaggagcatgcagcctagattcctcgcattcacagttcacaatagggttcgcgctcctatgagaatctaatgccagcgctgatctgacaggaggtggagctcaagtggtaattctcttcccacctcttacctcctgctgtgcagcctggttcctaacaggccatggtgtggcccggagggctggggacccctgctctagggctga

SEQ ID NO: 570550 - DNA, 550 bp, Homo sapiens
atatgaagtaaaggtcttcaaatactgggtaaagtttttggtgtttaaaatttctacatgagttttctattaccgttatgacaaattaacacaaacctggtgacttaaaacaatatcagtgtattacctttcagttctgtaggatcaagtccaatgcaagtcttactgggctgaaatcaaggtaggagaatggtatcattcctttctgcagactctagggcagcagtccccaacctgtttggcaccagagactggtttcatgcaagataatttttccatggatggaggtgggtggggggttggttttgagatgaagtggttccacctaagattctcaagcattccacctcggagtctcataaggagcatgcagcctagattcctcgcattcacagttcacaatagggttcgcgctcctatgagaatctaatgccagcgctgatctgacaggaggtggagctcargtggtaattctcttcccacctcttacctcctgctgtgcagcctggttcctaacaggccatggtgtggcccggagggctggggaccc

SEQ ID NO: 570551 - DNA, 571 bp, Homo sapiens
atatgaagtaaaggtcttcaaatactgggtaaagtttttggtgtttaaaatttctacatgagttttctattaccgttatgacaaattaacacaaacctggtgacttaaaacaatatcagtgtattacctttcagttctgtaggatcaagtccaatgcaagtcttactgggctgaaatcaaggtaggagaatggtatcattcctttctgcagactctagggcagcagtccccaacctgtttggcaccagagactggtttcatgcaagataatttttccatggatggaggtgggtggggggttggttttgagatgaagtggttccacctaagattctcaagcattccacctcggagtctcataaggagcatgcagcctagattcctcgcattcacagttcacaatagggttcgcgctcctatgagaatctaatgccagcgctgatctgacaggaggtggagctcaagtggtaattctcttcccacctcttacctcctgctgtgcagcctggttcctaacaggccatggtgtggcccggrgggctggggacccctgctctagggctgaatccat

SEQ ID NO: 570552 - DNA, 566 bp, Homo sapiens
catatgaagtaaaggtcttcaaatactgggtaaagtttttggtgtttaaaatttctacatgagttttctattaccgttatgacaaattaacacaaacctggtgacttaaaacaatatcagtgtattacctttcagttctgtaggatcaagtccaatgcaagtcttactgggctgaaatcaaggtaggagaatggtatcattcctttctgcagactctagggcagcagtccccaacctgtttggcaccagagactggtttcatgcaagataatttttccatggatggaggtgggtggggggttggttttgagatgaagtggttccacctaagattctcaagcattccacctcggagtctcataaggagcatgcagcctagattcctcgcattcacagttcacaatagggttcgcgctcctatgagaatctaatgccagcgctgatctgacaggaggtggagctcaagtggtaattctcttcccacctcttacctcctgctgtgcagcctggttcctaacaggccatggtgtggcccggagggytggggacccctgctctagggctga

SEQ ID NO: 570553 - DNA, 591 bp, Homo sapiens
atcagttaaactttattttatgctagcttaaggggctcttttacttatatttagacatatatgttaatcatatataactaatgtacacatagaaagtaaaatagaagctggggccggatgcagtggctcacgcctgtgtagtccagcagtttgagaggctgaggcaggaggattgcttgaactcaggagtttgagaccagcctgggcaacatagggagaccttgtctctattttatttttttttaaaamagaaagtaagtaaaatagaagaaaaaaaattaattaaagtgtttctaaaatttcatcacatccactcagctctcatgaatcacctttttatttctcattattattgttcatgttatcaagagcactggtaattcagcactttctaaaataatccataaaataactaaaaaccattggttctgtggtcttaagacaaccttgcgattatgtggagctaatttattttgtttattcttgctttatgaatgttgccaaacatattggattcacacctttctccactcctttcccacaaaccatttgaaacttaggggctaaaagagccctcagtatgctcttctg

SEQ ID NO: 570554 - DNA, 445 bp, Homo sapiens
aaggcaccagcagatttggagtctggtgaggcctgctctctgtttccaagatggtgccatcttgctgcagcctcacgtggcagaagggcaaaaataatggactctgggttctcacatggaagaagaaatggaaagataccagcagctctctgcagcatctattataagggcattaatcccatyaatgagggaaaagccctcgaggtttaataatcacctcccgaaggccctacctcttaataccatcaccttggggtttaagttccaacatatgcatttaggaggggcacataccttcaaattatagcaatccgcaagtgatatacacttcaggccctatggaacctacacttacccttggccatatccagccacgtggatgtcccacagtacttcactatcaatatgcccaaagtgatgctccatgccccatagctgcccctta

SEQ ID NO: 570555 - DNA, 416 bp, Homo sapiens
tggagtctggtgaggcctgctctctgtttccaagatggtgccatcttgctgcagcctcacgtggcagaagggcaaaaataatggactctgggttctcacatggaagaagaaatggaaagataccagcagctctctgcagcatctattataagggcattaatcccattaatgagggaaaagccctcgaggtttaataatcacctcccgaaggccytacctcttaataccatcaccttggggtttaagttccaacatatgcatttaggaggggcacataccttcaaattatagcaatccgcaagtgatatacacttcaggccctatggaacctacacttacccttggccatatccagccacgtggatgtcccacagtacttcactatcaatatgcccaaagtgatgctccatgcccca

SEQ ID NO: 570556 - DNA, 730 bp, Homo sapiens
acttacttagtgcctgctaggyactgagaataaacagttgagtaagtcactccttggatggatgtagggagtggaaaactgactcctagagcccatccaagaccaattagaactgtctgggtggtgagttctgggcataagtgtaatttaaaatctccctaagaatccaatgcaccgccaagatggagaaccactagatttgtagatcctgaagccagaggagtgtatgaaatgtaatactccagggaggaagactaggaagataatcaaagagaaagtgctaagtgggtgtcaaaaaaaccgtagagggaggattgagaagttgcttgatacagagaaagaagaataattttgttgtcagatcaatatgtggtgcaatttcaacctttttactttttagctttgtgtgattctggaaaagtcatttaaactctgagcctttgctttttcatttaaaaatgaggataataagaatcttcatatcctaggattgctgtgagcatctaagcagagtctggtgggcaacaaatctcagttgtttttgttattatttggagttcaggaggagagatcaagaacagaaaggtggacaatttaaaggtgattttgggtcctgcgggaaagttggggagaaggccattattattatttttatcttaaaactaacacaaaaatattgttaattagagtgccaattaagataaaaagaaaacttcatgtgtttttaaaa

SEQ ID NO: 570557 - DNA, 730 bp, Homo sapiens
acttacttagtgcctgctaggcactgagaataaacagttgagtaagtcactccttggatggatgtagggagtggaaaactgactcctagagcccatccaagaccaattagaactgtctgggtggtgagttctgggcataagtgtaatttaaaatctccctaagaatccaatgcaccgccaagatggagaaccactagatttgtagatcctgaagcsagaggagtgtatgaaatgtaatactccagggaggaagactaggaagataatcaaagagaaagtgctaagtgggtgtcaaaaaaaccgtagagggaggattgagaagttgcttgatacagagaaagaagaataattttgttgtcagatcaatatgtggtgcaatttcaacctttttactttttagctttgtgtgattctggaaaagtcatttaaactctgagcctttgctttttcatttaaaaatgaggataataagaatcttcatatcctaggattgctgtgagcatctaagcagagtctggtgggcaacaaatctcagttgtttttgttattatttggagttcaggaggagagatcaagaacagaaaggtggacaatttaaaggtgattttgggtcctgcgggaaagttggggagaaggccattattattatttttatcttaaaactaacacaaaaatattgttaattagagtgccaattaagataaaaagaaaacttcatgtgtttttaaaa

SEQ ID NO: 570558 - DNA, 619 bp, Homo sapiens
ttctttacttaataaacgcaaatttgctcacatttcaagagaattgaaattaccgaatccctaatgaccgttcgcctcacccccatagtcttacagtcttctgatactaaacacttatagtagtacttgtattttgaagacactattgataacttgcatgtgtgttgaggggcagaggttagggctgcagaattatgctaacttcataatatatttttagttttagtctctttcaattgtttttaggatgataaatatttttatccagactttatagactggttacaataattgacttaatctaatttaaataaaatttctatttagttaccctaagtataaatgacctgtcatatakacatgtttaagctattctaaaattataacttatgtatataatccttccctttctgtggtacttgaaggaatgtttagatctatatatggcacaaatgaggggtatatcccttcgcctgttcctcgactccagcagaacattctcgattctccaggtacaaaataatttgctaatagaatccagtttatataggttctgccagaagaaaattcccaactatatttttaatgtgatcaaagaccccacttgacaagaaatagt

SEQ ID NO: 570559 - DNA, 426 bp, Homo sapiens
ggccttcttcctagaacagtgcactctaatcacttttgaagttaaaccaatgccatggaaagcaagctattcaacaaaattttgtgtgtayttaaggggttcaggacctccctaaactccaactcgagtttaaaaagacttatctagggaattcagccacgtatatgacagattttagctagtcttctcccttattgccatttcattccctgtatccacctcctccctccctgctatcccttataattgatattgttgctcattacctgaagcccatatatcaaaatcagtattttcatcaacttgcaaatgggtgtgaggctttcctaatatgtagtacatacaatgtgctttattaggtttaatacacaaacacctggtcttttttctccattcttttgagtaatgaggactgttgactgtatt

SEQ ID NO: 570560 - DNA, 426 bp, Homo sapiens
ggccttcttcctagaacagtgcactctaatcacttttgaagttaaaccaatgccatggaaagcaagctattcaacaaaattttgtgtgtacttaaggggttcaggacctccctaaactccaactcgagtttaaaaagacttatctagggaattcagccacgtatatgacagattttagctagtcttctcccttattgccatttcattccctgtatccacctcctccctccctgctatcccttataattgatattgttgctcattacctgaagcccatatatcaaaatcagtattttcatcaacttgcaaatgggtgtgaggckttcctaatatgtagtacatacaatgtgctttattaggtttaatacacaaacacctggtcttttttctccattcttttgagtaatgaggactgttgactgtatt

SEQ ID NO: 570561 - DNA, 544 bp, Homo sapiens
agctcctatcttgtaaaaggcactcttaggtacacagtgaaagcatggggtttactgttaagtaaaaagaagtatataatccaagatagagaagacatatgcatcttgaaaatacaactgcattgtctagtaataataacaaccatgatttattatgcctctcacagtagatactatgtacttcacaataaactagagggtaagtattgttacccaccacccctggcattttatacatgatgaaattgaccttcaggaagactatacaagctgtaatttggtaacctgaaattggattggaacctttgtctggtaactgatggagagaccaatggtagtaaaaccaagagtcaaggaatgaagtccccgttctccaactaactagttctgtaacctcagaaatgtatcacttcctgagcttccatttcttcactagacgaaggagagggttggaaaaaagyatttctaaggtttattccaactataacagtctacgatttaaaaaaatttaaatgctgaaagagttatagacaattagtaataa

SEQ ID NO: 570562 - DNA, 415 bp, Homo sapiens
tgactcacatgttatttagaagtgtattgtttaatgtccaattatgctgagatttttttcagttatctttctattacttgtttatagcttaatttcattgtggtgtgagagcatactttgtatgatttctattgtttacatttgttaaggtatattttgtggctcagaaagtggtctgttttggggaatgttccatatgaacttgagaagaatgtgtattctgctgttgttasatgaagtactccatgaatatcaactaggtgcagttgcttaatggtgctttttacttcaactatgtccttactgattttctgcctgctggatctgtcaattactgataaaaaggtgtcgaagtctccaccgtacttgtggatttatttgtttctccttgttgttcttttagtttttgccttac

SEQ ID NO: 570563 - DNA, 540 bp, Homo sapiens
ggtgcagtggtgcacaccagtgcggtggctcatgccaacacgttgggacaccaaggcgagctgattgcttgagcccaggagtttaagaccagcctgggcaacatggcaaaaccctgtctctacaaaaaaatacaaaaattagccaggcaagatggtgtgtgcctgtggtcccagctacccaggaggctgaggtgggaggatcatctgagcctgggtggtcgagggtgcagtgagccatgatcgcaccactgcactcaatggaggtgacagtgaaactttgtctcaaaaaaaaaaaaaaaraaagaaagaaaaaaaaaaacctctagtagaaaacaaaactgggaatgtataatgatacccaaggttaaatcactgtggttcataatagcactggtgatagcttttccttataatagatgggcttgtacagatagatgctgcttgcttgaaggggggttttagtgggttttgtacattcatattttgtgggggaagaaacacagctactctatgccattatctaagttttaagtaaggaaa

SEQ ID NO: 570564 - DNA, 602 bp, Homo sapiens
gaacacctggcagcctccctcggctggccccattcaggaaaggggctgactcatttcttcaaaataggatagagtgagatggggtcagacactcgctgttcgcttcttcataagaaggacaggtagcaacatcgcaaagagtcagccaagagttgtcgactgtctggcacaagtagaagaatatttggaggttactgaaatcagaatatacagaaagctgttcactccacccaagcctaggagggcttttccaccaacctcagaggaaaatctacagaacatattcaaaagtgttccaaatatctattgctgagtcacaaatcaccccagaacttagtgaactaaagttcacaacagcaatccttttattatctctcatagtttctgaggtccaggaaatcaggatgggctcagttgggtggttctggctcaggaaggatctcataaagttgtagtcagatggaggctggtgttggaatggctcragactggaacagctagggatggccgagtgtctctcttcatatagtctcagggcctctccatgtggtctcttcatgtgtgacagcttgtgcttcctaacagcatggcagcttcaggat

SEQ ID NO: 570565 - DNA, 558 bp, Homo sapiens
cctattagttgcttgaccttggcaagtcacattatctcttgatgcctcagtttgactcatccacaaaattggaatggaattgcttacctcatagagtagccctaggagttaaatgagatataaatgcatgccaagtgcctagtggggcctggcacatagtaagtgcccttttgctacatcctgaggatcttcctaatttyattctcttacccacaaagggataacaatgtaaatatgtcttaccttgtccactttagaagggtgacttctatcaggaaaatggcacaagatagcaaggatggcttttaaagtgcatacctgggccaggcatggcggctcatgcctgtaatcccagcactttggaggtcaaggcagaaggatcacttgagctcaggacttcaagacaagcctgggcaacatggcaaaaccccatctgatatggcttggctctgtgtccccacccaaatctcatcttgaattgtactcccctaatttccacatgttgtgggagggacctggtgggagataatttgaatcatgggggtggtttcccccata

SEQ ID NO: 570566 - DNA, 340 bp, Homo sapiens
aggtgttccatccacacttgatgagagttgatgagtgctctcatgtaaacctctggactagtctcctaacaggtccagggatgaatccaacacaatctctgcattcagctgattgacataagatgaggacgagggcacacaaagtatgttcatgtacacacacacacatacacacacagactgagtcaataggtggttgattgccamtagtgcattaagagagggacacaaaacgtgcaaggagaatttctgggaaacaaaactcccatcatatccatgaaagctttcttacggggtgctgcagtgctacctctctgggccagtgtgtggacctcaggtg

SEQ ID NO: 570567 - DNA, 420 bp, Homo sapiens
tgtcaggatttcacaagcactagcatcagaagttcttggttggttccagctctgccccaatcttaggccaaaggtttaactcttccagtcctcaattactttgcttataaaatgaaagggttaaataagaccaaaaatcacatccatgctacagctcactaatcaatgaaggcttgctttccccccasccagccaagactgcctcagaatccctcttaacacaaagccctagagagcccctcccagcctgagttggccctctagacaatacacattagccatctctgaacaccgtaacccaattctggaactaatctgcctcaatatctactctggaggcaagaacctcagtcttcaaactcaagcttacaggaagaatcccatttagccttttccataaatcattgtagctttgaattc

SEQ ID NO: 570568 - DNA, 565 bp, Homo sapiens
gctgtgtccccacccaaatctcatctcgaattgcagcttccataattccctcatgttgtgagagggagccagtgggagatactgggttcctcccagtacgggagtattcccrcacactgttctcatggtggtgagtaagtctcacaagatctgatggttttataaggggaaaaccctttcgcttggctctcactcttctcttgtctgctgccatgtgagatgtgcctttcaccttctgccatgattgtgaggcctccccagccacgtggaactgtgagtccattaaacctcttccttttgtaaattggccagtcttgggtatgtctttatcagcaacatgaaaacggacttatacacaaacacagtgaaaatggactaatacacaaacacaggccatcttttggtgtgggtcatcccaggcttttatggactcattttatttgttcaatatttgctgatttgcatcagtctctacctgtgggtgtgtccaggctgagacagagctgggactggctgattcttctgaggctagacctagttttcctcctttcccatccccagcagt

SEQ ID NO: 570569 - DNA, 565 bp, Homo sapiens
gctgtgtccccacccaaatctcatctcgaattgcagcttccataattccctcatgttgtgagagggagccagtgggagatactgggttcctcccagtacgggagtattcccgcacactgttctcatggtggtgagtaagtctcacaagatctgatggttttataaggggaaaaccctttcgcttggctctcactcttctcttgtctgctgccatgtgagaygtgcctttcaccttctgccatgattgtgaggcctccccagccacgtggaactgtgagtccattaaacctcttccttttgtaaattggccagtcttgggtatgtctttatcagcaacatgaaaacggacttatacacaaacacagtgaaaatggactaatacacaaacacaggccatcttttggtgtgggtcatcccaggcttttatggactcattttatttgttcaatatttgctgatttgcatcagtctctacctgtgggtgtgtccaggctgagacagagctgggactggctgattcttctgaggctagacctagttttcctcctttcccatccccagcagt

SEQ ID NO: 570570 - DNA, 581 bp, Homo sapiens
atttacccaactacagatgaaaaatgtggttaggtctatagtagttgtgtgtgtactgaacatgtacaaacttttcctttcttgtcattattccctatacaatgcagagtacaataacaactattttgcatarcacatacattgagttataaattataagtaatctaggtatgatttaaagtaaataggaggatgtgcataggttttgtgcatatactacatcattttatatcagagacttcagcatccatgaattttggtgtccatgggggtcctggaaccagtccccactttgaaacagagtaatgactgtatatttcttcaaatccctttacaatactgagaacagtgctcaggatatggtaggttacatatacacatatttgttgattacaggtttaactttctaatttattggtctcagaagtagtgagataaaatattgaaacaatgatgatgcaaattagccaaaaggtgatagcgattttcacacataattttaacttctctttccaaagtatgttgagagtttttgtcctaaatgtatatagtgtcaacacatacatatatacacaaattat

SEQ ID NO: 570571 - DNA, 577 bp, Homo sapiens
cttttgtttttgttttgttttacaaagcagttattttctaattatttagaataacttttaacttgaaggtacagattaattaagcatgtttaatttttttaatcttctgaaaagagtgtacttgataaacacttgtcttctttcaataaaaagaagcaaatttggagcatttgtctccttcataaaagaaaaatgcccaatatcattaaggttcatttttaatcttaagtttttattttaagttgttataacaaaaaaaaaaatctatcttagaaaaagtgttcaaagtcactccttacctcrttacatttaaagatattgtttttataatgctaacccttttgatgatttgtagccaacaaaaaaaataatgcaattaggtaccatattccaaaatctgacaaagggctaatatcgagaatctacaaggaacttaaacaaatttacaagaaaaaagcaaacaactccatcaaaaagtgggcgaaggatatgaacagacacttctcaaaagaagacatttatgcatatggaaaaaagctcatcatccttagtcattagagaaatgcaaatcaaaacc

SEQ ID NO: 570572 - DNA, 560 bp, Homo sapiens
  misc_feature 355, 432, 489, 506: n = A,T,C or G
ttcataacatgaaaatgccaggtgaagcagcaagtgctaatgtagaaggtgcagcaagttatccagaagataatagctaagatcgttgatgaagyagttacacttaacaacatattttcaatgtagacaaaatagtctcatggaagaagacgccttctaggactttcatagctaaagaggagtagtcaatgcctggcttcaaatcttcaaaggacaagctcactctgttgttggtggctagagcagctggtgactttaagttgaaaccagtgctcgtttaccattccaaaaatccttaggccctgaagaaatatgctaagcctactctgcctgtattctgtaaatggaacaacanagcctagatgacagcaaatgtgtttatgttgcccgtttactgacatttttagctcactattgacacctgaagctcanaaaaggatcccttttcaaattatactggtaacaagcatctagtcacccaagactctngtagagatttacaaggngatgaatggtgttttcattgctggtaacacaacatccattctgtaacccatgga

SEQ ID NO: 570573 - DNA, 581 bp, Homo sapiens
tggtgattagcacttggtacctttttacttatgcaaatttctgcagtccgcttgaattcttctcctgaaaatgggcttttctttactaccacatgaccaggctgcaaattttccaaactttcacactctacttccccttaaaatgtaagttccaactttaggttatttcttygctcacccatatgagataggctgttagaagcatccaggcccaatcttgaatactttgctgcttagaaatttcttctgccagatagcctaaattattgctctcaagttcaaagttccataggttcctagggtaggggtacaatgcagccaagttcgttgctaaggcataacaaaagtgagctttactccagttccaataagttcatcatttccatctgagatcttgtcagtctggccttaactgtccatgtcactaccagcattttggtcatgaacattcaaccagtctcttaaagttccaaactttccctcatcttcctgttttcttctgagccctccacacccttacaacttctgcccattacccagttccaaagttgcttccacattttcaggtacctttctagcaa

SEQ ID NO: 570574 - DNA, 618 bp, Homo sapiens
tacaacaaattttaaaaatatatgtgtagagacaaggtacagatgaaccactagataactttttaatttttctgtaaagttgtttataagagccttggaataaaataataaaatttttatatggatacctaattgagaatagaagttaagtaatttccaggtttcccctcattcatgataggttctggttagaactcatgtttccagattcttgtcttaacattcttttaaatattaccttgattttattttttttaaatgtaaargtaactcttcaaaaataatttaaaaagccactgccaattattataaactttaataaacattagaggcagtttatagtatatttgtcaagaccatggactctggaattagataaattaccatataagcctgacttaaacatttactacccatgggaccttaacttctctgaacctcaacttcttcatcaggaaaataaggatattataatatgtattagtccattctcaaactgctatgaagaaataccagagactaggttatttatttatttatttatttatttatttatttatttttgagatggagtcttgctctgtcgcccagactggagtacagtggcgtgaccttggc

SEQ ID NO: 570575 - DNA, 618 bp, Homo sapiens
tacaacaaattttaaaaatatatgtgtagagacaaggtacagatgaaccactagataactttttaatttttctgtaaagttgtttataagagccttggaataaaataataaaatttttatatggatacctaattgagaatagaagttaagtaatttccaggtttcccctcattcatgataggttctggttagaactcatgtttccagattcttgtcttaacattcttttaaatattaccttgattttattttttttaaatgtaaaggtaactcttcaaaaataatttaaaaagccactgccaattattataaactttaataaacattagaggcagtttatagtatatttgtcaagaccatggactctggaattagataaattaccatataagcctgacttaaacatttactacccatgggaccttaacttctctgaacctcaacttcttcatcaggaaaataaggatattataatatgtattagtccattctcaaactgctatgaagaaataccagagactaggttayttatttatttatttatttatttatttatttatttttgagatggagtcttgctctgtcgcccagactggagtacagtggcgtgaccttggc

SEQ ID NO: 570576 - DNA, 456 bp, Homo sapiens
actgggctgaattcccagacggttaaggcattctaagtcataggataagatatgaggtcggcacaaaattcaggttataaaggcctcgctgataaaacaggttgcagtaaagaagcctgctaaaacccaccaaaactaagatggtgatgagagtgacctctggttgtcctcactgctacactgccaccagcgccatgacagtttacaaatgccatggcaacgtcaggaagttaccctatatggtctaaaagggggaggcacaaataatccaccccttgtttagcacatcatcaagaaataaccataaaaatgggcagccagcagccctcggggctgttctatgtcttttattcctttacttccctaataaacttgctctcastttatggacttgccctgaattctttcttgtgcgagatcaaagaagcctctctgggggtctgaattgggactact

SEQ ID NO: 570577 - DNA, 567 bp, Homo sapiens
gtgcatttttcctctttccctttggggctcaatataacagataaagtcagaggccaggtcttctccccaactttctgacacacctccaaaccctagtcccctaaaatattttggtgacttgtccttattcaaaaactgtgtgtctcaggcaggtcctttgggccttgacttggtctgtaaatggaggggctgggtaaacaggcaacaaggccccttcccacaacagcaagtgtggttatgcttccatatcaaagaggcagcataggcgatgaagtaagagggcctggatctgttagagagcactgtgtggtttcctcatccataaaatggggatgatattagaatctataccagtgagttrcgtgagaggcaaataagataatatatggaaaggtactccttttaaaaatatataaatggtttttcccaccattctgacaaaagtcatatatattgattgcagaaaatacagacaagcaaaaaggaaaagaaaatcatctatcatctctttccctacccagaccttctctggggaataattacagttagcattctggtatatatcct

SEQ ID NO: 570578 - DNA, 216 bp, Homo sapiens
ctttttctccccattttacagaaatgagatttgaaaccaagatagtgacttgcctcaggccacgcagcatgtaagcaacagagccagaagagcaaacacaggtcccctgactccaaatcagagctgctgccaggacaaataagatctgcamatataaatctccattgggcaaggccacagacaaaactgtcaggggtggctggcatgaacacatgc

SEQ ID NO: 570579 - DNA, 484 bp, Homo sapiens
cagggatggacgcacacacatgcacacacactcacacagcataccataacctatctgtcaccaaggcctgcttgaatacacccctgcttaacccctgtcccyactgcaccaacatggctcagggactagtcagctctcccccacccagcctactgtggacttctaaccaggctccctgcagccagtctacgaagtgttttcccaaaagtgccaactaattatcagccttgaggatgcagttcaactccttaggtaggatggtgtaacaaggctcttcataatctggcccaaattcacctctcttcaattcccatatacgttagactccatcacataacaatgaaccctgagctccttaaagttgaattcaacaagtatttattaaagaaatggccaaaaagcgggaaaccttttttttttttttgagcagagtttctcatcacccaggctgaagtacaatggtgagatcccagctcactgcaac

SEQ ID NO: 570580 - DNA, 596 bp, Homo sapiens
aaataaatttttaaaattcttacctctgggtggtgagattatgaatagcttatttcctttttttyatatttatatcttttccaatgcacattattaaaatatcttaggggctcaatagtggggagggaaacatgggacaggtacacatatatgaagccagtgaccatccacattcaatgggctcttccagaaggcagggtcttacttggcacataccaaaagccataaaagaatccaaacctttcatgcagttagctcactgctgagaattcactttagggaaataactgaacgaacccaaaatgccaaatgaacaaaaatactcattacctcttatctaaaacagtaaagaactagaaacaatcaaaatgtccaaaggaaagttccatatagaacatcaacaccatgggatgcaaggcagccattagaaatgccaattatgaaaactgtgtagaaaaatgaaataatgttgacaataggctgtaaaatgaaaagaatttgcaaagctgcatttgtcaggactgcagctatgaaaaatacacatgtatatcaacaagggcatttcaaaagtaaaaatgtgttatgctagaattatg

SEQ ID NO: 570581 - DNA, 612 bp, Homo sapiens
aggggtgcccagcagcctttcatttggtgaaagtaactgcaagggctcagagctgggttaatggatacaacagtgcctgtaatcagatccaggtgctgtatatacttgttattgattacgacttcaataattgcaaaatcaaccaaccaaaagaatcatgaaaaaaatattatgcaagatgtctaaacagaggccccaaaaccagcagttgctggagaagtatttatcacctttttcaagatccaagcttagggtattgtatgtttggcaaaatagctatatttcagcagggcttaaagagattacttgtctcagggctttcagtttggccggtaacagatgaagacagattgattgaaagcatttgaacaaatataaacttgaacaagctgaatggacgtgattaagttaattagggtcgataaatgccattgacaatatcttacaactcttcctttatcttggagtatttctttcttatataacacaggcaagtggatatggtgactctaatattaaacctgtaactgagtagccattcagcctaattaactagacaccatctctcaatggmctgctagataattaacgttttattttatacatgtaata

SEQ ID NO: 570582 - DNA, 587 bp, Homo sapiens
gttcccctctgtgtgtccatgtgttcttatcacttagctcccacttataagtgggaacatgccatatttggttttctgttcctgcattagtttgttaaggataatggcctccagctccatccatgttcctgcaaaggacatgacacaatctcattcttttttattttaagacagggtctggctctgtcacccaggatggagtatagtggtgcaatctcrgctcactgcaacctctgtctcctggattcaagtcatcctcccacctcagcctcccaaatagctgaaactacaggcacataccaccatgcccagctagttgagctcattcttttttatggctgcatagtattccttggtatacatataccacattttctttatgcagtctatcattgatgggcatttaggttgattccatgtctttggtattgtgaatagtgttgcaatgaacatatgcctgtgtcttcataatagaatgatttatattcctttgggtgtatacccactaatgggattgctgagttgaatagtatttctgtcttcagatatttgaggacttgccacactattttccacaatcattgaac

SEQ ID NO: 570583 - DNA, 587 bp, Homo sapiens
gttcccctctgtgtgtccatgtgttcttatcacttagctcccacttataagtgggaacatgccatatttggttttctgttcctgcattagtttgttaaggataatggcctccagctccatccatgttcctgcaaaggacatgacacaatctcattcttttttattttaagacagggtctggctctgtcacccaggatggagtatagtggtgcaatctcagctcactgcaacctctgtctcctggattcaagtcatcctcccacctcagcctcccaaatagctgaaactacaggcacataccaccatgcccagctagttgagctcattcttttttatggctgcatagtattccttggtatacatataccacattttctttatgcagtctatcatygatgggcatttaggttgattccatgtctttggtattgtgaatagtgttgcaatgaacatatgcctgtgtcttcataatagaatgatttatattcctttgggtgtatacccactaatgggattgctgagttgaatagtatttctgtcttcagatatttgaggacttgccacactattttccacaatcattgaac

SEQ ID NO: 570584 - DNA, 620 bp, Homo sapiens
tggtgtccaacaagtttcagatttttgagtatttaggatatcagattctcagattggggtgcttaacctgtatgtgcattgtgtcacatagtttattatttttttttgtagtgagaatgctcaaaatatactcttagtaattttcaagaatacaacatattgttataatctatagtcaccctgttgtacaataggtttcttgaacttatttctcctatttaattgaaattttgtatcctttgaccaatatcttcccaacttacttatactcccagcagtccccagtaaccaccattctcctctctgcttcaatgagtttaacttttttaggatccacatataagtgagatcatgtggtatttgtctttctttgccaggcatattttactaaacataatctccaggttcatccatgttgttgcaaatgacaagatgtcctttattaaggctaaatagtagttcattgtgtacaagtrcaccacactttcttaatccattcattcattgatggaaccgtagactgattccatactttggttattgtgaataattgctgcataggagtgcagatatctctcctacatactgatttcatttcttttggatacattcatttcttt

SEQ ID NO: 570585 - DNA, 583 bp, Homo sapiens
ggtgtccaacaagtttcagatttttgagtatttaggatatcagattctcagattggggtgcttaacctgtatgtgcattgtgtcacatagtttattatttttttttgtagtgagaatgctcaaaatatactcttagtaattttcaagaatacaacatattgttataatctatagtcaccctgttgtacaataggtttcttgaacttatttctcctatttaattgaaattttgtatcctttgaccaatatcttcccaacttacttatactcccagcagtccccagtaaccaccattctcctctctgcttcaatgagtttaacttttttaggatccacatataagtgagatcatgtggtatttgtctttctttgccmggcatattttactaaacataatctccaggttcatccatgttgttgcaaatgacaagatgtcctttattaaggctaaatagtagttcattgtgtacaagtacaccacactttcttaatccattcattcattgatggaaccgtagactgattccatactttggttattgtgaataattgctgcataggagtgcagatatctctcctacat

SEQ ID NO: 570586 - DNA, 558 bp, Homo sapiens
tgcactcctatgcagcaattattcacaataaccaaagtatggaatcagtctacggttccatcaatgaatgaatggattaagaaagtgtggtgtacttgtacacaatgaactactatttagccttaataaaggacatcttgtcatttgcaacaacatggatgaacctggagattatgtttagtaaaatatgcctggcaaagaaagacaaataccacatgatctcacttatatgtggatcctaaaaaagttaaactcattgaagcagagaggagaatggtggttactrgggactgctgggagtataagtaagttgggaagatattggtcaaaggatacaaaatttcaattaaataggagaaataagttcaagaaacctattgtacaacagggtgactatagattataacaatatgttgtattcttgaaaattactaagagtatattttgagcattctcactacaaaaaaaaataataaactatgtgacacaatgcacatacaggttaagcaccccaatctgagaatctgatattctaaatactcaaaaatctgaaacttg

SEQ ID NO: 570587 - DNA, 558 bp, Homo sapiens
tgcactcctatgcagcaattattcacaataaccaaagtatggaatcagtctacggttccatcaatgaatgaatggattaagaaagtgtggtgtacttgtacacaatgaactactatttagccttaataaaggacatcttgtcatttgcaacaacatggatgaacctggagattatgtttagtaaaatatgcctggcaaagaaagacaaataccacatgatctcacttatatgtggatcctaaaaaagttaaactcattgaagcagagaggagaatggtggttactgsggactgctgggagtataagtaagttgggaagatattggtcaaaggatacaaaatttcaattaaataggagaaataagttcaagaaacctattgtacaacagggtgactatagattataacaatatgttgtattcttgaaaattactaagagtatattttgagcattctcactacaaaaaaaaataataaactatgtgacacaatgcacatacaggttaagcaccccaatctgagaatctgatattctaaatactcaaaaatctgaaacttg

SEQ ID NO: 570588 - DNA, 528 bp, Homo sapiens
ttggcgcatgcttgtaattccaactattcaggaggctgaggcagagaatcgcttgaacctgggagtcagaggctgcagtgagccaagatcgtgccactgcactccagcctgggagacagagtaagactacatttcaaaacaaaaaaaaaaagaaaaagagaagaaagraaagaaagaaagaaaattagggtgagaggaattcagaaaccagatcagaggggatctattgtctataaataaaccattgattagccagacatggtgggacatgcctgtaatcccagatactcgggaggctgaggcataagaatcacttgaacccaggaggtggtggctgcagtgaaccaacatcatgccactgcactctagcctgggcaacagagtgagactgtctcaaaaaaaaaacaaaagaaaccattgaagggtcttgaagaaagatgtgacattatctgattctgtaaaagaccacaaggaggtaagaatggaagcaaggaggctacagcattagccccagcaaaagaggagatg

SEQ ID NO: 570589 - DNA, 615 bp, Homo sapiens
tttttctttaaaataaaagagaagcaaagaaaattatctgggcaatagcatcttaatttagattcaacccacaaaatggttattgataaaactttaaaccactagaattaagaaactatttagattaacaagaaagatacttatgtaatgagaaaaacacactagaaataacatcattatctgttccttaccacacaattaaatttagaatgaaagcatctctgggaaataatttcaattatgtagtcctagatcattagaagattttactaagattaaattgggacttaagcagccagtattcatttggagagcaacaaaaaccacagagtaaacactctagccaaagagttaattctagccaaaagaatattcaaactaaattttctaaaagaagaaaagatgcaacatattgtatataaaatgraggatttagttatttttttaaaaaagtttatgagtgtaaaatgaatgaaatgtcaaagaggaagacgtatacacattttcatattttctatatataaacatatgtgtgtagaatatgtacacattagaattttaaggctctaatgcaagtttttatgtttcttccaccacatctgtatgttaacaaat

SEQ ID NO: 570590 - DNA, 568 bp, Homo sapiens
tatctctcaccatataaaaaaatcaacccacaatgaattaaagaatttaatgtaagatccaaaactataaaactactagaagaaaacttagaggaaatgctttaggacattggtcgaggcaaagatttatggctaagacttcaaaagcacaggcaaaaaagacaaaaatgacaaatgggactgtattaaggtcaaaagcttatgcacagcaaacgatacaatcaatagagtgaagaaacaatctgtaractggggaaaaatatttacaaacaagggactaatatccagaatatataaggaactcaattcaacagcaaaaaaaaaaaaaaaaaaaaaaaaaaatcccatttaaaggtgggcaaaggtcatcaacagacatttcttaaaagaagatacacaaatggccaacaggtaaacaaaaaaatgctcaacattgctaatcatccgggagatgtaaatcaaaaccaccatgagatattatttcagttacaatggctgttatcaaggagacaaaaaataacaaatgttgccaaggatgcagaaaaaaggaaactcatgcactgttagt

SEQ ID NO: 570591 - DNA, 568 bp, Homo sapiens
tatctctcaccatataaaaaaatcaacccacaatgaattaaagaatttaatgtaagatccaaaactataaaactactagaagaaaacttagaggaaatgctttaggacattggtcgaggcaaagatttatggctaagacttcaaaagcacaggcaaaaaagacaaaaatgacaaatgggactgtattaaggtcaaaagcttatgcacagcaaacgatacaatcaatagagtgaagaaacaatctgtagactggggaaaaatatttacaaacaagggactaatatccagaatatataaggaactcaattcamcagcaaaaaaaaaaaaaaaaaaaaaaaaaaatcccatttaaaggtgggcaaaggtcatcaacagacatttcttaaaagaagatacacaaatggccaacaggtaaacaaaaaaatgctcaacattgctaatcatccgggagatgtaaatcaaaaccaccatgagatattatttcagttacaatggctgttatcaaggagacaaaaaataacaaatgttgccaaggatgcagaaaaaaggaaactcatgcactgttagt

SEQ ID NO: 570592 - DNA, 371 bp, Homo sapiens
ttgggccgtggtctcaggctttctggcttgcgggtggggcttctccagggaccccacccttttctgcctagaattcctctgcctcctgtccctatccattctttcacttacaggattgtatgtcacctaagttagatgtgtkacatagacaagcgtttctttttttttttttttttttttttgagacggagtcttgttctgttgcccaggctggagtgcagtggcatgatctcagctcactgcaacatctgcctcccaggttcaagcagttcttctttctcagcctcctgagtagctgagactctaggcgtgtgccaccacacctagctaatttttttatttttattagagatgcggtttcaccatgttgt

SEQ ID NO: 570593 - DNA, 347 bp, Homo sapiens
gatcatgaggtcaagagttcaagagcagcctggtcaacatagtgaagccccatctccactaaaaataaaaataaaaaatttgctgggcatggtggtgggcacctgtaatccaagcactcaggaggctgaggaaggagaatcccttgagcccaraaggcggaggttgcagtgagccgagattgcgagattgcaccattgcactctggcctgggcaatggggggaaaatccgtctcaaaaaaaaaaaaaaaaaaaaaaaaaaaaaaaaaaaagagtgaagcttgagctgcagaaggagagcttgcaggcctcccgggtagaatcgcaccttcacaataatgggaatgcg

SEQ ID NO: 570594 - DNA, 593 bp, Homo sapiens
gattgtctttaagtaataataagcaaataagttaatcagactgtaacaattataatatcaaccaacatcaaggtgtgtaaacatataagcaaatattagtggacataggaaaacatagcaaaacaaaaatactggggaatttcaataccccttyattattattattattatattttaagttctgggatacatgtgcaggaagtgcaggtttaggtatatatgtgccatggtggtttgctgcacccatcaaactatcatcaacattatgtaattctcctaatgctacccctccctcccctagctccctaccctccgacaggccctggtgtgtgatgttcccctccctgtgttccatgtgttctcattgttcaactcccacttatgagtgagaacatgcactgtttggttttctgttcttgtgttagtttgctgagaatgatggtgtccagcttcacccatgtctctgcaaaggacatgaactcatccttttttatggctgcatagtattccatagtatatatgtgccacattttctttatccagcctatcattgatgggcatttgggttggttccaagtctttgctattgtgaa

SEQ ID NO: 570595 - DNA, 593 bp, Homo sapiens
gattgtctttaagtaataataagcaaataagttaatcagactgtaacaattataatatcaaccaacatcaaggtgtgtaaacatataagcaaatattagtggacataggaaaacatagcaaaacaaaaatactggggaatttcaatacccctttattattattattattatattttaagttctgggatacatgtgcaggaagtgcaggtttaggtatatatgtgccatggtggtttgctgcacccatcaaactatcatcaacattaygtaattctcctaatgctacccctccctcccctagctccctaccctccgacaggccctggtgtgtgatgttcccctccctgtgttccatgtgttctcattgttcaactcccacttatgagtgagaacatgcactgtttggttttctgttcttgtgttagtttgctgagaatgatggtgtccagcttcacccatgtctctgcaaaggacatgaactcatccttttttatggctgcatagtattccatagtatatatgtgccacattttctttatccagcctatcattgatgggcatttgggttggttccaagtctttgctattgtgaa

SEQ ID NO: 570596 - DNA, 593 bp, Homo sapiens
gattgtctttaagtaataataagcaaataagttaatcagactgtaacaattataatatcaaccaacatcaaggtgtgtaaacatataagcaaatattagtggacataggaaaacatagcaaaacaaaaatactggggaatttcaatacccctttattattattattattatattttaagttctgggatacatgtgcaggaagtgcaggtttaggtatatatgtgccatggtggtttgctgcacccatcaaactatcatcaacattatgtaattctcctaatgctacccytccctcccctagctccctaccctccgacaggccctggtgtgtgatgttcccctccctgtgttccatgtgttctcattgttcaactcccacttatgagtgagaacatgcactgtttggttttctgttcttgtgttagtttgctgagaatgatggtgtccagcttcacccatgtctctgcaaaggacatgaactcatccttttttatggctgcatagtattccatagtatatatgtgccacattttctttatccagcctatcattgatgggcatttgggttggttccaagtctttgctattgtgaa

SEQ ID NO: 570597 - DNA, 548 bp, Homo sapiens
gctggtctctggcagggctgatgtgtgggcaggaaggagggtgccatggagtactcgttccccgtagtcgtggggacatggattgggcttctttttgctgaagatgagaccagctttggttgtttttaacctgaggtttccatgtgctcctcacacaggagagctcccgtacttgagctccagctgaacctaatgcactgtctacttttggggagatgcaggctaaataacaaaggagaggatggccacagctcaggtggggattctgagtgcctcagccccactaagcaccagacaagctcctactgcggcccccatctactcgcatgctccagaaatgggcccaggtcctcaagtgtacctacagccagatacaagccattcaggctgatcccagacatggtggggtctcccttgtagcacagacccaatgaactggtgcggctgagcctgctcagagccagggatggaacatggtttaggcaccacccccggttccttccagagacacgatatgcaaktgggaaaaataaagggggagggaaaag

SEQ ID NO: 570598 - DNA, 601 bp, Homo sapiens
ctaaattctagtcattagaaatcactgatgttttcaataagactgtaactttaaaatacagctgacccttgaacaacacagtgttaggggcaccaactgctacacagtcgaaaatccacatgttacttttgactcctcaaaaactttaactacaggccaggcacattggctctaacctgtaatcccagcactttggaagcccaaggtgggcggatcacttgaggccactttcacatggtgaaaccccatctctactaaaaataaaaattagccaggcatggtggcacacccctgtagtcccagctacacaggagaatygcttgaacctgggaggcagaggttacagtgagcctagatcacaccactgcactccagcctgggcaagagagcgagactctgtctcaaaaaaaaaaaaaattactaataacctactattgaccagaagccttacagataacataaacagtcaattaacacatattttacatgttatatgtagtatatactatagtcttacaataaagtaagctagagaaaagaaaatgttattaagaaaaacatgagaaaaagaaaatatatttactattcattaagtgaaaat

SEQ ID NO: 570599 - DNA, 542 bp, Homo sapiens
atttcagtatttaaaattagaagtgttttggtctttttttagacgtttgggcctggtgcagtggcttactcttgtaatcccaatactttgggaggcagaggagagargatcgcttgagggcaggagtttgagaccaacctgggcagtggcttactcttgtaatcccaatactttgggaggcagaggagagaggatcgcttgagggcaggagtttgagaccaacctgggcagcacagtgagaccttatctctacaaaaaactaaaaaattagccagatgtggctgtgtgagcctgtagtcctatctactctggaggctgaaatgggagaatcacctgagcccagaaggttgaggctgcagtgagccgtgatcatgccactgcactccagcctgggcaacagaatgagacgccgtcttaaaaaaagaaatttggtaatgtttttgttaccagaaatatgtcgtagcaacttaattcttgtttatatcaattagcctagggtaaaattagtttcattattcatcatttcacttaaagttgcagtt

SEQ ID NO: 570600 - DNA, 424 bp, Homo sapiens
gacttactatattcaaaatattcaacaattggtacagcgagtacacccagccatcaaaacacacctagcctaaatgtggtrccagggcatgctggttgaatactgggcagaaaaacagataacaggattcacatgccttgtctggggatatttaaagcttagtgctacatgtgaaagacaagttctacctttgagaactctcaatcctagacaacgtgataacactagatgaactgtggcagggacaagaccactcagggaacaaacagttcctagcaagagttcttgctgtccagctgagaaaaagtaaaggacttaggatattctcagttagtaaagatttgtttaaggccgggtgcagtggctcacacctgtaatcccagctctttgggagtctaaggtaggcggatcacctgaggtcagg

SEQ ID NO: 570601 - DNA, 424 bp, Homo sapiens
gacttactatattcaaaatattcaacaattggtacagcgagtacacccagccatcaaaacacacctagcctaaatgtggtaccagggcatgctggttgaatactgggcagaaaaacagataacaggattcacatgccttgtctggggatatttaaagcttagtgctacatgtgaaagacaagttctacctttgagaactctcaatcctagacaacgtgataacactagatgaactgtggcagggacaagaccactcagggaacaaacagttcctagcaagagttcttgctgtccagctgagaaaaagtaaaggacttaggatattctcagttagtaaagatttgtttaaggccgggtgcagtggctcacacctgtaatcccagctctttgggagkctaaggtaggcggatcacctgaggtcagg

SEQ ID NO: 570602 - DNA, 424 bp, Homo sapiens
gacttactatattcaaaatattcaacaattggtacagcgagtacacccagccatcaaaacacacctagcctaaatgtggtaccagggcatgctggttgaatactgggcagaaaaacagataacaggattcacatgccttgtctggggatatttaaagcttagtgctacatgtgaaagacaagttctacctttgagaactctcaatcctagacaacgtgataacactagatgaactgtggcagggacaagaccactcagggaacaaacagttcctagcaagagttcttgctgtccagctgagaaaaagtaaaggacttaggatattctcagttagtaaagatttgtttaaggccgggtgcagtggctcacacctgtaatcccagctctttgggagtctraggtaggcggatcacctgaggtcagg

SEQ ID NO: 570603 - DNA, 627 bp, Homo sapiens
aaatcttcttttctttgattatcttcccatagtccacaattctaccagcgaagwaatctccgctttctagtacctatgacagatacaagctttgttaagcacatttgtcctagtgtactgcagcctacaattagaaagaggaattggagaatatgtcagaggaaaaatcacaatcaaaactcattttctaacacgtaattagagccaaaacatgactacattccagatttcctaaaatcctatcccaaattagaatgtttttaaatgtcaaagtttcactcaaatgttttcccaattacgccattttttgatacaccttcactaatactctttaatgagatacgaagaattctttgaagatcagcattaaagcattaaattgaagaaggaaaaaaaaacttttgaagttttgcacatatctgtcatcttatttactatcagtcattgctaggtctatgcttctgagtataagaaaatgtttctcttcattaagaggaggttgtcctttaatgagtactaatgattccactttgaaactaataggaaatcctgaatatataaacttattgacattaaaaatcagcaatactaatactaacatcaaagtaatgatattgtttaatatat

SEQ ID NO: 570604 - DNA, 329 bp, Homo sapiens
gatttcatggacatttattagttccccaaattaatacttttataatttcttacgcctgtctttactgcartctctgaacataaattgtgaagatttcatggacatttatcacttccccaatcaatactcttgtgatttcctatgcctgtctttactttaatctcttaatcccatcatcttcgtaagctgaggatgaatgtcacctcaggaccctgtgatgattgcattaactgcacaaattgtttaaacaatatgaaatctgggcaccttcaaaaaagaacaggataacagtgatgttcagagaataagggaaatgaccattaggtctg

SEQ ID NO: 570605 - DNA, 329 bp, Homo sapiens
gatttcatggacatttattagttccccaaattaatacttttataatttcttacgcctgtctttactgcaatctctgaacataaattgtgaagatttcatggayatttatcacttccccaatcaatactcttgtgatttcctatgcctgtctttactttaatctcttaatcccatcatcttcgtaagctgaggatgaatgtcacctcaggaccctgtgatgattgcattaactgcacaaattgtttaaacaatatgaaatctgggcaccttcaaaaaagaacaggataacagtgatgttcagagaataagggaaatgaccattaggtctg

SEQ ID NO: 570606 - DNA, 329 bp, Homo sapiens
gatttcatggacatttattagttccccaaattaatacttttataatttcttacgcctgtctttactgcaatctctgaacataaattgtgaagatttcatggacatttatcacttcccyaatcaatactcttgtgatttcctatgcctgtctttactttaatctcttaatcccatcatcttcgtaagctgaggatgaatgtcacctcaggaccctgtgatgattgcattaactgcacaaattgtttaaacaatatgaaatctgggcaccttcaaaaaagaacaggataacagtgatgttcagagaataagggaaatgaccattaggtctg

SEQ ID NO: 570607 - DNA, 329 bp, Homo sapiens
gatttcatggacatttattagttccccaaattaatacttttataatttcttacgcctgtctttactgcaatctctgaacataaattgtgaagatttcatggacatttatcacttccccaatcaatactcttgtgatttcctatgcctgtctttactttaatctcttaatcccatcatcttcgtaagctgaggatgwatgtcacctcaggaccctgtgatgattgcattaactgcacaaattgtttaaacaatatgaaatctgggcaccttcaaaaaagaacaggataacagtgatgttcagagaataagggaaatgaccattaggtctg

SEQ ID NO: 570608 - DNA, 433 bp, Homo sapiens
catcaaaatacaaagaactaaggagaaaccaccaacagtcacaaggccagcatgatggtctcatctgtattggtgatagcagagggagcaaggaagatgtctgatggacctgaaaatatgagmccacaaaataaccaactaatatttcctggaaagtatcacatgccaatcagagaacagcagctgaaactttgaggagatttgtgatctccaatagacaatgagtgcaaggtccctgtggtaaggaagacttgaagaggctagtgaggttgaactcctaaaactgggctccccttttaaacagaatcccaaagtgagaaaaaataggagagtagaatcaagattgagcaggataatgattacagaaatgaaagagaaggttctgaaaaatatggagaagaggagccaagccagggaattctggaaatcaagc

SEQ ID NO: 570609 - DNA, 556 bp, Homo sapiens
ataataacataattttgggagttggacagacagtgcttctaattccagccctgacaattaaaaccttgggctacagctcttgaacttggttttctttcttataaactgggcatagaaatatttttctcacagatttattgtgagtattaaaaaaggtaaagggaataaaattgcacagacttgaaaatgaatctggcattttaattcattgctcaacaagtgttacttctccctctcttttagggggcttctatagaccaccactgtttcatgggcataactttcatttagatacaaccaaatgccatctgattgactctgagacaaggaaaatatattgtctttacatgtgtaaatatgattgagatatagtagattcagtttgggtctgattctgtgactttcagattttgcacttaaaattttgggttaattgtggagatacagatttagtcacaggcagytttcatgattttttttggtgtgtgtgtgtgtgtgtgcagaggggtgggggggtgggggggtggcttgaacaagcatttcatgcacatgatta

SEQ ID NO: 570610 - DNA, 610 bp, Homo sapiens
gattgatttttttctctggccaacttgggtgaaggaaatctaagaaatacatctttcagcagggcctagtattctcctcctccacttatatagctaccggagaagcaaaagtatgtgactagtagtttggaatactttggaattctgcttatctttctacttaatagtttgccagccatatgcttagaaaggtttgcatgatatgtttttttaatcaattaaaatgcataacatttcccctttcctaagtagaattgtccttaaatctcttcccttactattttttacttgcttttttttctgatttcattatttctcattaagtattgatgtgatcatgtcagagaagtgctcaatttcctatataccctacactgaatcacatagcatatataagaaatgtaaaccaaattactttgggattaagtgaaaaagggcctactcctctttaaacgcgggacttgagcagctcatgcctagcataaataggtgcttcgtagttctttgatgaatgacratgtgtgctgcattttcttctatgttattatttgcttatctatctgttcattcattcactaagtttatttataaatacatgaaagcctttttt

SEQ ID NO: 570611 - DNA, 578 bp, Homo sapiens
cacacagggggtatgcacacacatgggcacacatgcacacacacgtatgcacacacacaacacaacaacacacacacgaggctcctcaagaggcagatgtctcaggcatcaccttccctgctatttctccagacttgaacacaagtaggggtggctgcaggatgccagtgagaagtacgatccacagaagaaaaggagmccagaagaggctcttggcaaaggcccagctggagaagaagctgtggccctccttgacccccacggggcttctctctgctctgttagtacagctctccgtgctgtcggcaatggcactgacattgttgtgcagtggagaatagtatgacttggtgccctgcgaagccccgtggctaacagctgagccagctctgcaagggaaaaagccaggggccaggaacggtgtacattgatcgtgctacactagtgcggctcaaaagtcaatatctgcttgacatgctgcagagagtcctcaagcccactgggagttcagctcctcaaaaaatgtgctttcccttttcttctagatgacgaagtgcagaaagaaaaacagatgagac

SEQ ID NO: 570612 - DNA, 578 bp, Homo sapiens
cacacagggggtatgcacacacatgggcacacatgcacacacacgtatgcacacacacaacacaacaacacacacacgaggctcctcaagaggcagatgtctcaggcatcaccttccctgctatttctccagacttgaacacaagtaggggtggctgcaggatgccagtgagaagtacgatccacagaagaaaaggagaccagaagaggctcttggcaaaggcccagctggagaagaagctgtggccctccttgacccccacggggcttctctctgctctgttagtacagctctccgtgctgtcggcaatggcactgacattgttgtgcrgtggagaatagtatgacttggtgccctgcgaagccccgtggctaacagctgagccagctctgcaagggaaaaagccaggggccaggaacggtgtacattgatcgtgctacactagtgcggctcaaaagtcaatatctgcttgacatgctgcagagagtcctcaagcccactgggagttcagctcctcaaaaaatgtgctttcccttttcttctagatgacgaagtgcagaaagaaaaacagatgagac

SEQ ID NO: 570613 - DNA, 578 bp, Homo sapiens
cacacagggggtatgcacacacatgggcacacatgcacacacacgtatgcacacacacaacacaacaacacacacacgaggctcctcaagaggcagatgtctcaggcatcaccttccctgctatttctccagacttgaacacaagtaggggtggctgcaggatgccagtgagaagtacgatccacagaagaaaaggagaccagaagaggctcttggcaaaggcccagctggagaagaagctgtggccctccttgacccccacggggcttctctctgctctgttagtacagctctccgtgctgtcggcaatggcactgacattgttgtgcagtggagaatagtatgacttggtgccctgcgaagccccgtggctaacagctgagccagctctgcaagggaaaaagccaggggccaggaacggtgtacattgatcgtgctacactagtgcggctcaaaagtcaatatctgcttgacatgctgcagagagtcctcaagcccactgggagtycagctcctcaaaaaatgtgctttcccttttcttctagatgacgaagtgcagaaagaaaaacagatgagac

SEQ ID NO: 570614 - DNA, 567 bp, Homo sapiens
atgacctaatatttttcaagcacataaaatagagcagagaaaatgatatgtttacctccatgttaacgttttccttttttagagtacaggcaattaaagcttttccttaaacatgaaagtggcttcctcctccgcactaaactgatattgagaaaaaaataagtcatattaatttgagtgataaggaagacaatagagataattaaatgatgacacttgtagagacttgactataccattacactgcattatttaacctacacatatcagtaggacggtattaggtaaattcgcaaatgcaaaatcgtccaaaaacaaaagttctctaactaacgtattaagtttcgctgatccagaaagaacaacaggtttctttccagkgttgttcattatagaaggggagaggtggtcagacctgtcaggggaggacttgtttggtctctttgtgtggtatttatagcctggtctggttaatgtcaatcttcactttattggtattctcttaaatcctgaaattttacccagacttttccttataagcccatcttcatgtggacaattctatgt

SEQ ID NO: 570615 - DNA, 583 bp, Homo sapiens
cctgagagtgccctaaaatctgacagccctagaatggagctttgcaaggaaaaggtaaaaatcttcagaatctacaccaggatatgagcagagagtaatactatttaaatgtaattagtagactatgtctggcttgcaagtgactgtggaattgtgttagatggggactgactggtttaaaataccagcatttccagctgtactgggggataagatagaatgtttggaatggaattctatatggtctcatatttacatcacttctagaattcagctatcgatgtgtatttagtatatatatatgtattcaattctttgtaagaaattgtaaacatgcatgttttctagtttcagaatgatttagtgatttagaacaaagatttcaaactaatttgaacmaaatatgcatataccttctaagtttctgactatagaaatatatctttaatggcatgcattcccaaagactttttaaaagtgtgttcaataaaaaaatcgtaaaaggttgcaatgtgatttccacagattacaaatgtaaccacaatgtccaagtcatttttgcattgcttttcgattacagcct

SEQ ID NO: 570616 - DNA, 574 bp, Homo sapiens
ttgaggagaaaagtgaacacttacacactgttggtgggaatataaatttgtgcaaccattgtagaaagcggtatgatgattcctcaaagagctaaaagcagaactgctattcaacccgacaatcccattacagaggaatatgaattattstaccataaagacacatgcacacaaatgttcattgcagcactatttacaatagcaaagacatgaatcaacctaaatgcccatcgaatgataggctgattaaagaagatgtggtacatatacaccatggaataatatgcagccatgaaaaaggatgagatcatgtcctttgcaggaacatggatagggctggaggccattatccttagcaaactactgcagagacagaaaaccaaagactgcatgttctcacttacaagtgggagctaaatgatgagaacttatgacacaaagaaggaaaccacagacactggggtctatttgagagtggagggtgggaggacggtggagaagcagaaaagataactcttgggttctgggcttaattcctgggtgatgaaataatctgtacaacaaacccccatga

SEQ ID NO: 570617 - DNA, 293 bp, Homo sapiens
gtctctctctctctgttaagaagtggcatttaaaaaatacygtgtcctcccatctagaaacatgattttttctactgattgcataaaatgttttccttttgttttcactcttccaataacaattctacattttgtttttatgtttctttcaccttttctgttatgtctatgctaggcatattataatatttgatgctaccatgaattttcccccaatgatgttgtacattttttgccagtttacagaaaagctattgattttcagtgtatattatgtaacctgccatgaaacc

SEQ ID NO: 570618 - DNA, 470 bp, Homo sapiens
taggtctctgtgcaactctttttctacagaaagaaaaactctattataacctctaattatatgcacttacacacacacacacacacacacacacacacacacayatatgtattttcaaatcatagaacaagcatgtttggtggggggagttaggtaacagaaacatgtcaaagtaatttcatcagaacagagagctattactgaatcgcgttagaaaagaatacactgggagtttgaagggagttatctgtgttcttctttaagcacctaacttacatcatgggagcagcatgtgggagaagaaagttccgtaataagctacttaaaatgatcacacaggagatatacagttagtgcagtctgtgttttactgctggaaaccttcaatcatgaagaagtgattaaccaaggctgctccaagtggcattggtgaattaaaagttcaaacatgaaagctgacaaaaacaatc

SEQ ID NO: 570619 - DNA, 168 bp, Homo sapiens
gtacttatagaatcataaaatattaaatacaatcttgactaaatgcactctgccaagtgtacccacaactccttccatgtagaaatatacaaaagttttattgtcattagttttaawgttttaaataaagtatattttaaaatgtccttctgcaggtttttggaattc

SEQ ID NO: 570620 - DNA, 369 bp, Homo sapiens
gaattccttggactgacattttatctagaagatccagggaaagctttcttatgaacagtcaacatttactgaatgtctgtgtgccagccacggcagtagatactgtgagtacagcagtcaacgagatagaaactatcttcactctgaatgagattacattctagttaaggagacagattataggtaactgagcaataaattataaaatttcatatagaartaagggacatctaaaaaagaaatcaggattctttcatcttcaagtaacagagaaatgaatacaagtaattaatttatcttacttcttttgaggggacaacatggatggggggctttttgagtgtgccccctgctgtcattattccatga

SEQ ID NO: 570621 - DNA, 604 bp, Homo sapiens
accttcatcacggccgggcatggtggctcacgcctgtaatcccagcactttgggaggccgaggtgggcagatcacgaggtcaggmgatcgagaccaccctggctaacatgatgaaaccccgtctctactaaaaatacaaaaaattagctgggcgtggtggtgggcgcctgtagtcccagttactcgggaggctgaggcaggagaatggtgtgagcccgggaggcagagcttgcagtgagcggagattgtgccactgcactccagcctgggtgacagagtaagacttcatctcaaaaaaaaaaaaaagaaaaaaaatgctaccttcatccctatcacattttcttgctttatttttctttagtacctgtcactagtttttgttcaattctgctattgtcatctctctccccagtagaaatgactctggaggggcggagggtggccttggttggcttgtggcgtatccctagcatgcggaacagtgcccacacaaggggagcacctggcgaatgtatgttgaatgaaattaattatcattatcgtaacatacagatactcacaaaacctaaagggaagagaaatattcaaaattataaattagcag

SEQ ID NO: 570622 - DNA, 508 bp, Homo sapiens
cccttttgcttggcatttcttgctgccaccatgtgaagaaggacatatttgtttccccttccaccaaggttgtaagtttcctgaggcttctccagctctgcagaactggagtccattaaacctctttcctttatatcttgcccaatctcagatatttcttcttagcagcaggagaacatactaatacagtaaattggtacygaggtagtggggagctgctgtaaagacagccaaaaatgtggaagtgactttggaactgggtaacgggcagaggttgaaacaatttggagggctcagaagaaaacaggaataatttggaggactcagaagaaaagtgtgacacttcctagagatttgttgaatgtctttgaccaaaatactgatagtgatatcagcagtgaagccctggctgaggtgggctcagatggagatgaagaacttgttgggaactggaataaaggtgactcttgctatgttttagcaaagagactggtggcattttgcccct

SEQ ID NO: 570623 - DNA, 508 bp, Homo sapiens
cccttttgcttggcatttcttgctgccaccatgtgaagaaggacatatttgtttccccttccaccaaggttgtaagtttcctgaggcttctccagctctgcagaactggagtccattaaacctctttcctttatatcttgcccaatctcagatatttcttcttagcagcaggagaacatactaatacagtaaattggtactgaggtagtggggagctgctgtaaagacagccaaaaatgtggaagtgactttggaactgggtaacrggcagaggttgaaacaatttggagggctcagaagaaaacaggaataatttggaggactcagaagaaaagtgtgacacttcctagagatttgttgaatgtctttgaccaaaatactgatagtgatatcagcagtgaagccctggctgaggtgggctcagatggagatgaagaacttgttgggaactggaataaaggtgactcttgctatgttttagcaaagagactggtggcattttgcccct

SEQ ID NO: 570624 - DNA, 508 bp, Homo sapiens
cccttttgcttggcatttcttgctgccaccatgtgaagaaggacatatttgtttccccttccaccaaggttgtaagtttcctgaggcttctccagctctgcagaactggagtccattaaacctctttcctttatatcttgcccaatctcagatatttcttcttagcagcaggagaacatactaatacagtaaattggtactgaggtagtggggagctgctgtaaagacagccaaaaatgtggaagtgactttggaactgggtaacgggcagaggttgaaacaatttggagggctcagaagaaaacaggaayaatttggaggactcagaagaaaagtgtgacacttcctagagatttgttgaatgtctttgaccaaaatactgatagtgatatcagcagtgaagccctggctgaggtgggctcagatggagatgaagaacttgttgggaactggaataaaggtgactcttgctatgttttagcaaagagactggtggcattttgcccct

SEQ ID NO: 570625 - DNA, 511 bp, Homo sapiens
ttacagtcacctggggaccccaagatacccctgacccttgtgtcctggaatctccttattaagtttacagctgagaatgactaggaaatgcaatcccaagagaaaagaaaaaggctttgcaaatggttaaaatgacaaaaactagaatacagctttttaaaacagaaaaaaatctatcgtgcctcagaaagcagggctctaaaattttaaaagcagttaatctacaccaaacacttattctcctcttagaagctgatgaaagtgggtagaatcctgtatgtctttgaaataactgacctttatttgaacaaaagggatcataaaacttactttgtaaggttattttcaggattaaaatgtttggcacatagaaaatacttgacatattgaagatatataataaatatatatttttattatatataatatttatrtgtgttatattgatatatttattatataacattatttatataaatatattatataatataaatgtttatgtgtatat

SEQ ID NO: 570626 - DNA, 614 bp, Homo sapiens
ctctttgccttaaaagtactcagtttggccagtggctcacgcctgtaatcccarcactttgggaggccgaggcgggtggatcacgaggtcagaagatcaagaccatcctggttaacacagggaaaccccgtctctactaaaaatacaaaatttagccgggcgggcgtggtggcgggcgcctgtagtcccagctactcagtaggctgagacaggagaacggcgtgaacctgggaggtagagcttgcagtgagccgagattgcgccactgcactccagcctgggcgacagagcaagactccgcgtcaaaaaacaaacaaacaaacaaaaagaactcacggttcagtgaggaagataagcgattaaattatttgtaattactacgccatataataagctccaagatggagacttggattgaatcatatgatagttcagaggaaaatttagattgtcagatgtaggatgtctttccaaagacctgagcgcattcatagatgtataggagttctcccaatgaagacttggtgagagtggagcatactcctgaacaaatgagaaaacttctagccagggacagaggtttacaataacatttgacatccaagtagcagtca

SEQ ID NO: 570627 - DNA, 502 bp, Homo sapiens
cataaataccatgcgagctagtaacaacacaagttctctatttagaggtgcctgtcctttcttaagtttctggttagtttgggaacctgtgtccccagttatttgatgtactcaagaaaattgtgaaattgcagattatccaaattttttatatatttatttgtttttgttgttgtcttagggtgagagtgagagtgacgttggttcaagctctatacatcccgcatggaagccaatgttacatacatagctctttagctatrttttgggtattttcagcataacaggcctgtgtttccaaaattcagctctgccatccaccacattattgattcctgtatcctttattcatgcctaattaaaaatcaaaattcaaaatatttaaaccataggtcacagtgatcagccggtttagctgaatggtatgtgtttccattcaatacatcttcttacttgagctgattattttctaagtctttttgtaacaccggtaacaacagta

SEQ ID NO: 570628 - DNA, 571 bp, Homo sapiens
atgcatttttaaatctgaaaatgtagcctttatttctctttttttctgagcgaatggccaagacaaagataagaggaacgaggctgagttagaaattcaactcatggaaacataggcaagaaaaaaatcaatcttatgaaagcaaacatatttgccaactttgccttttcaacatactgcaaatgatacattcaaagtattaaaaataataccttgttgagagaaaattgataaaaagaaatgaaaaggaaagaagaacaaataaaaggagaaattggagaaactgcatagacaaaaacttccttaaatgcaatcatttcttttgcttctatccactctctgtgaaactcacttcaggccaaaagaaatatgaatgcatttgaaggtgaaaacagattataatggaagtatctctttgattacttttgaagcttcaagcctccactatttatttttattttttgaatgttattgtggcagatacaacattaacacttgcagaatctgatagagacaccaacagtggaataatgcaattgcatgcaaatrgaatgtcccaacaagaagaacg

SEQ ID NO: 570629 - DNA, 520 bp, Homo sapiens
tcaccactgcactccagcctaggcaacagagtgagactctgtctcaaaaaaaccaaaaccaaaaccaaaaccaaaaacaaaaaacaaaaaactgagatcacagaaatacaaagaattaaagactgttatgaacaactatataccaacaaatttggaaaatctagaaaaagaagtataaatttctagacatctacaacctatcaaaattgaaccataaacaaataaaaaatctgaacagaccaataatgagcagtgagatctaatcggtaataagaagtctcccrtcaaagaaaatcctaggacctgatggcttcactacaaaattctaccaaacatttgaagaagaactaataccaactctactaaaacgcttcaaaaaaactgcagaggagataatactttcaaaataaatctatgaggtcagcattaccttgataacaaaaccaaacaaggacacaacaacaaaaataaaactacaggccaataaacacagatgcaaaaatccttaacaaaatactag

SEQ ID NO: 570630 - DNA, 621 bp, Homo sapiens
tgcgagtgaaaataattagtaataataatcataaaataactgtaaaaaggtgatttttcagcttacaagatgaaggttgcctcctgtgatgtggggcactcgaggggcatctgattagagaggcccattggggaagagctttgtaaagtttgagaaatgtctcctgttatttgtgaagcaatataggaaaacttctcagactgaaacaagaaaagcaattagttttctgttcagaaacaaagagacatctggtgcaaaatatgctagactttccacaaggggcaggtactgtacatgaggaatatatttcagctgtacacatctcaccttcttcacccacasttcaaaagccacagttagcttcaagtagaattattcaccactatctaaggaaaggacagacgtagtaataactgacttccagcttcctcaagggcacaggaaaaatatgtgctgtagaccctacttagaatatttacagacaatttaataagattttggggactctctgaacctcacaaattaagaatattcttattttgcagaaaaggaaactgaggtccaaggacattagtaacttatccaagttacaacataggtaactaagacagtagttggacc

SEQ ID NO: 570631 - DNA, 494 bp, Homo sapiens
agctctcttgcctgccgccatgtaagacatgcctttgcttctcctttgccttctgccatgattgtgaggcctctccagccatgtggaactgtgagtccttgaaacttctttcctttacagattacccagtcttgggtatgtctttataagcagcgtgaaaacgaactaawacagttaggaactgtaaaaacccaaggtattttgcaagcccctctaagctggtaagactcagcctccaaactgtctctctatggatcttggtagaggttggttttaggctttcttcagataatcctacattaagtctttctctagggcatggtctttactcttaagacatggtctttctgccatctcaagtggattccagaggttttaaagaggcttgaaggacatttctccactctggcaaggctggaactccagtatctgcaggcactgcttaacctccaatatctttgttcacctttcagccctagagcaattgctagctg

SEQ ID NO: 570632 - DNA, 287 bp, Homo sapiens
atgtgaattcatgtatgtgtacatatttgggtttttttaggtaggcaaatatatatrtgtgtgtgtgtgtgtgtgtgtgtgtgtgtaacaaatatgttctcttttgttaacattcctctgtctaaatatgaatattaaatatccacgtggagctaaaacattgggagcataaacatctgaaaagcttaacccactgcttgagaagatagtgtattttttttttttttgagacagagtctcactctgtcgcccaggctggagtgcagtggcgtgatctcagcttactg

SEQ ID NO: 570633 - DNA, 571 bp, Homo sapiens
  misc_feature 219: n = A,T,C or G
tttattaaaagtcagggggttttataaacatttttggtaaggtttccctctgccttccatacccatttttttgttgttgtttttaggagaggggttgttgaaagctgaaattaggatcaagttttctaacaagtccatgccttttaaatgctggtgaatcagcttagaaatggagatagcctacttctccttctacccacagtgagytacacatagatnttttaactaaatgctgagagttctgatattctgagttttcttgacttcctcaaaatatgttctcaaaacaagtgtcaattttctcctggaatactccatgaaccaacacacatattaattttacttattggaactcgacacatttgcacgtacttcctaagatcaaattcttttcatctgttgtattctcaaatttgtcttgtctctcctatctagaggccatgatctcttaattagaaggtcctttcccttcccctactacgtgtaggaatgtccagtggccctgagctctgagaataggaccctgggagactatagttaccacctaaagaggaaaaccttacgtttctgt

SEQ ID NO: 570634 - DNA, 571 bp, Homo sapiens
atgtggtgagtagactcattttctgctctttttttggctaagtaataaactgtctggatctaaaagcggatcacacttttttcaacagacaaatccatcagccttgcttgacccacacatctacccattcattatggtctatggctgctttcacactgcaagggaagagctgaggagtttcaacagagactggacatctgtgcagcctacaagtgtttctctctggccctttgcaaagaaagtttgccaacatrctgatccactccacacagaggccttaaaatgactttaaaagtccacatcagggccaggtgcggtggcctatgcctgtaatctcagcaatttgggaggctgaggtgggtggatcacctgagatcaggagttaaagaccatcctggccaacatggtgaaaccccgtctctactaaaaatacaaaacttagccagacctggtggcgcatgcctgtagtcccagctacttgggaggctgaggcaggagaataacttgaactcggaagatggaggttgcagtgagctgagatcacaccactgcactctagcctgggtaacag

SEQ ID NO: 570635 - DNA, 596 bp, Homo sapiens
tgagtggggctccttgttctccagtgatgtttctgttggcttccctcctgatatggtttggctgtgtccccacccaaatctcatcttgtagctcccataattcccatgtattgtgggaggaacctgttgggagataattgaatcatgagggcaggtttttcccttgctgttctcatgatagtgaataagtctcatgagataaaatggttttaaaaacaggagtttccctgcatgagccctcttctcttgtctcctgccatgtgagatrtgcctttcacattccaccataattgtgaggcctccccagccacgtggaattgtaagtccaataaacctctttcttttgtaaattcccttgtcttgggtatgtctttatcagcagtgtgaaaacaaactaataaagcaaattgatactgtgagtgggatactgctgaaaagataccccaaaatgtagaagtgactttggaactgggtaataggtagaggttggaacagtttggagggctcagaagacaaaaaaatgtgggaaagtttggaacttcctacagacttgttgaatggttttgcccaaaatgctgatagcgatatggacaata

SEQ ID NO: 570636 - DNA, 416 bp, Homo sapiens
gctgccaaaacctcagtcatcaaagtmaatgatattttgatgccacatttcaaaaaataaaaattaatgccagaaaatctaggttgaactgaatatttatgtttgaaatcaagacagaatctgacctcacacttgtacagctcagtttcacttacttcagtgtaatcccagtcctgttctcaaatccagtttttattgaaaatattgacagtttgttcatcatgcatttttgtactaacttggattttgtcaaaagctgcattgaaatatgagtcgtcctgaagactgagttttctgatgctcctgaaattttgtgcccaaggccctctcagctcccttcttggtgcacaccaccttaggggctggcttatttacagggcgtccttccgctgcaccatgaacccccaggcaggggc

SEQ ID NO: 570637 - DNA, 608 bp, Homo sapiens
cctgtctttattgcctgatatttaatattttgagtactattgtctcatatatttttagttgtttctgctgaaaaggtacatctggcccctgttactccatcttgcctgaaaggtgacattctaatttacattttgaaagtttaaacattccttcaatactgacatcaaatatttccaccactacctagcttctttaccaatcaaagttggagataattttccccctctgggcacatgtaatattttgcatgtaactggaaaatttctacattaacttatataattttatattttgtccattcatttcagttcaaactactgcatgttgtgagggcaggttttagtcattgtccacaaaatttacatgtaataaattaccaataaaatrtcaaggtgaaaaaaagtgattatgtaattatttctaatcattaggtgataaatatagaaaccaaactatccctgatctggcaatatccaattaatgaaggaaacatagaaaatgcatttaataaaacaaacttaaatgtggtgctccatcgtcagagccatttgagttaacattatgtttttactttgtcatatctcctaattttctaaatcttagcttt

SEQ ID NO: 570638 - DNA, 558 bp, Homo sapiens
gttttttggaacaggcttttttaaaaatcaaactttaataaagtctaatttacctaaaattttggtccacaactttctttgtaggacttgttgtgtgtcagggtcattgtcaattaagaaaagtytatgctatggaaaaacacattctgaaattctggaattgttttatgtataaaatgttaaaacctgacaaacagttcaggatttattgcttcctaagtttttggattcacgagcgggtgagtgtcttttcttgtctctttcctttcctttgttgtcccccttttttttgcaacatacttagccttctgagccccgggaattatggaatgcccatgttcctttatatttccataggactgggggtttggagccccatgcagaggtggataaagtgtttgaggctcagaggaatattttccagcacctactgcttcttgatcccccagtcccctttgtcagctgtatagttgctgtctgtgcctcatcagtgatgcacatcaccctacacttgcatgccctgaagtttacacctatcattttccttctaatcttgat

SEQ ID NO: 570639 - DNA, 558 bp, Homo sapiens
gttttttggaacaggcttttttaaaaatcaaactttaataaagtctaatttacctaaaattttggtccacaactttctttgtaggacttgttgtgtgtcagggtcattgtcaattaagaaaagtctatgctatggaaaaacacattctgaaattctggaattgttttatgtataaaatgttaaaacctgacaaacagttcaggatttattgcttcctaagtttttggattcacgagcgggtgagtgtcttttcttgtctctttcctttcctttgttgtcccccttttttttgcaacatacttagccttctgagccccgggaattayggaatgcccatgttcctttatatttccataggactgggggtttggagccccatgcagaggtggataaagtgtttgaggctcagaggaatattttccagcacctactgcttcttgatcccccagtcccctttgtcagctgtatagttgctgtctgtgcctcatcagtgatgcacatcaccctacacttgcatgccctgaagtttacacctatcattttccttctaatcttgat

SEQ ID NO: 570640 - DNA, 558 bp, Homo sapiens
gttttttggaacaggcttttttaaaaatcaaactttaataaagtctaatttacctaaaattttggtccacaactttctttgtaggacttgttgtgtgtcagggtcattgtcaattaagaaaagtctatgctatggaaaaacacattctgaaattctggaattgttttatgtataaaatgttaaaacctgacaaacagttcaggatttattgcttcctaagtttttggattcacgagcgggtgagtgtcttttcttgtctctttcctttcctttgttgtcccccttttttttgcaacatacttagccttctgagccccgggaattatggaatgcccatgttcctttatatttccataggactgggggtttggagccccatgcagaggtggataaagygtttgaggctcagaggaatattttccagcacctactgcttcttgatcccccagtcccctttgtcagctgtatagttgctgtctgtgcctcatcagtgatgcacatcaccctacacttgcatgccctgaagtttacacctatcattttccttctaatcttgat

SEQ ID NO: 570641 - DNA, 443 bp, Homo sapiens
cctgttctcatttacataattaattcttgttctgcttgatctcagaagttacatgaattcatcagtttcttaattagatttctacatatttttctttatccaatgattttaaagttatcagaaatatttgaaagtacttattagtcttttccatgaatctgattgcagatgtgtatagagaaaaattaaaataataaccatagrtgacaaaaacttaaaatagacccggttaaaaatattatgagagtttatcataatgaaaaattgacacagaaatttatttattcctattgtataaagcattttaagatgacgaccagaatcatacctgacagcatcttaccatgacctcagatttttataaatttcacataatctttggaacattcataggaataacacatacatacaaatataacatgatattaaaaataataaattat

SEQ ID NO: 570642 - DNA, 563 bp, Homo sapiens
gtacaaaaatattaatttatctttgaaataaatatatagaggaaatgctcacatttaccatgtaaattacaagatgaatttggaagagccaacattgctgactatatgtagccaggaagactgagagacaagaccattacaaagaccagcaaactcaatgtggctatttggaataaaggcattgagagtggacaaaagaagaatgcagaccctgagttgaattgggggaaagctgaggacccagcacagggttgctgagcaccaagaataattccttgctccaagcagctcctgggaaaatagtaagttaaagaggcatagaatggcctcactcctctccaagggtctctgtctggcaacactgcttgcaacacaccctcagatgcccaaacaagtytcttcctagtggccgccatcatagcctccttgcctgcagaccccacctgaccattgaagagcttccgcaaatgggctccagtgagtacttatctgccacactttcccattgccactttgccagcatgcatacacacaaaatctcactgccctgctaccaccagcac

SEQ ID NO: 570643 - DNA, 382 bp, Homo sapiens
cccaccttggcctcccaaagtgctgggattacaggcgtgagccaccacacccggccrggcttttgttatttttacagacatgcttctatcactcagactcgggacccaagcaccaggcacctggccttaccacaccaccagtactgtggtccctacctggtgatgcatgcagttttcaaatacacacaagagactcatgtgtctctagatgtgtgggcacactatggcttgctatgatgtgagttttggcaaaattctagctctgtagaaatctataaaagccaagaaatgggaagattgtaatgttctggaagtcgtcaggcactttcctaagcctttttctagttatctagtcaagatattgaaccattctactcaggca

SEQ ID NO: 570644 - DNA, 382 bp, Homo sapiens
cccaccttggcctcccaaagtgctgggattacaggcgtgagccaccacacccggccaggcttttgttatttttacagacatgcttctatcactcagactcgggacccaagcaccaggcacctggccttaccacaccaccrgtactgtggtccctacctggtgatgcatgcagttttcaaatacacacaagagactcatgtgtctctagatgtgtgggcacactatggcttgctatgatgtgagttttggcaaaattctagctctgtagaaatctataaaagccaagaaatgggaagattgtaatgttctggaagtcgtcaggcactttcctaagcctttttctagttatctagtcaagatattgaaccattctactcaggca

SEQ ID NO: 570645 - DNA, 382 bp, Homo sapiens
cccaccttggcctcccaaagtgctgggattacaggcgtgagccaccacacccggccaggcttttgttatttttacagacatgcttctatcactcagactcgggacccaagcaccaggcacctggccttaccacaccaccagtactgtggtccctacctggtgatgcatgcagttttcaaatacacacaagagactcatgtgtctctagatgtgtgggcacactatggcttgctatgatgtgagttttggcaaaattctagctctgtagaaatctataaamgccaagaaatgggaagattgtaatgttctggaagtcgtcaggcactttcctaagcctttttctagttatctagtcaagatattgaaccattctactcaggca

SEQ ID NO: 570646 - DNA, 651 bp, Homo sapiens
gtttggagaaggaaatgtaataaaataaatggcaaactttacatgtatttatatatgctatacattagcaagtagagatatatggatattatgcattggtcaataagatatatacatccataacaacaggaaattcctggtttatgtaagttcatcaaatatgtgcttgaaatagtacatcctttctagttatttctttgtaaaattaatgtacattcacataactaccaagtatagtggcatgaaagagaggacaagcaacttttttttttgagacggagttttgctcttgttgcccaggctggagtgcaatggygtgatctcggctcactgtaacctctgcctcctgagttcaaacgattctcctgtcttagcctcttgagtagctgggattggcaccatgatatttacaaggatgcaccactatgcccggctaattttttgtatttttagtagaaatggggtttctccatgttgatcaggctggtctccaactcccaacctcaggtgatctgcctgcctcggcctcccaaagtgctgggattacaggtataagccactgtacccggcccacaagcacttttttataccaatatatgggtattgataggggaggaagaatgtatttccctcaccccttctaggtgcagg

SEQ ID NO: 570647 - DNA, 651 bp, Homo sapiens
gtttggagaaggaaatgtaataaaataaatggcaaactttacatgtatttatatatgctatacattagcaagtagagatatatggatattatgcattggtcaataagatatatacatccataacaacaggaaattcctggtttatgtaagttcatcaaatatgtgcttgaaatagtacatcctttctagttatttctttgtaaaattaatgtacattcacataactaccaagtatagtggcatgaaagagaggacaagcaacttttttttttgagacggagttttgctcttgttgcccaggctggagtgcaatggtgtgatctcggctcactgtaacctctgcctcctgagttcaaacgattctcctgtcttagcctcttgagtagctgggattggcaccatgatatttacaaggatgcaccactatgcccggctaattttttgtatttttagtagaaatggggtttctccatgttgatcaggctggtctccaactcccaacctcaggtgatctgccygcctcggcctcccaaagtgctgggattacaggtataagccactgtacccggcccacaagcacttttttataccaatatatgggtattgataggggaggaagaatgtatttccctcaccccttctaggtgcagg

SEQ ID NO: 570648 - DNA, 552 bp, Homo sapiens
tgacggcaacttctgcttcccgggctcaagcaatcctcccacctcagcctcccaaagagctgagaccacaggcgcaggacaccacaccaggctaattttgtgtatttttgtgtaaagatgaggttttgccatgttgcacaggctggtcttgaactcctgagctcaagtagccttctaatttttatgcatatttgatttctccatatattgcttccttttatgtttctagcattttttaattgttgaacatcttattatgcatactggccacttggatatcatcttttgtgaattatctattaagtctttttggtttaatttatatcttctcttatgtttttcttatcaatttataaatattagtaagcataaaatattttgttatctgtattattgtatgtattatatttactaaaattactrtctcttatttgcagatatattatttgtttataccactaaatgaagatttcagaatctatactctaagaacaaggaaatagtctaatataatcatagtattattatacatttaaattaaataattttaac

SEQ ID NO: 570649 - DNA, 502 bp, Homo sapiens
ccgtctgtcctctcattctcaaacttaggtcgtgttcacttaaacaattaagccaatccatagatatagccttttttgtcacccattgtcaatagcaagtgtttcaattgcctattgattaacacacttctctgactataataagcactgtggtatgttcatcaaatgtatgtttccttgattctttccatatattaataacaggaacctgtatcttcagtagaaaacatatatacatgtaggccacattgacagggaatttgctgttctaaacttgtaaatgcattctctcatgttacatctgttacatgatcaggaaaggtgacataagaactagtggtagtgccacatgttgcatattcgtaacccatagagttagcagtagaggctgtgtgatatgtgctatgtgccatcccagtctttggggacttgtaaccacagatattttcaagaaatgtttcttctgttgatattgggtragtttctgggcacattgaatatt

SEQ ID NO: 570650 - DNA, 584 bp, Homo sapiens
cttcatcaattttattagcctttttaaagaacaaacattttgcttcttggtcatccttaytgattttatctatcgcttttccattgtctgtttcatggatttctgcttgtgtttttattatttccaaccttgtagtttgggtttaatttgcattttttcctttcttcctcaggtagattttaaaccattcttcctttctattatgagcatttaaagctgtaaatttcccttagaaccctcaaatagcttcatttcacaacgtgtgatatattgtgtgttcatttacattcaatttaaaatattttctagggattacatcaagctaaaaagcttctgcacagcaaaagaaacaatcaacaaagtgaagagacagcacacagggtagaaaaaaaactttcaaactatccatctgacaagagattaataaccataatatgtaaggagctcagataactcaatagtgaaaagaaaagaaaagaaaagataaaaacaccaaagaatttgatttaaaaatgggcaaaaaatctaatatttctcaaaaaaagacatacaaatggccaacaggtatatgaaaaaatgctcaa

SEQ ID NO: 570651 - DNA, 584 bp, Homo sapiens
cttcatcaattttattagcctttttaaagaacaaacattttgcttcttggtcatccttactgattttatctatcgcttttccattgtctgtttcayggatttctgcttgtgtttttattatttccaaccttgtagtttgggtttaatttgcattttttcctttcttcctcaggtagattttaaaccattcttcctttctattatgagcatttaaagctgtaaatttcccttagaaccctcaaatagcttcatttcacaacgtgtgatatattgtgtgttcatttacattcaatttaaaatattttctagggattacatcaagctaaaaagcttctgcacagcaaaagaaacaatcaacaaagtgaagagacagcacacagggtagaaaaaaaactttcaaactatccatctgacaagagattaataaccataatatgtaaggagctcagataactcaatagtgaaaagaaaagaaaagaaaagataaaaacaccaaagaatttgatttaaaaatgggcaaaaaatctaatatttctcaaaaaaagacatacaaatggccaacaggtatatgaaaaaatgctcaa

SEQ ID NO: 570652 - DNA, 484 bp, Homo sapiens
agattgatttgggaagaatgaccatcttaaaaatgttgactcttctaatccataagcggggcattctctctccatctaattatgtcttccttaatttctctcagcagtggtttgagttttcagtatagaagtcttgtatgtcttcaraaaaacttattcctagatatttcattttttctatgctattttaaatggtatggcttgtcaattttattctccaattgctcatattaatatatagaaatcagttgaattttgtatatttgctcttgtaacctaaaatcttgctaaatttacatattaatcataggaattattatataaacttattagaattttctacatttacaatcacattatctgtgaataaaaacagctttattctttctttccaacttttatagtattcatttctttttcttgccttgttgcactggccaggcttcgagtgcaaggctgaatacagaggtaaaagtaggaattc

SEQ ID NO: 570653 - DNA, 484 bp, Homo sapiens
agattgatttgggaagaatgaccatcttaaaaatgttgactcttctaatccataagcggggcattctctctccatctaattatgtcttccttaatttctctcagcagtggtttgagttttcagtatagaagtcttgtatgtcttcagaaaaacttattcctagatatttcattttttctatgctattttaaatggtatkgcttgtcaattttattctccaattgctcatattaatatatagaaatcagttgaattttgtatatttgctcttgtaacctaaaatcttgctaaatttacatattaatcataggaattattatataaacttattagaattttctacatttacaatcacattatctgtgaataaaaacagctttattctttctttccaacttttatagtattcatttctttttcttgccttgttgcactggccaggcttcgagtgcaaggctgaatacagaggtaaaagtaggaattc

SEQ ID NO: 570654 - DNA, 549 bp, Homo sapiens
atgatcttcataagttctaaaaacttcatagttatttgtcaatgtaaatacttttytcaaatatttatagcttaatagctaaaaggcaggttttggaaactgcctggttcacttagaagttacgagatttttttcagccctttatttgaccttcttgtccttcaatgtcttaatctgttagatgggaacatgaattcctaattaacagagttattagaataaaatgtattagataaaagaacaatccttagggtagtgactgatataaattaaatggttaatatttatttgtcatattgtctttataactattatatttataatatagttattatatttatatttatatattattatataaatataaatatataatataaatataactattatataacatatttataaatataaatataatagtatataatattgtaaatatagtataatagtaatatttattatatttaataaatataattattaagacatataatactattatatatctttttaaaaacatttattttaagttcttaaattaattgt

SEQ ID NO: 570655 - DNA, 549 bp, Homo sapiens
atgatcttcataagttctaaaaacttcatagttatttgtcaatgtaaatacttttttcaaatatttatagcwtaatagctaaaaggcaggttttggaaactgcctggttcacttagaagttacgagatttttttcagccctttatttgaccttcttgtccttcaatgtcttaatctgttagatgggaacatgaattcctaattaacagagttattagaataaaatgtattagataaaagaacaatccttagggtagtgactgatataaattaaatggttaatatttatttgtcatattgtctttataactattatatttataatatagttattatatttatatttatatattattatataaatataaatatataatataaatataactattatataacatatttataaatataaatataatagtatataatattgtaaatatagtataatagtaatatttattatatttaataaatataattattaagacatataatactattatatatctttttaaaaacatttattttaagttcttaaattaattgt

SEQ ID NO: 570656 - DNA, 549 bp, Homo sapiens
atgatcttcataagttctaaaaacttcatagttatttgtcaatgtaaatacttttttcaaatatttatagcttaatagctaaraggcaggttttggaaactgcctggttcacttagaagttacgagatttttttcagccctttatttgaccttcttgtccttcaatgtcttaatctgttagatgggaacatgaattcctaattaacagagttattagaataaaatgtattagataaaagaacaatccttagggtagtgactgatataaattaaatggttaatatttatttgtcatattgtctttataactattatatttataatatagttattatatttatatttatatattattatataaatataaatatataatataaatataactattatataacatatttataaatataaatataatagtatataatattgtaaatatagtataatagtaatatttattatatttaataaatataattattaagacatataatactattatatatctttttaaaaacatttattttaagttcttaaattaattgt

SEQ ID NO: 570657 - DNA, 555 bp, Homo sapiens
ctccatatgatattttggaaagaaatccagcttttgagatctatgtttaatgtacaaaaataaaatcaaaacaaaaacaaaaaaagacaaagacctttcagtggctactaaaatgggtctgtctttgttcaatctggcaaagaaaccattattcttttagaaatagtgcttcctcacctttaggatttttttcacaaaaatttatggcaaagccagtgccaatacccagtaactccatttygtacccacacatatttatgttcttcatcaggaaattaattagaaatagatgctaagattactaatctattagagaaaaattcagaatctctttgcttttttagaatctgcaaagcccttgcattgatctgaaggacagctatttgtctcttgctttgtataactatctctattaatttcagatagactactgactaccctatcctgtagccagactgctgagcttggttcccaaatactacattaactagtaagttacttaaattcctcacaagcttcttgttttctcctgtttttctaatatttccttctcag

SEQ ID NO: 570658 - DNA, 529 bp, Homo sapiens
gaaaagctaaatatatttggatctgtaagcataaaaattgttttatggaaatatgcttttaaaaaatatgaaacatatattcacaaaatgttgatataacagtttgaaattgcctacttccctgattttcactaaaaattatggttgctgacagtttaaaaatkccaatcaatatatgataattggaactagaaataaaaatggatataagaaaagtaagacttgcttttggtaagtaaatctaagaggtatgaagaatgcattttgactaaggaaaaaagaaattttttccctgaagtaaaatgactgactgctaaaatttaataaaaagagaaaaaagtatacgacaaataattttaaaaatatactgtcaaaggtttgtagaagatgaatcttatgaaaataactttatctgaagaaagctggttagaattagaagaaaattatgttttttctaaaaatttgacatttaattaaaaatacactaatgcaagactagaattgaatcttctctgttaaaacagcaagg

SEQ ID NO: 570659 - DNA, 533 bp, Homo sapiens
caaataatttccactaagaagtgcacaataaaagaccaagaaagatatggagagccataagaaacaagaagctataaaatcagacccactgtgatacattaataataaacaaacataaaaatgctttatatgtttaaagaagtaacaagagatgaaaatcatgataaagaaacaggacattgcaaactgacatggaagatgtaagaaagaatcaaatacatctactggaaatgaaaaaatataagaaagtaaaaatttgataaatagatatgaggcatgttaaatgcactgatgggaacaataagcaatcrtaacatgaatctagagtaaactatctagaatgtagcacagagtccaaaaatcataattaaaaaaaatcatgaatgaagattttaagggacatggaggattcagtgggaacatcttatgtatatataatcagagtgccttaaggagaaaaatatggaaaatagtggcaggacaatgttcaacaagataataagtttttcataagtaataaaataattatcaga

SEQ ID NO: 570660 - DNA, 643 bp, Homo sapiens
ctttgttttggccaatttctcgcatttagaacaagtgtatttacccaaagcttgctcacacattgtatttagaaaggaactaagttgcttttgattttataggctcatgggtggaagtgacttaccttgtttcagatgagattttagacttgaacttatggactaatgctgcaatgaaytaagactttgggggactcttgggaaggcatgattggctttgaaatgtgaaagggacatgagatttgggagggaccaggggcagaatgttattaggctttatgtccccacccacatctcatcttgaattgtaatcccagtaatccccataatccccatgtgtcaagggagggaccaggtgaaggtaactgaatcacggggtttgtttccccgatgctgttctcatgatagtgagtgagttctcaagagatctgatagttttacaaggagctcttcccattttgcttcgcacttcttcctgttgctttgtggaaaaggtgccttgcttccccttcaccttcctccatgattgtacgtttcctgaggcctctccagccaagctgaactgtgagtcaattaaacctctttcctttataaattacccagtcttgggcagttctttaaagcagtatgaaaacagactaac

SEQ ID NO: 570661 - DNA, 463 bp, Homo sapiens
tggccaacatggtgaaactctctctctactaaaaacacaaaaattagctggatatggtggtgtgtgcctgttatctcagctmtttgggaagctgaggcaagaggatcatttgaacccaggaggcgaggttacagtgagttgagatcgtgctactgcactccagcctaggccacagagcaaggctctgtctcaatttaaaaaataaaaataaataaaaaataaataaaataaatccagtacccagaagacaagggaaaagtttattcccagacaacatggggatcattttctaatcaaaatatttacccacacttagggtaaaagatcttaataagttctagccatcaggatatctcctatgcttcccattttacatggaagtaattactggagttactgtgtcccagcttcagtatataataatgaatatgtatattgggaatgtggataacttgtctttttt

SEQ ID NO: 570662 - DNA, 630 bp, Homo sapiens
tgtgtgtgtagttacagttctaagataacacacaaatatttacaaataaggcaatgcacaaatattttaccaggaccagagtcaatttagagaagggggcagtccaactcagttgcaaagtccagctcatacggtcaatggaccagagcaggggtggagatggaagaccaagttcaagaggctagcagctaaactctaggcagcaagatggattccactgttttgtttcctaattagactattcgttagmtctgcagccatggggagtatccatgaatgactttagggcagccacagcagctatgagcaagaaggcatccttctctgttcactggcaatagagtattcattccagccactgaaagagaaacagattttccacatccttctgaccccaattctcaaaaagcttgctttttgcttagttaaaccaactttgccagttgtagggaaacacttggtgcagagatgagagactacattgaattttgcattgaagtccacttttatgagttacactgttgatccatctgcctatgaccctagacagaagaaatgcatatgactgaaagaattttcttttttattgaatagtttaaacaattctgtcaatacctagggtgaaaaatt

SEQ ID NO: 570663 - DNA, 295 bp, Homo sapiens
  misc_feature 41: n = A,T,C or G
gggtgatgattctggtggtattgtatagaaatactcaagtnagggtgatgattctggtggtattgtacagaaatactcaagtagggtgatgattctggtggtattgtayagaaatactcaagtagggtgatgattccggtggtattgtatagaaatactcaagtagggtgatgattctggtggtattgtacagaaatactcaagtagggtgatgattctggtggtattgtacagaaatactcaagtagggtgatgattctggtggtattgtatagaaatactcaagtagggtgat

SEQ ID NO: 570664 - DNA, 294 bp, Homo sapiens
agggtgatgattctggtggtattgtacagaaatactcaagtagggtgatgattctggtggtattgtayagaaatactcaagtagggtgatgattctggtggtattgtacagaaatactcaagtagggtgatgattctggtggtattgtacagaaatactcaagtagggtgatgattctggtggtattgtatagaaatactcaagtagggtgatgattctggtggtattgtacagaaatactcaagtagggtgatgattctggtggtattgtatagaaatactcaagtagggtga

SEQ ID NO: 570665 - DNA, 591 bp, Homo sapiens
aagcttctggcatcataccttttgttgagttgagagaagagaactgcctctctaaaaaatatatccttagggagtgatataattaacctactataaaagactacacttaaaaggtatattcttagaagattcagatattatggatgtgaactcctgctaagcctagagcttggaagcaaatgtaaccttgcatatttaattttattctaaacacaacctcagacatgtaagctgctgccattcctattttagacactgaactgaaggataggcaggttcagtcactcccagtacccgtagagaactgggggtcaattttacatcttccctgcccactgcggtgtactctgtggtccaacatctcctcagctgattcagtgcacctgcctagaataatcctgtcaatttattctatgggcctcgcctagtacagttttcctttgcctgtatccatcttctgtgcctacctctagttcagaaagtatactttttttctctttctccctcagctaatcctagtcaataccatggtttatagaagctgtyctatagctcactgacttcccctgttgacaaaaatgatgcaaaaac

SEQ ID NO: 570666 - DNA, 610 bp, Homo sapiens
ttcccatggccaaataaattgttccattgtgaagataggcaaaggtgtaaaagttctcttactcattttttaaactagcataaccctgactcccaaaccgatataaccaactttgtaatctttatagtcatgcctagtgtcaaattaatgtttattgaaaggaatttggacgtgcaagtgattataaagaatatataacaattgcctataatctcatcattcaaaaattatcaccattaatattttaactaatattttaaatatgccagaccccgtgctaagtgcttatctatatgtttttatttaatttcattaagaatcttctgccataggcattattgttgtaacctcttttttcctgatgaagagactgacacatagaaagattaacttgcccaaggttgccaagcaagcagtcacaggtgaggtataaacttaggaggtcttattctggaattcacttttttttttttttttttccgagacggagtctggctctgtcacccaggctggagtgcagtggsgcgatctcggctcactgcaagctccgcctcccgggttcacaccattctcctgcctcagcctcccgagtagttaggactacaggtcc

SEQ ID NO: 570667 - DNA, 301 bp, Homo sapiens
tcataatgacagactaggaagtaactgattcatattcccctgtagcaacaagaattctgaacccatccacagaaaaaaatacttgggattcargtagaagtttataaaactccgtggggcccaagacatagttgggtcatttcaagtgtgcaggttggcacccaagtggctgatctgctgattctacttttggttcaagcctaggaactgcctcacccctaagagctttgagcctgtagccaaaatcatctttcaagggttttaggagaaatcacacacattagtacattggtgaagaggc

SEQ ID NO: 570668 - DNA, 301 bp, Homo sapiens
tcataatgacagactaggaagtaactgattcatattcccctgtagcaacaagaattctgaacccatccacagaaaaaaatacttgggattcaggtagaagtttataaaactccgtggggcccaagacatagttgggtcatttcaagtgtgcargttggcacccaagtggctgatctgctgattctacttttggttcaagcctaggaactgcctcacccctaagagctttgagcctgtagccaaaatcatctttcaagggttttaggagaaatcacacacattagtacattggtgaagaggc

SEQ ID NO: 570669 - DNA, 301 bp, Homo sapiens
tcataatgacagactaggaagtaactgattcatattcccctgtagcaacaagaattctgaacccatccacagaaaaaaatacttgggattcaggtagaagtttataaaactccgtggggcccaagacatagttgggtcatttcaagtgtgcaggttggcacccaagtggctgatctgctgattctacttttggttcaagcctargaactgcctcacccctaagagctttgagcctgtagccaaaatcatctttcaagggttttaggagaaatcacacacattagtacattggtgaagaggc

SEQ ID NO: 570670 - DNA, 513 bp, Homo sapiens
aaaggaaagaacaaacagttataaaaagctattagttaagaatactatacccagcaaagctgttcttcaacattaagaagagataaaaactttcccaatctggctgagggcagtggctcattcctgtaataccagcatttgggaatcagaggcaggagaattgcttgagtctaggtgttcaaggtcagcctgggcaacatagtgagatcttgtctctacctaaagtaaaaaattaaaaatttgcaaggtgtggtgatgctcacctgtagtcccagctactctggaggttgaagtgggtggaatacttgagcccaggaggttgaggctgcagtcagctgtaattgtgccattgcacttcaacctaggtgacagagcaagactgtctcaaagcaaaaacaataataaaaactttcccagatgaaaaataaataaataacataagctgagggaattcaccaatgtccaacatgtcttrcaagaaatgctaaagggagtccaatcttaaaaaaaagg

SEQ ID NO: 570671 - DNA, 654 bp, Homo sapiens
gctaccttgcaggagggagaagaacatagacctgagtccatcctaggcaatcggaaaactagtcaacccccagacagggtgttcaacgtctggccaagatcaacgcagccacctggctgtactgcagataaccacagacacakgaatcagctaatctgatgccagaggttccacagagttggcctgccaactcatgacctaaattaatgcatattgctttaagacactgagtgcgaggtggtattttatgcaacattcttgtggtgattgatattttaaatagtgtctcatgtagaattcttatgcctttttaaaatagtgttttttaagataaattatgtatcataaaattgattattttaaatgtgcaattcaattaatttcaatatattgatagttatacatcattatcataatgtaaatgttcagcatttcaccaccctaagttaaagaaatgaaaagaaataaaagaaaggaaaagaaaataaaagtgttcattcatagccccaagcaactaataatttattttccatctctatatatttacctatttttggtatttcatataaataaaatcatatattacgtgttattttgtgtcttctttcacttagcataatgatttttgggttcatccttgtggtaacatgtatc

SEQ ID NO: 570672 - DNA, 513 bp, Homo sapiens
ctctttgcaacggtgattcaggatctggggcttcatgatggaattcagagagtactttttggcaacaacttgaacttttggctgcacaagctcatcttcatagatgccatctccttcttgtcagggaagaggctgacattgtccttggacaggtacatccttgtggacattgatgatatatttgttgggaaagagggaacaaggatgaatgtcaaagatgtgaaggtaagcttatttatagacaacatcgaaatttgtatttcacaatatggtactgataaaatattactaatatgatagattattaatccctaaagttttaaggtgcagtagagttgaaataagatagccatttagaaaaatattgaaccaagacttaaccattctttacacacacatacacacaccagaagcttcagaatgggacagagctaaaatattaaaatatcccraagagttagtgaacttaatctctttgccctttttttttttttttttttttttctgaacaga

SEQ ID NO: 570673 - DNA, 476 bp, Homo sapiens
aacctattgcagacgttgtattctattattgatgctcaaattattctaactttggtgggaagctgttcatcttactattagtagagcaaaatgtttcaattttgtcttgttaattttctggcctaggtctggttttagctactttgccaaagagccctaactcctgctaaaagtaaaggcatttcatggctacgagctgtgctgtagggatgctcattgttttaatataaaatatattcccagctttggcatcatacttggacttccaacamaaacaggaagacacagtgtttcatttctgtctcatattttgtatctcctttctcctatacagagaggtgatcaaagacactgaggataacagaagagttcatatggatgacttatttaccatatctcatgatatgaacacagcagtcttagaataataatttcaatgtgattattgataaaatcttggattttttggtagttca

SEQ ID NO: 570674 - DNA, 541 bp, Homo sapiens
tcaattaatcgtgctgagaaaattggatagtcatatgcagaagaatgaaactggacccttgtctttcactatatactgaaattaactcaagatggagtcaagatttacatataagacccaaacctgtaaattcctagaggtaaaccaaggtaaaacttttctagacattgacccagggaaagaactgatggctaagaactcaaaaggaatttagaaaaaaacccaaaaatcatcaataggacttaaactaaaaagctttgcacagcaaataaataaataaataaataaatagtgcaaactgataacttacagaatgggagaaaatatttgcaaactgtgcatctaagtataaactaatatccaaaatctatrtgcactcaaacaactcaataagaaagaaaattgaataacctcattaaaaagtgggcaaaatgccaacatggtgaaaccctgtctcttctaaaaattaaaaaaaaaatagctgagcatggtggcacatgcctgtgctcccagctactcaggatgctgaggcaggaggatg

SEQ ID NO: 570675 - DNA, 431 bp, Homo sapiens
tgaaagaattccaatataggaataatgtaaaatgtcagaagaaatattagggcaaaaataatatggatataaatttaagaataaattaagtacaaatttaacttattcttttaaaacccttcaatttttaaaaccccttattttggaaaagcttgttaatgagctagaaataaagtktctcaatttgggatacaaataaaatagtaaagctcaggaaatacacttttttctacctgaatatttcgtgcggaaactttagttttgaatatgtgtaataaaatgtggctgggcatgatggctcatgcctgtaatcccagcactttgggacgccgaggcaggtggatcttttgaggtcagaagttcaagaccagcctggcccacatggtgaaaccccttctctactaataatacaaaaattagatgggcgtggt

SEQ ID NO: 570676 - DNA, 601 bp, Homo sapiens
aaataatgaaatgtttagatacagaaaaatgacataggaattaattatcccagatacttatcattttttggtgaaaacacttaaaatctactcttttagtaattttcaagaatatgatatattgttactattagaatctactataggtttcttcaacttsttcttccaatcaaaatgaaattttgtgtactttaaccgaatctctccaacctcttcactctcaacctctgggaactaccattttactctctgcttctttgagtttaaattttttagactccataaaaagtgagattatgtatttatcttgctgtgccttgcttatttcacttaacataatgtcctctagttcatccatgttgtcacaaattacagaattttcttctttgtaatgtctgaatgatatttcattgtgtatatgtaccccattttctttatccgtttatccactgataagatgcttaggctgattctatatcttggctattgtaaataatgcttaaatgaacaaggaagtgcagatattgatttggtaagttgaattcatttcctttgatatatacccaatagtaggattgctagatcatatggtagttccatt

SEQ ID NO: 570677 - DNA, 557 bp, Homo sapiens
accaattttactttcatattttccagctctgaagtttcagtgggtcatggtaygcaatgaggaagccaaaagtttcactggcaatactggtttctctctgtttctggaataacttatgcatcttttgccttagttatcagtggatggtgtttatatgacctgatcacaaagtctaggaacgcatacagcttgaactttaaaaagataaatttgtccccacggcatatactatagaccttagtcagctgatcagttctacaaagcatacctttgtaaatggtacataagatactattaggttggtgcaaatgtaattggagtttttgccatgaaaagtgcctcttgtggtatcagatgggacagcttgattgtggccaggagatccaccttagatgtctcatgcacgtggcaagttagtgctggctgtcacctgggtgctttgttggggctgtcaccctgtgtctagatttccccccaaatagcctctcaatatggcaatgtgggcttctctcagcacggtggctgggttctgagagagagagactgttccaagagcc

SEQ ID NO: 570678 - DNA, 557 bp, Homo sapiens
accaattttactttcatattttccagctctgaagtttcagtgggtcatggtacgcaatgaggaagccaaaagtttcactggcaatactggtttctctctgtttctggaataacttatgcatcttttgccttagttatcagtggatggtgtttatatgacctgatcacaaagtctaggaacgcatacagcttgaactttaaaaagataaatttgtccccacggcatatactatagaccttagtcagctgatcagttctacaaagcatacctttgtaaatggtacataagatactattaggttggtgcaaatgtaattggagtttttgccatgaaaagtgcctcttgtggtatcagatgggacagcttgattgtggccaggagatccaccttagatgtctcatgcacgtggcaagttagtgctggctgtcacctgggtgctttgttggggctgtcaccctgtgtctagatttccccccaaatagcctctcaatatggcaakgtgggcttctctcagcacggtggctgggttctgagagagagagactgttccaagagcc

SEQ ID NO: 570679 - DNA, 336 bp, Homo sapiens
ggattctttgaaccggcctctgggagtggagctgaggataataactaacttttatgaagcatttcctatgtgctaggaaatgttctgggaattttctaaacattagcatttgcactcactccccaccacaccccatgaggtagacaattttatatttattttataacctgagacttgctgaggttaacttcaagcatgtggcagagggagaattcaaatctaagtctgtctgactttaaatgtaattctaattgacatttacacgtgttttcatttaattcttgttatagtcctgatrttatcttcatttcatggataatcacattgagatcccca

SEQ ID NO: 570680 - DNA, 415 bp, Homo sapiens
taaaggttatgaaaattgctcaagtacacacaactagaaagtggtagagcaaggttttaaacccacgatagcatgacccccaagtacaggtttttaaccattggtctacactactttcctctagaaatgatgaaagatgccaaataaaatgttcagaagatcctttaagaatttgagaatttcattcagtttggaaattgtttctccaataaatcccacacctcaagtcttggttttaaagcagatccaagctgaggtccccaaatttcttaaaaattaagccagaaaaatttaatgaatggttttgtgctttttctaagttgacacaaacctccagggacctatcagcatatttgaactcctgtagttggaaatataataaagaaygaacatctgcatctgttactagttaaaa

SEQ ID NO: 570681 - DNA, 239 bp, Homo sapiens
ccacaaccttcctaaatgaatagaatttttccataggtgaagagtgttctactgacactaggaaaggtggagctcaagacgcagttaatttaatctgtttatttattgttggtgctataatatctgcctgccagggacccgagacctaggcttacttgttggcactatgatcctattgttcatctgaacttggccatggagaaagcarcagggaggttgtgagtccaattggaagagct

SEQ ID NO: 570682 - DNA, 527 bp, Homo sapiens
ctttggcctcccaaagtgctgggattacaggtatgagctactatgcctgaccttataatgtatttcaatttatggacatctatgcctgaaggcctcccagcattttaaaagaaaacaaccaagagagtaacataatcaaacaaggcaatatgcccaaataaataaatcccatagttggctcataaataaacttccatacctggtactcaacattaaagatatgcaacatatgaaactgaaaatatatatatatatatwtttttttttgagacagggtctggctctgttgcccaggctggagtgcagtggcatgatctcagtccactacaacctccgcctcctgggttcaagccatcctcctatctcagcctcctgagtagctgggactacaggcacgcatcaccatgcctggctaattttttttgtattttctgtagagatggggtttggccacgttgccaggctggtctccaactcctgggctcaagcgatctgcctgtcttggcctcccaaagtgctgggattac

SEQ ID NO: 570683 - DNA, 527 bp, Homo sapiens
ctttggcctcccaaagtgctgggattacaggtatgagctactatgcctgaccttataatgtatttcaatttatggacatctatgcctgaaggcctcccagcattttaaaagaaaacaaccaagagagtaacataatcaaacaaggcaatatgcccaaataaataaatcccatagttggctcataaataaacttccatacctggtactcaacattaaagatatgcaacatatgaaactgaaaatatatatatatatatatttttttttgagacagggtctggctctgttgcccaggctggagtgcagtggcatgatctcagyccactacaacctccgcctcctgggttcaagccatcctcctatctcagcctcctgagtagctgggactacaggcacgcatcaccatgcctggctaattttttttgtattttctgtagagatggggtttggccacgttgccaggctggtctccaactcctgggctcaagcgatctgcctgtcttggcctcccaaagtgctgggattac

SEQ ID NO: 570684 - DNA, 606 bp, Homo sapiens
agactctatctcaaaaaaaacaaaaacaaaaacaaacaaacaaacaaaaaaaacaaaaacaaaaacaaaagaatagcactccttggccgggtgcggtggctcacgccggtaatcccagcactttgggaggttgaggcgggtggatcacgaggtcaggagttcgagacaagtctggccaacatagtaaaaccccatctctactaaagatacaaaaaaattagccaggtgtgggtgtgtgcctgtatcccagctactcgggaggcwgaggcaggagaattgtgtgaacccaggaggcagaggttgcagtgcccgagattgcgccattgcactccagcccaggcgacagtgtgagtgagactccgtctcaaaaaaaaaaaataaagaaaaaaagaatagctctccttgatggtgtgatggcaatatgaaggatggattggagttggaagaaataaatagaaatagtgtagtaaaaaaatcatgggggctttgaaccaaggcagtgacaggtggggtaacaaactgaacagatgtgggagatgtttaagggttagaatcatgaggattctacacagaattctatgcagatagaaatgttcctatgtgaga

SEQ ID NO: 570685 - DNA, 513 bp, Homo sapiens
atctgtgaaattgctttttgatgtgtggattcatctcacagagttaaacattttatttgatccagcaggttggaaacacttttgttgaatctgtgaagtgaccttttggagcccttgaggcctacagggaaaaacagattatcaccagataaaagctagaaagaagctatctgtgaatcagctttgtgaagtttggacacttatcacagagttaaacatttcttttgattcagctgsttggaaacgctctttgtggagattctgggaagggacatttgggagtccattgaggcctatggggataaacagaatatccacagagaaaactagaaagaagttatccgtgaaatgctttgtgatatgtggattcatctcacagaggtaaatttttcatttgatttagcttattggaaacactccttttggaggctttgcaaagggacatttctgagccattgaggcctatggggaaaaattgaatatccttgtataaaaactagaaagaagctatct

SEQ ID NO: 570686 - DNA, 513 bp, Homo sapiens
atctgtgaaattgctttttgatgtgtggattcatctcacagagttaaacattttatttgatccagcaggttggaaacacttttgttgaatctgtgaagtgaccttttggagcccttgaggcctacagggaaaaacagattatcaccagataaaagctagaaagaagctatctgtgaatcagctttgtgaagtttggacacttatcacagagttaaacatttcttttgattcagctgcttggaaacrctctttgtggagattctgggaagggacatttgggagtccattgaggcctatggggataaacagaatatccacagagaaaactagaaagaagttatccgtgaaatgctttgtgatatgtggattcatctcacagaggtaaatttttcatttgatttagcttattggaaacactccttttggaggctttgcaaagggacatttctgagccattgaggcctatggggaaaaattgaatatccttgtataaaaactagaaagaagctatct

SEQ ID NO: 570687 - DNA, 380 bp, Homo sapiens
aatggacattttggaaccctttgagtcctatggggaagaactaactatccccagataaaaactggaaagaagctgtctgtgaaactgctttgtggtgtgtggagtgttcaaactttcttctgattcagcaggttgaaaaaaatcttttaggagaatctgtgtagggacagttgggarcatattggggtttatggggtaatactgaatatccagagataaaaactataagtaaggtatctgtgaaactatttttttgggtgtatggattcacgtcacagagttaaagctttgttttgattcagcggtttgcaaacactgtttttgcagaatctgcaaatggacatttgggagtctatataggcctaatgagaaaaactgaa

SEQ ID NO: 570688 - DNA, 380 bp, Homo sapiens
aatggacattttggaaccctttgagtcctatggggaagaactaactatccccagataaaaactggaaagaagctgtctgtgaaactgctttgtggtgtgtggagtgttcaaactttcttctgattcagcaggttgaaaaaaatcttttaggagaatctgtgtagggacagttgggagcatattggggtttatggggtaatactgaatatccagagataaaaactataagtaaggtatctgtgaaactatttttttgkgtgtatggattcacgtcacagagttaaagctttgttttgattcagcggtttgcaaacactgtttttgcagaatctgcaaatggacatttgggagtctatataggcctaatgagaaaaactgaa

SEQ ID NO: 570689 - DNA, 380 bp, Homo sapiens
aatggacattttggaaccctttgagtcctatggggaagaactaactatccccagataaaaactggaaagaagctgtctgtgaaactgctttgtggtgtgtggagtgttcaaactttcttctgattcagcaggttgaaaaaaatcttttaggagaatctgtgtagggacagttgggagcatattggggtttatggggtaatactgaatatccagagataaaaactataagtaaggtatctgtgaaactatttttttgggtgtatggattcacktcacagagttaaagctttgttttgattcagcggtttgcaaacactgtttttgcagaatctgcaaatggacatttgggagtctatataggcctaatgagaaaaactgaa

SEQ ID NO: 570690 - DNA, 417 bp, Homo sapiens
gcagtttctcagatagcttccatcctttttatcctgggatattcgattttctgccattggcctcaatgggctccaaaatgtcctttagcagaatggacaaacactctttccaaactacttaatccaataaaagggtttccaaactgttgaatgaaaagaaagatttaacactgcgagatgactgcacacatcaaatagcagtttctcagatagattcctgctactttttatcctgggatatttgctttttcaccattggcctgaatgagctctgaaacgtccattcacakaatggacaaaaaaagtgtttcaaaactgctaaattcaaagaaagatttaacactgtcagattaatgcacacatcactaagtagtttctcagaaagcttctttctagtttttatctgaagatgtttcc

SEQ ID NO: 570691 - DNA, 466 bp, Homo sapiens
ctttcttttgattcagtagtttggagacacagtttttgtccattctgcaaatagacatttgggagctcactaaggccaaaggcaaaaaagcaaatatcttaggatacaaataggtaggaaactttatgtgaaacttctttgttatgtgtgcattcatcccacatagattaacctttcttttgattcacaatttggaaacastttttttgtacattctgcaaatggacatttaggagtgttttgaggcctatggtgaaaaagaaaaaatatattcagataaaaactagaaagatgtattctgacaaaatgctttgtgatgtgtgcattcatctctcagagttaaagctttctttttattcagcagtttggaaactgtttttgtacattctgcgaatggacatttgggaggttattgaggccaatcatgaaaaagtgaatattccaagataaaaactagatggaagct

SEQ ID NO: 570692 - DNA, 466 bp, Homo sapiens
ctttcttttgattcagtagtttggagacacagtttttgtccattctgcaaatagacatttgggagctcactaaggccaaaggcaaaaaagcaaatatcttaggatacaaataggtaggaaactttatgtgaaacttctttgttatgtgtgcattcatcccacatagattaacctttcttttgattcacaatttggaaacagtttttttgtacattctgcaaatggacatttaggagtgttttgaggcctatggtgaaaaagaaaaaatatattcagataaaaactagaaagatgtattctgacaaaatgctttgtgatgtgtgcattcatctctcagagttaaagctttctttttattcagcagtttggaaactgtttttgtacattctgygaatggacatttgggaggttattgaggccaatcatgaaaaagtgaatattccaagataaaaactagatggaagct

SEQ ID NO: 570693 - DNA, 552 bp, Homo sapiens
aaatatcttcacttgaaacctagaaggaagcttgctgagaaactgctttgtgatgagtgcattcatctcacagaggtaaacatttcttttgattagctctttggaaacactgtttttggaccttatgcaaatggacttttgggagctcattgaggcaaatggtgaaaaagtgaatatcccaagttaaaactagaaggaaagtatctgaggaaccactttgtgatgtgtgcatcctctcacagagttaaacctctcttttgattcaacaatttgaaaacactgtttttgtagaatctgtggaagtacatttgggagtgtattgatgcctatggtgaaaaagmaaataacttcagataaaaaattgaaaggagctttctgagaaatttctttgttctgtgcattgatctcacagagttaaatgattcttttgattcagcagtttggaaacactgtttgtgtacattctgtgaacggacatttgagagcacattgaggcctattgtgaaaatgaaaacatcttcagataaaaactagaaagaaattttctgagat

SEQ ID NO: 570694 - DNA, 552 bp, Homo sapiens
aaatatcttcacttgaaacctagaaggaagcttgctgagaaactgctttgtgatgagtgcattcatctcacagaggtaaacatttcttttgattagctctttggaaacactgtttttggaccttatgcaaatggacttttgggagctcattgaggcaaatggtgaaaaagtgaatatcccaagttaaaactagaaggaaagtatctgaggaaccactttgtgatgtgtgcatcctctcacagagttaaacctctcttttgattcaacaatttgaaaacactgtttttgtagaatctgtggaagtacatttgggagtgtattgatgcctatggtgaaaaagaaaataacttcagataaaaaattgaaaggagctttctgagaaatttctttgttctgtgcattgatctcacagagttaaatgattyttttgattcagcagtttggaaacactgtttgtgtacattctgtgaacggacatttgagagcacattgaggcctattgtgaaaatgaaaacatcttcagataaaaactagaaagaaattttctgagat

SEQ ID NO: 570695 - DNA, 533 bp, Homo sapiens
ctctctctttacacaaaaatcaactcaaaatggatcaagaacataaatctatgacctgaaaccacaaaaactctagaagaaaacattagaaaaacccttctagacactatcttaggcaaagacttcatgaccaagaacccaaaagcaaattcagcaaaaacaaacaggtgagacttaactaaagagcttctgcacaggaaaaggaacaatcagcagagtwaacagacaacccacagagtgggaaaaaatcttcagtctgtacatctgacaaagggctattatccagaatctacaaggaactcaaacaaattacaatttacgaattacaattacaaaaatgtggaaccagcccaaatgcccatcaatcaacaagtggataaagaaactgtgataaacatatacatatatatgtataatggaataccactcagtcatcataaggaataaattaatggcattcccagcaacctggatggaactggagactattattctaaatgaagtaactcaggcataaaaaactaaacatcgta

SEQ ID NO: 570696 - DNA, 460 bp, Homo sapiens
cctactcatgtaaccaaaaaccacctgttccccaaaaaacctatggaaataatgaataaataaagtacaggattcttctcagcaaacataaataaataaaataaaaactgaagtttatctttttatctctcctttttggcaggacaaattttagatatgtttttaaagaattaataacytttttcctttctctgagacatggtctcactttgttgcccaggctggagtgcagtgatgcaattatagttaactgcagcctcaaactcctgagctcaagcaatcctctgcctcagcctcctgagtaggtaaaaccaaaggcacatgctaccaagcctgggtaatttgttatttaacctttttgtagagatgagctcttgctatgttgaccaggctaaaaataaacaaatcttaattaacttaaatatttctaacactttgggcattcatgaaaacagctcca

SEQ ID NO: 570697 - DNA, 487 bp, Homo sapiens
tccagtttttttcttaagatatttggtttttcccctttggcctcaatggactcccaaatatccctatgcagattttctgaaagaagtatttccaacctgcggaatctaaataaatgtttcactctatgagatgcatttacacatcaaaacacactttcacagatagcatctttttagtttttatctgggaatatttgcatttcaataatagrcatcaatgggcttccaaatgctcatttgcatattctccagcatagtgttttgttttgttttgttttgttttggggggttttggttttggttttggttttttgtagagatggggattcactctgctagccaggatggtggcaatctcctgatatcgtgatctgcctgccttggcctcccaaagtgctgggattacaggcatgagccactacacccagcctccaacatagtgtttttaacctgtagaataaaaagaaaggtttaattcagtgacatg

SEQ ID NO: 570698 - DNA, 526 bp, Homo sapiens
ttcatttttccccataggcctgaatggcttttcaaatgtcccttagcagattctagaaaaagagtgtttccaacctgctggagcaaaagaaaagtttatctatgtgagacaaatacacacaaaacaaaacagtttcacggatagcctctttctactttttatctggggatattctgtgtttacttatagtcctcaatgagctccaaaatgtcctcttgcagattctctgaaaacagtatttcyaatctgctgaatcaaaataaaggtaaaactctgtgaggtgaaagcacacatcacaaagcagtttcacagatagctcctttctagttttttttttctgtggatattcggttttatcatatagggacaaatgggtcccaaaatgtcccttcgaaaatactccaaaaaaagtgcttttaagctacttaatcaaaagaaagcattacttctgtgagatgaatccacacatcgcaaagcagcttcacagatactttctttctagtttttatctggggatattcatttt

SEQ ID NO: 570699 - DNA, 476 bp, Homo sapiens
tgaattaaaagaaaagtttcattttgtgagatgaatcaacacatcacaaagcagtttcacagaaagattctttcagtttttatctgtgaatattcagtttttcttcttaggcytcaatgggctgtcaaatgtgccttcacagattctacaaaaacagcgtttccaacctcctgaatcaaaagaaaggtttaactcttttgtaaaatccacacatcacaaagcagctttatagatacttcattctaatttttatctttggatattcaggttttcttcttaggcctcaatgggctcccaaatttcacttcgcagattctaaggaaatagtatttctgtgatgactcaaaagaaatgttttcactatgagaagaatccacattcacaaaacagttttatagatgcttatttctactttttatttgggatattcgatttttctccataggactaattgggctccaaaatgtcccttcaca

SEQ ID NO: 570700 - DNA, 476 bp, Homo sapiens
tgaattaaaagaaaagtttcattttgtgagatgaatcaacacatcacaaagcagtttcacagaaagattctttcagtttttatctgtgaatattcagtttttcttcttaggcctcaatgggctgtcaaatgtgccttcacagattctacaaaaacagcgtttccaacctcctgaatcaaaagaaaggtttaactcttttgtaaaatccacacatcacaaagcagctttatagatacttcattctaatttttatctttggatattcaggttttcttcttaggcctcaatgggctcccaaatttcacttcgcagattctaaggaaatagtatttctgtgatgactcaaaagaaawgttttcactatgagaagaatccacattcacaaaacagttttatagatgcttatttctactttttatttgggatattcgatttttctccataggactaattgggctccaaaatgtcccttcaca

SEQ ID NO: 570701 - DNA, 476 bp, Homo sapiens
tgaattaaaagaaaagtttcattttgtgagatgaatcaacacatcacaaagcagtttcacagaaagattctttcagtttttatctgtgaatattcagtttttcttcttaggcctcaatgggctgtcaaatgtgccttcacagattctacaaaaacagcgtttccaacctcctgaatcaaaagaaaggtttaactcttttgtaaaatccacacatcacaaagcagctttatagatacttcattctaatttttatctttggatattcaggttttcttcttaggcctcaatgggctcccaaatttcacttcgcagattctaaggaaatagtatttctgtgatgactcaaaagaaatgttttcactatgagaagaatccayattcacaaaacagttttatagatgcttatttctactttttatttgggatattcgatttttctccataggactaattgggctccaaaatgtcccttcaca

SEQ ID NO: 570702 - DNA, 476 bp, Homo sapiens
tgaattaaaagaaaagtttcattttgtgagatgaatcaacacatcacaaagcagtttcacagaaagattctttcagtttttatctgtgaatattcagtttttcttcttaggcctcaatgggctgtcaaatgtgccttcacagattctacaaaaacagcgtttccaacctcctgaatcaaaagaaaggtttaactcttttgtaaaatccacacatcacaaagcagctttatagatacttcattctaatttttatctttggatattcaggttttcttcttaggcctcaatgggctcccaaatttcacttcgcagattctaaggaaatagtatttctgtgatgactcaaaagaaatgttttcactatgagaagaatccacattcacaaaacagttttatagatgyttatttctactttttatttgggatattcgatttttctccataggactaattgggctccaaaatgtcccttcaca

SEQ ID NO: 570703 - DNA, 549 bp, Homo sapiens
acctgctgaatcaaaagaaagatttcactctgtgagatgaatccacccatcacaaagcaattccacagatactttctttgctgtttttacctgggaatatttggtttttcttcataggcctcaatgggctccraaatgtccctttgtagatgccacaaaaagagtttttcagcctgcttaatcaaaaaatgttttaactctgtgagatcaatccacacatcacaaagcaatttcacagataccttcattctagtttttaaatggggatatttaatttttatccatgggtctcagtgggctcccaaatttcccttcacagattctacaaaatgaatgtttccaacgtgctgaataacaaaaaagtgttaattctgtgagacgaacccacacaccacaaagcagtttcacagatagcttctttttagtttttatatggggatattctttttttttccatggacctcaaaggacactgaaatgtccctttgcagattctccaaaagtgtgtttccaactgctgaataaaaacaaaggtttaattctgtgaga

SEQ ID NO: 570704 - DNA, 549 bp, Homo sapiens
acctgctgaatcaaaagaaagatttcactctgtgagatgaatccacccatcacaaagcaattccacagatactttctttgctgtttttacctgggaatatttggtttttcttcataggcctcaatgggctccaaaatgtccctttgtagatgccacaaaaagagtttttcagcctgcttaatcaaaaaatgttttaactctgtgagatcaatccacacatcacaaagcaatttcacagataccttcattctagtttttaaatggggatatttaatttttatccatgggtctcagtgggctcccaaatttcccttcacagattctacaaaaygaatgtttccaacgtgctgaataacaaaaaagtgttaattctgtgagacgaacccacacaccacaaagcagtttcacagatagcttctttttagtttttatatggggatattctttttttttccatggacctcaaaggacactgaaatgtccctttgcagattctccaaaagtgtgtttccaactgctgaataaaaacaaaggtttaattctgtgaga

SEQ ID NO: 570705 - DNA, 561 bp, Homo sapiens
aagaaaactttaaccctggaagaggaatccacacatcacaaggtagtttcaccaaaagcttctttctagtttttatctggagrtattttgtttttccccattggccacaatgggctcccaaatgctcctttgcagattctccaaaaacagtgtttccaacctgttgagtcaaaagaaaggtttaaccctttgagatgaatccactcatccaaaagcagtttaacagattacttcattctagtttttatctggggatattcggttttccccattaagcctcaatggctccaaaatatcccttcgcagattctccaaaaagagtgtttccaaactaccgattcaaaagaaaacttgaacactgtgagatgaatccacacatcacaaaacagtttcacagatggcttcctcttgtttttatctagggatattcaatttttccccatagccctcgatgttctctcatatgtccctcacagattttcccaaaaatagtgtttccaacctgctgaatcaaaagaaagttttactcttgtgtgatgaatccacaaatcacaaagaagt

SEQ ID NO: 570706 - DNA, 561 bp, Homo sapiens
aagaaaactttaaccctggaagaggaatccacacatcacaaggtagtttcaccaaaagcttctttctagtttttatctggagatattttgtttttccccattggccacaatgggctcccaaatgctcctttgcagattctccaaaaacagtgtttccaacctgttgagtcaaaagaaaggtttaaccctttgagatgaatccactcatccaaaagcagtttaacagattacttcattctwgtttttatctggggatattcggttttccccattaagcctcaatggctccaaaatatcccttcgcagattctccaaaaagagtgtttccaaactaccgattcaaaagaaaacttgaacactgtgagatgaatccacacatcacaaaacagtttcacagatggcttcctcttgtttttatctagggatattcaatttttccccatagccctcgatgttctctcatatgtccctcacagattttcccaaaaatagtgtttccaacctgctgaatcaaaagaaagttttactcttgtgtgatgaatccacaaatcacaaagaagt

SEQ ID NO: 570707 - DNA, 608 bp, Homo sapiens
ccacaatctggtgttgggtctgatgagtgctacacacaaagcagtttcacagacagattctttctaggttttacctgtaaatrtttgatttttccccataggcctcaatggagtctcaaatgtcccttcgcagattctccaaaaagagtgattccaacctgctgaatcaaaagaaaatttaaatctgtgagacgaatcaacacatcagaaagcagtttcacagatagcttttttctagtttttatctggggatatttgtttttaattatagatgtcaatgggctcccgaatgtcccttcacagattctacaaaaattatgtttccaatctgctggatcaaaacaaaggtttaactcttttgagaggaatccacacattcaaagaagtttcacagatacctttgttctagttttcatctgggggtattcgattttaacttataggatttaatcatctcccaaatgtctttttgcaaactctccaaaaaagtgtttccaacctgctgaatcaaaagaaaggtttaattatgagagatgaatccacacagctcaaagcagtttcacagatagcttctttcttttattaatctggtgatatttggtttttac

SEQ ID NO: 570708 - DNA, 608 bp, Homo sapiens
ccacaatctggtgttgggtctgatgagtgctacacacaaagcagtttcacagacagattctttctaggttttacctgtaaatatttgatttttccccataggcctcaatggagtctcaaatgtcccttcgcagattctccaaaaagagtgattccaacctgctgaatcaaaagaaaatttaaatctgtgagacgaatcaacacatcagaaagcagtttcacagatagcttttttctagtttttatctggggatatttgtttttaattatagatgtcaatgggctcccgaatgtcccttcacagattctacaaaaattatgtttccaatctgctggatcaaaacaaaggtttaactcttttgagaggaatccacacattcaaagaagtttcacagatacctttgttctagttttcatctggggrtattcgattttaacttataggatttaatcatctcccaaatgtctttttgcaaactctccaaaaaagtgtttccaacctgctgaatcaaaagaaaggtttaattatgagagatgaatccacacagctcaaagcagtttcacagatagcttctttcttttattaatctggtgatatttggtttttac

SEQ ID NO: 570709 - DNA, 357 bp, Homo sapiens
atgtatgaattcatctcacagaattaaaccttttttttgattcagcagtttggaaacgctctttttggagaatctgcgaaaggacatttgggagccctgtggcctatggggcaaactgtatatcccaagataaaaagcagaaagaagctatctgttaaagacctttgtgataggtggatttatctcacagagttataactttcttttgattcagcaagttggaaactctttttgtagaattgtgaagggacagttcccaggccatcaaggcctatggggaaaaacagattatcctcaaatgaaaagtagtatgaagctatckgtgaaattgctttgtggtgtggattcatctcacag

SEQ ID NO: 570710 - DNA, 466 bp, Homo sapiens
aagtgaccttttgtagctgtttgtggcctatggggaaaaacagaatatccccatataaaaactagaaagaagctacctgtgaatcagctttgtaacgtttggattcatatcacagagttaaacatttcttttgattcagctggttggaaacactctttttggagaacctgggaagggacatttggaagcccattgaggcttatgtggaaaaactgaacatatacagagaaaaagtagaaagaagttatccatgaaacttctttgtgatatgtggattcatctcagagagttaaatctttcgtttgatttarcatattggaaacagtccttttggagactctgagaagggacatttttgagcccattgaagcctatggggaaaaattgaatatctttgtataaaaactagaaagaagcaatctgtgaaactgatttgtgatgtgtggattcatctcacagtggtaaa

SEQ ID NO: 570711 - DNA, 466 bp, Homo sapiens
aagtgaccttttgtagctgtttgtggcctatggggaaaaacagaatatccccatataaaaactagaaagaagctacctgtgaatcagctttgtaacgtttggattcatatcacagagttaaacatttcttttgattcagctggttggaaacactctttttggagaacctgggaagggacatttggaagcccattgaggcttatgtggaaaaactgaacatatacagagaaaaagtagaaagaagttatccatgaaacttctttgtgatatgtggattcatctcagagagttaaatctttcgtttgatttaacatattggaaacagtccttttggagactctgagaagggacatttttgagcccattgaagcctatggggaaaaattgaatatctttgtataaaaactagaaagaagcaatctgwgaaactgatttgtgatgtgtggattcatctcacagtggtaaa

SEQ ID NO: 570712 - DNA, 445 bp, Homo sapiens
ccattgaggcctatgggaaaaaaacaaatatcccgagacaaaaactggaaacatctccctgtgaaacagctttgtgatgtgtggattcatatcaccatgaaactttctcttgtcccagcaggtgggaagcactctctttagagaatctgtgaaggcacatttcggagccttttgaggcctattaggaaaaaccaaataaccccaggtaaaaaygagaaagaagttatttgtgaaactgctttgtgatgtgtagattcatctcacagagttaaacctttgtttttattcaacaggttttaaacactctttctatagaatctgtgaagggatatttgggagcctattgaaccctattggaaaaaaaacaaatatccacagataaaaactaaaaataagctatctgtgaaactactttgtgatgtgtggattcatctcacagagttaa

SEQ ID NO: 570713 - DNA, 509 bp, Homo sapiens
gaactttcttctcaccatttacttgagacaactataattactatgccacttttaaagaacattagaccagcctggccaacaaggtgaaaccctcatctctactaaaaatacaaaaactagccaggcatggtggtgtgtgcctgtaaccccagctattcgggaggctgaggcaggagaatcacttgaaccctggaggcagagattgcagtgagctgagatcgctccactgcactccagcctggagcgagcctctgtctcaaaaaaaaaaaaaaaaaaaaaaaaaaaaaaaaaargaaagggaaggaaaaaaaggaagaagattaaggggaaaaaacgaatttttcaataaagaatgaatgctagccaggtgcagtagctcatgcctgtaatcccagtactttgggaggctgatgcgggcagatcacctgaggtctacagttcgagaccagcctggccaacatggtgaaaccccgtctctactaaaaattcaaaaattagccgggtgtgat

SEQ ID NO: 570714 - DNA, 505 bp, Homo sapiens
gaactttcttctcaccatttacttgagacaactataattactatgccacttttaaagaacattagaccagcctggccaacaaggtgaaaccctcatctctactaaaaatacaaaaactagccaggcatggtggtgtgtgcctgtaaccccagctattcgggaggctgaggcaggagaatcacttgaaccctggaggcagagattgcagtgagctgagatcgctccactgcactccagcctggagcgagcctctgtctcaaaaaaaaaaaaaaaaaaaaaaaaaaaaaaaaaaggaaagggaaggaaaaaaaggaagaagattaargggaaaaaacgaatttttcaataaagaatgaatgctagccaggtgcagtagctcatgcctgtaatcccagtactttgggaggctgatgcgggcagatcacctgaggtctacagttcgagaccagcctggccaacatggtgaaaccccgtctctactaaaaattcaaaaattagccgggtg

SEQ ID NO: 570715 - DNA, 505 bp, Homo sapiens
gaactttcttctcaccatttacttgagacaactataattactatgccacttttaaagaacattagaccagcctggccaacaaggtgaaaccctcatctctactaaaaatacaaaaactagccaggcatggtggtgtgtgcctgtaaccccagctattcgggaggctgaggcaggagaatcacttgaaccctggaggcagagattgcagtgagctgagatcgctccactgcactccagcctggagcgagcctctgtctcaaaaaaaaaaaaaaaaaaaaaaaaaaaaaaaaaaggaaagggaaggaaaaaaaggaagaagattaaggggaaaaaacgaatttttcaataaagaatgaatgctagccaggtgcagtrgctcatgcctgtaatcccagtactttgggaggctgatgcgggcagatcacctgaggtctacagttcgagaccagcctggccaacatggtgaaaccccgtctctactaaaaattcaaaaattagccgggtg

SEQ ID NO: 570716 - DNA, 533 bp, Homo sapiens
taacctcagcatttcattgtggttggtgtttgtagggaaagaaagaacawtaaatgaatacaattaaatcatgttaaagtcctgaccggtgctggtccgtaaagacattggtttgaacattaatctagagtgtcctagtttagaagtaatagtttcacttcctaaatttataattgcgatatttgatcttcgcatgattaatttagtcaagaatgacaacttgccagtagatcaaaatcaggaaatttgattaaatattgtggctagttgctttatgttaaaacattatagctcaatggtgggatttcagttgcctgaaatcttttgccaggcaactataatcaacatgcatacacatacacatcagtgtattcctcccagaaatatgtttgccataacttttataaagatttacatatcagcctataagtgttttagactggggccacctggaaaaaataatccttttaatcttccaagttgctgagaaagaatgttttcttcccaataaattagcagtattaactttctac

SEQ ID NO: 570717 - DNA, 600 bp, Homo sapiens
atgttggccagtctggtcttgaactcctgacttcaagtgatccacctgccttggcctcctaaagtgctggaattacaggcatgagccactgcccccggcctttaatttatttaagttagtyttcatccttctctggtgccaccttgagaagcttaataatcaactttctgaattctttttctggcatttcagaaatttcttggtttagaccattgctggacagctagtatgatcttttgtgggtgtcatagaatgttgttttgtcatattaccagaattacttttctagtttcttctcatttaggtagaatgtttcattggaaatatctggaactcaagcgctgctgttcagattgttttgtcccacaggtaatcctttgatgtggtgctctcccctttcttctaggaatagggcttcctgagagccagactcctgtgactgttattacccttctggatctagccacccagtgggcaactgggctctaggctggtgctaaggaatgtctgcaaagtgtcctgtgatgcagtctatcttcaggtctcccagctgtggatgccggaacctgctctggcggagatggcaggggagtaaagtgg

SEQ ID NO: 570718 - DNA, 516 bp, Homo sapiens
ttttctttctgacatggtatgtgttcagaatttgaaaaaaacaagcccaaaagagaaaaaaaatgactggctgtaaacccagtgaatgacagtattgtcagtgatttctaaaaaaaatcttccccttagcaatttctggactcagttaaaacttagcaacatctctcctttgaaatagtctgaagacaagattatgaagacaaactctcaaatattatcctagcttcgaaacattataaattcccatttattggaagttattaggactgggcaaggtggctctcgcctgtaattccagcactttgggaggccaaggctggcggatcacctgaggtcaggagttcgagaccagcctggccaatatggtgaaagtttgtctctactaaaaatacaaaaattagacaggtgtggtggcaggcgcctgtaattccmgctacacaggaagctgagacaggagaatttcttgaacccaggaggcggaagctgcagtgagccaagatcaagccattgaactcc

SEQ ID NO: 570719 - DNA, 568 bp, Homo sapiens
agctgggcatggtggcacacgcctatagtcccagctacttgggaggctgaggcaggagaatcgcttgaacccaggaggcagaggttgcagtgagccgagattgcgccactgcactccagcctgggtgacagagtgagactccrtctcaaaaaaaaaaaaaagtgttatggtttgaatatgttccccaaatttcatgtattgagaacttaatccccattgtagcaatatttaaaggtagatcatgtaagaggtgattggatcatgagggctctgcccttataaacagattaattaattcatgggttaatggattactgagttatagaaggaaactgtggctttataagaagaggaagagagacctgagcaagcatgatagcatgcttagctttcttgccaggtgatgccctgcaccgcctctggactctccagaattcccaccagcaagaagggtctaaccagatttggccccgacctgggacatctcagcctccataactctaagaaatacatgtattttcctcacaagttacccagtttccagtattctgtaatattacaatgtttt

SEQ ID NO: 570720 - DNA, 591 bp, Homo sapiens
taggccaatttcttggggtctatggggcccaggcaaatctgaaatccagtggggcagtcaaaccttaaagttcctaaatgatcacctttgactctatgtctcacatccaggtcacactgatgcaaaaggtgcattcccatgggcttgggcagctctgcctctgtaggtatgccatgtayagcttacctcctggctgctttcatgggctgccattgtgtgtctgcagcatttccaggtgcatggtgcaagtttttggtggatctacaattctggggtctggagaatggtggccctttactcacagctccactaggcagtgccccagtggggactccgtgtggaggctccaaccacacatatctctcccacactaccctagcagaggttctccatgagggcccctcccatgcagcaaacttctgcctgtacatccaggtgtttccatacatcctctgaaatctaggtggaggttcccaaacctcaattcttgacttctgtgtacctgcaggctcaacattacatggaaccttccaaggcttggggtttgcaccctctgaagccattgcccaagcagtaccttggcccctttta

SEQ ID NO: 570721 - DNA, 643 bp, Homo sapiens
ctggcagcattcaccataagctaacttaggagcccttgggccttaagggaacatcagtggtagtctggcagtaattcccagggacctgtggtggtggtggccatggtgtgaggttcactgcctttgaaagaggagggagtatgagaaggacttcatcttgtggtttgagtgccagatgagcctcaacacaatagaacaccaggtgaacttctaaggtttttgactctactcctgggctcctggacaacatctctggacccacttggagcttggggtgacttgctactttgaaagagacacaggccttgctggctttgccacctgctgattgtggaacgcctggatcctcagcaaacagagggagtagtgagggagtgattatagcaggcctggggcaagacccattgttatgctggcattaggtctgactcagtgcattcccagtggtggtggccacagagtggcttgtgtctctctacccccaggtctgggtggctgataacagagagagagactccatttgtttgaggagaaagggagggaagagaacaaaagtctcttcctggtaatccagagaattctcccaggcatagtctgagaccatcaaggtggtacctstacaactctgcaagaaccacagtgt

SEQ ID NO: 570722 - DNA, 586 bp, Homo sapiens
atgcagaactgtaagtccattaaacctctttttcttctcagtcttgggtatgtctttattagcagcatgaaaatggacgaatacagccattaaacaccagagtttctatgtctggtttctttccctctgactaccccaattcactccacctcctcttccaggaagtacagaaattgcaaacaatagagatgttcattggtcaaagctcttaccttaaaaagtatttgcttttttgccctactattttggacatactgaaatatacctgatatggtttggagatttgtttaatccaaatctcatgttgaaatgtgatccccattgttgaaggaggggcctagtggaaagtgttttggtcatgggggtgaattcccttctgaatggcttggtgcctttactgaggtaatgagtgggttcttactctattacttcacacagtgctggtggttgaaaaaagcctggaacctccccaaccctttcttgctccctttcttgccatatgagatgccagctctccttttgccttccattataattggaagcttcctgaggcctcacgagaaktcaagcagatgctggtgccatg

SEQ ID NO: 570723 - DNA, 653 bp, Homo sapiens
tttaaaattagtacaatgyctgtaacatagtcacacttgactaatgataataattattgttcagagttcaataaatagtatccaaaagagtcagaataaaaactgcaataaaatgtcttcttttgcttaagtaatatatggtttaaagaaattagtaattttaacctttcagtgatcttcccactcaggccatccacaatctccaaagaaacatctccttgtgcccaattcagactcagaaatttatattccaagttcatttgaaggggatatgcagagggtactaaactaatatgaggtctgttgactaagtaaaacattggaagttttgaagtgagtgcatcatcaacacgttgctttatagcgatttctaagcctctggtatcactgcaattcccatcacctagaaagcaaaaacaaaacactcaagttcaatattaaaagaacatcccaaaataaaataaatgaaatgattggaaatcgtctaaagcccatttctctatcctttatctttcaaccttccctttcctagttctattctcttagcatctactccatattcttaatcagaaccagaacaaggtaataacagattttccattttaaaaaagactctgatacagaaaataatgacaggtccctctactgaatat

SEQ ID NO: 570724 - DNA, 636 bp, Homo sapiens
tgctatttttaagcataggatatgggaaatgcaaggtgaacttcagacagcctgttgagccagaaagcaaggaagcactcaaatattaatgggatttagtcaggagagcrtggaagctagcttgaaggggctcccattgaccaaatttggggccatttaagaatccaaaagaaataatgaggctgtatatttttgaagaattcaaattaattttcatattattccaactaaaattagttggaaagttcatacaccttcgctgcaatacatgaaaatggtatgtcttccaaaaaatggctatcactgattgaaatacattaactatattaaaatccatgtgtctgtaagaaggaaacaagaaaacactcttttgccatctttggagaagattattacacctattacttaccctggaatttgtattgaagaaacagaaacatttatcttggtttgctattggaatcatatttgagtaaccaaattaacatagctaatgagaaagctctttctcaaactagaatgacagctgacaagtgtagaataaatgattaaattagaaagccatcaattggtagcctctcatgtagcccttcattcagacaaggattatccacagatgttaaaaccactaggtaa

SEQ ID NO: 570725 - DNA, 636 bp, Homo sapiens
tgctatttttaagcataggatatgggaaatgcaaggtgaacttcagacagcctgttgagccagaaagcaaggaagcactcaaatattaatgggatttagtcaggagagcgtggaagctagcttgaaggggctcccattgaccaaatttggggccatttaagaatccaaaagaaataatgaggctgtatatttttgaakaattcaaattaattttcatattattccaactaaaattagttggaaagttcatacaccttcgctgcaatacatgaaaatggtatgtcttccaaaaaatggctatcactgattgaaatacattaactatattaaaatccatgtgtctgtaagaaggaaacaagaaaacactcttttgccatctttggagaagattattacacctattacttaccctggaatttgtattgaagaaacagaaacatttatcttggtttgctattggaatcatatttgagtaaccaaattaacatagctaatgagaaagctctttctcaaactagaatgacagctgacaagtgtagaataaatgattaaattagaaagccatcaattggtagcctctcatgtagcccttcattcagacaaggattatccacagatgttaaaaccactaggtaa

SEQ ID NO: 570726 - DNA, 562 bp, Homo sapiens
tcagatgagtaagatatgctctttgtcttcaaaacgctacttggaaatacccttaactgtgaaaaagggtgtactggcctcatcgtcctcgtcctcatttagttcctttgtttgtttctatggttctgtattaagaagcagttttctttttcttttttctttacaccaatgtcacttgccaaagcagttttcttatttaaaatttatctccagagagaacttgtgtagcaacaagaggaaagctatgtgtactagagttatagttcacagagcaggaatcactgttgatgtaaatcagttaactgaaattgtgatttatgtacctgcactctcctgtgagttgtgacacccccaagaaagtgataaatgcatytgtggccttacaaggcagagaattgaatcccagctgactcagtagccacatcaacttggtcaaagtagaagagggtaggaaacaaaaatgaagaatgagaccaccatctatatttacagtaaaaggatcctgttcgcagtgctgggatagcagtctttgtttattaagcataatgctatatagactgta

SEQ ID NO: 570727 - DNA, 423 bp, Homo sapiens
cacacacacatacacacaagggtgggtgtaagatataacttcaccaaaattccaagctggttttatggtagacagtcatttgtttgtttgttttttttagacagggtcttgctctgtcacccaggctggagtgcagtggtgccatctcagctcactgtagccttgacctcccaggctcaagtgatcttcccacctcagcctcccaagtagttgggactacaggagcacaccaccatgcctcgctaatttttgtagtttttataaagatgagaactcgctatgttgcccaggctggtctcgaactcctgggctcaagcaatccatcggccttggyctcccaaagtgctgggattacaggtcaccatgccaggctgagacagtaacttgtaagatttaattgttggtcgggtgcagtggctcacc

SEQ ID NO: 570728 - DNA, 520 bp, Homo sapiens
acctgccactacacccagctactttttgtatttttagtaaaaacagggtttcaccatgttggtcaggctgatctcaaactcctgacctcaagcaattcacccgcctmggcctcttaaagtgctggaattacaggtgagccaccacgcctggcctcatcatgccttttatagctatccattttactcccaacccttgccccctcaacccctggcatggactaatctgttctccatctccataattttgtcacttcaagaatgttacataaatggaatcatatggtatttaaaccactcaggattggcttttctcactcggcataattctctggagatccatccagatcattgcatgtatcagtacttcactcctttttactgctgggtagtattccatgctatggatataccagtttgtctaaccattcatccactaaagaacatctgtattgtttccagttatgggctattatgaataaaactcctataaaacattcacatactggcatttatatgaaca

SEQ ID NO: 570729 - DNA, 520 bp, Homo sapiens
acctgccactacacccagctactttttgtatttttagtaaaaacagggtttcaccatgttggtcaggctgatctcaaactcctgacctcaagcaattcacccgcctcggcctcttaaagtgctggaattacaggtgagccaccacgcctggcctcatcatgccttttatagctatccattttactcccaacccttgccccctcaacccctggcatggactaatctgttctccatctccataattttgtcacttcaagaatgttacataaatggaatcatatggtatttaaaccactcaggattggcttttctcactcggcataattctctggagatccatccagatcattgcatgtatcagtacttcactcctttttactgctgggtartattccatgctatggatataccagtttgtctaaccattcatccactaaagaacatctgtattgtttccagttatgggctattatgaataaaactcctataaaacattcacatactggcatttatatgaaca

SEQ ID NO: 570730 - DNA, 666 bp, Homo sapiens
ctgtatgactataccttgttttcattataacctctattaataatgctaagaacccccgtacacagctgtgtttaaaaccaaaagttgtattaatgaccagaccagcttgaccttgattgatctgggtatctacactggacagagtaaaatgagaaagcaagtctgcccatcaggaggccacctattctgactacagtgaaaattaaaattaaagctatctctttcacattgctctgcacttttgyaaattttcttcaaatcgtggatttttttcagtcttctctatatctaagaaaagaaatatgatgcacaggatgtcaagtcaacagataaagccaggaaaagctatccctgtgtaaatgaagcatgatattgggacagcaggagtcaagaacataagtgagtgagccagtctctgtgtaaaattggtcacaaccaactgaacacagttttgaaagaaaaaaggaaaatagttgaaggaagcacaaagctctaagccaatgcaaacaacagtggttaaaaagtgatgggttgattcctgaagtgcaaacgtttatttcatggttgcacgattagacacagtaaatccatatacctctgtacctagccaggaccctacttttattcccaaaagctcaaaatcaagtgtaataaacaaaagtatag

SEQ ID NO: 570731 - DNA, 502 bp, Homo sapiens
ccacttggtggtcacctcatgtaaatgaagtggcggcctgcaatcagaggctgcagcgaagttacaaaggttacactcctgtgcaaacatctgataggctgcaaaaaacaaccaatcagaggttaaggtgaagttacaaagttgcacttttacacaaacgaagactctgcctgcaatcgtctgactggttgtagacattcaatttccaatttgccttgcagaaaatgtgggggtttgtaaagggagtagtctctggtccttttgttacttaggcttgggaagttagggttttcctttcaatttagttctcggaagtcagtgtgaaatggccttaggttccctgcctccataccttgttctcctgcctcagctggggaggcctcataatcatgatggaagatgaaaggcacatcttayattgagacagacgagagaatgagagccaagcaaaaagagtttccccttataaaaccatcagatctcatgagacttattcactacc

SEQ ID NO: 570732 - DNA, 567 bp, Homo sapiens
gcctatcaactatcacggctctgaatatctaacaaggaatacatatttgcttaattmaaatttgcccagtataaacaagcacttcatttctagcatgtaaaaatagatataagaaaacaaaaaattgactaaagaccccatgcaataaattttaaataacttatatagacactttaccctcaaaaaggggaacacaactacttaagtatgggctacacattgtgacttccttccgaagagtacaatgtggaaaaggggaaaagaggttaattttacactgaagaaatcacacatataacatcttagccagataatcaaggtcaagtcataaatcatgttgacagtatggacccttggcatggtgtgataagaatggcacttcatccctggacattcttatctaaaacccataaccacagcctaatcatgagaaaaacaccaaattccaacagaagggcgtcctacaaaaatgcctgaccagtagtcctcaaaactattaagttcatcaaaacaatgaaattctgagaaactgtcatagccaatagaaccctaaagacaaatgacgac

SEQ ID NO: 570733 - DNA, 463 bp, Homo sapiens
aagtaccacactcaataggtactttatagacattacgctgctttgagagcaccaaagactctgaagtaggcactcttcactccatggcttgcagaagtgaaaacaggytaaaaaaaactaagtgaactaggtaggattcagtgactaacgtgacagtcttcctactccaaattcctctttaccatgttgtccttgtccaactaaaactctatttcctactatgtacttttatataaaatgaaataattggtaagaaacactttaataacaagcagagttagccaggcatggcagctcacacctgtaatcccagcacttttggaggccaaggagggtggatcacttgaggtcaagagttcaagaccagcctaaccaacatggtgaaacctcctctactaaaaatacaaaaaaaaaaaaaaaaaaaaaaatagccgggtgtgatggcatgcatctgtaatcccag

SEQ ID NO: 570734 - DNA, 463 bp, Homo sapiens
aagtaccacactcaataggtactttatagacattacgctgctttgagagcaccaaagactctgaagtaggcactcttcactccatggcttgcagaagtgaaaacaggctaaaaaaaactaagtgaactaggtaggattcagtgactaacgtgacagtcttcctactccaaattcctctttaccatgttgtccttgtccaactaaaactctatttcctactatgtacttttatataaaatgaaataattggtaagaaacactttaataacaagcagagttagccaggcatggcagctcacacctgtaatcccagcacttttggaggccaaggagggtggatcacttgaggtcaagagttcaagaccagcctaaccaacatggtgaaacctcctctactaaaaatmcaaaaaaaaaaaaaaaaaaaaaaatagccgggtgtgatggcatgcatctgtaatcccag

SEQ ID NO: 570735 - DNA, 595 bp, Homo sapiens
agttttcttttgctttggcagattggtgatgaaattttagagatcaatggtgagaccaccaaaaacatgaagcattctcgagctatagaactgattaagaatggtggccgcagagttcgtctgtttctgaagcggggagacggctcagtaccagaatatggtgggtcaaactatgaaaacattccttccttccctggcatgactccatgaatttgtctccagaacggcagcaggaaagtcttttttgtttcccctattcaccagtgtcttaccagcctctcgcaccatgtgattatttgcctcgcttgttctgaaatctctacacatttcatccttttgcttgcttacgtggactggggcatggcctaagacaagatctttatagccccctttctgataatcagagagaacgttttgtctagtccgaccaagagcgaaggaatgtttgtttgtactgtgccaaactgttcctcagatccaattgttagcacaaaatgactatatactccttttaagaagcaggaaagcaggtttcctgagtgatatgttsaggcacaattattttttcctttttggttacttggtgtctttattt

SEQ ID NO: 570736 - DNA, 563 bp, Homo sapiens
tcagcaataaaactgaacaaagtactcctacgtgctataacacaaataacttcaaaaatattatgcatagtaaaagaatcyggtcacaaaagactacatgtgttacatccagagaaagctaaatctaaagcaaattagtggtcacttggggccaggggtaggaatacgaattgactgtagatggacataagagacagtgttggggtgatgaaaatattttaaagctgtattctggtaatgtttgtacaactctatgaacttattaaaagttatttacttgtagtgtgtaaattatatttcaataaaacccttcaagaataaaatgcaaataataactggctgaacactgaactgaactgtaaccctcaaaaatttataatgggaataaaaaattgttccatattttttccacacacaaattgtatccatattttttcaattcttgctttctttcctccagaaggcatgttctgcctcatttattattatctccccgcctgtacccacgacatatctccttcaagcccgttcaatatttcccactaacaattcatttcctactt

SEQ ID NO: 570737 - DNA, 566 bp, Homo sapiens
atagctttaagaggtgataagatcactgtgttagctaagatcatttatatactataacaagcaaattgaggaatttcagtgaattcatacacaattgtatttttgtttttgctgaagtagaggtaagcaaccttttttaaaaaaatgaccagagaatcaatattttagcgttttggggcaatagagtctttgtcacaactactctgccattttaactcaaaggctgccgtggaaaggtttgtatgttccatcaaattttgasttgtaaaaaacagggtagatgacaggctttggtcccagcttactgtgacaacagttggctgccaacacttaatcatctaaaacaccagtctatctactggaagtgtgtaggctgcctgtgtgctcatgaggaagaggaaactgttttggtgaatggctagctcaactcgcttcagccattatcataacaacatcttaatttttacattatttcatagttctaaaaacttgcttacagtatatgtgtgtttcactataaacttacaaattagataatttggatcttttttaggacatggaggctg

SEQ ID NO: 570738 - DNA, 620 bp, Homo sapiens
aaataattgagaaggacacattcacacttgatggtagcactgcatggttggatcattttctctgtgagcctggtcaacattatctgttatgatcaccaaatgatgagcatacttggttatattgcaatgcgatgcagtcattcaagcgtttaatttgtcaacatatttttttctcaaaatatagacaccaaacaaccaaatcatttatatcttttgaaaagggtctatgctgtgattattttttaaaaaggtgtttgttaaacattttgaacattgcatatccagtttgacgtttccgataatgagcctaggaaattctcccatgcttttagcattcatgagaaggaatccggggaaactaaaatggtactcacaaatttcaggcatatttaagatagattgtcttcagttttgaaatccaataaaaatacatgatctttatttggccaacccaatttttgtcttttgtctaggacttttcaggttgtcagccatcaatgcagatactccacagtcaggtttcaggtatcagacatggagtgattgagcattttctacaagtggagtggggggtgtctcacaaggaaaatgaataaakagtaacctatcactaacacacc

SEQ ID NO: 570739 - DNA, 640 bp, Homo sapiens
ttttttccttactgggtttcaataaataaatgtattcatcattttataatgctttaacaattaaattgaattgtaaagtggttcacttggcagcaatgtcctaaatttataacatatttctcctaccattttcatttttatggttttctagaaattctagcacaccttgtttctaacaatctgcccaaattattttatattttaagctgtctatacatatttggatctattaatatgtttacatacgtatttcatctgaattactccttgtattcaacttgttttttgyctattcaatttatttttcactgaaatataactttgatatttcttacagtgaagttctatgtatagaaaagttaatcttaaaatatcttcatattcacttaatattgaatgatatttaactggatatagaactctactatttttttcccaatagcactttgaaaataataattaattattttctggcttgataagaattggactgtcagtcaagttaatttctattcataagtaaaccatttttattgtttaaaaaatattctctgtgttttaatttttaaagatgcgcagtatcaatttctctagttagaaataaatatgactgtctaagagggatatgtgttttttttta

SEQ ID NO: 570740 - DNA, 640 bp, Homo sapiens
ttttttccttactgggtttcaataaataaatgtattcatcattttataatgctttaacaattaaattgaattgtaaagtggttcacttggcagcaatgtcctaaatttataacatatttctcctaccattttcatttttatggttttctagaaattctagcacaccttgtttctaacaatctgcccaaattattttatattttaagctgtctatacatatttggatctattaatatgtttacatacgtatttcatctgaattactccttgtattcaacttgttttttgcctattcaatttatttttcactgaaatataactttgatatttcttacagtgaagttctatgtatagaaaagttaatcttaaaatatcttcatattcacttaatattgaatgatatttaactggatatagaactctactatttttttcccaatagcactttgaaaataataattaattattttctggcttgataagaattggactgtcagtcaagttaatttctattcataagtaaaccatttttattgtttaaaaaatattctctgtgttttaatttttaaagatgcgcagtatcaatttctctagttagaaataaatatgactgtctaaragggatatgtgttttttttta

SEQ ID NO: 570741 - DNA, 634 bp, Homo sapiens
attcacagtttattagggaagacaaacatgtatcaaaataaaaaaaggccccaatgctagtaatgagtcctttcscagtgatcagagaagtttgtacaactgcttgggaaaacacagaaaggaatatgagttttctttaatgttgtagctagtggggatattgaagatcagttaaaaccccttctaagtttaaatataggttaaggcctttattctttttctttattctctaccccagtcatcaatatgtcctattgtcgatgtatatttttctcatctctgcctatgcctcatttggccagtgacagcaaagaagttgctaatcttcctgggggattctcagaactcaagggatagccttccctggttttagattaaatcttgagttaaaatattgtacaatgaaactcagtactgcgggaaggagggaattggtttagcatagccatgaggtgcaaggactcttgtctcaaactgcagggattcatattttaactcttactatctaagcaatcttggactaattgcttctctctgtttttggttcttcacatttcaaatgggaataaaaataattgtagatatgataactagaggaatgaagtgaaatcatgagtgtaaaatacttagcagt

SEQ ID NO: 570742 - DNA, 634 bp, Homo sapiens
attcacagtttattagggaagacaaacatgtatcaaaataaaaaaaggccccaatgctagtaatgagtcctttcccagtgatcagagaagtttgtacaactgcttgggaaaacacagaaaggaatatgagttttctttaatsttgtagctagtggggatattgaagatcagttaaaaccccttctaagtttaaatataggttaaggcctttattctttttctttattctctaccccagtcatcaatatgtcctattgtcgatgtatatttttctcatctctgcctatgcctcatttggccagtgacagcaaagaagttgctaatcttcctgggggattctcagaactcaagggatagccttccctggttttagattaaatcttgagttaaaatattgtacaatgaaactcagtactgcgggaaggagggaattggtttagcatagccatgaggtgcaaggactcttgtctcaaactgcagggattcatattttaactcttactatctaagcaatcttggactaattgcttctctctgtttttggttcttcacatttcaaatgggaataaaaataattgtagatatgataactagaggaatgaagtgaaatcatgagtgtaaaatacttagcagt

SEQ ID NO: 570743 - DNA, 403 bp, Homo sapiens
gtaaaaatactaatagtccctgatatgcrgaaataatggcataagctgtctttctctctgtctcctctccctctctgcctcggctgccaggcagggaagggccccctgtccagtggacacgtgacccacgtgaccttacctatcattggaggtgactcacattctttaccctgccccttctgccttgtatccaataaataacagcgcagccagacattcggggcactactgttctccgtgcattggtggtagtggtcccccgggcccagctgccctttctcttatctctttgtcttgtgtctttatttctacactctctcatcgccgcacacagggagagacccaccgaccctgtggggctggtccctgcagggttataggcatgagccaccatgcccggcct

SEQ ID NO: 570744 - DNA, 442 bp, Homo sapiens
tagtaaaaatactaatagtccctgatatgcggaaataatggcataagctgtctttctctctgtctcctctccctctctgcctcggctgccaggcagggaagggccccctgtccagtggacacgtgacccacgtgaccttacctatcattggaggtgactcacattctttaccctgccccttctgccttgtatccaataaataacagcgcagccagacattcggggcactactgttctccgygcattggtggtagtggtcccccgggcccagctgccctttctcttatctctttgtcttgtgtctttatttctacactctctcatcgccgcacacagggagagacccaccgaccctgtggggctggtccctgcagggttataggcatgagccaccatgcccggcctgcttttttctttttcaaaaggactctttctagattat

SEQ ID NO: 570745 - DNA, 406 bp, Homo sapiens
gtaaattagtaaaaatactaatagtccctgatatgcggaaataatggcataagctgtctttctctctgtctcctctccctctctgcctcggctgccaggcagggaagggccccctgtccagtggacacgtgacccacgtgaccttacctatcattggaggtgactcacattctttaccctgccccttctgccttgtatccaataaataacagcgcagccagacattcggggcactactgttctccgtgcattggtggtagtggtcccccgggcccagctgccctttctcttatctctttgtcttgtgtctttatttctacactctctcrtcgccgcacacagggagagacccaccgaccctgtggggctggtccctgcagggttataggcatgagccaccatgccc

SEQ ID NO: 570746 - DNA, 560 bp, Homo sapiens
ctcctgtcaaccctgcaccgactctggaaggctccctcctggaacctccgcctctccggtcccgctgacgagtacagcggaatcaaggaagtgccccaggagccacgtccaagtgtgttcttcccctaagaggccaatcatctttctctctcttttcccacctcaatccttcccttccttcccctcctgacctgtctgaattcccatttgcaccagtttccctttttcacagacaagacaagattccctcagataactaagccattccctggccatgagttactacagtttcggtcattcattcagtggaaaagcgaccagggacagaaggcgccgccataaaggtcacctggcccgagcagacgccaggtcgctgcttcttccttggctgctgacattttaacagcggcccagacagtctgtttccgctttccccaaacaagcaccctggagaccctcccccgacggctcgaggcgagaaacggggcctggcccaggagccggtggccgcgacctcgggtmtgcagtggcgccctctgcaccttgggaagcgcccgacg

SEQ ID NO: 570747 - DNA, 561 bp, Homo sapiens
gaatctcagatttagtggattcagwttttcattttaagaagattcctgggtgacttgcatgcttctgaagcttgagaagaggttgccttagagtctggagacctgctttgattcttgcctccatcactgactcctaccctcacccatgaccttgggcaaggtgctcatcttttttctgttttcagttccttatctgccaaacgaaggtccatctgctgtctttccagatttccggaagcaccagtgcattttatgctcttaaaaagtgtaaagagctctataaatgcaagttaataatacaagcagtaatgattatctgaaaacttaattcttacctaagacctttattccatagcttctattttattagaagttgactttttcttataatttcaacttttattttagattcagggggtacatgtgcaggttacctgggtgtagtacgtgatgctgaggtttggggtatgattcctcctgtcacccaggtactgagcatagtacccaatagttagattttcaaaccttgcttccttccctccttcccctctagtagccccc

SEQ ID NO: 570748 - DNA, 561 bp, Homo sapiens
gaatctcagatttagtggattcagtttttcattttaagaagattcctgggtgacttgcatgcttctgaagcttgagaagaggttgccttagagtctggagacctgctttgattcttgcctccatcactgactcctaccctcacccatgaccttgggcaaggtgctcatcttttttctgttttcagttccttatctgccaaacgaaggtccatctgctgtctttccagatttccggaagcaccagtgcattttatgctcttaaaaagtrtaaagagctctataaatgcaagttaataatacaagcagtaatgattatctgaaaacttaattcttacctaagacctttattccatagcttctattttattagaagttgactttttcttataatttcaacttttattttagattcagggggtacatgtgcaggttacctgggtgtagtacgtgatgctgaggtttggggtatgattcctcctgtcacccaggtactgagcatagtacccaatagttagattttcaaaccttgcttccttccctccttcccctctagtagccccc

SEQ ID NO: 570749 - DNA, 566 bp, Homo sapiens
tggcatgcgcctgtagtcccagctacttgggaggctgaggcaggagaatcacttgaattcgagagacggaggttgcagtgagctgagattgcaccactgcactgcagcctggctacagagcaagactctgtctcaaaaaaaaaaaaaaagatataaaaattaactggcatggtagcatgtgcctgtaatcccagctactggggaggctgaggcaggaaaatcatttgaacgcgggaggcagaggttgcagtgagtggagattgtgcaacsgcactccagtctgggcgacagagtgagactccatctcaaacaaacaaaaaaacagaaagccacatggtcagcaaagcctaaaatgtttgctgcctagcccttcacagtaaaagctggccaacccctggtctagcacatttatttggtgctaccagcttcatcatcaccgccaccttcatcagctgctccttctgtctggaaagttcttccaccggatcttaggacagcatgctcctttgtgggactcggatcacatcttaagtgcaacctcctcagagatcttctgtggttacctt

SEQ ID NO: 570750 - DNA, 564 bp, Homo sapiens
aggtggtatagcaactctggaatattaagcaccaagaaaagaaacctagaatttcattccctgtatccatttatctccttaaatttacattccatagttgaagggattaccctaaagcaggatcaatatttggtttatttcacacactggaatcatctgtagagctcagaaaagcctgaggctggaggagaggcatcagcaaaatttaaactatttcccaaatcttaagctttgagagatactgtgttctgctctagggactgcttttctcccgatgtcatttagctttttccccagcrttctcaatcctctttatttccaaatcagagaatactcacgattgttgttcttttaacgtggatatgagcacttgagcaaatgtagctgctgaaagactttaaaagattttattcactttaatacaccatggctaattggggaaaagagcaaacaagcacattaggattatatctgcaggcctataactgtttaccggcacactggcaacatgttaagtagaatgtgacaatactgggtaatgaggaaaaaaaattcatttgcttg

SEQ ID NO: 570751 - DNA, 564 bp, Homo sapiens
aggtggtatagcaactctggaatattaagcaccaagaaaagaaacctagaatttcattccctgtatccatttatctccttaaatttacattccatagttgaagggattaccctaaagcaggatcaatatttggtttatttcacacactggaatcatctgtagagctcagaaaagcctgaggctggaggagaggcatcagcaaaatttaaactatttcccaaatcttaagctttgagagatactgtgttctgctctagggactgcttttctcccgatgtcatttagctttttccccagcgttctcaatcctctttatttccaaatcagagaatactcacgattgttgttcttttaacgtggatatgagcacttgagcaaatgtagctgctgaaagactttaaaagattttattcactttaatacaccatggctaattggggaaaagagcaaacaagcacattaggattatatctgcaggcctataactgtttaccggcacactggcaacatgttaagtagaatktgacaatactgggtaatgaggaaaaaaaattcatttgcttg

SEQ ID NO: 570752 - DNA, 501 bp, Homo sapiens
tatctgactttgaaatctggtctccaggaagaggaacatcacacaccagggcctgatgtggggtggggggaggggggagggatagcattaggagatatacctaatgtaaatgacgagttaatggttgcagcacaccaacgtggtacacgtatacatatgtaacaaacctgcacgttgtgcacatgtaccctagaacttaaagtataatttaaaaaaaaaaaagaaatctgtgtctcatgacaacagctttaggaaaatagaaatgcttttttgttcaagaaaggcattccagggagaaattgarccttcttaataaatacaagtaagagacctaacagtgccctcagaatttctgtggaggccttagtggtagcctaagctgggctgcataaattgtccatatcaaaggaaaattgctgatggatataattcagcaattgttctcccttgttccctgctgtgctatatccatgccatagctatagctacatccactctttc

SEQ ID NO: 570753 - DNA, 230 bp, Homo sapiens
  misc_feature 72, 225, 226, 227, 228, 229, 230: n = A,T,C or G
cactcctactgtttatcttcttcacagacaacaccgatttctcaaggaaagccaatcacctgaacatcctgngctgtaaatgyacctcattaatttttaaaacattgtagcgctaaatggcagcagcaagtggaatttctcccagccctcaaagatggggaaagcttaaagggcatgcatgagtttcatcatcagtctgtcaacagggctagaaatagaagccannnnnn

SEQ ID NO: 570754 - DNA, 617 bp, Homo sapiens
tggctccatctttacattgtgtgttttgttttcaggacagttttccttgccaatagacaagagacagctgtatgagtttgatatcaaagttccactgttggttcgaggacctgggatcaaaccaaatcagacaagcaaggtaggtgcctgacaagctggtgctgtggacaggtaggcacttgcctgagaaaataaggtgtttcctcctgagataagattggttaggttcctcttcccactagggctgagcagcagaagagtttttaagtggaaacaatgattgcttttttttttccttaacttcccactgctctctgtatctgtattttcaccccacatatacatgtctcattagaatgcatagcttttctttgtcttttgagactagatctttactttgttctggagcagtgactctcaacagaggatgtgcatcaaaattgccctccgaaactgaagaagaaaaatggtacgtgcttgggcaatatccagaaagagtrtgattgactcacttggtctggaatagggacccaacatctgccttttttccttttgaagtttgcaggtgattctgagaggcagcctggtttggggcccactgccttgtagagcagagc

SEQ ID NO: 570755 - DNA, 610 bp, Homo sapiens
agagtggttaactgaaacagactctaaaaataccctttggtagcgtgctcactgaagtattttctgtttgtctaaaattagcagatttgagcagatttgagcagtgtactctcgttttccaaagccttccattaggtgacttcttattctggtgtactttgttatctttctggataacacgtttgatgrgtgttaaaaggtaaagccaggaatggctttactttctaacagaatactttacaaagcagtttccagcttagatacttcctcctacagggaaccttcccaaggtgtttccttggcagtgctcccttccttatcccgccactgtcccacatgtcccacctaggccttgaagggcagaacctgtgctctgttcactgttgtattccagtgcctgacacaactatttgcacagtatttaggtgctgaacaaatatttattgaatgccaaaattggttcatttactaagcagaaagaaaggaaaatattttttgttggcagtgtctgcaaagagatttgtcttttcccatgaaaattgagaagtggggacagaaaagcaagaaagtgggagcaaaagtaattgagatccacagtggctcaggagtg

SEQ ID NO: 570756 - DNA, 632 bp, Homo sapiens
caataatgataactaacctttattatttactatgtgccagacactgggtgttttacacatgtaaatgtattttatcctttattttatcctcaaggaatctgtttgagacagatactcttattatccccattttatgaagaatgagaagttaaagatgaccccaagtttatacagttaaattgggatttaaacccaagccatctgaattcagtgcttattctagaccatcactttgcttaactacctctcaggaagtccaagctctgacaggaagtcaagactgaacattacggttgagagtcatcagtgcagaggtgttcactgcagttatggggatggatgagctttctgagggaggaagcaygcagataggacagcaggtgaccaaggatgaatcccaggggaggcctacaatgagaagtcaacacagggaagggtgcagaggcccaccgagtgtgaaggagactggagaacagcccaaagccttggccttcaaaggactggtttggtgatgggtttgaagatggaagtcagggttaagaagtgaaagctcaggctgggcgtggtggctcatgcctataatcccagcactttgggaggccgaggggggcagatcacttgaagtcaggagt

SEQ ID NO: 570757 - DNA, 632 bp, Homo sapiens
caataatgataactaacctttattatttactatgtgccagacactgggtgttttacacatgtaaatgtattttatcctttattttatcctcaaggaatctgtttgagacagatactcttattatccccattttatgaagaatgagaagttaaagatgaccccaagtttatacagttaaattgggatttaaacccaagccatctgaattcagtgcttattctagaccatcactttgcttaactacctctcaggaagtccaagctctgacaggaagtcaagactgaacattacggttgagagtcatcagtgcagaggtgttcactgcagttatggggatggatgagctttctgagggaggaagcacgcagataggacagcaggtgaccaaggatgaatcccaggggaggcctacartgagaagtcaacacagggaagggtgcagaggcccaccgagtgtgaaggagactggagaacagcccaaagccttggccttcaaaggactggtttggtgatgggtttgaagatggaagtcagggttaagaagtgaaagctcaggctgggcgtggtggctcatgcctataatcccagcactttgggaggccgaggggggcagatcacttgaagtcaggagt

SEQ ID NO: 570758 - DNA, 437 bp, Homo sapiens
tattaaaatctttctctcttgttttcttagactacctaagagtttgttaattttgtttcttttcaaaaagccaactcagttttattgactttttaaattatttttctattgttgatttcatttatttctgctctaatattcattatttcctcccttttaataactttgtgcttagttcaacttgtttttttctagctccttgagatgtatagttaggttgcttatttgagatcttttttcwtttttaatgaaggtatttctccataaacttcccttttagtatctccacaaacttctctctaactacctgttttgctgcaccccacaagtttgggtaagttttgttttgttttcatttgtattgaagtatttgtaatttcctttttgatgtttactttgacccaatgattgttcaaaagtctgttgtttaatttcca

SEQ ID NO: 570759 - DNA, 502 bp, Homo sapiens
tgtattatcagttctttagtctataatgttgcccatttaggctctacagatatattaaaaatattcgttgatgaaataaaaaccaggaggtaataagaaagcctgtaatgtaaaggtttcccatttcttgtgaaagtagctgtggactttacccacagttattgctgcatcacattctgtttgatataatttttatttcatctacagttgtgccataatcaccaaattcccaaagtaaaaatatgttaggtttatatcattatttaaagatactttaaattttattttcctaaattaaattttcaacttgaaatattcttttgtaacagaaggaagaaagtgccattrtattttcactttgggccactattttaaaatattgggcaaacaaagtaacaataaaaattaaagctgagaaactatggcaaagacaaagtaagacaaagaacactgacttagattctgagataaaaagccagtttttgtttgtttgttttatttg

SEQ ID NO: 570760 - DNA, 399 bp, Homo sapiens
taaccccttaaatataggaagtccttgtgtaacactacctgatggttatcttttttcagtgcctgaagatgagtcatgccttatggtttctattaaggcctgtaactagatatttaagacagatgtatctttgcagagatgggttccattcttactgactagaattcgaagagttaaagaggccaaaaaatgcatgccctacaacatggcattcagaacaaaaggcacattgttaacactaagggcacaatttctcctctaccgttaatctacagtgtcttgcaccactctgttgttccactgctgtagcaatatatttaagtggtaatgaacaygctggtggtgcaagaaacagagccaaatgagactgccaaagacaagacaacactgtgctattcc

SEQ ID NO: 570761 - DNA, 543 bp, Homo sapiens
aggtcatgtgactgacttcttgccaatgaactgcaggcagaaaacatgcatgtccyttcatgcctgccccgtaaaccctctacatgctctcctctttcatcccctagctaaagacagaggctccaggaaagaactctgaggctgtagaagatggcagagctacagatggaaagatgccctgcaggactgtgtgtttgtttgctacggctgccataacagagctccacaaactgggtggcttcaacaacaaaaatccattgcctcagttctaaagactagaaatctgaggtcaagatgtttgtaaagtgggttccttctgagggctgagagggaaggatctgttctaggcctctctcctgacttgtagatggccatcttcatgttcacatgatgtattccctgtaggtgtgcctgtgtccaatttcataggaaaaccaatcctattggactagggctcaatctactcctgtatggcctcatcttaactaattacatctataacagctctatttccaaataacgtcatggcctgaggaactggag

SEQ ID NO: 570762 - DNA, 543 bp, Homo sapiens
aggtcatgtgactgacttcttgccaatgaactgcaggcagaaaacatgcatgtcctttcatgcctgccccgtaaaccctctacatgctctcctctttcatcccctagcyaaagacagaggctccaggaaagaactctgaggctgtagaagatggcagagctacagatggaaagatgccctgcaggactgtgtgtttgtttgctacggctgccataacagagctccacaaactgggtggcttcaacaacaaaaatccattgcctcagttctaaagactagaaatctgaggtcaagatgtttgtaaagtgggttccttctgagggctgagagggaaggatctgttctaggcctctctcctgacttgtagatggccatcttcatgttcacatgatgtattccctgtaggtgtgcctgtgtccaatttcataggaaaaccaatcctattggactagggctcaatctactcctgtatggcctcatcttaactaattacatctataacagctctatttccaaataacgtcatggcctgaggaactggag

SEQ ID NO: 570763 - DNA, 543 bp, Homo sapiens
aggtcatgtgactgacttcttgccaatgaactgcaggcagaaaacatgcatgtcctttcatgcctgccccgtaaaccctctacatgctctcctctttcatcccctagctaaagacagaggctccaggaaagaactctgaggctgtagaagatggcagagctacagatggaaagatgccctgcaggactgtgtgtttgtttgctacggctgccataacagagckccacaaactgggtggcttcaacaacaaaaatccattgcctcagttctaaagactagaaatctgaggtcaagatgtttgtaaagtgggttccttctgagggctgagagggaaggatctgttctaggcctctctcctgacttgtagatggccatcttcatgttcacatgatgtattccctgtaggtgtgcctgtgtccaatttcataggaaaaccaatcctattggactagggctcaatctactcctgtatggcctcatcttaactaattacatctataacagctctatttccaaataacgtcatggcctgaggaactggag

SEQ ID NO: 570764 - DNA, 543 bp, Homo sapiens
aggtcatgtgactgacttcttgccaatgaactgcaggcagaaaacatgcatgtcctttcatgcctgccccgtaaaccctctacatgctctcctctttcatcccctagctaaagacagaggctccaggaaagaactctgaggctgtagaagatggcagagctacagatggaaagatgccctgcaggactgtgtgtttgtttgctacggctgccataacagagctccacaaactgggtggcttcaacaacaaaaatccattgcctcagttctaaagactagaaatctgaggtcaagatgtttgtaaagtgggttccttctgagggctgagagggaaggatctgttctaggcctctctcctgacttgtagatggccatcttcatgttcacatgaygtattccctgtaggtgtgcctgtgtccaatttcataggaaaaccaatcctattggactagggctcaatctactcctgtatggcctcatcttaactaattacatctataacagctctatttccaaataacgtcatggcctgaggaactggag

SEQ ID NO: 570765 - DNA, 552 bp, Homo sapiens
atattatgctttttggaaatgcaaaaaaaaaaaaaaaattaggcttcaaatcgttcctcagccttcagacttataattctgtctagacttgcagcatctgattgctccagtggatgggctgttgtctggagagagtcgctctcagtgtgtggtagccagagacaggccttgaagttgggggacctgggcttcagttctatctstgcccctagaaatgcagcatgaccttaaggcaaatcatgttttccactgagcccttgtttagtcattggaaaaaagaaaacatttcttccctcttggtgttgttgggaagattaatcaaattaaattaatcttccaattagcacagagtctggcacggagtaagtgcttaatatgttttctttttaaaacaagaagaggcagattttttatctgggaactgtgatctcacccttctacattggtgttcagtgtctgagggacataggacttggcagccttagtaagacaaacctaggggctgatatttggagtgatggcctgaagaaaaggaattatgagtgttctata

SEQ ID NO: 570766 - DNA, 590 bp, Homo sapiens
aatggctaataaatctgataaaaacgttttagctgccctagtaaccaaagaaatttaaagtagtaatgagatacttaaagtgaatttaaaagaggagaaaaaacaaggaaaaggaaaaatagaagaatattagaatatttgggtgaaaatataggcatttagtgagacacggtcttgaactgcttgggagtgggaatrgggaaattctcacattgctgatattttcagtggatcagaaaagcaatgtgacagtacagactataaacataaaaaaggatcgcatattcctgtactttttactcctggaaaagtttctttagaaaatagtggaaaaaaaaagttgaattgcagcattattttaaatacagaaaaagtatataccttgcaaaagaaggaaggttaaacaaaatattttaaatccatattgagaaatgttatataacattaaacattctatgaaaaaattaatgatgtggggaaaatacttacaacataatgagacatttgatgcaaataaggttcagacacatggtctcggtcatgtacaaataatatgtgatagaaatgaaaactaagtggaaatatataat

SEQ ID NO: 570767 - DNA, 590 bp, Homo sapiens
aatggctaataaatctgataaaaacgttttagctgccctagtaaccaaagaaatttaaagtagtaatgagatacttaaagtgaatttaaaagaggagaaaaaacaaggaaaaggaaaaatagaagaatattagaatatttgggtgaaaatataggcatttagtgagacacggtcttgaactgcttgggagtgggaatagggaaattctcacattgctgatattttcagtggatcagaaaagcaatgtgacagtacagactataaacataaaaaaggatcgcatattcctgtactttttactcctggaaaagtttctttagaaaatagtggaaaaaaaaagttgaattgcagcattattttaaatacagaaaaagtatataccttgcaaaagaaggaaggttaaacaaaatattttaaatccatattgagaaatgttatataacattaaacattctatgaaaaaattaatgatgtggggaaaatacttacaacataatgagacatttgatgcaaayaaggttcagacacatggtctcggtcatgtacaaataatatgtgatagaaatgaaaactaagtggaaatatataat

SEQ ID NO: 570768 - DNA, 547 bp, Homo sapiens
cactcccatttcccttctccccacagtacttaaaacctcaatgactccctatggcttttgggataaagtttgtggtatggctttgaccccagcctctgtctctagcttaaaggccttagagatgggctcttgctctgttgcctaggctggattccctcacgaaacttgtgctctgaccacccccaaattcttgcacctccatgaatacattgtgctacttcatgtcttcaagccttcccrcatgtggcttgctcaagattttctcctcattaaccctttaactttagcttacactgggcttctaatctcagtggctacagcattttttgttattcatatctcagcagtgacagtaattattgatttgctgagctatctccctccacttaggctatgatccatttgactcagagatgattatcctgcttacatccctggcacctaagaaaatgtctggtatatactaggtgctcaataaacacttgttaagtagagataataaattcataaatggtaattgaggtgatttcatagcttcattttaatt

SEQ ID NO: 570769 - DNA, 554 bp, Homo sapiens
aaatatgatgtagtcatagagcagaattaaaatattgatgtagatttcyaaaaagtgaaaaataaagatataagaccaaaaaagtgagcagcattatctcttttacataaataataaaaaagaacacacatttatatatgtgtgtgtaaagaagtttttgaaagtaggaagctcctttggcaaatttaagcttaaaaaataaagaaagcaggaagcatatgttaagtagacttttactttctgttttgtatatttctgtctgatttttgttttaccatgtgtatttattatttttacataagaaaacatttatatgagaaaaagtatcagcagagcttacacagtgataggattatacatcatgatttcctctttaaacatctttataattatcaaacatgagtgattaaaaaaactgaagctaaaggtagcaatattctctatactggcagatttttcagcattgcatatgaacccacctccggtaagtgggttatctttctaatttatgacttcagtgaaatctgtttcctggcaatggttgccagggcacg

SEQ ID NO: 570770 - DNA, 619 bp, Homo sapiens
taaaattatcaatgtatccgtwttaaaaatttaaatagaagatccaaccattaaagtgccgctgatagaccctgaaggaggtctgcctctcccaaaggcagacggcaaacaatataggctacagacacaaacactgggacttcgtattaattgtgctgccacacaaagggggtgtggtatggggttgaggggctcactggccagtttttccatgtttctcaaataaaactctggtgtcatcaagaaacatggtggagggagacatgaagactttagagacaggaaccactgcagaaatgtaaggattaggaagtagaataataccccaccctggggctgagacttcggggaggggacggcacatcactcctccttttccttcccgtgcccagccatggctgcacctttcccaggctggatatggtggacatgtgggaggtgtggacaaagacggtagaagagaaggagaagaacgtagaaaacaaaaggggattgagctacgctaacactggagatgcagggtggcttcagatccgcaagacatgttttgaattttctgggaccgtaatgatcagaaggcagatactaatgagaaaatttttgagcccatgaagatttt

SEQ ID NO: 570771 - DNA, 619 bp, Homo sapiens
taaaattatcaatgtatccgtattaaaaatttaaatagaagatccaaccattaaagtgccgctgatagaccctgaaggaggtctgcctctcccaaaggcagacggcaaacaatataggctacagacacaaacactgggacttcgtattaattgtgctgccacacaaagggggtgtggtwtggggttgaggggctcactggccagtttttccatgtttctcaaataaaactctggtgtcatcaagaaacatggtggagggagacatgaagactttagagacaggaaccactgcagaaatgtaaggattaggaagtagaataataccccaccctggggctgagacttcggggaggggacggcacatcactcctccttttccttcccgtgcccagccatggctgcacctttcccaggctggatatggtggacatgtgggaggtgtggacaaagacggtagaagagaaggagaagaacgtagaaaacaaaaggggattgagctacgctaacactggagatgcagggtggcttcagatccgcaagacatgttttgaattttctgggaccgtaatgatcagaaggcagatactaatgagaaaatttttgagcccatgaagatttt

SEQ ID NO: 570772 - DNA, 316 bp, Homo sapiens
cattaatcttccattcaacaagcaacaatgtgtgttagacactgttcggggaatgctgatattgtagtgaacaaaccaggtgtggttctgtactcatgggtgggaaagatattggatacatacattgttctgcacaatgtaaacattttgttgcagtatgaagtgcatacagaaagtrcacaaataagtgcacagctcaactcattttcatgaaacgaatgcacacatataattagtacccagtccaataatcggaatcttaccagaaccccagatgccttcttgtgcctccttccactcacagtcacttccaagg

SEQ ID NO: 570773 - DNA, 594 bp, Homo sapiens
ataaaaatgaatcaggcaagtcttgggcatatataaaagaggtacaggcttgtccaatgcttctcttccccagcctcgctctctgcaccctctcctgtccactgtggtctttcaaacactagacaataaaggrgcctgaatcaaaatatctctctcctatagaatcattttcttcagagtggagtggtgatatttcagcagaaaaattcacattacctgtatacatgctataaaaagcataaagctcttcattaggacaaaattaaccttggggctttagagatttctaaaaacacagcaaagtaaaaccaagcctcagaaatttacttcaagcaatttttgtgtttcgcataatttaatacatgatcacaaatgttttagtaactaaaactaacgagactgacaagaaacgaccatcttctatatctccaactgccttctcttggtctcctttgcagcatcaactactacctaaccttaggtggattcaagagttccccagggttcaaatctcgattctcttggcttcttactcccataaccccctgcaactgatcctgaacacagccagggcttcagcaactgcccatggcc

SEQ ID NO: 570774 - DNA, 576 bp, Homo sapiens
ggtgatatttcagcagaaaaattcacattacctgtatacatgctataaaaagcataaagctcttcattaggacaaaattaaccttggggctttagagatttctaaaaacacagcaaagtaaaaccaagcctcagaaatttacttcaagcaatttttgtgtttcgcataatttaatacatgatcacaaatgttttagtaactaaaactaacgagactgacaagaaacgaccatcttctatatctccaactgccttctcttggtctcctttgcagcatcaactactacctaaccttaggtggattcaagagttccccagggttcaaatctcgattctcttggcttcttactcccataaccccctgcaactgatcctgaacacagccagggcttcagcaactgcccatggcctgatgtttgcgcatttgttccctgagctcagaccttccaaggtgctawctcctgagtggaagacacacatatccaactatcgatcagctccctctcccataagcaactcaaacttaactcatgatttttctaacaaaccagtttcccacttccataatcctccattt

SEQ ID NO: 570775 - DNA, 445 bp, Homo sapiens
aagccaactgtgtgtttgaaacccttcaggtctcttttagaagttctctggcttctctgtcctcagattctcggctctgccatcagctcacctctctgctctytcaagtcttagcccctccgattctcttagccttgacagcccaccactgccttcaaacaggtgatttctgcatttaatttgggctttcttgttttgctgtagttccaggtgatgtggagtaacagtgcacagtgactccatatcacctggaacaatggaaacattttaaattgcaattatgtaaagtaataaaggaaaaaaacccatagtgctgttataagagggaatattaggagtctgtggctcaagttcactgtgttctgtagaaacactgtagtttatcaatatcatacctgagccttcagcacatagacacagaattagtgaaagaagccagcagcta

SEQ ID NO: 570776 - DNA, 520 bp, Homo sapiens
ttttacatcacacgtttcaattctgagacagaatttggctgaagtatttaagattttcttatggttttgagttgtttaaatgttgatacatatatttccaaatatgacctcattggagagtcagtgtatttggctgacaattaaataaagtttataagcttacaaaaagggatgcatactacagccaagttgaaaaagtaacacttgggcacaaagctacttggcttactttcattgggttgtcttttgtgatattaggcaaataatttcattttttaaaatttctgctgttgggcaaatgagcctgttgttgaggcttactcatatgaatgtttamatttttctcctctgacatcagtcattcatcaaaaccacctgggtatccaaaacctatatttatggtttcactgtattatggttttgcattattcatctgctaaatatcttttgagtaccattgttcatcattgcatctcagtgcctagaataggaagaagagctaacaagaatagttcctaat

SEQ ID NO: 570777 - DNA, 552 bp, Homo sapiens
taggaacagttatcccaaatttctttcttaacacatagtattattctttccaaagtgactaaaactaagaatttttgaataacgtttatttctgtgataaagtaattatgtacaagttagaagttatgctagggggcctggaaattctcggacagaaattctattttctcataatttcatggcttttaaatatgtcgccattgcatagagttttcacagcagctggtagagatgtaatattaattttatttgcctaggaaagggaaggaagtagctggccattgtgtgtatgtgatgtagtagggaagactaggttactctgaagtagtttcgagcattagtaccttargtattgcattgaattatttaagaaggtggggaaagttcagaagaaaatgattggaatgatagtaccaaaatttcagtgaggtatggttagtggaattagaaatatttatcctggacaccataggagaatataaaactagtttcaaatatttggagagctgacaagtagaagataaattaaggaattgtttgtattgtcctatg

SEQ ID NO: 570778 - DNA, 585 bp, Homo sapiens
gggtttgggccttagattgcccactgactgtttatactattgaaatgagccagcatattgccaccccagattttaacttaagtaagagtgcagatgtgcataaatgtatgatttaattaaaagcaattttccaaggcccttgcgtggytagattcctctgtggaatggcaatatcagtagacaggacctatttctactgccatggactcctctttttcattcatttgaagcagaggggtagatttgttgcaataagataaagaagaaataattaacttacgtttggactttttgtgactttggcaaagtttattctgaaacaccagattcaaatcattctcggggcgacagtaagaattttcccctgcagtcctaacgcctcaaagcttgcccattatatggcatgtgcttttgggagtacctacccctcatctctaaaatgggggaaattttgtaataattgggtttgggggaaaagaaaaggagaaatttgttagcagtcaacaaatttggattctaaacctaatgccttgtctacccctgctaatgtctctgtacatgtctcttagatatttttatttcact

SEQ ID NO: 570779 - DNA, 600 bp, Homo sapiens
tcaggtcatgattcctctaaaggcatattattggattattttactgtgggtctactttattaggagaaggccccgaaagggtgttttgttttgttttgttttgttttgttttgtttggagggacgtaatactagggaaaattctttttgtcacaggttccctctcccagtgaccctaacttggaggcctctttaggagtcccagagactctgagagggtcacactgtaccttgaaacagtttttggcgtttgtataaagctgcggatgcgctctgtaggaggttgctatgacaatttgcaaacagtagagtggatgaaactccgcaggaggtggctcccttccractggagtctgcactagttcgggcctgcacagtaggtccagccaggagccagagatactcgggcggggcagagcataatggacccctggccccaagagaacttcagaaactaggcacctctcgagaaggaagtgcatggcataactctgccccgtcatccgggatttgtcgggctttcccaccccacctcctctcacagttgaagtggcaaaacctgtgacctttgaacagaggcgcactgtgtgccacgcacgac

SEQ ID NO: 570780 - DNA, 538 bp, Homo sapiens
ctcgcacaactaagttatctacatgatgaattggggagaggggagtggctaagtcgctgggaccgagaatggggggacggggaagcagtactgtctgtgagcagccattcagttcgaagagctgaaaatgcatttatgtttaggggtgcgcatggcaggggaggggtctctgcggcgctttcggccggagggcagcagcggtaggttgagctgtagggcagagaaggggcgccgcggggccggggaggggaaaaggtcgccggagtggagccgagggaagcagtgcagatggccggagggggcggaggagggcgagcggagggcgcggagttttccggggagcrgaggggcggctgcgcgcaaaccgggggactgagagtagccgggcgggaggttgggtgggggtggggtgtgcgtggccggggccgggggagccgggggcggggcctgcggcggcggaggagggcggcggagggcggcgggggcggggccgcgcgccggcgcctgtgtgtgagtgcgcgggggcgcgcgcgcgcgg

SEQ ID NO: 570781 - DNA, 651 bp, Homo sapiens
cacaggatattagggaagaataaatatatcagttaaagactttacctcctattctaggaaagggatttgtacatttttgttgtatgctggatagtagtatcagattaaatgaaattatgacctagwtgtctttatttggagatcaagtatggtttaaagagatgtttataagaaacaagttgacaagggatggacttctgatggttaattttatgtgtcaacttgatgagctaagggatgcatgcccaaacagtgggtaaaacattattttggggtgtgtttgtgagggtgtttctggaagggattaggatttgaattggtagactgagtaaagaagattgccctcccagtgtggaatcatctaatcagttgagggctcaaagagaacaaaagggaggaggaagggcaaatttgctctttctacttgagctggaacattcattttctcttgccctcagacatcagcactatcagcacttctggttctcaggccttcagacttggaccaggaattatatcatcagcccccagtttttgggcctttgggtttggactgcaactataccactggctttctgggtctccagcttgcagatggcagatcatgtgacttctcagcttccataattgcatgagcgaatttctcataat

SEQ ID NO: 570782 - DNA, 554 bp, Homo sapiens
aaaacttacactagctaaactatccacctttatgtcccctgctccactaatgaatactctcctctagccaaaccttttctccaacactccttttattttatcctcttgatttttttctcatgccattttctattgttcagcaagagcttttcctcctgtcaccaaattcatatccacttttattcattaaaatatttttgtaactagcaaaagaaaacccaacacaaagtggattaaacaaaaagaaatttcttggctcaagtaaactaaaagtccaaagtaaagcacattcaggcacagtttgattcagaagttcatgatgtcatttattttgagatgatcttggctctgtgtgttgatttcattctcaggctggtttccttcagaatagcagaaatggctgcaagagttctagaccctgtgctcagttgaatcgtgttccccccagattcctgtccatctgggacctgagtatgtgaccttatttggaaataggatcttggcagtgtaattgcattaakatgaggtcatattgaattaggatgggtcctagt

SEQ ID NO: 570783 - DNA, 606 bp, Homo sapiens
tattttaaggcaaaatatttatgttgcaatagttacatcaatatcaaatatatttaacatgaaactcctagagaaataaagcacctgcaaggaactccccccaaacatgcttcagaagagcaatcttgattcagaaagataatctttagtaatcatatgaactgccactaagggactcctcaggcagagccttccctaatgagcatagccagggagctctgagtgctgccrtctccttacccgcaagccactgggaaatgcatcagccccttgctcccactgcataaagcaggaaataatacatttcaagaagctacgtcttcatattcagattcacattacagggaggttaaaagaagaaaccttgtttgtgttagttgcagatgtatcccaagcacctgaacaatgcctgcaacatatacgatgttcaatgagtgaatgatggcacagagactaggtaggctgctgcctgccaaatggaggactttcagggtcatagtagagcagcacagtcaagggggattttcctgaaccctgatctaccatttctaacttcctgaattgtttttgacctttccttctctccactgaagaaaaaatgttaat

SEQ ID NO: 570784 - DNA, 598 bp, Homo sapiens
gtcatccttttttttttttataaaaatgtaaaaggaaccagggttgttattttaaggcaaaatatttatgttgcaatagttacatcaatatcaaatatatttaacatgaaactcctagagaaataaagcacctgcaaggaactccccccaaacatgcttcagaagagcaatcttgattcagaaagataatctttagtaatcatatgaactgccactaagggactcctcaggcagagccttccctaatgagcatagccagggagctctgagtgctgccgtctccttacccscaagccactgggaaatgcatcagccccttgctcccactgcataaagcaggaaataatacatttcaagaagctacgtcttcatattcagattcacattacagggaggttaaaagaagaaaccttgtttgtgttagttgcagatgtatcccaagcacctgaacaatgcctgcaacatatacgatgttcaatgagtgaatgatggcacagagactaggtaggctgctgcctgccaaatggaggactttcagggtcatagtagagcagcacagtcaagggggattttcctgaaccctgatctaccatttcta

SEQ ID NO: 570785 - DNA, 627 bp, Homo sapiens
ctcccatctgcttctcttcctctttactttctcatcatgaggcctggctctagttagggacagtggccaagcactaactcaagcagttacttcatcaggccggacttcaccaatttttcatttctgagctgctgacaccaagttagtcatccttcctgaatctctctgaaaaagctggccctaggcaaatttgtaaagtaggtcagatatatgagtgctgccatacacactttcagtgctttctcatacacttttgtcacccttctgcaggggtaccccatacattggacttcgcaattttctccctttactcccatccttcaggaagtccatatccagtgtccttttttccattgcgtcatttctaggagaaatctggtagaaaaattctagcaaaatgttactcatagacaataaacatttagtatttcatcctctatggaatgagtttcaagatttatgtttctgtgttctgttgttaagataggcacgtggggcagtcccagcaaagtcatcagctgaaactgtgagttgaggcacttgtaagtagagttggctgctctcttaaatgctagaatttgaaggaatttgatggcatwttttaaaaagaaaggaaactaacatttc

SEQ ID NO: 570786 - DNA, 591 bp, Homo sapiens
agaaaaaaatttaaaacttagatgtaaatttaaatcagaaggtaaaagacttatatactgaagactataaaacactgatgaatgaaattgaagaaaacacaaataaattgaaaaatatcccatctctatggactgaaataattaatattattaaaattcccatactacaaaaaataatctacagattcaatgcaatccctataaaaatttcaaggtcatttttcaaaaatggaaaaatcaatcctaaaattctgtggaaccacaatacaccccagataaccaaagtaatcttgagcaaaaagaacaaagctacaggcatcatactacctgatttcaaaatgttttataaaagtgattataattaaaacagcataatactggcataaaaacagacacatcgacctatggaacaggacagaaagctcagtaataaactcatgccttcatggtcaattgattttttacaaaactgccaagaacccrtaatggaggaaaaacattctattcaataaattgttcaaggaaaaccagttatccacattcagaaaaaaatgaaattagacccttaccttacactatgctccaaaataa

SEQ ID NO: 570787 - DNA, 540 bp, Homo sapiens
cagtaaattttcctctatcccttcattttgagcctctgtgtgtctttgcatgttagatagctctcttgaagacagcgtacagatggatcttgattctttatctggtttgccattctgtgtcttttaattggggcatgtagctcatttacatttaaggttagtattgttaggtgtggatttgatcctgtcatcatgatgctagctgattatttttgcagactagtttatgtggttacttcatagtgtcactagtctgtgcacttccatatgtttttgtaatggctggtaacgatttttcctttccatatttagtgcttccttcataygctcctgtaaggcagaggtttaacatcccactgacattattaggcagttcattgagacagcatttgcctgcctaagcatttgcctgtctgaaaaggatcttatttctccttcacttataatgcttagtttgtctggatatgaaattctgggctggaaattcttttcttttttttatttttattttttgtttttttgtttgtttgtttgtgttca

SEQ ID NO: 570788 - DNA, 511 bp, Homo sapiens
agttcatgtcctttgcagggacacggatgaagctggaaaccatcattctcagcaaactgacacaggaacagaaaaccaaacaccacatattctcactcataagtgcaattgaacaatgagaacacatggacacagggagggaaacatcacacaccagggcctgttgggggttggaggctaggagaggaatagcattaagagaaatacctaatgtagatgatgagttgatgggtgcagcaaaccaccatggcacttgtatacctatgtaacaaacttgcacattctgcacacataacccagaacttaaagtataatttaygaaaaaaaaaaatatatatatacacaaattaaaaaaaagaattatctatttgtaaactgtggatttctttggagcattgtcctcataaactttttgtatagcattaatgatttcagcattcttccacccaagcttcactgcaaatttgttgtttgttcttgtgtttattttaccagaatttatgttgctctg

SEQ ID NO: 570789 - DNA, 511 bp, Homo sapiens
agttcatgtcctttgcagggacacggatgaagctggaaaccatcattctcagcaaactgacacaggaacagaaaaccaaacaccacatattctcactcataagtgcaattgaacaatgagaacacatggacacagggagggaaacatcacacaccagggcctgttgggggttggaggctaggagaggaatagcattaagagaaatacctaatgtagatgatgagttgatgggtgcagcaaaccaccatggcacttgtatacctatgtaacaaacttgcacattctgcacacataacccagaacttaaagtataatttacgaaaaaaaaawatatatatatacacaaattaaaaaaaagaattatctatttgtaaactgtggatttctttggagcattgtcctcataaactttttgtatagcattaatgatttcagcattcttccacccaagcttcactgcaaatttgttgtttgttcttgtgtttattttaccagaatttatgttgctctg

SEQ ID NO: 570790 - DNA, 545 bp, Homo sapiens
gggggctgaagtccacctacgctccacttaaccccatatactcagaatgcgcagtgcggcatctgtccactgggggcgtctttttcctcgaattgcgctagggctccccagcggctaacagtagccacctgcgcttgtgtkcgcgttatgtatcgtttccatccttcgtggcttgatttagttctttatactctcgtcctcatatctggattatagatcgttcccacagtgtcttcacacttgacctgcaaccaaaggatgctcaaagtcgggtaaatatatagtatctaataaatttctgtaattctcaattcttctacagtggcatatgctcattcgaagaatttgagtatgtcattctcaatttgagtatgtcatgtgtattatatttgacataaatatacaacttctaaaccaatattttttgtatcattccactcagaaagtatccagtttaagacaggagaatacacaattataatgtttaaaaaactgggatggggtcaaaggcattggaaaaatattttaatatggagattacggac

SEQ ID NO: 570791 - DNA, 523 bp, Homo sapiens
atcagaatgactcgtgagcttctatcatataaagatgcctggacatgacacacagatattctgatttcagggagtttgtgctgtggccttgatacatgtgatttccaaaagttctccttgggattctgaagcacaaagtagttgagaaactgctatttaatatatgatactttttttctcccatcacctattccccatcattaggccagaaatttgaatttttaagaaataatagtatcaataatacctataatgtgtagaatgaaccctctgtaccagacactctgaaaagcactttatatacctcctttacttaatccccacaaggaatctatcactctggtgttctccccatgaggatttagaaccattaagtaaactgtgcaaaattatacctatggccgggtgcagtggctcatgtctgtaatcccagtactttgggaggccaaagcaagcaaatcgcttgagctcaggagttggagaccagcctaggctacrtggtgaaatcccgtctcttcaaaaa

SEQ ID NO: 570792 - DNA, 602 bp, Homo sapiens
agacttcaacattgatcagtctgctatcttgaattgaaagtgttgtctgtgctccttgaaaaagacacaactaaaaaaaagtggcaagtgtagtggctgtgaaaacacccctctcagatctgtgactacaagaagcggaatgactgaggcccaaattctctgttagtcacattcacctgcgttcacgcacctacaggctcccagctaatgacaattacacggagggctgctgcyctagaaagatgcaggatagctctgacctgcaacttttgcccgatgttttccacaatgactttgctgaactttctttacaacatcactaatgtctaagatgctcccatacagccttccttttctgtctccttctctggatccctcttccagcctcttctggctcccttcccattttttctcactggcattttcctactacatttcttgtgtaatttaccctgtttctgtgtctttttagcaagaacttggaggaacacacaaagacatgaatacatatacatgtgtgttatgtatgaaaactgagaggaatctagcatggaagtttgctgtattttgagcacaggaacaggctgaggagtttgataggg

SEQ ID NO: 570793 - DNA, 601 bp, Homo sapiens
tatttgccaattatataatatataatataaatatatgtataattatatgtaatttatattatgttaatatattatatattatattagttggcaaatatattatatattatatattttatatatcatagaattggcaatatataatattaaatatatttatattattatataatatataattatatatatatatatggcacaggcatagtacaaaagtgagtgattaactcttttggggaagtgggtaatcaaggtaggaatacagaaawgatgacaatgaatcagggttttgaaaatgagcagaatctggggtaaggtcattccaggatggaaaatatcatgttaaaaagcatgaaggtatgaacaatatggaactgagagcagttttaatttttcataaagacaacatttatttttcaccttaacatttatttttaatatgccttacttaggttaagagaaaacaaagatttataaagccaagtgtcccttttattattatactttcttttcacataaccttttcagcctagattcacgtaacttcctgtctctcccattaaaggagaggggtcctgcacattacaacaggcaaaaaagg

SEQ ID NO: 570794 - DNA, 584 bp, Homo sapiens
gaaggatgttccatctggtggagaaagcatggtatgagagaaaggttaaggcatgaatcttgacccttcttcccactcccacccacccccaaccacccccaaccaccataatgactacgtaaatttgtacaactttgatgacctctgctagccctacttattttctctatgaaaaaaatatgctatttttctgtgattacccagctgtatggaccagccctatactactttccataatatttaacattcaaatgtttacattttaaaacattcaacatgcaaggagcagtatgtaaaaatttgacttgtgaccctttgatatatttatttatctttgagattatatttactcccattcattaarggatagttcagaggtatagaggtgcattttttgattgccttctgtttacccttacattttttttttgaaaatttcacatagaaaattgattatggtatgtaaaagtggtaataaaaaagcaaagaaaagacagctaagaataacttttaaatggcatttatgtttatatattacttttgtttctcttttcaggtttggagtttcagcactataaactcag

SEQ ID NO: 570795 - DNA, 676 bp, Homo sapiens
tttaaagctctatataatagactaaaaataaatatactaagaaaaaggcgtaatccttacttgaaaccttgagcaaaaaaccaggaaccaccccacaatgtccaygtgcttaattatttattattggcttttaaattccattaactaatagcataggcagtaagtaggatgatgctgagcctgcttaatgagcaacatttacaaaaaggcaaatgctcttctcacacaccctgggccccagcttcaagacaaatccgtctagagaagcttggtgtctggatttgcctgagccaaatgttttaccaagaacaaggccaatgacccaccacccttggcacagtggtagcaatagaactggttaagccttatctgtcttttttttcctgtagctgatactattgtcggactaccttgaatcacatcctcattccttgctgcaaagccgagattttgttgtggcatcctccactcaggcatgatgatcctataccaaactcagatgcaagcccatttgtataaagctagttaggctaatcccattctccttgccaatggatggtttagaagtgggcatctgctgtgaagtggagattgcagtggtccgagattatgccactgcactccagcctggcgacagagcgagactccgtcttgaaaaaaataaaatgaagtgggc

SEQ ID NO: 570796 - DNA, 676 bp, Homo sapiens
tttaaagctctatataatagactaaaaataaatatactaagaaaaaggcgtaatccttacttgaaaccttgagcaaaaaaccaggaaccaccccacaatgtccacgtgcttaattatttattmttggcttttaaattccattaactaatagcataggcagtaagtaggatgatgctgagcctgcttaatgagcaacatttacaaaaaggcaaatgctcttctcacacaccctgggccccagcttcaagacaaatccgtctagagaagcttggtgtctggatttgcctgagccaaatgttttaccaagaacaaggccaatgacccaccacccttggcacagtggtagcaatagaactggttaagccttatctgtcttttttttcctgtagctgatactattgtcggactaccttgaatcacatcctcattccttgctgcaaagccgagattttgttgtggcatcctccactcaggcatgatgatcctataccaaactcagatgcaagcccatttgtataaagctagttaggctaatcccattctccttgccaatggatggtttagaagtgggcatctgctgtgaagtggagattgcagtggtccgagattatgccactgcactccagcctggcgacagagcgagactccgtcttgaaaaaaataaaatgaagtgggc

SEQ ID NO: 570797 - DNA, 512 bp, Homo sapiens
ggaaacattattcccttctcaactccttcctacatagtagagttgccggctacctaaaggaaagaggatttgtatagaacctgactttcttgaccagcataactttgcaaaattctggcaatagatatttaaatttttattctcctctggaagaagcaagccataggatggacttggtagtgccttttatttgtttgtttattttgagacagagtcttgctctgtcacctaggctggaatacagtagtgtgatcttggctcactgcaacctctgcctccgggttcaagcaattctgctgcytcagcctcctgagtatttgggattacaggcatgtgccaccacacccagttaatttttgtaatttttgtatttttagtagagatggggttttcccatgttggccaggctggtcttgaactcctgacctcaagtgatctgcccacctcgccctcccaaagtgctgggattacaggtgtgagccatcacgctcggccggtagtgcccttttgtt

SEQ ID NO: 570798 - DNA, 592 bp, Homo sapiens
tctgcaaaggacgttgctgcatgtactttttttattgctgtatagtattccttggtgtgtatgaaccatatttcctttattcagtctaccattaatgggcatttaggttgactgcatccctttgctattatgaatagtgctgcgatgaacatatccattaatgtgtctttacggtagaaaaatttatattcttgtgggtgtacacccagtaatgggattgctaggttgaatgttaattctattttaagttctttgaggaattgccacactgctttccacaatggctgaactactttacactcccatcagcagtgtataagcattctcttttctctgcaacctccctagaatctgttaytatttttattttttaataaccattctgactggtgtgacatggtatctcattgtggttttgatttgcatttctctaatgattagtgacattcggcatattttcatatgcttgtcagctgcatgtatgttttcttttgacaactgtctgttcacatccattgcctacttcttaatggagttgtttgctttcttttttttttctaaatttaaattttataaagtaatatgtgtacat

SEQ ID NO: 570799 - DNA, 561 bp, Homo sapiens
ctaaaaattttaaaggaaaatatacatgtatgtaattttacatcacctaaaccagactctaatagctattaaagttattcatttaatctattttttttctggttatagaacaataattggttatacttttaattctaagaatattttttctttcatagaaaatgagccttcaaatagttactgaatatactttatataccatatcttttaaacaaaatctcataatttcattgttttcatttaaataaaagatgaccctgaaactggatgatgctctttctctcttgtgtctttgttcaaaacattcatgtatattagtggccagtaaacttcacaacaatccctttgtagtttagccttcttccagaaaatccttagtcttatagccatagsgattctgctttctttcataaggctgctttctttgggcacaatgggaaacattcttatcacacatcgtgttatgaggctggtgctagcacatttgaactgaatgtttggtgtgttttacaaatattcactatgtctccaggaaaaacactggcatgaaaaggtattcac

SEQ ID NO: 570800 - DNA, 561 bp, Homo sapiens
ctaaaaattttaaaggaaaatatacatgtatgtaattttacatcacctaaaccagactctaatagctattaaagttattcatttaatctattttttttctggttatagaacaataattggttatacttttaattctaagaatattttttctttcatagaaaatgagccttcaaatagttactgaatatactttatataccatatcttttaaacaaaatctcataatttcattgttttcatttaaataaaagatgaccctgaaactggatgatgctctttctctcttgtgtctttgttcaaaacattcatgtatattagtggccagtaaacttcacaacaatccctttgtagtttagccttcttccagaaaatccttagtcttatagccatagcsattctgctttctttcataaggctgctttctttgggcacaatgggaaacattcttatcacacatcgtgttatgaggctggtgctagcacatttgaactgaatgtttggtgtgttttacaaatattcactatgtctccaggaaaaacactggcatgaaaaggtattcac

SEQ ID NO: 570801 - DNA, 533 bp, Homo sapiens
accctgagctatgcctctttctaaaagttcagaaacttttgcatgaaaaatgatcaactgaaagtcatgaaggccaaattccatgtaagtcgctaaaaaaagagaataagatgcaaaacaacatcctcacagaaaatgtaactatgtcataaagacatgttcaaaaatcagattatacctgtaatgtcctaagtgcttgaaaataaaacagcacattacatgcattaagaaaatcatataatgtgaaatagtaacattaaatattttttaaaactcagataaaatgagggaacacaggagatttttagaaataaaataattttataaatgaaagctgaactagaagaaacagaagtgaataaatgcaacaataaaatgcctatgccttaaggtaaatagaagatagaaaggatatatatatatatatatatwtatttatttgtgtgtatgtgtatatatatatatgtgcattatatatatacatatgtgtattatgcatgtatatatatacacacacacataaaaaatcaaaa

SEQ ID NO: 570802 - DNA, 516 bp, Homo sapiens
ttttgaatttaaataatttcaggtaggaattttatttgtttttggattttcatctctgtttgcctgatgccttgaggtaccaatagcctagtaccatttaaaataaattattgcttatatgttttattaattattcaagtgatgtgaatttagtttacaaatccatgtaaagaataacttattttcgtgaatattcaggagaaatttttctgtttctccacttaaaaccaagactggaggcagacaatttgatttattttctggggatggkttaggtctagttcaaatttattttgaagttgtagttgtttggggttcctgcttcattaaaagattcttctattagactcctagcttgagtattcctttaggatttgtctcttctttcccattctttgaatcttggaaactgaagctcaagttcagaactagttagtttcttgttagctcactgatgtaagtaaaactttctaaaaataaaaatctgatgtttacagttgtttttaacagtagtga

SEQ ID NO: 570803 - DNA, 436 bp, Homo sapiens
tgacatgggctgcaacatgaatgaaccttgagaaacattttgctatgtgaaggaagccagtcacaaaaggacaaatgttgcatgattccatttacataaaatgtccagaagaggcaatctatagagacagaaagtagactggtaatggcctggggctgggcggagatcaggaaatgggaaaggactccgcatggtacagrgtttcttttttgggtgatgaaaatggcttagaattagacagcagtgatggttatacaatcttgtgaatatacaaataaatactgcattgtatattttaaaatgtaaacgttacagtatttgaatatacctcaaaaagaaatgaggacaacaggatccaacgaacaggtggttctgagcatgaaataaaacgtctgcaaggctcttagcacagtgcctggcaggtagtttgtgctca

SEQ ID NO: 570804 - DNA, 464 bp, Homo sapiens
ttggggcaccccagccagctggcactactggccccagccagtcccaggcaatagagggtaggccttagaaaatgtcarggaaagcactccaaatcccagagacacttcagcacagggtcgaagctcatactcacactgcctacatcctcaaagcatggccctctccacacaccctcaaccccattcctcagagtgagcatcctggtccggtgaaatgtttaaatccagcaaacgtctcctggacaccttccataaggcccccactgtgggagtaaaggggcagagactgggtatgggctagaacaagcttcccactgggaggcaggatgagcctgatagtagtaaggctacagggccaggcctaggggggcatgaaggcacatggcatggccagggggaagggacaggggtgagcagcaggtgcacaaagagattcaggagagagagagacagggagccaatgg

SEQ ID NO: 570805 - DNA, 536 bp, Homo sapiens
gccccagggagcccggtttataagagccactgccaccgtttgtccatcgctcactgggacgctgctttgtgataaacattttgcacagttacctcagttagccctcccgctggcactatactgacggctcccttttcagatgaggaaccggggctcggagaggtgaagtcacttcttcaaggtcactgcagtcagaggcggagctgccctgaggctaattgaagcttaagtttcagacccttgcaaggcccggacctaatttttgcatttgtatttttgtgttcttttcctttaaaagccccctcccscgacagtaggagggtcaagccccttcaaaatggatctctctgaccgtgacctggtctgtctgctgtcctctgtggcactgcctcggcatgggtggggatgggggggttgctggggctgggcagtgccaacctggcatggagggaaggacgtccagatttggtcaaggggcccacatgacctttgcatgagtcttggcagactccaaacagcctgctgtgcagcggagc

SEQ ID NO: 570806 - DNA, 435 bp, Homo sapiens
tgaggaccccaaaaagctcagtctcctgtgttttactcagagtcatttggcctctccacctctgcattacaaggctgtgtttgtgccttaagtgccagcaggtgctctttgaattttgattctcatcttccctggatctccagaggcttcctgaagtgaggctgtgtggcctgggtagggtgctccaactgttcctttcctaccagaataggagaggaactgyctggggattctccttctgaacccaagcctgcgggtctttgacagggatcccccaggtgagagagagagcacacatgtagctgcgtctgtgatgagagccactgccctctggggcgggctccttctctgctaagccgtgggcttgcacagggaaggggtcccccacctggctatgctcaggtctcctctgcccaacctggcacctgagagaca

SEQ ID NO: 570807 - DNA, 558 bp, Homo sapiens
acctgggtgaggagaccctctgctactccaggggtaaaccttaaagaaggtgtcttgaagagcccagaggacactcacgtgctaaggtgtccattttatgcatctttaaaatattttatttaaaaaaaaaaatagccctgccctgtcttagtgccactaacggcccagttccatccattctgaatggaaaagcggagactgccagcactttccttggtcttccctttgtctcccatgatgtgttgttccctcatccctcccatccatttcacygtgtgtggatggatagcagagggtaccacgcagtccttgaggcagtcctgtgtgattccatgatcagttgtttttgtattttaactattcttccaaaccagcagatgtttggaaattaaggaaaaaattaaattctcatcaatggttgctgttatagttaaatcagtaaagatcttgagtatcaacttggtgttttaattttttaaaaatttctggtgaaatcctgctaaggttatttcacatttcaggagtttcagctggtgggggagatgggcagaggtaaga

SEQ ID NO: 570808 - DNA, 530 bp, Homo sapiens
cttgccccactcccaggacagctgtccctcctgggcccgccaggagctctcggcttcccacagcaaggtggacccacccagctgcctctgctcctgcgagaggttggagtagagcataaggagcacattggtggcaggcggtgtggggggccgcggccagcactctccagctaccctggacatctgcttctccagggccccagggygcttcagccacttggagagaggcctggtcacctccaaaaccatgctgcccaaggaaaaggtgacctgggacaaagtgacagtgaataggtccatctgaaaccgctctaagcagctgtctgaagcctgctctgtgtcgggctttggctggtggaaaatctcaatggcaagtgagccctcagtggggaggtccacagggctggacagctgcagccggagctcagcccatgccagatcctcttgttggctcaggaaggagaagtcaaaagcaaacgtccagttctgcccatccactgccacatctgggtaggagaaaaccaagaagg

SEQ ID NO: 570809 - DNA, 580 bp, Homo sapiens
tgcccaggggagcctcttacctcttgcctcaacttggtgagcacttggctcccaggctctgtacgcaatgttctttgccttgggctgtggctggcacaaggcagggcacaccattcactgtttggatgaccgtgcatttccatctcaaaagtgctctctctggttgagctcaagctatgaaaaccagcacatcccaccaggtgtggtgtggcattaagcatcctgcccacttcgatggttgctttcacctgcagtccaggggttataggagttgtacccatgaagaatcttctactaaatatcaggatgaagaggaagaaagatatgaatgacaggtgttgaattgtaataagtaggcagaaaataataccggtttcaatagatgactttattaggcctatgtaacactgagcaagctgtacctcattttctgaagtctacagctacagacaaaaggcatcacctgacaagacctccaaatgagggaaatactaaaactcaagcatgkacccctccagcatactgggcagacagacacactgctagcctgctgctcctctccagccctaatggccctggc

SEQ ID NO: 570810 - DNA, 446 bp, Homo sapiens
cactctctcttgctcaccatcatatcctcggacagtgctggcatatagtggrtactcaggaaatatttgtctgatgagtgagtgcatctgattttcccagctctggagaggtgatatttcatgtcacttatcaaaggagaaactgaggcctcatgagctgcagtggtttgtgtggacgctcacagccagcaaatcttaaaatcttgtgctgagatttgaacttgaatctgttggcctcctgtgccttcattctctctttctctctctctctcttttttttttttttttagagatggggtctcactctgtcttccagtcgggtgcagtggcatgatcatagctcactgcagcctcaaccgtctaggctcaagtggtcctcccacctcagcttcctgagagtagctgcgactataggcgtgtgccattatgacagttcccataccctc

SEQ ID NO: 570811 - DNA, 446 bp, Homo sapiens
cactctctcttgctcaccatcatatcctcggacagtgctggcatatagtggatactcaggaaatatttrtctgatgagtgagtgcatctgattttcccagctctggagaggtgatatttcatgtcacttatcaaaggagaaactgaggcctcatgagctgcagtggtttgtgtggacgctcacagccagcaaatcttaaaatcttgtgctgagatttgaacttgaatctgttggcctcctgtgccttcattctctctttctctctctctctcttttttttttttttttagagatggggtctcactctgtcttccagtcgggtgcagtggcatgatcatagctcactgcagcctcaaccgtctaggctcaagtggtcctcccacctcagcttcctgagagtagctgcgactataggcgtgtgccattatgacagttcccataccctc

SEQ ID NO: 570812 - DNA, 624 bp, Homo sapiens
tgcaatcttagaaggaagcagcatcccaaaagaggaactggtcctgaggctcacacaggccattgtggaaagcgacacaaaagacagacagaggaaaagaggatctggaaaggaagtcaatgtggcatgtctgacccactgcagacatcactgtccgcagagcccaggctgtggccatggctgggctgctcacagacctccttcacgggtggagaaactaaggaacagttctacagtaagcacctcttgtttatgtgccagaaacaggctatgagtggtgacttatgcctgtaattccaacattttgagaggctgtggcgggaagatcacttgagcccaggagttcaaggttgcagtgaactgcaatcatgccactgcactccaacctgggcaacacagcaaggccctgaytcaaaaaaaggaagcagcagcggcagctggaaagggccggaatgagccaaggtaggggggcaggcagccagtgagcccatttgtttcctgtagctcgcaccgattacccacaaaaatgggactatggagtgagacacagtgtcctcacccaccaagggagatcccaggattcccaagaggtgatgcaggaccctgggttgccaaaactgagaa

SEQ ID NO: 570813 - DNA, 427 bp, Homo sapiens
gcactaagtgctctggagaagcaaaaacagtaggaatagaagaggtggatttgagctagggagggatctkgtctctgtggagttagagggtccaggatgaactgcctgggacaggggactgtctgagggaaagtatgaatgttggaaaccccaggctggggccatcagccagcagtatatactgagcccttaccatgggtacagaaacactgtactggctgtctcaagtctgcgtatggactagcagaggagagaagacatccacgtgtaaaagttgggtagaagtgtcatgctggttttcagtgaaaacagaagtagctatgcctgctttgtccacagtggcaagcagcatctcggcttgggcagaatgggactctacccattagttatttatatctggtacttgctatatatctggcagggatgt

SEQ ID NO: 570814 - DNA, 596 bp, Homo sapiens
ccttttttcactgattattgtgttgaaagttttcatagcaaatggagatctcattccccatgtaagtggcgaaagcttggttttctcctgtctgacaatcttaacaactaacttaaaaatcttaaagsctattgcaatggggtatattaccttttctttatcaagaagctcttgtaaaataacttgtctttcccgacacagttccaagaagtcttctgagtgcagactttcgtgtaaggctgggaagaaggtcagctgggtgcagtccacccccacctcgtccggctcgccctcagcctccctcagtgtcagttcatctgcagcagcataaagggacacgtggtgttgacaggagccacctgacatggtaagggccggtgcacagcatgtgcctacatcaccaaggagcagcaaggctccagggccgaagtgaagagcgtggatctctcactgtgcccctccactgcttctggaaatggacaccacacatctggggcaccctggggtgtggtcaaaataccttccagttgacttatcctggagggcccagatatgcccaggcctagctgttcagccacttccagtgaccacagggc

SEQ ID NO: 570815 - DNA, 595 bp, Homo sapiens
atctcatttcctctacccagtggtaccacaagtattttcgatcatccccatgatgatgctaagtctgcaaaggagaagtgccttctccaaagccaacaggtggccaaacagagatttaaacctggtctgttggattccaaagacttccttgagcatgggagctagattactttgctgaggggctattattttatgagygcatgatatctgctagcatttcaaaaaactggaagacttatagatgtaggccttgcaaatcttggccattttaaatgagtaaattgttctcataacttgccagaggcattcccatgaaagcatggctttggggtgggggatagtgcccagcaggtggtttctggcatttgatggacctgatcatccatcatgtttctgtgaatcaccagcagttcaatctggaggatcttcaacttcctcatcagtcaaatgtggttaataatagtaccataataataatcacgggcttctagaatgattaaatgggacaatattttcaagagcttaatatggtaccttactcagcttaagtaatcagtgttatcactgtgaatgaagctaatcctatttcaaaaca

SEQ ID NO: 570816 - DNA, 480 bp, Homo sapiens
aataataataataaactacaggctaatcccaaattaccaacacccagttttccaacaccctgcccatgttgctgctgtcatatgcaaagtgagattgtttttagtcctcagagtagctaaggtgctcaggagtgtttcttgtgcttgggcgtaatttattcaaatcaactgagcaaatacttattgaccttttattattttccaggcactattcaggcactctggatacatctgtaaactaaacaaactaaaatccatgacctgggtgtgaggggaagggtgtagacataaagataaacacaataaataagtaaattaaaattaataattattgtgtataatataacatattaatatataacataataatatcataatgaataagaaatgataagtgctattgagaaaaaaagagccaagaaaggagaaytgacaaaaatttgatttttgattgataagtgcttgtatgcagaaggagag

SEQ ID NO: 570817 - DNA, 551 bp, Homo sapiens
ccctgaccccttgccatatgcaaaaattaactcaaaatgaattaattatctacaataagagccaaaacaaaatttttaggagaaaacacagtggtaaatctttatgaccttggatttggcaatggatttttacatataatgccaaaagcacaagtaacagaagaaaaaatggataaactggacttcatcaaaactgaaaatttttgtgcatcaaaggacattattaagaaaatgaaaggagaacstacagaatgagagaaaatatttgcaaatcatatttcttttgagagtctagtacccacaatatataaagaattcatacaacttagcaacaaaaagagaaacaacccaattaaaatatgggccaagcccttgaatagacgtttcccccaaaaagatatacaaatggccaaaaagcacataaaaaaattcaacattattagccattagagaaacaaaaatcaaaatcacaatgagataacactccatgcccattagaatggctaaaaaattttttaaagggaaataaatattggcaagcctgtggagaa

SEQ ID NO: 570818 - DNA, 529 bp, Homo sapiens
aggagcagccatatctgaagcagttgcaggacaactgcacatcaggtgtcttcaggacaccaggcacgagagtccaagactatctgccttgccaaccctccctgcctttcctcctgtcctgtccatcttctcaattcattcatgcccatattctactcagtgaccattcacaggggtccctgatgtagctgcagacccagtccatgctcacatgggcctcaccactgaagcagaagaaagagatttgaacaccatcttatttcaacagtggtaagaaaccaaaaattgatagatgtacagtgcctttattagcagatggggaagagacgacttaagtggctgatgtccttggcatccattttaatacatatcctggtttcagatatgctcaagtgtgcaaacacraaccaaagaaataagaaaccaaggaagattacacaattaatcattgatttgcactgtgatcagtgctgagggtgctgaggaaatgtgaggcagtgggatctgatttggcccatgggatggggat

SEQ ID NO: 570819 - DNA, 444 bp, Homo sapiens
acaatggccaagtgggatttattccaggaatgcaaatctgacaaatatccaaaaagtaatcaatcaatctaactcaccattttagcaggttaaagaagaacaatcgcatggctcatatcaagtgatacaggataacattcaataaaatttaacacctattctatgataaaactctcagcaacactaggaataggtataaatgtttttaacttgataaagggcatctacgaacaactctacagctaacatcttatttagtgataaataatgaatacttgtcgctctaaaacgtggcaataaagtcaaaggaggctctactttcactgcttttattaaatatagtgctagaagttctattcagtgcaataaggcaagaaaaaaagtaaaagccatacagattgaaaagaaataaataaaattgtycctatttgtagataccctgat

SEQ ID NO: 570820 - DNA, 604 bp, Homo sapiens
tgagggtaagacaagacaatgattataaagtccacagctcatggaaagtagacattattcccattacttttccaccagcctccagtgtacttactgcacatggactgaagcctttgagattcctgtcgccaggattccctaaactgctgacacaatctgctactctggatccctggaacccacctctggcaaaccctgcagaggcagaatattataggcttctcataattttcttaatatctgtattattttattaagtcctacatgcctatgaaacatggtttctattacattctgackgactaataaaaccctgccagagccagagtgctcagccttcttaattaatagttggtggtggaaagaaaggtggggaagatgggagatttttctcaggtgtagtgcagatcaaatctaacctgagatgaagcatgagaacatttactggaatataggcccttgtgtaagaagataagcttgtaaccactctgttctgaattttataaccacaaagcagtgttctttaaggttttccatgaagttcccccttggaaataacagaacctaaaatgttatgccacttctcccggaatgtggctgttaa

SEQ ID NO: 570821 - DNA, 582 bp, Homo sapiens
ggcatttgcagccgtgcttggaagggtgataggagcacatcacgcagcccttgtctggggccagggggtggtacatgacctgggaagttaactgaagggaggacctcctgacacttcttcaggtgaactgcctgcatcactgtcaggcacagcgacctgaagcacagcacgagggcgcatcacatgtgcccctgggggaaggactctctgcagtctaagtggtgacacwttaacctaagggcttgtttttcactgcctgtgcatggtgcatcgggggtgaggtgggggaaggacagggagagctgccctgaggaggtcaaggttaacaaggagtcaaatacatagaagacagtacattgcactgtaaacctttctggccaaggctaggaccagcagcctgcatctagtcctgatcctggcccagactgtacattcgtccttctctttctctgacttccccaacatgtctgtcaggttaaccagtggaatgggaagttgcatggacagcattccataggttgaccccaaaggtgttcacatgtgtgcatgcacacacacacgtgcacacacacatgcacacat

SEQ ID NO: 570822 - DNA, 606 bp, Homo sapiens
ccaagctcatcttcctattcaatgagccgagcctcatcccctccaagatccccaccatcattggcatcctggcctgtcagctgaggggccacttcagcacccaggacttgctcaggtaccacaccaagctgcccagggggaagagcagggccccagggctgtttaaaaagggaggacagaccccagctctctccccattgtgctcaaccctgaatcacttggaaccttctaggaatttttgctcagggctgagagttggggaaaggatggtttgctgaagtcaggatgggacaggccggtttccccagcagggctgtgtgtttactgttcccactgctcaggctcccccactgtggccaaatattcaggaatttccataagcactgccatccttggcagccaatgacccacatgcctggctcctgcagactcctgaagagcagtcccagccaccagtgtgtttccccttctctttcctgtcactatctrattgatcaggtagagccagagttagcgtctctggtgaatcctgactgattttagaagtctctggaaatacacagcatgccatgatgatttcccttaaactctcacttgcagctgcac

SEQ ID NO: 570823 - DNA, 542 bp, Homo sapiens
ctgaagtggagggagtcacccgcagccaccccagcttccaggcagccacggggaatgtctccctcaccttttagcaccaggaagaactactttcagcaactcaagaagagcagaaattttgcaacagattatgtttctgtctttgatctggacactcagaaactgagagagataagcatggttaagcttttgtaattgcwcacaactagtgggataaatttttgagccacctacgcatacaaatgcatacatacataccctctccctggcttcattcttctccactgaccccactttcccttcaatttgattttttctttctacactttaaattatcttgtagattttaaaagacacattattttggaaacaaggactatgttttaatttttaaaattaactgcatctttgcttagcaacatcttgtactggtaactaagtcttggatgggcacagtgcctgctacacggtaggcccttaaagaatgcagatggaagtgcttagagcaaggggatagatgctccccctccttttgctgagat

SEQ ID NO: 570824 - DNA, 542 bp, Homo sapiens
ctgaagtggagggagtcacccgcagccaccccagcttccaggcagccacggggaatgtctccctcaccttttagcaccaggaagaactactttcagcaactcaagaagagcagaaattttgcaacagattatgtttctgtctttgatctggacactcagaaactgagagagataagcatggttaagcttttgtaattgcacacaactagtgggataaatttttgagccacctaygcatacaaatgcatacatacataccctctccctggcttcattcttctccactgaccccactttcccttcaatttgattttttctttctacactttaaattatcttgtagattttaaaagacacattattttggaaacaaggactatgttttaatttttaaaattaactgcatctttgcttagcaacatcttgtactggtaactaagtcttggatgggcacagtgcctgctacacggtaggcccttaaagaatgcagatggaagtgcttagagcaaggggatagatgctccccctccttttgctgagat

SEQ ID NO: 570825 - DNA, 532 bp, Homo sapiens
tgtgatctgtctttgaaatctgtcagttttggggtccaggtgcctcagtgctaggggagaattatttggagtgaaagttcctatattagtttcctgggacagccatagcaaagtaccccagccagggtggcataaactacagacatttattgtctcgcagtcccggaggctagaggtccgagaagaaagtgatggaggggctggtttcccctgaggcctcttttcyggctcagagatgctgccttccccatgtcctcacgtggtctgtcctctgtacatgaccgtgtcctcatctcctgttataagcacaccagtcacgtaggattagggcccatcctaatggcttcactttaactttatcacctctttaaaggccctgtctccaaatactgtcacattctgaggtactaggggttagggcttcaacatatgaattggggggaacatggtttagtccatatcagtgcctcacgtctcaatacatattcagggaaagatgtttgcatgggctgaaactcctctgaccccaggg

SEQ ID NO: 570826 - DNA, 532 bp, Homo sapiens
tgtgatctgtctttgaaatctgtcagttttggggtccaggtgcctcagtgctaggggagaattatttggagtgaaagttcctatattagtttcctgggacagccatagcaaagtaccccagccagggtggcataaactacagacatttattgtctcgcagtcccggaggctagaggtccgagaagaaagtgatggaggggctggtttcccctgaggcctcttttccggctcagagatgctgccttccccatgtcctcacgtggtctgtcctctgtacatgaccgtgtcctcatctcctgttataagcacaccagtcacgtaggattagggcccatcctaatggcttcactttaactttatcacctctttaaaggccctgtctccaaataytgtcacattctgaggtactaggggttagggcttcaacatatgaattggggggaacatggtttagtccatatcagtgcctcacgtctcaatacatattcagggaaagatgtttgcatgggctgaaactcctctgaccccaggg

SEQ ID NO: 570827 - DNA, 603 bp, Homo sapiens
ttttatatacattagcgctgcgctaaataacaaatgaacccaataacggcatcgtttcctaaataagagccatcatctggagggagtgggaccacagaggttaggtgtttctcattcagcatgataatggagaaggaaagagtgggcaagaacctagcttctgaggaacagaaactcagaagatgctacactcggaagaggacccmaagtagccacagtgcagaatggaagtcttatgtatgaaaaggattcaaaacactatgacatttgctgttcctttataattagccttctctttgtaagtagtcctaatgaagaaatttggcaacaaatataaaatagtttctccacaaaataattttagggactcccttaaacacagaaaaaaatgtagtagctgttatttaagtgcccaggaagtctcctcactccaaaatatctctcacattcaacacctagaaattcattcttctatagatccaaaccattaggcaagaagtgtcctaccaataatgccgtccttgaaatgcaagcattgcaggtataaataacattgaatcataacatgctacgtgactttcactgttttgttttgtttttttg

SEQ ID NO: 570828 - DNA, 614 bp, Homo sapiens
cctgtctataagtcatcttggggactggtttttaataagcagagggtttcctgtgctccaaaatttgcttagggctgaccctgacaactctatttatttatttatgcatacaaacacagtttaaattagcaaacagatgagttaaaataatgagattaccaaatgaacacaaaaggtatcctgaatcttcccaaacccaattcaaagccaagccttaaaatcaagagggacagaagtgctcagcaaaccacctgcaatttaactgagttcaaggagttaaaaggtcttaaaattaaccatgaaatgtgaaaaatatatgaatggtcttcaaaaacaacatttgggaaactktatgtcagaaataccaacactgtggttgccaagagtgaggcattttgcgatgactaacaaattaaggcatcttaatgtgaaaactgattatataatgcataatcaagcagagtaaggaggaaacagaggtatgctttctcattaattctggcttagaactacattgcgtaacatcaccagatttatgaatatagagcaactttaaaaatccacggatgttccctgaatcaaatcatttttatagctcaaagaggctgtcattt

SEQ ID NO: 570829 - DNA, 614 bp, Homo sapiens
cctgtctataagtcatcttggggactggtttttaataagcagagggtttcctgtgctccaaaatttgcttagggctgaccctgacaactctatttatttatttatgcatacaaacacagtttaaattagcaaacagatgagttaaaataatgagattaccaaatgaacacaaaaggtatcctgaatcttcccaaacccaattcaaagccaagccttaaaatcaagagggacagaagtgctcagcaaaccacctgcaatttaactgagttcaaggagttaaaaggtcttaaaattaaccatgaaatgtgaaaaatatatgaatggtcttcaaaaacaacatttgggaaactttatgtcagaaataccaacactgtggttgccaagagtgaggcattttgcgatgactaacaaattaaggcatcttaatgtgaaaactgattatataatgcataakcaagcagagtaaggaggaaacagaggtatgctttctcattaattctggcttagaactacattgcgtaacatcaccagatttatgaatatagagcaactttaaaaatccacggatgttccctgaatcaaatcatttttatagctcaaagaggctgtcattt

SEQ ID NO: 570830 - DNA, 635 bp, Homo sapiens
atttaaatataatactcaatacactttaatgatgcatggtataatattgtacaataatattaaatataaattgctcaatctcattcaatatttcaatgatctgatactttttagactaaaaataaatgggaaaagagaaagagagaagagaaaaggcataattattattataagccacaagttttcacgtataataggatgaatactatattggcattcaagtaatttagttcccacaataaataataagatacatcatccaacctattatctgctatatcataaaaataattttatatgcaggatcaaaaggggtgattttcttgacttttctgtgactattttcaaaagtcatgaagcagaacatccacgcaagaggataaactggctctgcagctgacccctggaggtactaatgcagwgtttgaaaggggaggaaagcttattactagtgaccatgagattccccaacttatattagtcagaaatagcaccccaggatggaatactaaatcataagggtatcctacaaaggcagtctagaatgtgagaggtctaggatctgtggatgtcagagaagtctgtattttcacaaatcataaaaaccgaaaccgctttaaacagtttttttaaaa

SEQ ID NO: 570831 - DNA, 599 bp, Homo sapiens
caaggtaatataacaagcagtggtggagtatttattcaaactagtcaatcatcactgcaaggccctggtacctttcttttacaaatgagttcttgtttcagccatcaacttcatcatccccagaagcccaaaacaacactccagtttataacctgattgaattgcagtgatttcagacctagtactattgtgatctgggatctttttattacggcatcataaacatcactttcaacaactttcctgtatgtcttkgccccgttctgagagatataagtcagaggtggagaaaaggctacaaatgcgttgatttgtggcatgaagaattgtgcagaatcttttcctttgatatgacagtccaaggggtatattaacaagggcagatggttgccatcatttgttacaagcacctattcattataaaaaaggaaaaacaactcatccctcaagaaaggatttaaagtgataccagaagacctcgatcttccactctccagcctccctgcttcatcttggtaaggatgttgttcctaacccttccttctatgccagggaaaggatatgcaaactaaaaaagaagaagtaccagatgtgaaatt

SEQ ID NO: 570832 - DNA, 599 bp, Homo sapiens
caaggtaatataacaagcagtggtggagtatttattcaaactagtcaatcatcactgcaaggccctggtacctttcttttacaaatgagttcttgtttcagccatcaacttcatcatccccagaagcccaaaacaacactccagtttataacctgattgaattgcagtgatttcagacctagtactattgtgatctgggatctttttattacggcatcataaacatcactttcaacaactttcctgtatgtctttgccccgttctgagagatataagtcagaggtggagaaaaggctacaaatgcgttgatttgtggcatgaagaattgtgcagaatcttttcctttgatatgacagtccaaggggtatattaacaagggcagatggttgccatcatttgttacaagcacctattcattataaaaaaggaaaaacaactcatccytcaagaaaggatttaaagtgataccagaagacctcgatcttccactctccagcctccctgcttcatcttggtaaggatgttgttcctaacccttccttctatgccagggaaaggatatgcaaactaaaaaagaagaagtaccagatgtgaaatt

SEQ ID NO: 570833 - DNA, 623 bp, Homo sapiens
ggaagctataactttaaaaggggaataaagataagagagttgattcacttcacagaacccttaaggaggtttggggtttaaagtctgtttctatggggtacaaaatgcccacacacacctccctcctactccctgcactagatacaagcaccaagagaataccgcattttccatgggataaatttaactggagtagctcaacactcagagacatcaggtactgtgaagagcaaggaaaaaaagtggattaattaaacatccatgtgttgagttaagagatgcctcctcctcagcctctatctcttcatgtgcaaaaacctggaaaccaggcatcttccacacacataaggaatcaaagattacttccttggaaaaactgacctgccgcagagaaaaatatctttattctcagcttgaggttctccagcaaagtgctaggtcctaacaccccggagattccaaaatgaaacagrtcaatcgacaaggcctagaaacagatctgcaaatcagccttttaatgcttcattcaaacctagactgacacccaagaaacaccaaacatttcatgaaagatttcaataaaaagagagaccaaaataaacagagaaaaaaattaaaactgg

SEQ ID NO: 570834 - DNA, 462 bp, Homo sapiens
ctcattatgatgtttatattgattgcatattgaaatgatgatattttgcatacactgacttaactaaaattaatttcacctgttccttttactgtatgtagctactagaaaatttaaaattatctatttggctcacatattattgtagtttgcataatatttccataagatagtgctggctaataaaataaactgaatcatattttccagtatatagtaccacaaaaggtcatggtttttgtaccattaaatggttttcaggcattttaattgcttcttgctaaatcttatgtgagacatataagcatattcaaagtaaatattttggtayttctaggccaggcgcagtggctcacgcccataatcccagcactttgggaggctgagacaggcggttcacctgaggttgggagttcgagaccagcctgaccaacatggagaaaccccgtttctactaaaaat

SEQ ID NO: 570835 - DNA, 559 bp, Homo sapiens
tagaagtaattctaccctattccttacgcaacttggtccaaaatttattttaaaattttataactctatattgaatccctactatatgtcagacactgctagtcttgaacatacaaaaatgttcctaagcctagctgtggagagagattcaaaggcactaatataaacaatataacatcatgatgaatgttttcctgtaggtatactcccatgggaacacaaatttgagtaggatgcagagaatgcaattcataggaaaaggcttctcaagggaagtaatatttatccaagcataaataagaaaaggaaaaggagaaggaagcggatcttcatatctaaaaacaattgcttaacccatggtaacctaagtctacttttatgttttcttttctcacattttatgttttgctcttacattatttgatacaaattacatctttaaacattataaagcaataaacrcagttttacaatttatgaaattgtctcaggggtatggagcttttgaggcagctccaaatccattcttcttttttcagtggctgctcagctgtgggtt

SEQ ID NO: 570836 - DNA, 585 bp, Homo sapiens
atgctaatgaaatgtataaaatcctaagtcaaaggtcaaatcacatacttgatctctcaagtcacccacttggccctcttctaaatgtactttacttcctgtcattcctgctctaaaactttttaataaactttcactcctcctccaaaacttgtctgggtctctcactctgccttatgcccctcrgtcaaattctttcttcagaggaggcaagaattgaaggttgctgcggacctgtttggactcgccaccactaacaatatccttttgaacaatcatatttctacaggtatgtccatacttcattgaatctcagcctaaaaatggataatgtatctttgtcttcattctgaaggccactgtgtatacacattgaataaatgtgtatgccttttctcctattaatcaatctgcctcacgttagtgatttttcagcaaaccttcagagggctggggtggggaaagtggggaagctctccctttgcccccaaacaaggctactgtgatcctagagagagggagatggaaatagggtaaattaaaacaccacaaaaatcattgttcttgtatcaattctgccatttt

SEQ ID NO: 570837 - DNA, 642 bp, Homo sapiens
tgtatcatcatttttttatctaagccaattgatggctataaagtaatcagggtaatatttgcacttggatcataacctaactacaaaamcctcattccaaaagagtaactttccttaaaatgttataaccaatggagaaaacattggaataagcttatagcattcccagtggacatatttggcttaacaagttctatagtgagtgttaaaaatattgaaaaaagaaaaatagctcagagaagtctaagctatgtgaggaatacaaaatttatcaagcctggagagacataagacttcagtcatcccctcaccccctgggggtggcacctatgcccaggggtaattgtttaaaagcgtttttgctcctgactagctgcctcacccattatcttcatgttcctggaatttgtgacttcttcaagacttactccaaatagatatttactcatttctctgagctatcatgtatatagaaagtacacgttattaaacttctgtttgctgttctcatgttaatgtcttttagacattagaagttttagaagacactgttctcatgttaatgtcttttaaacattagaaattagacatttagaagtcccaactaataactaatgaaaggtagaggagaaaattgttttt

SEQ ID NO: 570838 - DNA, 579 bp, Homo sapiens
gggccaatgacattcagtctactgctctttgcacaacttcacactgcataaatgaataaattctcaaatagccatcaaaaatgaaatatccagaggaggcagtctaaagaattacaatgaatttttaaagtaacacttgttttgtaaacaggaaagtacatagaaaggaaaagagaaaatccattctatataaaatagaaaaatatgtttgtactgactcaattatttaaaattaatattgtgtggcctargaatatgtttttatataattaatgtttgttttttacaaaggttcctacaggcaggaaatgtgtttgatttttgtgtatacttcagatttcatcacaacagcaatataatgcaggactcaatgcaaagtaagaaaaaacaccaggcaatcagttttggttgctttttcactaacaaagcttgttaagaaaagaagagcatttttattttttataaatagaggattttagtgcctattttggaatagcaggtagtattccagctgtttggggctgctttgggctctaggcattttaaaattaatgggctgggccaaacaaagagtgtatt

SEQ ID NO: 570839 - DNA, 643 bp, Homo sapiens
cttagtgactcttaccctcacacagaacaagctgatttctcatgacagctatattcaatctatgactaaataatgccattttaaatgaccatgtgtgggaagtaaaactataaagtgaacatgtgctttagagcctggagctcttagttcaaatcccagttctgtcatttactagttgtaggacatttttaaaatctgttaatttctctggatggtcagtttcctcctatgtaaaatggagacaatattacctacctcacagggttaatgtgaagattacattatatagctcatgtaaagcacttagctaaatagctggcacagagttgacacttgatgaatggtgycttttatctgccccctctgcaattacttacttaaagttatctattatttaagcatctttccattcttaccaaacttaaaattggtacccaaaaaaatcacctaatttttctcctgttgtactaagtagcaaaagaaaaacattcaagaaatgggaaggccttcatgatacaagttttcatgtctgtaaaattaactctgcattaactcctgacttaaaattctacaacacagaactacaaaattttaaaagaacagaatattaatctagagttgatataaaaatactagctgtctc

SEQ ID NO: 570840 - DNA, 607 bp, Homo sapiens
agatttctcctgtaggacacagttttgcaaaaattgctttaatcattaagtaaagttaagcttgatgaaaaatctttctactacacgtctttgagtcccaacaacagaagcacagatgatggctgtgtgaacttctatcagtttgcttcaaaattaaagaaaatcttcttagcatacaaatcccaacaagtagcctagcaccacttttcatttattaccaatgcaaccaatttaaacagaacttattcagtttataagatggatatcttgtcaactgctaatcataatataaacaatgaatttgtactgcatattatctgtgcattttttctcttcaaataagattgcaaccttaacagaaaatgtggaacaaaccagcttccgcaacatagttctttctttaacaataacaacaataaaactatgctaaaactacactgaagctacactacaataaactgcaaaaaatcaaaagatccaagcactaacactgagtcacattgtactctggcacctgtaataagattacctccttgtgacctgctcaaattctggacccaaagaaagttttcagaaagtttttcyaaaatcctctgtctgtcaccca

SEQ ID NO: 570841 - DNA, 526 bp, Homo sapiens
ttgttatctctaacaagtgatttattttaagttcatcttttctcatttcctgtgacctgttcagaagctcatgtacatctaccattgtgagcacccaaatagtttgttatctcctcacacaatacttcatagtcagctgattcactggggttcgttttactatgtaaccatctaccataaatacctagattgtttaaaaggccacaccgccactcacacacaaaaagaaagctttgcatattactgtaacctcttcacatgatttactagtgttaacacagctttctatgaaaaatgaaarataaaagttgtagagaccaagggaaaactccttcagcctctaaaggttcatggaaaaatcaactcacaaaaggcaaattaattacagaaacggcatacaaatgtatttaatgtgtacatgagagccttcagaatgaaaacccaaagatgcaggggaaattgtccatttatatgcttcagttcaacaaagtatgaacagccatactcaaataagattggacaaaaa

SEQ ID NO: 570842 - DNA, 585 bp, Homo sapiens
cagttgcaggaacctgcctcatccaaagttacagagctcctgggatgatatgccatcaatgattgacagttgcaggaattctaagggtccattcccccgtttcaatatgagacaattctgaaaggccatcccagctccaacactccccayaggacagctaagatttccattgtaagttggcttctctgccaatctgcctttctttatatgtttccttatatgtttattttctgaaagactgtcccaacaaaacttttttgtactcaaatttactttcaagtctgttctagtgtatatgatctaagacaacaatcactcttcattctaccatcagctcccacctaggaactctactaggctcaggacccttatatttcgtccaagttagaactaatacttcatgccaggattcttgattcttactatattcctgtcatttctaccatttgacctagttttattttatgtaacaaacaactctgagtaaagtttaatgttaaaaaaccatagcaggaacttctaacatatgaggaatgcctaaacactagggagtaaaggaacccacttcttgggaaaggatcagtt

SEQ ID NO: 570843 - DNA, 556 bp, Homo sapiens
caccaccaccatcaacaaaagcaaggccttttgcagttcaaaatacatggaagggatcaaagctcagagggaaagacctcaagatcttgcttttttgggtatgacattgatctcatctcttcaacagtaatagataattttggttttatgtcatctagccatgacagagccattcattgcatcattggttgagataatatagcataaagtatttaacagcaaccaccctaaagatgacaatatggaaatactgcttaatggacagaaatttttttatctgtaaaatagcataagccatgttttacctcctcacattcagaggaggtgattaatgattttcccccttgaaaatataaagtattttttaaatgcctatacttccaaatccatataataattaagtagctctgaacttaacytttcaaaatttattctaaagggtttcttttactttttattctggctttcaaaatagtaaaaggcattattaaattcccttctgtagctgtcacccaaattgtacctttagcacacatataccaccgatctatttgca

SEQ ID NO: 570844 - DNA, 638 bp, Homo sapiens
attctaatatttggatcttcctcattactttaagaaaaaaggaaaaccactcaggccctgttgcccaattattttacatttacagcatgattttgaatgtagaatatacatacatattgtcactgttcttataaagtaactcaaatagatgattctaaatattaaaatgggaagagataaaaaactcaaatcaacaaatatttacggagggcttactatgcacaaatagtgaagctacttacaatccacattgttaagtaggtatgaaatgagcaattagctgcaagttaaagacactcaaaatcacagtgcttcaaatgagacagaagtttactttgctttcacaaaaaaagtctggaggtaaagtgctcctgagctgatgtagtggttctgctttataaaatacctaggaacccaggcgtcttccaacttctcactccgccaccttaggtatggccttatcctcatagtccaagatgccagctagagttccaaccatgacatccacattccaggcagcaggatrgagccaaagtgtgcaggtagactaacttttatggaagtttgcaaaagttacccaataaaaatttcacttatatgtcattaatcttacttgcatctcaaagcataattacagc

SEQ ID NO: 570845 - DNA, 554 bp, Homo sapiens
tcatctttactcctgaatctgaggcaataggctactttctcccttattaaacataaagaaaaataattacttaatgagagaatatatagccattctcaataaaagcaactgggattccacaaacattactatgtcatgactgaatgaaygaagtgctaagataaagagtttagaaagaatgaaaaacctaattacttataggaatctgtgtgattaagtctagaaaaataaaaggaagaaaagtgcattagtctaatgagatgtagacaaaatatttaaaattggctcaaagtgtttggttgaattatcttgaataataaaagattaaatttcctagaaaatctttgttccaaagtaaaatgattttctgattcatgcttttgaaactttataaagtgaaacaaaagggcattttcctattctttttagtgttgaaaaatggtaactgggcctcagcagaactgaatttgggaacctaaatggcaaacctaaaaattcacttaaagaaggtgaattaggaaactttgttcctcataacagagctccagtgcttg

SEQ ID NO: 570846 - DNA, 602 bp, Homo sapiens
acactgtcctttaaggtcactggcctccttgggcctcagttgcctcatgtgaaaaatgagaggtctactagattatacatggcacttactttcatctctcacatcaattacaatcaactgataatggctggctgaagcactgtgttaagaaggattatgaggctgattctggacaaaagtagagtgtcatgggtgatttgytaagtcttccataaggacattgaggaaatagctgtacatatgcaatatattttccttatttgacccaaaggaccactaggatttcctttagttacagtctataaaggatattttacaataaaatatcataagatcctttatacaaaatgtttggtcttgttgcttcctccagccacccaagctgctgaaaggaaagaaggccaaggcagagaaggtggctctagtcccttatcataaagaagcagaaggccaacaaggtggtgaatcccctgtttgagaaaaggtctaagaattttggcattggacagcacatccatctcaaaaggaacctcacttgttttgtcaaagggccccactgcatctggctgcatcagcaaaaagctatcctctatgaatggctg

SEQ ID NO: 570847 - DNA, 602 bp, Homo sapiens
acactgtcctttaaggtcactggcctccttgggcctcagttgcctcatgtgaaaaatgagaggtctactagattatacatggcacttactttcatctctcacatcaattacaatcaactgataatggctggctgaagcactgtgttaagaaggattatgaggctgattctggacaaaagtagagtgtcatgggtgatttgttaagtcttccataaggacattgaggaaatagctgtacatatgcaatatattttccttatttgacccaaaggaccactaggatttcctttagttacagtctataaagsatattttacaataaaatatcataagatcctttatacaaaatgtttggtcttgttgcttcctccagccacccaagctgctgaaaggaaagaaggccaaggcagagaaggtggctctagtcccttatcataaagaagcagaaggccaacaaggtggtgaatcccctgtttgagaaaaggtctaagaattttggcattggacagcacatccatctcaaaaggaacctcacttgttttgtcaaagggccccactgcatctggctgcatcagcaaaaagctatcctctatgaatggctg

SEQ ID NO: 570848 - DNA, 602 bp, Homo sapiens
acactgtcctttaaggtcactggcctccttgggcctcagttgcctcatgtgaaaaatgagaggtctactagattatacatggcacttactttcatctctcacatcaattacaatcaactgataatggctggctgaagcactgtgttaagaaggattatgaggctgattctggacaaaagtagagtgtcatgggtgatttgttaagtcttccataaggacattgaggaaatagctgtacatatgcaatatattttccttatttgacccaaaggaccactaggatttcctttagttacagtctataaaggatattttacaataaaatatcataagatcctttatacaaaatgtttggtcttgttgcttcctccagccacccaagctgctgaaaggaaagaaggccaaggcagagaaggtggytctagtcccttatcataaagaagcagaaggccaacaaggtggtgaatcccctgtttgagaaaaggtctaagaattttggcattggacagcacatccatctcaaaaggaacctcacttgttttgtcaaagggccccactgcatctggctgcatcagcaaaaagctatcctctatgaatggctg

SEQ ID NO: 570849 - DNA, 602 bp, Homo sapiens
acactgtcctttaaggtcactggcctccttgggcctcagttgcctcatgtgaaaaatgagaggtctactagattatacatggcacttactttcatctctcacatcaattacaatcaactgataatggctggctgaagcactgtgttaagaaggattatgaggctgattctggacaaaagtagagtgtcatgggtgatttgttaagtcttccataaggacattgaggaaatagctgtacatatgcaatatattttccttatttgacccaaaggaccactaggatttcctttagttacagtctataaaggatattttacaataaaatatcataagatcctttatacaaaatgtttggtcttgttgcttcctccagccacccaagctgctgaaaggaaagaaggccaaggcagagaaggtggctctagtcccttatcataaagaagcagaaggccaacaaggtggtgaatcccctgtttgagaaaaggtctaagaattttggcmttggacagcacatccatctcaaaaggaacctcacttgttttgtcaaagggccccactgcatctggctgcatcagcaaaaagctatcctctatgaatggctg

SEQ ID NO: 570850 - DNA, 588 bp, Homo sapiens
cagagatgtccacattcaaattcccagaacctatgaatatgttacctgacatggcaagagggattttgcagatgtaattaaggttaagggccttcagatgggaggattatcctggataatctgggtggctcccactaatcacatgagtcctaaaaagaagagaatctttccaaggtgtggtcagagaaagagatgtgaggttggaagcagggtcagagaaacatgacgttgctggcttagaagatggaggcagagggccatgagccaaggaatgagrgtgacctctagaaactggaaaaggcaaaaataatggactcttccctagagactccagaaaataatgcattcctccaacaatttgatttttactccagtgaggcccaggtcagacttttgattacagagctgaaagacagaaatttgtgtggtttaagacactaagtgtgtggtaatttgttacagcagcaatagaaaactaaccaaacatatatacatatgtatccactcatataaatttaacaggacagtatatattagggcaaacatacataatcaatagtgttaagtggttgtctgttttgtccgtta

SEQ ID NO: 570851 - DNA, 592 bp, Homo sapiens
ctcccaccaggccacagtttcaacactgggaattacatttcaacatgaaatgtggaggggacaaacatccacaccatatcagagaccaattcttctctttattatacaaatgccaataaagcccaggagagaaaataacagaaaaaaaaattgtagctaatggcaatcactgataaggaatcataaatgagactcagaatatcttaaaatagttgtgcaaatgacaggaaaatcaaaacaaccttcttccagtaaatgtctcatgaagcaattgtgtataagcaaactgcagtagcttgcctacaatagctaacaacatcatctcacttaagatggatgaggtaaaagacatttctgccaatcttgctgtagccaccaaaaagcaaaaaatatgtaacagtcttttcgatgtcaacatttctttgatgatatctgtaaacatytgtttccatgtaacaagcaacctattcttcaaccaatgaatacagcatgagataagagtcataagacttgaagtttgctcccctctttcatggaatcattggggtcttcataacccacctaacctcagctgcctcaataaattatgaaa

SEQ ID NO: 570852 - DNA, 608 bp, Homo sapiens
cttatattttcagtatccaattagtcatttcaagtatgagatatagaaaagaatgcttggaatgtttgctatggctttgtacaaataaaatataatacctaacaagggcaggaggaaggaggagggatttataagtttgctkattgtatttttaaaagtcaaatttcatttaaaattatgtttaaataatattaccagaatattccaaaataaaagtcaaaggtaagaaaaataatgttaaaatcttctcaaatttatgaagaaaaaatgaagtaaaaaataaaaaatcttgtgaaatttatctggtctttcctgaagctctttggtatctccatagacatggtttgaatgcaaaaaactgcccatgcagtgtctatgataagattgcctttaacacactcagcatgctaatatatcaggttcaaaaaatgatttcataattgttttacttaagactaacaggcaaagattgtcctgaatttgctgctctgctgtgtttttgtaggaccaaatcccaggtgcagtttggcctctaagaggcataatctgctccaggaaagccaatcaggaagtcttccttttaactatggcacaaccgttcagattca

SEQ ID NO: 570853 - DNA, 597 bp, Homo sapiens
aatttttttattattggaggaagttattttatctaattcttgatctacttataataagtaatcctagaatttttttttttttttgagacagggtctcattctgtctcccaggctagagatctcagctcactgcaacttctgcttcccaggstcaagcgattctctagcctcagcctcccaagtagctgggactatgggcatgagccaccaatgcccagctaatttgggttttgttttgttttgttttttgtagagatggggtttcaccatgttgcccaggctggtctggaactcctgagctcaaagccattttcccacctcagcctcccaaagtgctgggattacaggcatgagacactgtacccagccagtaatcccagaatttttacaaaagctcctattgttgcataatgaaacagtattctcttgccattatttaaagtcacttttttcactttctggtaaaaaaattcgttcaatcattgacaaatatttgctgaacacccactctgtgccgtgtactactatgttaggtgctggatatatgttgatgaatgaaacaaactgtatccttgtagaatttgagtctgctgaact

SEQ ID NO: 570854 - DNA, 550 bp, Homo sapiens
acatttacaatatttctgatagctaaaacttcaaaaaaaaaaaaaaaaaaaactagacactgtcacatttgaaaaagattaagagctgccaaaactacgtgggtgcctgtaatcccagcactttgggaggccaaggtgggagggtcacttgagcccagtagtttgacaccagtctgggcattatggcaaaaccccatctctacaaaaactacaaaaattagctgggcatggtaacacacctgtagtccaagctacttgggaggctgaggtagaaggatcatatgagcccaggagttcgaggctgccattagctgtgattgcccaactgcacttgagcctgggcaacagatcaagaccctgtctatctccataaaacaacaacaacaaaaaaacataacaacctgcatgggctctttacacrccttcaaacatagctcatgatccctgtaatatcactgttattggatactaacttctaatggcctttcattattcactaacttgatcctgagcaatctgcccctctctttatcttctttatatttcttaa

SEQ ID NO: 570855 - DNA, 599 bp, Homo sapiens
tgaactgttaaataccgtaagaatagtgggctgaggggcactatcaggagctcaaattttgatacagaatgtctgagatgcctactagcaagccaactgactttcataccggttttctggactagcttttacgtggtacatttagaaatgtgcatcttcctctctctgaagcatttcttaagcttttcatgctttccttataattcctatggtaattattatctatttcactaattttagccaaatttattattttagcatatcattatctaacaatttctgaagaacagaggactgcagagctgggtacttgattttacttggtatttctattttctcacagctctaagcacaattccactatataaatacttgttgaaatcagtttttcagaataccygaaatttagcaagattatcaacctaagttacctctgttttcctcgatcagatgaatctagttattggttaacatagggagcactaatttaactttctgaaaagcatgtcaagtgtgagacatctttatctgcattcttctcagtcttgtttctgttggggaatgtgttagaaattaggtatattttagaacatcctgag

SEQ ID NO: 570856 - DNA, 544 bp, Homo sapiens
tgaaacagtctcactctgtcacctaggctagagggcagtggcrtgatcttggctcactgcaacctctgtctccaaggttcaagtgattcttatgcctcagcctcccgagtagctgggattactggtgcacaccaccatgcccaactaatttttgtatttttttagtagagatggggtttcaccatgttggccaggctggtcttgaactcctgacctcaggtgatccacctgcctcggccttccaaagtgctgggattgtaggcatgagccatcacccctggccctgacctatggatatttgactcttcttgatagattaaatgatgaaacatatgcaccaatggaaaggatgcattaagtacagccactgaattttgctaaaatagcccataacttttttgtttttctgtgtattccttttactttttaatcatgcggcagatggcttcagataccatttattttgagatataaattctaagcaaacaatagacaaatgtaatacatattgtatttgcttcagatgaacaggaaatgaacatag

SEQ ID NO: 570857 - DNA, 537 bp, Homo sapiens
tacattttcttgactgacacagtagtccgcattagaattaagtgataatgttttcctcataggtttctttggagttaatattcaccttggtgtatttcagttacccaaggtatgcattaatggcccagaatgcacaccttgggagatatcttaatactattatgatatggtttctcagtttcctatttgaatttgaagaattcttttattttctcttttattgaatctgtcctatttctatgaaatgacaaatgggaaataaggatagaaaagtagtaaaggcctctctctgctccttaatgatgcttttattgtaaaatcttgcatttttttaattttaatttttcttctcaaaactttcttttacctgaagcytactgttgtttcaccatcttatatccttcagctcagttaagactaagtttccatttcctaatttaagttggccaagaacattaaattagcaggtgtttgtgttattttgtttcctaatagaacatgaagctgcccaatgaccagtgaagcaattggtatgca

SEQ ID NO: 570858 - DNA, 537 bp, Homo sapiens
tacattttcttgactgacacagtagtccgcattagaattaagtgataatgttttcctcataggtttctttggagttaatattcaccttggtgtatttcagttacccaaggtatgcattaatggcccagaatgcacaccttgggagatatcttaatactattatgatatggtttctcagtttcctatttgaatttgaagaattcttttattttctcttttattgaatctgtcctatttctatgaaatgacaaatgggaaataaggatagaaaagtagtaaaggcctctctctgctccttaatgatgcttttattgtaaaatcttgcatttttttaattttaatttttcttctcaaaactttcttttacctgaagcctactgttgtttcaccatcttatatccttcagctcagttaagactaagtttccatttcytaatttaagttggccaagaacattaaattagcaggtgtttgtgttattttgtttcctaatagaacatgaagctgcccaatgaccagtgaagcaattggtatgca

SEQ ID NO: 570859 - DNA, 563 bp, Homo sapiens
ttggtgatgaaatctttgcctaagccaatgttatcgtatagagtttttataatttcaggtcttagatttaagtccttaatccatcttgagwtgatttttgtataaggtgagagatgaggattcagtttcattctcctgcatgtggctagtcagttatcccagcaccatttgttgaaaagggtgtcctttcctcactttgtgtttttgtttgctttgtgaaagatgagttggctttaagtatttgggtttatttctgggttctctattctgttccattggtctatgtgcctatttttataccagtaccactctgttttcatgtctatggccttatagtatagtttgaaatcaggtggtgtgatacctccagatttgttctttttgcttagtcttgctttggctatgcaggttcttttttggttccatatgaattttagaattgctttttctaatcctgtgaagaatgatggtagtattttgatggggattgcattaaatttgtagattgcttttggcagcatggttattttcacaatattgattctacccatccatgagcatgg

SEQ ID NO: 570860 - DNA, 449 bp, Homo sapiens
tagtaagtgctaggtaaatatcaatgaatgcatgaatgaatgaatgcaataatayggcatgccattttgtgattttgcagtgaaaagcattttttccttacccttatttttttctccttcctccgactgaaagtggatgtatttgggggtatatggctctactttaacttttaaccaggccatgaatttatagtgatggaaactaccagaagcacatgtaagtgatacactgctcagaatcctttctgtggtaaggcagcacaaagagaaaaaactttatatatattctcttctctcagcagctgtccagccttagtcagagttccctgttacttccaagatactctgtcttttactaagggtaataattttggggaagatactcctcatgttcttacattttcacctgttaggagaaaacaggatctctgttagtcagattagcattt

SEQ ID NO: 570861 - DNA, 613 bp, Homo sapiens
ggacttggtatatattttccagacgcttttctaggcagagacacattttcttttctcttctaaaactcttattaagatgaatgttggtctgtctggatgagtcttgtggcttttaatttttgtctcatactttgcatatcctttycattctgtgagaatttttggctttcttttctggtcactgattttgatgttagctattttcattccgctctttaagtcttcaactgtctagtttttatttttgcaataccattttaaatttccaagaataccagtggtgttttctgtggctatttttttttttttttttgagacagagtcttgctctgtcacccaggctggagtgcagtggcacgatctcggctcactgcaacctctgcctcctgggttcaagcaagtctctgcctcagcttcccgagtagctgagattacaggcgcctgccaccaggcccagctaattttttttgtgtgtgtgtttttagtagagacgtggtttcaccatcttggccaggctggtcttggactcctgacctcgtgatccacccacctcagcctccaaaagtgctaggattacaggcatgagccaccgcgcctggcctggctgttctta

SEQ ID NO: 570862 - DNA, 613 bp, Homo sapiens
ggacttggtatatattttccagacgcttttctaggcagagacacattttcttttctcttctaaaactcttattaagatgaatgttggtctgtctggatgagtcttgtggcttttaatttttgtctcatactttgcatatccttttcattctgtgagaatttttggctttcttttctggtcactgattktgatgttagctattttcattccgctctttaagtcttcaactgtctagtttttatttttgcaataccattttaaatttccaagaataccagtggtgttttctgtggctatttttttttttttttttgagacagagtcttgctctgtcacccaggctggagtgcagtggcacgatctcggctcactgcaacctctgcctcctgggttcaagcaagtctctgcctcagcttcccgagtagctgagattacaggcgcctgccaccaggcccagctaattttttttgtgtgtgtgtttttagtagagacgtggtttcaccatcttggccaggctggtcttggactcctgacctcgtgatccacccacctcagcctccaaaagtgctaggattacaggcatgagccaccgcgcctggcctggctgttctta

SEQ ID NO: 570863 - DNA, 613 bp, Homo sapiens
ggacttggtatatattttccagacgcttttctaggcagagacacattttcttttctcttctaaaactcttattaagatgaatgttggtctgtctggatgagtcttgtggcttttaatttttgtctcatactttgcatatccttttcattctgtgagaatttttggctttcttttctggtcactgattttgatgttagctattttcattccgctctttaagtcttcaactgtctagtttttatttttgcaataccattttaaatttccaagaataccagtggtgttttctgtggctwtttttttttttttttttgagacagagtcttgctctgtcacccaggctggagtgcagtggcacgatctcggctcactgcaacctctgcctcctgggttcaagcaagtctctgcctcagcttcccgagtagctgagattacaggcgcctgccaccaggcccagctaattttttttgtgtgtgtgtttttagtagagacgtggtttcaccatcttggccaggctggtcttggactcctgacctcgtgatccacccacctcagcctccaaaagtgctaggattacaggcatgagccaccgcgcctggcctggctgttctta

SEQ ID NO: 570864 - DNA, 613 bp, Homo sapiens
ggacttggtatatattttccagacgcttttctaggcagagacacattttcttttctcttctaaaactcttattaagatgaatgttggtctgtctggatgagtcttgtggcttttaatttttgtctcatactttgcatatccttttcattctgtgagaatttttggctttcttttctggtcactgattttgatgttagctattttcattccgctctttaagtcttcaactgtctagtttttatttttgcaataccattttaaatttccaagaataccagtggtgttttctgtggctatttttttttttttttttgagacagagtcttgctctgtcacccaggctggagtgcagtggcaygatctcggctcactgcaacctctgcctcctgggttcaagcaagtctctgcctcagcttcccgagtagctgagattacaggcgcctgccaccaggcccagctaattttttttgtgtgtgtgtttttagtagagacgtggtttcaccatcttggccaggctggtcttggactcctgacctcgtgatccacccacctcagcctccaaaagtgctaggattacaggcatgagccaccgcgcctggcctggctgttctta

SEQ ID NO: 570865 - DNA, 592 bp, Homo sapiens
ggtttaatggaagcaagaaaaatcaagatatttttataatatttcaggtaaagtgtaataaaaacccaatgtaaaggagttggaatggaaaggagagggataggtatgaaaaaagaactgacagttgtagtgactggaagtggcccaagatagcttagatatccaatggatctatgcttggaagaatggtgacatcatatcttcagtaggagggygtattagtctgttctcacactgttaataaagacatacctgagactggataatttatagaggaaagaggtttaattgattcacagttccacatggctagggaggcctcacaatcatggtggaaggcgaatgaggagcaaagttacttcttacatggtgccaggcaagagagcgtgttcacgggaactcccttttataaaaccatcagatctcgtgagacttattcactaccaggagaacagtatgggggaaactgcccccatgattcatttatcttcacttggccctgtccttgacacatggggattattacaattcaaggtgagatttgggtggggacacagtcaaaccatatcagaggataaactgaattgggaga

SEQ ID NO: 570866 - DNA, 608 bp, Homo sapiens
acgtagctgatcgtggatgaatcttttggtttctttcaggttgacttggactctgcttagttcccatcacctgataagaactcrcctttaaacatgtgaaatggaggatataattgcaattaaagtaaagcctgataatttaggttgattattgacatctaatcagtttggactaaatgcaagttatatgttaacaaaaatctcagcttcgttagccacaaatgaacacttgaagttaaatgaataatttggtaggcaggatccaaaagagcaatgtctaaaagcttcagagtaaaaggaaaaaatggaaagcacatgtaccctaaaacttaaagtataataataaaaaaataataaaaaaaaaagaatagacataaggtgcctgccaatactctgactcctctccaagcctactataagccaatcaattggcatatgtcatgtcctgcagatggaaaaggagtatgtgcaaacatgtactgtacagatgcatggatctgctctgcagctgctggaggttatatttgttaagcagcctgacaatatccatgagttttgaaaaaggtagttgcattataggaggtagactaatcctatttgtttcacgt

SEQ ID NO: 570867 - DNA, 608 bp, Homo sapiens
acgtagctgatcgtggatgaatcttttggtttctttcaggttgacttggactctgcttagttcccatcacctgataagaactcacctttaaacatgtgaaatggaggatataattgcaattaaagtaaagcctgataatttaggttgattattgacatctaatcagtttggactaaatgcaagttatatgttaacaaaaatctcagcttcgttagccacaaatgaacacttgaagttaaatgaataatttggtaggcaggatccaaaagagcaatgtctaaaagcttcagagtaaaaggaaaaaatggaaagcacatgtaccctaaaacttaaagtataataataaaaaaataataawaaaaaaagaatagacataaggtgcctgccaatactctgactcctctccaagcctactataagccaatcaattggcatatgtcatgtcctgcagatggaaaaggagtatgtgcaaacatgtactgtacagatgcatggatctgctctgcagctgctggaggttatatttgttaagcagcctgacaatatccatgagttttgaaaaaggtagttgcattataggaggtagactaatcctatttgtttcacgt

SEQ ID NO: 570868 - DNA, 608 bp, Homo sapiens
acgtagctgatcgtggatgaatcttttggtttctttcaggttgacttggactctgcttagttcccatcacctgataagaactcacctttaaacatgtgaaatggaggatataattgcaattaaagtaaagcctgataatttaggttgattattgacatctaatcagtttggactaaatgcaagttatatgttaacaaaaatctcagcttcgttagccacaaatgaacacttgaagttaaatgaataatttggtaggcaggatccaaaagagcaatgtctaaaagcttcagagtaaaaggaaaaaatggaaagcacatgtaccctaaaacttaaagtataataataaaaaaataataaaaaaaaaagaatagacataaggtgcctgccaatactctgactcctctccaagcctactataagccaatcaattggcatatgtcatgtcctgcagatggaaaagsagtatgtgcaaacatgtactgtacagatgcatggatctgctctgcagctgctggaggttatatttgttaagcagcctgacaatatccatgagttttgaaaaaggtagttgcattataggaggtagactaatcctatttgtttcacgt

SEQ ID NO: 570869 - DNA, 579 bp, Homo sapiens
ctgtcaccacccagcagtcattttcacactcatcattgttaaggaattctacagcagatatgactttgagaattttacagttgcaaggtaagactgcaccatatcagctacttttttttaatgctctactatgcacaattcacccatgaatccagggcttgtacttaacctgctatttctcccaaaggacatcattatagacagaagtgaaaggtagaatcaaacagaaatagagcacaattgggattacttattttttccacttgccccctgtgtaccttttcttttcttctttgtcgatgaattgttttctgggagaactccacaggaataacaattgacataaacctcggaaatgacaggaactattcaaaygtttgtttaaattttgcagatttgttgtcatttaggcttggaatcataagcctcatggacatagaaggtgggacacacatgatgttactgagaaattaagatttaatatacttaaaaatattggggcatatactttagttttaatgacaatcttattgtgtataaaaatcatctgtattttctctaagttcaatgtagacagaa

SEQ ID NO: 570870 - DNA, 579 bp, Homo sapiens
ctgtcaccacccagcagtcattttcacactcatcattgttaaggaattctacagcagatatgactttgagaattttacagttgcaaggtaagactgcaccatatcagctacttttttttaatgctctactatgcacaattcacccatgaatccagggcttgtacttaacctgctatttctcccaaaggacatcattatagacagaagtgaaaggtagaatcaaacagaaatagagcacaattgggattacttattttttccacttgccccctgtgtaccttttcttttcttctttgtcgatgaattgttttctgggagaactccacaggaataacaattgacataaacctcggaaatgacaggaactattcaaatgtttgtttaaattttgcagatttgttgtcatttaggcttggaatcataagcctcatggacatagaaggtgggacacacatgatgttactgagaaattaagatttaatatacttaaaaatattggggcatrtactttagttttaatgacaatcttattgtgtataaaaatcatctgtattttctctaagttcaatgtagacagaa

SEQ ID NO: 570871 - DNA, 539 bp, Homo sapiens
caaaataatctgtaaaacaaaccctcatgacacaagtttacctatataacaaacctgcacaggtactccgacttaaaaggtttaggaaaattatgtttagtttttaaaatttgaattaaaacaattttaaatattcarttgacaaagaaggtatatattaaaggtacacaatgtgatgatttgatatacatgtgcattgtgtaatgattaccccaatcatattaattaacataccaattaccatctatgttgtacattagatccccagaacttatttatcttataactgaaagtttgcccccactggtcaacatctccccatttcccacaccctctcatctgtggcaactgctgcttcactctgtttttatgatttatgtaaaatcaaaacagtttgattttacatataagtggtatcatattgtatttgtctttctgtgtttggcttatttcacttagcaaaatgccctccaggttcatccacaaatggcaagattttcttcatttcttatagctgaatactattctattgtaagtgg

SEQ ID NO: 570872 - DNA, 539 bp, Homo sapiens
caaaataatctgtaaaacaaaccctcatgacacaagtttacctatataacaaacctgcacaggtactccgacttaaaaggtttaggaaaattatgtttagtttttaaaatttgaattaaaacaattttaaatattcaattgacaaagaakgtatatattaaaggtacacaatgtgatgatttgatatacatgtgcattgtgtaatgattaccccaatcatattaattaacataccaattaccatctatgttgtacattagatccccagaacttatttatcttataactgaaagtttgcccccactggtcaacatctccccatttcccacaccctctcatctgtggcaactgctgcttcactctgtttttatgatttatgtaaaatcaaaacagtttgattttacatataagtggtatcatattgtatttgtctttctgtgtttggcttatttcacttagcaaaatgccctccaggttcatccacaaatggcaagattttcttcatttcttatagctgaatactattctattgtaagtgg

SEQ ID NO: 570873 - DNA, 539 bp, Homo sapiens
caaaataatctgtaaaacaaaccctcatgacacaagtttacctatataacaaacctgcacaggtactccgacttaaaaggtttaggaaaattatgtttagtttttaaaatttgaattaaaacaattttaaatattcaattgacaaagaaggtatatattaaaggtayacaatgtgatgatttgatatacatgtgcattgtgtaatgattaccccaatcatattaattaacataccaattaccatctatgttgtacattagatccccagaacttatttatcttataactgaaagtttgcccccactggtcaacatctccccatttcccacaccctctcatctgtggcaactgctgcttcactctgtttttatgatttatgtaaaatcaaaacagtttgattttacatataagtggtatcatattgtatttgtctttctgtgtttggcttatttcacttagcaaaatgccctccaggttcatccacaaatggcaagattttcttcatttcttatagctgaatactattctattgtaagtgg

SEQ ID NO: 570874 - DNA, 539 bp, Homo sapiens
caaaataatctgtaaaacaaaccctcatgacacaagtttacctatataacaaacctgcacaggtactccgacttaaaaggtttaggaaaattatgtttagtttttaaaatttgaattaaaacaattttaaatattcaattgacaaagaaggtatatattaaaggtacacaatgtgatgatttgatatacatgtgcattgtgtaatgattaccccaatcatattaattaacataccaattaccatctatgttgtacattagatccccagaacttatttatcttataactgaaagtttgcccccactggtcaacatctccccatttcccacaccctctcatctktggcaactgctgcttcactctgtttttatgatttatgtaaaatcaaaacagtttgattttacatataagtggtatcatattgtatttgtctttctgtgtttggcttatttcacttagcaaaatgccctccaggttcatccacaaatggcaagattttcttcatttcttatagctgaatactattctattgtaagtgg

SEQ ID NO: 570875 - DNA, 482 bp, Homo sapiens
aagaatccttcatatgttttggataatatcgtttatcggatatgccttttacaaatattgtctcccagtctgtgtcttgttttttcactctcttgatgtctttattttttaaaagacatatattagccaaacatatttgtaatagtttaaacagtgtaaacctaacataataaaattgaaattcttgcaactgattaatttaaaaataatattatattcattctggtaaacaaagaaagcattttgtctatttgattccaaaataattagttgattaatacttgaatctaaaagagtaataaacrtttggtccataattatcttttttaaaatttaagaatttgaatttttaattactttgtatttttataagtaatatgaaatgaagcctagttattaaaaaattaaaactttactaccccagtttgggttcttgtctcatcctccccccaaaataataattgctatggtattggtatgtt

SEQ ID NO: 570876 - DNA, 469 bp, Homo sapiens
cctagaaagaatgcagggcaacgaaaactctcattcattgctggtaggaatgcaaaatagtacatccactttggaaaacagtttggctgtttcttacaaagctaaacatactcttaccataaaatctagcaatcatgctctttgatatttacccagaggagttaaaaacttatgtctacacaaatgtttatagcagctttattcatacktgtcaaaatttgaacaaccaagacatccttcagtagtttgatgaataaataaactgtggtacatccagatagtggaatattatgcaatgctaaagggaaatgagctatcatgtcaagaaaatacatggaggaaacttaaattcatgctactaagttagccaagtcaatctgaaaagatcactattgtacatttccaggtatatgacatctagaaaaggcaaaattatggagatggcaaaaaaaattctacgtttgccaga

SEQ ID NO: 570877 - DNA, 469 bp, Homo sapiens
cctagaaagaatgcagggcaacgaaaactctcattcattgctggtaggaatgcaaaatagtacatccactttggaaaacagtttggctgtttcttacaaagctaaacatactcttaccataaaatctagcaatcatgctctttgatatttacccagaggagttaaaaacttatgtctacacaaatgtttatagcagctttattcatacgtgtcaaaatttgaacaaccaagacatccttcagtagttygatgaataaataaactgtggtacatccagatagtggaatattatgcaatgctaaagggaaatgagctatcatgtcaagaaaatacatggaggaaacttaaattcatgctactaagttagccaagtcaatctgaaaagatcactattgtacatttccaggtatatgacatctagaaaaggcaaaattatggagatggcaaaaaaaattctacgtttgccaga

SEQ ID NO: 570878 - DNA, 469 bp, Homo sapiens
cctagaaagaatgcagggcaacgaaaactctcattcattgctggtaggaatgcaaaatagtacatccactttggaaaacagtttggctgtttcttacaaagctaaacatactcttaccataaaatctagcaatcatgctctttgatatttacccagaggagttaaaaacttatgtctacacaaatgtttatagcagctttattcatacgtgtcaaaatttgaacaaccaagacatccttcagtagtttgatgaataaataaactgtggtacatccagatagtggaatattatgcaatgctaaagggaaatgagctatcatgtcaagaaaatacatggaggaaacttaaattcatgytactaagttagccaagtcaatctgaaaagatcactattgtacatttccaggtatatgacatctagaaaaggcaaaattatggagatggcaaaaaaaattctacgtttgccaga

SEQ ID NO: 570879 - DNA, 630 bp, Homo sapiens
gacatacgatgctggcctgaagtggtgacagaggcagggaatagagagaagttaaccgagttgagcgatcccgaaaggtttagatgcaagcctgggagaccatcaatgtttctgctgagggcagagaaaaaagactgagtcaaasatgagactcaagttttatcctaaataaatttttgtcatctggacaggctgcagaatccgcataagaaggaaaaaataaagtaaccttcattgttttaatccgctaataatgtggtggggttttttgttgtggtggttgttattgcagcataacaagtaactttctaactgatacaagctataaggaataacagcagtgtgtgtgtgtgtgtgtgtgtgtgtaaataataacatgaaaagaaaaacactgaggtgaatgtgattttgaaggcaggtttgtcttccatataaactacgctattttcatccatctatgagactatgacaaagctaataataaatcaatgggaagatttcttgctgggttttcaagcaaaacaagttaatagggttccactgaatttatgaatgaagatgccctgtgaatttagctacatcctactgtgagaaaacagcacctcctctgtccctctcctgcctatttct

SEQ ID NO: 570880 - DNA, 610 bp, Homo sapiens
aaatataatttatcaaaagtcactcaaaaataaatagaaaatcctaatagacctataacaagtaaataatttgaattagtaatttaaaattttcccacaaagtaaagccaatgcttagatggtctcactgatgaattttagccagaatttaaggacttcacaactcctccacaaaatacagtaacagagaataattcctaactcattccataatgcagtgctacactataccaaagacatctgaaggaaagctgactagagacaaacatatctcatgaacatagatatgttatgagattcccaaaagatattagtaaaaaaattcccaaaagatattagtaaactgaatctagcaacatatgagaacgggattttacagtatattagtctgatctcacactgctataaagacatacctgagactgggtaatttaaaaagaaaagaggtttaattgactcacagttccacwtggctgggaggcctcaggaaacttacaatcatggggaaaggggaagaggcacgtcttacatggtgtcaggtgagagagaacaagcaagagcagggaaaactgccttacataaccatcagatctcgtgagaactcactcac

SEQ ID NO: 570881 - DNA, 615 bp, Homo sapiens
tctacacgtgtgtgcagacagtagggcaatagagtctaaacaccaacttagaggggttaccaaaagaccagtgctctaaaaaacaaacatttaaaaaaacctcttttttcaccaatatacataattccttccagcgcccctatcatttatgcttttggcttgcatcattttaggccctaaaagatcttcagttggaaaaacataatagcttgtctttgtggggtaaattgcatatggaggagctgtttcacacatattatctcacatgatccccacactgtggttttataaaagaaaaaaagtgaatttcttggagatgacaagactgtcaaaagcacaggactcatgaattgaatcatggggccaaagttttcccgtgctgttctcctgatagtgaataagtctcacgagatttgatggttttataaagggcagttcccctgtacacactctcttgcctgcarccatgtaagacatgcgtttgttccttcttccccttccaccatgattgtgaggcctccccagccatttggaactggagtccattaaacctttttctttataaattacccagtcttgtgtatgtctttatcagcagtgtgagaacagactagt

SEQ ID NO: 570882 - DNA, 615 bp, Homo sapiens
tctacacgtgtgtgcagacagtagggcaatagagtctaaacaccaacttagaggggttaccaaaagaccagtgctctaaaaaacaaacatttaaaaaaacctcttttttcaccaatatacataattccttccagcgcccctatcatttatgcttttggcttgcatcattttaggccctaaaagatcttcagttggaaaaacataatagcttgtctttgtggggtaaattgcatatggaggagctgtttcacacatattatctcacatgatccccacactgtggttttataaaagaaaaaaagtgaatttcttggagatgacaagactgtcaaaagcacaggactcatgaattgaatcatggggccaaagttttcccgtgctgttctcctgatagtgaataagtctcacgagatttgatggttttataaagggcagttcccctgtacacactctcttgcctgcaaycatgtaagacatgcgtttgttccttcttccccttccaccatgattgtgaggcctccccagccatttggaactggagtccattaaacctttttctttataaattacccagtcttgtgtatgtctttatcagcagtgtgagaacagactagt

SEQ ID NO: 570883 - DNA, 539 bp, Homo sapiens
ttctggaaatcttagtgcatgctatggggttttaatgcacacaataaaaataaaagtaaaaagctactgctaatgttaaggtactgtaggtgctaatgacatttttgtttgtgatcttgcttttccattgaacagaacaaggctgcccttgcgttttctgcacatttcagccactcctgtgggccctgctgcctgctcagtgtagccagygctccaagtgcattgccagattcagccatcacagccacattccagcaagtgttgctaccctcatgtaacagaggagcaagaagattcgacacattaagtgaaattttcactgagcacctaagagcaagcatgcctgattctaaaacttaaattcgtatccactgagtttgctgcctctaaaaagccagtagcagtgattgcaattcactcccagaccccttcaaggccaggaatcttttcattttatcaaggttgactcacccccatggatgcatgcataaggaatttagacttgatgagcctgccttgaattattgtcatagacaatg

SEQ ID NO: 570884 - DNA, 539 bp, Homo sapiens
ttctggaaatcttagtgcatgctatggggttttaatgcacacaataaaaataaaagtaaaaagctactgctaatgttaaggtactgtaggtgctaatgacatttttgtttgtgatcttgcttttccattgaacagaacaaggctgcccttgcgttttctgcacatttcagccactcctgtgggccctgctgcctgctcagtgtagccagcgctccaagtgcattgccagattcagccatcacagccacattccagcaagtgttgctaccctcatgtaacagaggagcaagaagattcgacacattaagtgaaattttcactgagcacctaagagcaagcatgcctgattctaaaacttaaattcgtatccactgagtttgctgcctctaaaaagccagtagcagtgattgcaattcactcccagaccmcttcaaggccaggaatcttttcattttatcaaggttgactcacccccatggatgcatgcataaggaatttagacttgatgagcctgccttgaattattgtcatagacaatg

SEQ ID NO: 570885 - DNA, 684 bp, Homo sapiens
gtcggcaccaggctgcctttcttttttttttcttttaacaaggccctagaacaaaagataactctccatgttcaacatggagtcaaagtgaccctttaacctgggctatgtgaaacagcagttcccattgagctggaggtatccctagtccattccgtaagaatggtgtgtagacatttgctaagcctcactcagagggttgcagcacaggatccagagtcctgcagcctgcttaccatccgcagcagagaccctgcaatttctgggtatagcggtggaagtgataccagcagcaacygtcagcatcctaccctggagtatcggggtaaaggctgcagcccctgatggcagcaacagtggcagctgtggcctcactgagctgtgctgcagcatgtctgtctgtgtttctggctgtgtggattcctagacatggttcttgaactctcctaaatattctatggactcttcaatatttgtacaaattctgttacagcttaggtcatcagagtcggttgcttgttacaaagaatagaaacattgagcactggtaatgattatcccttcccagctgctgggagagctcccaagagggcagaaatagagttgcctcaagactgggtcaaagtttgctgtgtgtgcagcagagatttggattaaagagggtagggggcatagcaaatacaa

SEQ ID NO: 570886 - DNA, 565 bp, Homo sapiens
aggaaccttagattattaataatcactccaatagtcctaagtacaagctaaccaaaatatgtcatatgtacttaggaaaaagcagctagaatctccctatgaaattttataaatttatttcaaagcataaatctttctgatcaaattgaaatagctatattgtttaattttagttttaaatagcaacagcaattagtccactaaaggaactaattgcttggaaattttcatatttaaacacaaagccatttctaaatgacactattgaatatcattttaaagtctaaggaaacaatgatctttcaaggtaaagcagtaaagcaaaggtttcaaacacttcaaggaaagartaaaagtagttgtttttgctttatttttataaataaaactgcattacaaaaagtgtgattatgatcaatgcctattttcagcaacacatttcttatgaacaaccacagaattctagacacatatgataattcaaaacacatttgaaatgatggggcatttttcatgcaatctactcctaaagattatgattattttcagagctgcagaattataa

SEQ ID NO: 570887 - DNA, 565 bp, Homo sapiens
aggaaccttagattattaataatcactccaatagtcctaagtacaagctaaccaaaatatgtcatatgtacttaggaaaaagcagctagaatctccctatgaaattttataaatttatttcaaagcataaatctttctgatcaaattgaaatagctatattgtttaattttagttttaaatagcaacagcaattagtccactaaaggaactaattgcttggaaattttcatatttaaacacaaagccatttctaaatgacactattgaatatcattttaaagtctaaggaaacaatgatctttcaaggtaaagcagtaaagcaaaggtttcaaacacttcaaggaaagaataaaagtagttgtttttgctttatttttataaataaaactgcattacaaaaagtgtgattatgatcaatgcctattttcagcaacacatttcttatraacaaccacagaattctagacacatatgataattcaaaacacatttgaaatgatggggcatttttcatgcaatctactcctaaagattatgattattttcagagctgcagaattataa

SEQ ID NO: 570888 - DNA, 565 bp, Homo sapiens
aggaaccttagattattaataatcactccaatagtcctaagtacaagctaaccaaaatatgtcatatgtacttaggaaaaagcagctagaatctccctatgaaattttataaatttatttcaaagcataaatctttctgatcaaattgaaatagctatattgtttaattttagttttaaatagcaacagcaattagtccactaaaggaactaattgcttggaaattttcatatttaaacacaaagccatttctaaatgacactattgaatatcattttaaagtctaaggaaacaatgatctttcaaggtaaagcagtaaagcaaaggtttcaaacacttcaaggaaagaataaaagtagttgtttttgctttatttttataaataaaactgcattacaaaaagtgtgattatgatcaatgcctattttcagcaacacatttcttatgaacaaccacagrattctagacacatatgataattcaaaacacatttgaaatgatggggcatttttcatgcaatctactcctaaagattatgattattttcagagctgcagaattataa

SEQ ID NO: 570889 - DNA, 579 bp, Homo sapiens
attgaatgcctgttatagaaaaattacagaataaacttgtgactggtcttattttacaktttaaaaaagaaagaatttgacacaaataaatggaaagatgtcctgtgttcatgaattggaagacaatatatttaagatgtcaatgctacccaaaacaatctataaatttaatgcaatccctatcaagatcccagtagtggcttttggtagaaatagaaaaatttatcctaaaattcatatggaacctcaacggacctcaaatagccaaacaatcttgaaaaagcataacaaaattgaatgtcataattcctgatttcaaaacttattacaaagcttcagtagtcaaaacaatgtggtactggtataaagacagacatatagaccaatgaaaatagaatcaagaacccagaaataaaccctcacatgtacagtcaaatgatttttgacaagagtaccaagaccattcaatggatattctcttcaataaatgatactgggaaaagcgaatatccatatgcaaaagaatgaagttgaacccttaccttaagctgtgtatacataaaacccaaaatggattac

SEQ ID NO: 570890 - DNA, 568 bp, Homo sapiens
aatcttgtcattgaaaaggccaggcggggctgctcttccatcagaagcaaggtagatacattaaccatgataggtggaagggtctgtggtgatgggaaattgaagatcaggtcccaagaatgaaataattgggagcattgttaagatatataagcgggaccrttttgagtctaatgggcagaaagctaactcagttattatcattgtgggaattttcagactagcatccacttgacagtcctggcaccttgattgaaggcatttctatgtctctttgacaaagatccctgcaaaacagccccatgcgtgtattacgactcttcctctaagccttctcagtgggattggctgtcatgcaccaaagtgtcagtgtgtgatgcgtagagaaaatgccatgatttttcattgaatattaaatactagctctgaactgatgttaatactcaaagtcaaaaccaaacaaaacacagtagtcactggtcagagcaggggctcacagaggtcagatgagaggtggagacttggtccagcatgtttcacagtgagcgtgcaaacccaaatcaggaga

SEQ ID NO: 570891 - DNA, 669 bp, Homo sapiens
tgtgtttctagtggcatcgaactgctttcaatcttgccaatacgttgttcaaattagccataagcttcccagggctaactacctttttcaattcatatgaaaaatacccatcctgttttttattccttcagagacagcaatatttgtttcatgtttttctcttctatttattttttatttttagagagaatctcagagtgcatgcagtggcatgaacacagctcactgcagcctccagcccctgggcttcaataatcctcccaccacaggctctggagtagctgagactgtggktgcatgatgccacaactggctaattttttttttttttttttttttaagatatggtctttctctgtgttttccagcctcatcttaaactcctggctttaagccatcctcctgcctcagcctcccaaagaactgggattacaggctacaggcatgagccaccatggccaggcagacagagcagtcttgattttaaagaagcaaaataatttatttatttattcagccaattttattgagcatccactctgcacctggtacgatgctacatgtcaaacgtgtgtgtgagcactgctttaatcagaagcccagcacactggcagacatgaagtttgaataagcaagaattagacaagattataaattaggggtggagtc

SEQ ID NO: 570892 - DNA, 669 bp, Homo sapiens
tgtgtttctagtggcatcgaactgctttcaatcttgccaatacgttgttcaaattagccataagcttcccagggctaactacctttttcaattcatatgaaaaatacccatcctgttttttattccttcagagacagcaatatttgtttcatgtttttctcttctatttattttttatttttagagagaatctcagagtgcatgcagtggcatgaacacagctcactgcagcctccagcccctgggcttcaataatcctcccaccacaggctctggagtagctgagactgtggttgcatgatgccacaactggctaattttttttttttttttttttttaagatatggtctttctctgtgttttccagcctcatcttaaactcctggctttaagccatcctcckgcctcagcctcccaaagaactgggattacaggctacaggcatgagccaccatggccaggcagacagagcagtcttgattttaaagaagcaaaataatttatttatttattcagccaattttattgagcatccactctgcacctggtacgatgctacatgtcaaacgtgtgtgtgagcactgctttaatcagaagcccagcacactggcagacatgaagtttgaataagcaagaattagacaagattataaattaggggtggagtc

SEQ ID NO: 570893 - DNA, 480 bp, Homo sapiens
gaattctttcctgggtgaaggcaacagccctcctgggctgagtctcttttgagggtttgcctacactggtcttgtttataatagcaaatcgttgaaaacaacctcaatatacattaataacaaatgctatttgtctattaatgtatgaaacaaacatacattatgaacaggctgatgaaacaacacattggtcaatctataaagtgggaagtttttaaggctaaaaaaacagtattcatggaaaatatctaagttatatattttagcttgaataaaacaagttacagacaatatgtaatatttgaaagcttaattttaaaaaatgttgaaaatattcttacatatccatctctaaatgaagacgcataaaatttctggaaggatacaaaaaaacatgaagacyagtgtgttacccttcgggttacattgctcgtatcagattcaaagtgaatagaaagcccagagcccagcttcaaggtg

SEQ ID NO: 570894 - DNA, 493 bp, Homo sapiens
ccctcctgggctgagtctcttttgagggtttgcctacactggtcttgtttataatagcaaatcgttgaaaacaacctcaatatacattaataacaaatgctatttgtctattaatgtatgaaacaaacatacattatgaacaggctgatgaaacaacacattggtcaatctataaagtgggaagtttttaaggctaaaaaaacagtattcatggaaaatatctaagttatatattttagcttgaataaaacaagttacagacaatatgtaatatttgaaagcttaattttaaaaaatgttgaaaatattcttacatatccatctctaaatgaagacgcataaaatttctggaaggatacaaaaaaacatgaagaccagtgtgttacccttcgggttacattgctcgtatcagattcaaagtgaatagaaagcccagagcccagcttcaaggtgagctgtttcctttgaaccycatgtgaataggttgtgaatg

SEQ ID NO: 570895 - DNA, 479 bp, Homo sapiens
cttgtctgcccaagtctctcttaagatacggtgccaaggcccaagggcacacggaagatgtgttctaccgactccgaaggtcacagggcttggagaatagctgttgttccggggaatgcacaatgaataaagcataagatcataacagctttctccacagacacagcatcctgtgatttatattgcatttgcagttagatagaactgcctattctctttctagccctttccccaggatgtgcttgctgtcgcgcaggaagccatcatacgcgaaggcgctcacgcccacagctaccagactctgaagaagatggcatttcctcccgatgttgccatcacttcattccgtcagccaagttcttctttgtggctcaaggaatgttygctctttgagataccatcaacaaagcacgtgaaattgtcagaggctgagctttcaggaaaatcctattgacaacagccaagtgggagtcagtctc

SEQ ID NO: 570896 - DNA, 479 bp, Homo sapiens
cttgtctgcccaagtctctcttaagatacggtgccaaggcccaagggcacacggaagatgtgttctaccgactccgaaggtcacagggcttggagaatagctgttgttccggggaatgcacaatgaataaagcataagatcataacagctttctccacagacacagcatcctgtgatttatattgcatttgcagttagatagaactgcctattctctttctagccctttccccaggatgtgcttgctgtcgcgcaggaagccatcatacgcgaaggcgctcacgcccacagctaccagactctgaagaagatggcatttcctcccgatgttgccatcacttcattccgtcagccaagttcttctttgtggctcaaggaatgttcgctctttgagataycatcaacaaagcacgtgaaattgtcagaggctgagctttcaggaaaatcctattgacaacagccaagtgggagtcagtctc

SEQ ID NO: 570897 - DNA, 535 bp, Homo sapiens
ataacacgtagagaatccaagaagaaacagctctcttgcattagggtcacttgaggagtgttcatttaggaaaggactatcatcagaatttggggtagaatataagggagacacaggatttagcactgtaacccaggatgtgtaacagcagagctgtcaccagccctagcccaaagcgtcaaagggagagaattattaccaatacctgaaagaagagagctggcaaaggaggctgccttgagatgagcagtgaaattcagtgaagaaacaaagccaggcccagaaaagtcacagggagatgaaataccccgacctcactttcaacttcctcttatctattgctgggttggccctgtaatagcctgaatcccactttctgatggccaggaagccctttggtagtccatacaggccattgtgctggtaacacagccgataatggtagaaaatagatctgcagaggcagagagaagaaatyggccacactcatacatgtctccttttccagactctgaattttctagagtctggatct

SEQ ID NO: 570898 - DNA, 527 bp, Homo sapiens
gggtgggggggtgggggagttgggtaacaaaaccaattaaataactgacctctgatggtattgtagcccattctaagaatttttattattatttttaaaattcaagatggcaatccacaggaggatttcagcaaaagagcaccatgctctacagctgtggctacatacgggcactttcttccaccgatgtagaataaactttctggtaccaagcacacatatcagctagaaagctattaaatagtcaaagaggcagataatgatgactcggactaaggtcattatccaaaaamattgaggtggtaagaaatggtcaaatttaggaactgttttgaaagctcagccaatagtatttgctaatggattggactggaaatggtatgtgagacacagtgaggagtgaaagatgactccaagtttttggcctaaacagttggagtaatggagtggccttttacagaaattgagaagactaactgacaaaactctcagggaatacctagggtacagtaataatcgtgtgctta

SEQ ID NO: 570899 - DNA, 527 bp, Homo sapiens
gggtgggggggtgggggagttgggtaacaaaaccaattaaataactgacctctgatggtattgtagcccattctaagaatttttattattatttttaaaattcaagatggcaatccacaggaggatttcagcaaaagagcaccatgctctacagctgtggctacatacgggcactttcttccaccgatgtagaataaactttctggtaccaagcacacatatcagctagaaagctattaaatagtcaaagaggcagataatgatgactcggactaaggtcattatccaaaaacattgaggtggtaagaaatggtcaaatttaggaactgttttgaaagctcagccaatagtatttgctaatggattggactggaaatggtatgtgagacacagtgaggagtgaaagatgactccaagtttttggcctaaacagttggartaatggagtggccttttacagaaattgagaagactaactgacaaaactctcagggaatacctagggtacagtaataatcgtgtgctta

SEQ ID NO: 570900 - DNA, 527 bp, Homo sapiens
gggtgggggggtgggggagttgggtaacaaaaccaattaaataactgacctctgatggtattgtagcccattctaagaatttttattattatttttaaaattcaagatggcaatccacaggaggatttcagcaaaagagcaccatgctctacagctgtggctacatacgggcactttcttccaccgatgtagaataaactttctggtaccaagcacacatatcagctagaaagctattaaatagtcaaagaggcagataatgatgactcggactaaggtcattatccaaaaacattgaggtggtaagaaatggtcaaatttaggaactgttttgaaagctcagccaatagtatttgctaatggattggactggaaatggtatgtgagacacagtgaggagtgaaagatgactccaagtttttggcctaaacagttggagtaatggagtggccttttacakaaattgagaagactaactgacaaaactctcagggaatacctagggtacagtaataatcgtgtgctta

SEQ ID NO: 570901 - DNA, 618 bp, Homo sapiens
tgctctacagctgtggctacatacgggcactttcttccaccgatgtagaataaactttctggtaccaagcacacatatcagctagaaagctattaaatagtcaaagaggcagataatgatgactcggactaaggtcattatccaaaaacattgaggtggtaagaaatggtcaaatttaggaactgttttgaaagctcagccaatagtatttgctaatggattggactggaaatggtatgtgagacacagtgaggagtgaaagatgactccaagtttttggcctaaacagttggagtaatggagtggccttttacagaaattgagaagactaactgacaaaactctcagggaatacctagggtacagtaataatcrtgtgcttatttattgtatcagggattggctaaattgtggtaacaaagagctctcaaaatatgatgattcaaataagatttaggtttctttctctactgtgcaatatcctggaagtgaatggaggaggctggtggagcagctgtacctcttgtagtcattcaggcacccaggtttattccgtcttatttgatctggtgtcactcagctgttgtcttttctacatggttgaagctggctcattac

SEQ ID NO: 570902 - DNA, 618 bp, Homo sapiens
tgctctacagctgtggctacatacgggcactttcttccaccgatgtagaataaactttctggtaccaagcacacatatcagctagaaagctattaaatagtcaaagaggcagataatgatgactcggactaaggtcattatccaaaaacattgaggtggtaagaaatggtcaaatttaggaactgttttgaaagctcagccaatagtatttgctaatggattggactggaaatggtatgtgagacacagtgaggagtgaaagatgactccaagtttttggcctaaacagttggagtaatggagtggccttttacagaaattgagaagactaactgacaaaactctcagggaatacctagggtacagtaataatcgtgtgcttatttattgtatcagggattggctaaattgtggtaacaaagagctctcaaaatatgatgattcaaataagatttaggtttctttctctactgtgcaataycctggaagtgaatggaggaggctggtggagcagctgtacctcttgtagtcattcaggcacccaggtttattccgtcttatttgatctggtgtcactcagctgttgtcttttctacatggttgaagctggctcattac

SEQ ID NO: 570903 - DNA, 556 bp, Homo sapiens
tagaataagacttatgacaattttctaagagacataacatgaattgtatacccgaacaaccatagtcttaagtcttaaagaaatggagagctaagatatcatctgttttcyttaagttagcattgaagtcagtattaaaacaatcttatctgagccctaacttatcgttcagagaactttatgcctcctaagtagaacttattgactaataaaaagaaaataaaataaatttctcatccttatttttgaagagtgtaaacaatgaaagctgaaaataaccaaccttgtttctgaagttgtcagaatgtgacacttgttactataggaatggagccagtaattattcatctttaatttgtttgattattttaaacagcaaaagaattaaaaaattgaaaactgacgtttgaactgaattaaggaggtaactcaagtgccagtaacactaacctgcctcagggatgaacgggtccaattcaaagatacttcattataccacaaatataactaaaataagcataaattgatgaataagatgtcctcatcagtggctaat

SEQ ID NO: 570904 - DNA, 556 bp, Homo sapiens
tagaataagacttatgacaattttctaagagacataacatgaattgtatacccgaacaaccatagtcttaagtcttaaagaaatggagagctaagatatcatctgttttccttaagttagcattgaagtcagtattaaaacaatcttatctgagccctaacttatcgttcagagaactttatgcctcctaagtagaacttattgactaataaaaagaaaataaaataaatttctcatccttatttttgaagagtgtaaacaatgaaagctgaaaataaccaaccttgtttctgaagttgtcagaatgtgacacttgttactataggaatggagccagtaattattcatctttaatttgtttgattattttaaacagcaaaagaattaaaaaattgaaaactgacgtttgaactgaattaaggaggtaactcaagtgccagtaacactaacctgcytcagggatgaacgggtccaattcaaagatacttcattataccacaaatataactaaaataagcataaattgatgaataagatgtcctcatcagtggctaat

SEQ ID NO: 570905 - DNA, 562 bp, Homo sapiens
catcaatttctaaagcttcactgaaggctatgkgtttcctgcatgggcaaacatgtatggcattggttttagcacaagtctacggtttgaacgtgtccctccaaagttcacgtgttggaaatttaatcccaatgcaacagtgacaagaggtgagacttttaagaggttattaggccatgaagactctgccctcatgagtggattaataccattatctggagagtgatttcattgtcaccagagtggggtctttatacaagaacttttggttcccgctttctctctcccatcctttctttgctcttccaccatgagatgatgcaacaagaaggctcttgcaagatgctgggccctcgatctttgacttctcagcctctagaaccgtgagtcaataaatttatgtttattataaattaccaagtctgtagtattctgttatagcatcacaaaacaaactaagatacacacaccgaaaaactactaaaatatgacaatctgaacacaaataaattttttcattcaatgtaacctagatagagacaaaaagttctaggactgttga

SEQ ID NO: 570906 - DNA, 562 bp, Homo sapiens
catcaatttctaaagcttcactgaaggctatgtgtttcctgcatgggcaaacatgtatggcattggttttagcacaagtctacggtttgaacgtgtccctccaaagttcacgtgttggaaatttaatcccaatgcaacagtgacaagaggtgagacttttaagaggttattaggccatgaagactctgccctcatgagtggattaataccattatctggagagtgatttcattgtcaccagagtggggtctttatacaagaacttttggttcccgctttctctctcccatcctttctttgctcttccaccatgagatgatgcaacaagaaggctcttgcaagatgctgggccctcgatctttgacttctcagcctctagaacygtgagtcaataaatttatgtttattataaattaccaagtctgtagtattctgttatagcatcacaaaacaaactaagatacacacaccgaaaaactactaaaatatgacaatctgaacacaaataaattttttcattcaatgtaacctagatagagacaaaaagttctaggactgttga

SEQ ID NO: 570907 - DNA, 421 bp, Homo sapiens
cggctcaccgcaacctctttctcctgtgttcaagcgattctcctgcctcagcctcccaagtggctgggactacagtgcctgacaccaagcccagctaatttttgtatttttaatagaggcggggtttcaccaagttggccaggctgatctcaaaaactcctgacctcargtgatctgcccacttcggcctcccaaagtgctgggattacagatgtaagccactgtgcctggccaacattgtgtttattgaaagtatgcagtgaaccagaaattctacaggactgaggtacacatatgtagcatatgtgtatatactagtatatacatagtatatacactcaagacaaatcattaaaaggctatctcctcctagaatacttttagccagggtcaaattaaataaggtgtgttttttttcaga

SEQ ID NO: 570908 - DNA, 602 bp, Homo sapiens
cagggaactagttttattctccaccaccttatttgctcataggaattttgtagtaccataaagcaaaatggctaaaatacctgcatgtctgcctamaaaccttactgtttctttaattcggttccctgtgtctttcttacctatatacctactttgttcctaataagaacatatgtttctgtttgttttatagaagtcagaaaactcaaaactttcaagagcaagaagttattttgactaaggaaatattttttaaaacctggaaattcagtttgctatgagtaccataaagaatatacgggcctggaaaagatgagcatcctcttttcctaaagagagtttttttcctggatctcggcatgctcctcaaagaagagcttgagatgccaaatttccctttcctaaagggccttgtcacctcatgatagcactgttattctgagaccctcaataggttatgactttcttaatgggctgggtccagagtaatactttccagtgatacattagtgcagcccaaccctctcccacaaaagggagatacttaataagctaaactgcagacactctgcttccttcataaatgatttggcatcctattg

SEQ ID NO: 570909 - DNA, 636 bp, Homo sapiens
ttgcccatctctgaactaacaactaggcagacaagtaaaacactgctagaatcagcatcagaacagtaaagaaacactaaacatgttttaagagtaagaatatgtatgtatttatacatatttaaaagacatgttcagattaatatacagatatataaatataggcaagtagaaaaaaaatgsaatggaaatgcaatggaatgtcagtgtccctggtttatcttgatatgttgaagcttcataaccttgatcttgggtaagtagatttacctctcttcattgaaatttactcatttataaaatgcaacaatacaacatatcccatagggttctcagaggaccaaatgtgaccacgtgcaataaatggtagctattataatatgcagaaatggtgctagatgttcaaaactcttgcctagcatcaagaagaatgcttaaggtgagctccattggaacttaatgcatgagatccagggtactagctaattagcaaggcttgcagctgcaaagtacaacacagaacagcttatgtcagggaaaagcaaaatgattcacttcactcggtaatgaatccctttttgcgctgtttatctatgctttcccacaacccagcactaactgcatatttcactagag

SEQ ID NO: 570910 - DNA, 636 bp, Homo sapiens
ttgcccatctctgaactaacaactaggcagacaagtaaaacactgctagaatcagcatcagaacagtaaagaaacactaaacatgttttaagagtaagaatatgtatgtatttatacatatttaaaagacatgttcagattaatatacagatatataaatataggcaagtagaaaaaaaatgcaatggaaatgcaatggaatgtcagtgtccctggtttatcttgatatgttgaagcttcataaccttgatcttgggtaagtagatttacctctcttcattgaaatttactcatttataaaatgcaacaatacaacatatcccatagggttctcagaggaccaaatgtgaccacgtgcaataaatggtagctattrtaatatgcagaaatggtgctagatgttcaaaactcttgcctagcatcaagaagaatgcttaaggtgagctccattggaacttaatgcatgagatccagggtactagctaattagcaaggcttgcagctgcaaagtacaacacagaacagcttatgtcagggaaaagcaaaatgattcacttcactcggtaatgaatccctttttgcgctgtttatctatgctttcccacaacccagcactaactgcatatttcactagag

SEQ ID NO: 570911 - DNA, 607 bp, Homo sapiens
gaactaacaactaggcagacaagtaaaacactgctagaatcagcatcagaacagtaaagaaacactaaacatgttttaagagtaagaatatgtatgtatttatacatatttaaaagacatgttcagattaatatacagatatataaatataggcaagtagaaaaaaaatgcaatggaaatgcaatggaatgtcagtgtccctggtttatcttgatatgttgaagcttcataaccttgatcttgggtaagtagatttacctctcttcattgaaatttactcatttataaaatgcaacaatacaacatatcccatagggttctcagaggaccaaatgtgaccacgtgcaataaatggtagctattataatatgcagaaatggtgctagatgttcaaaactcttgcctagcatcaagaagaatgcttaaggtgagctccattggaacttaatgcatgagatccagggtactagctaattagcaaggcttgsagctgcaaagtacaacacagaacagcttatgtcagggaaaagcaaaatgattcacttcactcggtaatgaatccctttttgcgctgtttatctatgctttcccacaacccagcactaac

SEQ ID NO: 570912 - DNA, 581 bp, Homo sapiens
cttgttgaacatgccaatcataatcctgactcagagctttgcacatttattccctctgcataaaatgctcttctccccaaatatcagcactatctattgtcacctcattcatgtctctgctcaatgctcaacttacagaggccttccctgagcaccttacakaacatagcaattccttccccatcccacatgtcacactatccccttgccatgctttggttttcatagccattattactcctggttgtgtgtgtgtgtgtgtgtgtgtgtgtgtgtgtatacccagacatttgaaaaaatcagttgtgaactactgattgagtgttataaaatttagctatttggtcccaattgtcttgcagagaaatgaccacaagcctgaaagccataaatcatgggagtttattccctgtattatatcaacacactataaatatttgtttactttttaagttatgtattttcctcattaaaatataagcaccatgttaatagaaacttcgtattctgtctggaacgatttttatacaaaataagcatttcatgaattaacaaattggagaaacgaaatgaacaaaacc

SEQ ID NO: 570913 - DNA, 542 bp, Homo sapiens
atttcaaacatttacttagcaagaaaactttaaaagagacatccaatcggtagctcacaatgtaggtttacatatacacagagagtactacactgggaccatgtatacagtaatgtattatcttgtttaatttgaaaacattatrgtattagagaagttattgtactgagacttcaaaagatgaaatgttatatcttctaagattattttaagtgaaaaataagcacagtataaaaccatttcctctctccaaaatgctggttgaattcaaagaatatctgttttcctttattcctttagaactgtaagtctaactacaaaaaaataaaatttcaatgttctgcgacgctaactcagaataagcattggggaatccaatccaattcccaaatcttgaacatcagaaagtgtacaaacagaacccacaaaatgtatcaaggatacctttcatactgtgaaatggaatgtaattaacagaacaataagccttcaatggaattgacttgcctattgttgatctgtgttggctatttgcgctagat

SEQ ID NO: 570914 - DNA, 631 bp, Homo sapiens
tgctgctttaagaatattagtttgcataaaataggaaggaattttcagtttactaaaaatatttctcataaagaattgaaaatatttatgaatatccatatctatgaaatctgctaaatatccaaatttgccatttaatctgatgtatgtaaaacaactactttaattagaagagagcaactttcatcaatctttcccctatgcctggtttagtcagcagaacactacctccacattctcatctctcaattgagctttcaggaatatatatctgaatgtatatctaccgtcagaacagaaatcttgtcttgtactctcaaagatgaagtatctcacttttttccatctcagaaaatggtaccaccattcacttaattacataawaacatacaagtcattcctaatttatctttctctcacacccacatctaatccatgcactgccaaattataccacatttctttcatctcccacactgccatcttggcacaagccaccattatattttgcttcgattactgctatggcttcccaagtggtatccctttttctcccactactctacaatccaatttttcttccaagattattagtggaatccatttttctactcataaaacataaatcaga

SEQ ID NO: 570915 - DNA, 631 bp, Homo sapiens
tgctgctttaagaatattagtttgcataaaataggaaggaattttcagtttactaaaaatatttctcataaagaattgaaaatatttatgaatatccatatctatgaaatctgctaaatatccaaatttgccatttaatctgatgtatgtaaaacaactactttaattagaagagagcaactttcatcaatctttcccctatgcctggtttagtcagcagaacactacctccacattctcatctctcaattgagctttcaggaatatatatctgaatgtatatctaccgtcagaacagaaatcttgtcttgtactctcaaagatgaagtatctcacttttttccatctcagaaaatggtaccaccattcacttaattacataaaaacatacaagtcattcctaatttatctttctctcacacccacatctaatccatgcactgycaaattataccacatttctttcatctcccacactgccatcttggcacaagccaccattatattttgcttcgattactgctatggcttcccaagtggtatccctttttctcccactactctacaatccaatttttcttccaagattattagtggaatccatttttctactcataaaacataaatcaga

SEQ ID NO: 570916 - DNA, 604 bp, Homo sapiens
cctctggcatttaggtatgcaataacacttggaacactgcccggggtgcaaacaaaaaaaaatatgtaaggcacatgttaagcattttatgaagaccacttaatttcactaaagagagacaggaagaattggactgattttccacataaactccctgggtcttttgctgaatatcttgatagtaagcaagcttgtggaagatcctttactgcctattcattcattattaccatggtatactctttataaatatgaatgttcacagataacaaagaatccatctatagcaagaacattgctacctaaattttgagaagattgaaytaatgatacaatgaaacatttcctcaattaaaactttttaaaatttaaatgatcgttttttaaattttaaattattttgacataaggctattagcacaagatctgctaaagttacactgagctggctagaattaccatttagggaaagattggcatcaggttataaaattgtagtcattttattgagtttaattgaaggcaatcaacaacattgcaaaagctgtgactctgaaggcagtcaacatcattgcaaaagctgtgactctgaatattgatatat

SEQ ID NO: 570917 - DNA, 499 bp, Homo sapiens
ttgctgtttgggcatctaaacttcagaaatagagttagttcttaatagatcaggccacatagttcttaaattatgtaatgaaatgcgtacggtcttatttattctcaggcaaggcactttacgttagttctgtgaaacttcacggttttaattccatgatatgagagaggaagcttayaggagaagagcttgatctggattcttttggaaactgctctatttttagttaggctcacgcgtaaaatgcatctctagagagctgaatgacttgaatagttgaatgggagacttttaatattgacgttttggaagtggatgaacacctaaaagaacaacaattttctttttcctcaattaatataagcctgccccatctgttaacatctaactagtgatttcaagagctacttagcattgctcctagtcaatgacaatgaggtgagagtattagttaaaatggagaatactagctgtatttttagttttagagaaaactcca

SEQ ID NO: 570918 - DNA, 588 bp, Homo sapiens
cttcgtttgcttccttctcttatctccttatcatgcagcataagatgtattgactttatatcatagtatttaagtattgttaacttcacatcatagtatttaagctaygggatatcaatgaggtgagtaaacatcacccaagaactttgtgtcttcttttggggaaagggttagtaaatttgcagctgtacacagggttgttgaatcatgttaggtggaagtatgaccttgttcttgtctttatttgaaaattaaatatggtttaagaagatatgtatgggtgccaaggtgacaaggggtcgattgacttgtgatgtttaattttacatgtcaacttggataggtcacaataccagaaagctgctcaaaaattattctactgtagacgttttggtgaagatattttagtaacacctaaacgaatagacattgagtaaagctgattaccctccaataatgtgggcgagcctcatccagtcagtcaaatagaaaaaagtcccatctttcccctagaaagaggaaattctgtcagcagacggctttcagactcgaattgcagcatctctgatcaatgggccttaccctgta

SEQ ID NO: 570919 - DNA, 588 bp, Homo sapiens
cttcgtttgcttccttctcttatctccttatcatgcagcataagatgtattgactttatatcatagtatttaagtattgttaacttcacatcatagtatttaagctacgggatatcaatgaggtgagtaaacatcacccaagaactttgtgtcttcttttggggaaagggttagtaaatttgcagctgtacacagggttgytgaatcatgttaggtggaagtatgaccttgttcttgtctttatttgaaaattaaatatggtttaagaagatatgtatgggtgccaaggtgacaaggggtcgattgacttgtgatgtttaattttacatgtcaacttggataggtcacaataccagaaagctgctcaaaaattattctactgtagacgttttggtgaagatattttagtaacacctaaacgaatagacattgagtaaagctgattaccctccaataatgtgggcgagcctcatccagtcagtcaaatagaaaaaagtcccatctttcccctagaaagaggaaattctgtcagcagacggctttcagactcgaattgcagcatctctgatcaatgggccttaccctgta

SEQ ID NO: 570920 - DNA, 499 bp, Homo sapiens
ttgctgtttgggcatctaaacttcagaaatagagttagttcttaatagatcaggccacatagttcttaaattatgtaatgaaatgcgtacggtcttatttattctcaggcaaggcactttacgttagttctgtgaaacttcacggttttaattccatgatatgagagaggaagcttacaggagaagagcttgatctggattcttttggaaactgctctatttttagttaggctcacgcgtaaaatgcatctctagagagctgaatgacttgaatagttgaatgggagacttttaatattgacgttttggaagtggatgaacacctaaaagaacaacaattttctttttcctcaattaatrtaagcctgccccatctgttaacatctaactagtgatttcaagagctacttagcattgctcctagtcaatgacaatgaggtgagagtattagttaaaatggagaatactagctgtatttttagttttagagaaaactcca

SEQ ID NO: 570921 - DNA, 619 bp, Homo sapiens
tttttcacatttttaacttttccatgtctgaaaaaatactggattctcatattaatactctaaatacaaacacttcccataattagttaaccactttatctaagtagtgtttcaactcttctcaaactaatttctcaataaaagaaggaaaaatggaattttccatgtaatgcattgccatctgtgtgcagctgataagatgaaaaaagaatatttgaatgtcagaggattggagttacaaaccgtaccttccatgacatacaccagtgaccccacgtctccttctttgatgatgcaactgtgccttgccatactccaccgggtacatacaatccacaatctcctggatctgcgacagctccaagttcttcataaagtcattgtcaaggatagcttcctttataagatccttggacctatggcaagagagggaagatttactggcacatctgacaagctctttcatagtttgtgaggtttagcagcgccatagagtgctctggcacaccacaaatgtattttcttgttaggaatccaataattttctggaagactggagaacaaagtatgtccatggcagcaaaamaaaaaaaaaaaaaaaaaggcactaagaattttt

SEQ ID NO: 570922 - DNA, 604 bp, Homo sapiens
ttttaagtattctatcatttaatgaataagtgacctaccaaccaaccaaccaacaaaatcatacaagtccattttgctttagactttttcttaatcacaaagattgctagaaaaccaatggatacatactttaaagtttgtaatttagtttaagaataaacatgaataaaatttcaacattccagaacaaatactattactactgtttatawttataaaagaatatcagggatgtattgtactatacacaattatagaaaaaaatgtttacttattttttatgtgcctcttctgctagacttaatgctccacataagcagggatcattttaaatttgttctttattttatgcccagtgtctactaagatgccagtcatctataaatagtatttaaaaaaataccaacctaacagctttatgtgtgaagactggtgaatataatgttaccttcagtaaatggtgggagataatactgctcaagtaatattttggattaaaaaagaattggattcctacttagctatttgaaacaactggtagaaatgcaacagttctttacacatgtcccatgctttttagagaatatttctttcttcaagcagc

SEQ ID NO: 570923 - DNA, 511 bp, Homo sapiens
agaaatattttatcaggaggaggacaatcagagcactatcagagaagtcagaagccacataagatgaaagcaaagaacttagcaatccagagaggaggcagcacatttggaatgtcatattaaaagtcttaattttwaaaaaattaaatacaagctgaccttagtcctcatttccttagcaagtggcttccaggggagtgacctgcggtagtgaacactgactaaagcgttagtcttccctccccatttctgggaggcttttcatccagacctcagtctaaccagcctagccttcaccattatgttttgtaataattcagttttaagtagtgcaaagatacacataaaaataaaaacaattgaaatttcattactatgaagaataatcctagagtggaacgttatgctgccattaaaattttgtttatgaggagtgttaatggcatggaggaaattcttctattatttttaagtgaaaatgcaggatacaaaattgattttagagtaagaa

SEQ ID NO: 570924 - DNA, 511 bp, Homo sapiens
agaaatattttatcaggaggaggacaatcagagcactatcagagaagtcagaagccacataagatgaaagcaaagaacttagcaatccagagaggaggcagcacatttggaatgtcatattaaaagtcttaatttttaaaaaattaaatacaagctgaccttagtcctcatttccttagcaagtggcttccaggggagtgacctgcggtagtgaacactgactaaagcgttagtcttccctccccatttctgggaggcttttcatccagacctcagtctaaccagcctagccttcaccattatgttttgtaataattcagttttaagtagtgcaaagatacacataaaaataaaaacaattgaaatttcattactatgaagaataatcctagagtggaacrttatgctgccattaaaattttgtttatgaggagtgttaatggcatggaggaaattcttctattatttttaagtgaaaatgcaggatacaaaattgattttagagtaagaa

SEQ ID NO: 570925 - DNA, 583 bp, Homo sapiens
gtttttgtttctcaaattttattttggatggaggacatttaatttcaggtctctgaagaaacaaactggaggcttccatataggctgttgtgtcacttcaaaagaaactaatcaatataggaccacatcttactatttataccttcatacagatattgccaaatagcattatttctgaattgtcacaatttgtctctgctctcgcagcaagatagataccttgtgcctctgtgtagtacaaccccaaagatggtcttgtcagagaataatactcaaagccctgccttttcatgtaattttcctttaagtcctttcctattgaggactgaaaaccttaggtcaactctcattagtctttactttctccaacattayagactataattaatcagggcctccatctaattcttctttgaatccctttctttccccaaagaaatggtctaagacactcactgtaactaagatataatgcatataaaatcagtgagttgagttgtgttattagtatgggagttggggaaagccgatatcacaagtaccagaaggtagccatctgctcaacccagagtatatattttaa

SEQ ID NO: 570926 - DNA, 565 bp, Homo sapiens
taagatataatgcatataaaatcagtgagttgagttgtgttattagtatgggagttggggaaagccgatatcacaagtaccagaaggtagccatctgctcaacccagagtatatattttaacaatattttgaaataattcagcagcctgacttgggaggtataagaagcaaccacaaagatcatgattttttttaatctttactatctgcctttgtgtacaaattatttatttttaaaaatctttttctttcatgcccaaaatgtgtggctttttaaatctaaacacccataaaagcracttgactcatttgagctatccctattcctttgtcatcattgaattgtcagcctctgaaatattagctatatataatgatatgctggtattctggctgtctggcttgggtggagaaaagcggaggaagccatggtgtgtagcgtttgccaatttccatggtgtaaatactcccaccatggccaatttcaagctttcatgcaaaatcaacctgtttgcaaagttcctggaaattaacaagcagatcttacatgagccagtgcaagttg

SEQ ID NO: 570927 - DNA, 565 bp, Homo sapiens
taagatataatgcatataaaatcagtgagttgagttgtgttattagtatgggagttggggaaagccgatatcacaagtaccagaaggtagccatctgctcaacccagagtatatattttaacaatattttgaaataattcagcagcctgacttgggaggtataagaagcaaccacaaagatcatgattttttttaatctttactatctgcctttgtgtacaaattatttatttttaaaaatctttttctttcatgcccaaaatgtgtggctttttaaatctaaacacccataaaagcgacttgactcatttgagctatccctattcctttgtcatmattgaattgtcagcctctgaaatattagctatatataatgatatgctggtattctggctgtctggcttgggtggagaaaagcggaggaagccatggtgtgtagcgtttgccaatttccatggtgtaaatactcccaccatggccaatttcaagctttcatgcaaaatcaacctgtttgcaaagttcctggaaattaacaagcagatcttacatgagccagtgcaagttg

SEQ ID NO: 570928 - DNA, 595 bp, Homo sapiens
aagctttcatgcaaaatcaacctgtttgcaaagttcctggaaattaacaagcagatcttacatgagccagtgcaagttggctccagcacaatactggatatagagtatttttctaacaccctaagaatttagtgtaacttaatttataaattctgaaaccaacatgataatcctttctttccttaaaaatttcatgaggtggtataatatccccagataatttaatgccaggattagcaatagttctttcaaatgttcaattttagaaaaataaattggaaaatccatttccccatttacttattacagagaaaatttctgaatrtaaagaaaaaatacttgacagaaattatctttctacacaatcttaggtaaaaatgggcaattttagagtataggaaaacatatacctacttctcaaataagggagccagcactattcactgttaataaataggcccccattagtttttcttaagctaataaaaggatattctacattatggttaccatacagtaggctagcaatatgtaaataacagtagggttatttcaaggtgtagggaaggctagttcagattaagtggtcaggaag

SEQ ID NO: 570929 - DNA, 632 bp, Homo sapiens
tttaaccaaaaacatcactcactaattttcttttgcactgaatggtcaactttgggatcaaatgtcaggggaagcaataaatgattttcacagtcaccttggcctacagtattgtctatccatttgggaactcagacatccaagtcttcattgaggacatgacagtccacagctctttcacacagacatactccttgcagagcctcttaaaagtttctaattccgagttattttcaaaggacaactccatccatctattgtgaaatatttgattaatacctataagaaagaaaattggtagtcctgttgctgccacaattgttaagattctgcccaaaccatggatcctatttcttgcctaacaacttttctgaatgaactccacagatataagctggctaagagctaagaactaccaaccagcccacataaagataaaatttaatcctgcaaagttattggccaatttagatattccctcaaaaccacaaaccagttttcaacaaggttcacactgtattttcacatcaaccaactctgctatagctatcccaatcttatgacaaaaatagtcatgaggaaattaaaactgtttgccraattcagacctataattagcatttgatacaaaa

SEQ ID NO: 570930 - DNA, 535 bp, Homo sapiens
aaggcaaagtctttttattggagttcaacccaggatattcccttctagtatgacctaaacatcatctcaggatgactgaggctggatttatatgtacaaactacaggcctgtctgcctgattcccgcccagagctgtataatgcttgcagtgtcagtccatgtccttcacttgaaacatatgacacaatgagagggmcaattatgatggtctattgtagtgtgagaaatgtcataatttgaatatttttataaaaatacatataggagaaaaggggggaacacaaccctcactctcaaaatctaaaagtgacttgtaaaacctagaaagcaagagttgggaaacctctgaacacacataaagaggctttctttgaagtcattagcagggtgtgttattaataataaattgaatcaagagtattgtagtcaaagaagggccttgcatttgacagggaaaaatccaaggcagtacatggttgtaagccattcatatgacatatgagtggctcttaggagctgaaacacaaagccatc

SEQ ID NO: 570931 - DNA, 548 bp, Homo sapiens
actaataaaatagtcagtgtgattaaaaatgaaaacattaatagatctttttaatagcagcaactactaactggggaaaattaaacatttgataataacaaaataatttttaaaacacctataagttaatcttcaaagacatgtccaaaaaccatttaaagaaaaatatgaaagattaatgataaatgtaagatgttaataaatggtaagacctgccttctttttggtggcaatgtctcaatataaaaaatatgccaagtctccctaaatgtattacttaaatttaaacaatcaaaatctcaaccagatttctcaagaatttgacaaattaaattttatcatatatgtaaaatatttacgtawatctgaacaattggtgggaaatgaaacaatggtcacagggtcttataagaaaactaaacacactataagcattgcaaaaatacaaaagatgtataaatgaagtagaactcttccttatattttcacgaagttcacctttaattgattaaagaacaaagtatacaaaaatagaaacttatacatac

SEQ ID NO: 570932 - DNA, 548 bp, Homo sapiens
actaataaaatagtcagtgtgattaaaaatgaaaacattaatagatctttttaatagcagcaactactaactggggaaaattaaacatttgataataacaaaataatttttaaaacacctataagttaatcttcaaagacatgtccaaaaaccatttaaagaaaaatatgaaagattaatgataaatgtaagatgttaataaatggtaagacctgccttctttttggtggcaatgtctcaatataaaaaatatgccaagtctccctaaatgtattacttaaatttaaacaatcaaaatctcaaccagatttctcaagaatttgacaaattaaattttatcatatatgtaaaatatttacgtaaatctgaacaattggtgggaaatgaaacaatggtcacagggtcttataagaaaactaaacacactataagcaktgcaaaaatacaaaagatgtataaatgaagtagaactcttccttatattttcacgaagttcacctttaattgattaaagaacaaagtatacaaaaatagaaacttatacatac

SEQ ID NO: 570933 - DNA, 556 bp, Homo sapiens
ctcttccttatattttcacgaagttcacctttaattgattaaagaacaaagtatacaaaaatagaaacttatacatacgagaaattgataacattgcagtgctggaagtttctgtaacataaaaatacagtcaaccctccgtatccatgggttctgcattcatacatttaaccaacaatggattgtaaatttttttaaaaaaatggatggtcacatctgtactgaacatgtacagactttttttggtcattattccctaaataatacaatgtaacaacaatttacattgcatttaccttgtcttggatattatatgtaatctagaaatgatttaaagaataagagaggaggaggartacaagaccagcctgagcaacatagcaagatcccaactatttaaaaaaattaaaattaaataaaaaataaattagctgggtgtggtagcatgcacctgcagtcctagctactcaataggctgaggtgctgggattgtctaagctcaggcgttggaggctgcttgagccattattgtgccactgcactccaatctagggga

SEQ ID NO: 570934 - DNA, 495 bp, Homo sapiens
attgactttgaaagtctgagtcctttggcctggtaatggggtcaactaatccaggaccatatggattattaaaaagaggtatagaaataatgggaaaatgaaaggaaaagtggttgtcagaaagcaagcacatgtctgttactattacccggtacactcttgtgtttattgactggggtacagagtccaagtgagactcagasattccaaggaaaaaaatgcctgatgtcctctaaccttcagtccagagctctttctatcatgctgatttcttcacaatccttctgcttagtttcttctaaacctttctaataaaatcgtaggtcattttccattagagttgtaaaatagtagtaagtaatgaattcttagttgtattctactgctcattttcttgtgttaatcactgccttgcattaagatcatctttccacagtgttttaaagaaattatagtcacctggttccattttcacaggttccaatttaagagatt

SEQ ID NO: 570935 - DNA, 480 bp, Homo sapiens
tttgtatgtcttcttttgagaagtgtctgatcatgtcctttgcctatttttaaactggattatttgtgttttgctggttgatttaagttccttgcattctgcatattaggcttttgttagatgcatattttgtgaattttttcccattctgtaggttgcctttttattcaattgatagtttcttttgctttgcagaagctctttagyttaactaggtcccacttgtcaatttctgttttgtttccattgctttcggggacttagccataaattctttgccaaagctgacgtcaagaaggatatttcctaggttttcgtccaagatttttatagtttgaggtcttacatttgtatctttagtacaccttaagttaatttttatacatggtgaaaggtaggggtccagctttattcttctgcaaatggctagcaccgtttactgaataagtcctttccttcactgtttatttttgttgactt

SEQ ID NO: 570936 - DNA, 603 bp, Homo sapiens
cgaggaaggaaggcatgtcaaaagccaagagaggctgaaagcaaggcctcttgtaccagttagctaagttgtgaatgcaaaggaaaagttcttaaaggaagctraaagtgctactccagtgaacacacaaatgataagaaagcagatcagccttactgctgatgtggagaaagttttagtggtctggatggaagatcaaaccagccacaacattcccttaagccaaagcctaatccagagcaaggttctaactctctctaattctatgaaggctgagagaggtgaggaagctgcagaagaaaattagcctaagataaaaatagtctttttggtcattcactgcatatcattgaattatctaatattccaacatgtttataaatgctgtcattaaatcttactttcaatatataatactttggctcttgttctctgtgattaaacatgtttttataattgaaatataataccataagataaccatttaaaagtatacagtttaatgtggtttgacaattgtatgctttcatgtagctgtctttaatatccagatatagacaacctccattttaacaaaaaattccctcatgcccacttaaagtc

SEQ ID NO: 570937 - DNA, 576 bp, Homo sapiens
tcccaacacatagaaatgaaaaatactcaaagtagtagatgtcctaaatactctgacttaawcattatacattctatgcatgtaacaaaacgttgcatgtactgtcaaaaaatgtatatggatattatatatcagataaaaatttttaaaacatgatcaagtattactgttgaattagagtaatctctgggaagtacatttatatagtttccatgttctgtggaaaattctcactagatagaaaaactaatgcaaaattagtttagcaaaccagatgtcttacacaattcttgagagttatcatggcagtgtcaagcaacatgctagcactttggcttgctttttactcacaaaaataacagttttataggtactgggtgagcatcaagagaactggcaaattctagaagaggagagaacaaatctatatgctgagcaaggtcaatggcttcttcccctccatcttcccatgagggactgagcttacccaaaatctaaaatgaaagacattaactaatacttaaagattaatacagagttttaaaaaattaataggaatttaaatttaaaaattca

SEQ ID NO: 570938 - DNA, 602 bp, Homo sapiens
cctccatcttcccatgagggactgagcttacccaaaatctaaaatgaaagmcattaactaatacttaaagattaatacagagttttaaaaaattaataggaatttaaatttaaaaattcactcttcattatgtaagtattgtcttttaatgttaaattaaaaattgacctaccaccagaaaggtaataaaaacaggaacaaaagaagctaaatgcattacagatgaataacataatcacactgaaggtagaagggaagaaaagagctaacccaaataacattggaaaaaaatattttgaccagatactctaaagctaaagacacaagaaactgtacacacatactgtcatacagttaggaaatttgtttctcataagagtgtgagtaattctgaaatgactttacacacatatattgttttatcagcgttgtagaaaaaagttacaaataaagaggagggtcttgttatgttgaattagaattaaaagtataagtaagaactcatacacacacacacacacacacacacataaagaaagagagagattgagggagagaaagaattgtgtggatgagtatttatacatatactttacagtatt

SEQ ID NO: 570939 - DNA, 602 bp, Homo sapiens
cctccatcttcccatgagggactgagcttacccaaaatctaaaatgaaagacattaactaatacttaaagattaatacagagttttaaaaaattaataggaatttaaatttaaaaattcactcttcattatgtaagtattgtcytttaatgttaaattaaaaattgacctaccaccagaaaggtaataaaaacaggaacaaaagaagctaaatgcattacagatgaataacataatcacactgaaggtagaagggaagaaaagagctaacccaaataacattggaaaaaaatattttgaccagatactctaaagctaaagacacaagaaactgtacacacatactgtcatacagttaggaaatttgtttctcataagagtgtgagtaattctgaaatgactttacacacatatattgttttatcagcgttgtagaaaaaagttacaaataaagaggagggtcttgttatgttgaattagaattaaaagtataagtaagaactcatacacacacacacacacacacacacataaagaaagagagagattgagggagagaaagaattgtgtggatgagtatttatacatatactttacagtatt

SEQ ID NO: 570940 - DNA, 583 bp, Homo sapiens
ttatctgaaatttttggagaacatttatgaactggatttataaatagatttgctaactggtactttgtaacttctaaaaagcagactagttgtattttccaaaataagtgagttctttaaatgactcacgaccaatttagacttatattgaagaaacatctagaaacaaatactttccaattttttaaaaattgactttggtgtcatgaacttaatgtttattaattaatattcagaatattctaacattttaaagatgacaatacaatttactttatatacagcagtttggtaaagaaaacaacaaataatcaatttaagtgaaataacccattttgaatatgtattttaattaactcgtcagagatgttaattggctttctattattttggacagttgtggtgctttgataagctcastttttcttctttacttttatctactttagcatgaattaatttttatattttatagatatgtaaaattttacatactttattaattttaataaagtaaaacataattcatgctaagaaaattaagtttataaaacaactgacaatgaacagtttagcatagcct

SEQ ID NO: 570941 - DNA, 554 bp, Homo sapiens
taagctaaatgagaaataattggagactctgcagcaaaggagtgacttatttgacttagctgagggtttgtataatcaktaggttgaatgagatatgatgatgctcctcctcatagtttatgggattaaaaacctgctttgtgttaaaagagaaaatttgctgggaatgcataaagatagcaagtaccaacacttcatggtaatgttcattaaagctctacccatattttttaacagagctgctataaacagaataattaaataaaattcaaagaaagaagctgaaatattttagcaagtctttttcctaacacctttctcatttttgaaaagtttaccttcttgttgactaaacatatttttccttgcatttttgatattggctaatgtcatttttaggataaacttgaggttttttatatttctgtttaagccttttatataatcagggcatcacaattaaggtgttctctcactctgtgataatattgtaaccaagtccaaacttgtcctgctcaccacacaaccattttcagggtgcccgtgctcgatcc

SEQ ID NO: 570942 - DNA, 554 bp, Homo sapiens
taagctaaatgagaaataattggagactctgcagcaaaggagtgacttatttgacttagctgagggtttgtataatcatyaggttgaatgagatatgatgatgctcctcctcatagtttatgggattaaaaacctgctttgtgttaaaagagaaaatttgctgggaatgcataaagatagcaagtaccaacacttcatggtaatgttcattaaagctctacccatattttttaacagagctgctataaacagaataattaaataaaattcaaagaaagaagctgaaatattttagcaagtctttttcctaacacctttctcatttttgaaaagtttaccttcttgttgactaaacatatttttccttgcatttttgatattggctaatgtcatttttaggataaacttgaggttttttatatttctgtttaagccttttatataatcagggcatcacaattaaggtgttctctcactctgtgataatattgtaaccaagtccaaacttgtcctgctcaccacacaaccattttcagggtgcccgtgctcgatcc

SEQ ID NO: 570943 - DNA, 237 bp, Homo sapiens
attaaataaaattcaaagaaagaagctgaaatattttagcaagtctttttcctaacacctttctcatttttgaaaagtttaccttcttgttgactaaacatatttttccttgcatttttgatattggctaatgtcatttttaggataaacttgaggttttttatatttctgtttaagccttttatataatcagggcatcacaattaaggtgtyctctcactctgtgataatattgta

SEQ ID NO: 570944 - DNA, 607 bp, Homo sapiens
ataatatgttgtttaaacaaaaatgtctgtaagagtccataaagtgacagaatgagtgaatgtgcaaagaaactattccaagaaccaggaaaatacaagaagagttaataataacccaagcaattaaaatgatgcatatcaggtactggggatgctttagtgtgcttgggctgccataacaaagtaccactgattgggtggcttaaacaaccaacttatttttcacgattctggaggcttgaatttcaagagcaagatactagcaaatttggtttctggtgaagactctcttcctagcttgcaaatcacccaccttcttgctgtgtcctcacatggccttttcctctgtgcttacagygagagagagagagagagatctggtgtcactctacttataaagatacaacttctatttcataagggtcccacccttattactgcctttaaccttacttagttctttaaaggttctctaagatggtggggtggggtggcattcagttcagaacaggagatatggctaaagtactggaaagaaaaatgtacagcctaaaagaggtacctgcccatccattcatctactcctccctccaaccactcctcccac

SEQ ID NO: 570945 - DNA, 607 bp, Homo sapiens
ataatatgttgtttaaacaaaaatgtctgtaagagtccataaagtgacagaatgagtgaatgtgcaaagaaactattccaagaaccaggaaaatacaagaagagttaataataacccaagcaattaaaatgatgcatatcaggtactggggatgctttagtgtgcttgggctgccataacaaagtaccactgattgggtggcttaaacaaccaacttatttttcacgattctggaggcttgaatttcaagagcaagatactagcaaatttggtttctggtgaagactctcttcctagcttgcaaatcacccaccttcttgctgtgtcctcacatggccttttcctctgtgcttacagtgagagagagagagagagatctggtgtcactctacttataaagatacaacttctatttcataagggtcccacccttattactgcctttaaccttacttagttcyttaaaggttctctaagatggtggggtggggtggcattcagttcagaacaggagatatggctaaagtactggaaagaaaaatgtacagcctaaaagaggtacctgcccatccattcatctactcctccctccaaccactcctcccac

SEQ ID NO: 570946 - DNA, 525 bp, Homo sapiens
gtaaatatttttaaatggttaaaagaatgatataacttcacacttagattttaaatatagaacttctcactggctcttgatactgtaaaattttgaatttgaaggaacttggcaaaaccacaaattaatctccatatgttctcctttgagattcatatgaatattgcattccatggaaaacctcagtatyacataggtccttaaaataaatgtgcaaagtaatcttaatcttttgtggtatatgttttggttaaataaaagaagccatagcaatatgctgcaaaattgctttggttcaaaatgtcattttagatcatcttctcctgggcaaaggtaaatatgattctaataatatttgacttgtaaactgtatttttattaaggtaggttgactttcttataaactgaaaattaatttgaagaattcctagtcatgcaaatgacagtatctaagaaaagagacatgtataatatcatctaaaagagttgttgtttcatatgttttcttcttgatatgcagccata

SEQ ID NO: 570947 - DNA, 626 bp, Homo sapiens
atcagaaatagcactccaaaagagagccaaatctgtcatgtttttatatcaaaaaggaaaaactaacttaccatactatgaacattaaaaatcacttgtatggctgcatatcaagaagaaaacatatgaaacaacaactcttttagatgatattatacatgtctcttttcttagatactgtcatttgcatgactaggaattcttcaaattaattttcagtttataagaaagtcaacctaccttaataaaaatacagtttacaagtcaaatattattagaatcatatttacctttgcccaggaraagatgatctaaaatgacattttgaaccaaagcaattttgcagcatattgctatggcttcttttatttaaccaaaacatataccacaaaagattaagattactttgcacatttattttaaggacctatgtaatactgaggttttccatggaatgcaatattcatatgaatctcaaaggagaacatatggagattaatttgtggttttgccaagttccttcaaattcaaaattttacagtatcaagagccagtgagaagttctatatttaaaatctaagtgtgaagttatatcattcttttaaccatttaaaaatatttactgt

SEQ ID NO: 570948 - DNA, 467 bp, Homo sapiens
aaaaagcacttgaaaaattcaacaatatgaacagtattcataatgaaaactctcagcaaacttggaataaataaaatttcatcaccctgataatacatatcaataaaatactacagcyacatcatacttaatggtaaaagaatgaaagcttccctggtaatatttggaaaagaaaatggaggcaattgcacccacttctattcaacattttatttgtcctagtcaatacaatagaaacagcaaacaataataggttagtaaattttcaggatgcaaaaatcaatatatgaacgacaactggtttcctttatgttagcaataaccaactggaaactgaaagcaaattataatttataaaacattgtgaacataagtaattcaaaaatctaagctgttggaactccttaaatgattttgagccttaaaggaattcttatgaggactgagtcaactttacaggtagctat

SEQ ID NO: 570949 - DNA, 572 bp, Homo sapiens
cagggcaagtattcaggctaaattgtgggagctaagaacacaaagtacattgatttctttattacagttagcagatatctaagattgttagcacaggtccttgaataaattttgcttctaagagaagttactatttattcctaattagatggagaggaaaatctctttgaagaggaacttctactttactttttacrtacataaacttggacacaatggttttaattatagatgtttagtttaaattaattcataatataaaaaatactgttgctccctgcattatttatattggttaaaaaaaatcctaaaactaaacattgaacaaactataagtgagccaaattaactataattaatttaaaaatgtttggtcattaaaattatttatgagacggttttagctccaacttaaaaagatcttagaaatagtcaatcccatcattttgataggaaaaagcaaacaaactaaaaatcaatgacttcttggatccatcagagaactgagtttgcagggcacattacctccctgaaatctgaagagacaggtggattcaaaaagtcacaggtga

SEQ ID NO: 570950 - DNA, 585 bp, Homo sapiens
gagtcaaaatatatttttagggactttgggtgggtctaaatatatgagggctctcataagacatttgatcccataggaaagaataagaaatatcaattacaagttcaaaaacatagattttgttaaaataagatcctggtaaagtgactacattatttgaggatcatctttatggaagaattatataaccttattctgtttgacttagccatgaacactcaacttgttctggccaatgaaacgtgaaagaaaaagacatttgttatctccagacagaaactataagaagcaatgaatatttygccattttccctttctttgattctggaatcacagaagtatatgtcaagatagagcttccaatagcctatgtatctcaggaactaaaataaacagagtgtcttggcatactgcaatagatacatagtgtaagccataaacattttattttaaaaaactttttgggtttctttgtttgttttatgcctctgaaatttggaagttacttgttattggtgtaacataacctaaggtgacctgacagatacgtgacaatgatgatagaactttctaagatatgcagct

SEQ ID NO: 570951 - DNA, 611 bp, Homo sapiens
acattgctttaggaaagcagcccttcacagtatttgggcttatataattgtgattgcagtggtaagcatttgaaaacttatgaaaatttagaatcactcaaaatacaattgactccaggttattaataatttacattaggaaatataagtataaatatttacatttcaactattttaattgtttaagacaatttgacctttcaagaagataattttaaaaagtaactccaatctcaaatgtataattgtaaattgatatttaatttgaagacttcattaatttrgaaacaatattgaagggtttatgataacttaaaatttttaaaaggtctagcatattatgattttaagagtcacaaaagtgcttgaaaaggtttgtcacccagataatggggaaagttaaaaaggatatcaagtattgcaaagtatctgattagtagagagactaaattcagatgccagcataaagtttaagtgcctcacactgttatttaacttgtgttggccaatataaaccaaatttagaaaattcatctttcatgcctaatatgtgaatgaagaaaaacaaaaaaattttaaagaaaattcatccttttataagcctaactgtt

SEQ ID NO: 570952 - DNA, 611 bp, Homo sapiens
acattgctttaggaaagcagcccttcacagtatttgggcttatataattgtgattgcagtggtaagcatttgaaaacttatgaaaatttagaatcactcaaaatacaattgactccaggttattaataatttacattaggaaatataagtataaatatttacatttcaactattttaattgtttaagacaatttgacctttcaagaagataattttaaaaagtaactccaatctcaaatgtataattgtaaattgatatttaatttgaagacttcattaatttagaaacaatattgaagggtttatgataacttaaaatttttaaaaggtctagcatattatgattttaagagtcacaaaagtgcttgaaaaggtttgtcacccagataatggggaaagttaaaaaggatatcaagtattgcaaagtatctgattagtagagagactaaattcagatgccagcataaagtttaagtrcctcacactgttatttaacttgtgttggccaatataaaccaaatttagaaaattcatctttcatgcctaatatgtgaatgaagaaaaacaaaaaaattttaaagaaaattcatccttttataagcctaactgtt

SEQ ID NO: 570953 - DNA, 591 bp, Homo sapiens
atcattagtgttcatcctatcrctggcagatccagaattttggagcagagactcagcagaaaaaaagaagaggaaaggttagaggcctgagattatttcaggactgattctttttggggggaattgccttaaccaatgtcaaatgctgcaggaaaattttgtatgaagtttgacataaaacgctataaataaaatattttaacttgagttccctgtttagaaagtagaactttaagaatatattaaaaatcaatatattcctaccaagggttttgatagcaactgactaaaaacacgaataaaagctcagcattatcacatatttattgagtctcaacactagacaataccatttgaagcacaaagacatgttatctcgatagctgttattatttacatgcagtcaaggttttcaggtgtctaatgataaactcctaaaagcaaccaacacacatcaggaaggttactttggcaaccatgactaatcaaccacatgtacattttaggatgacagccgactgtcagtgataacacttttagattgacataggaggaaaaattggcattctgaccattaatagagtgggaaca

SEQ ID NO: 570954 - DNA, 591 bp, Homo sapiens
atcattagtgttcatcctatcactggcagatccagaattttggagcagagactcagcagaaaaaaagaagaggaaaggttagaggcctgagattatttcaggactgattctttttrgggggaattgccttaaccaatgtcaaatgctgcaggaaaattttgtatgaagtttgacataaaacgctataaataaaatattttaacttgagttccctgtttagaaagtagaactttaagaatatattaaaaatcaatatattcctaccaagggttttgatagcaactgactaaaaacacgaataaaagctcagcattatcacatatttattgagtctcaacactagacaataccatttgaagcacaaagacatgttatctcgatagctgttattatttacatgcagtcaaggttttcaggtgtctaatgataaactcctaaaagcaaccaacacacatcaggaaggttactttggcaaccatgactaatcaaccacatgtacattttaggatgacagccgactgtcagtgataacacttttagattgacataggaggaaaaattggcattctgaccattaatagagtgggaaca

SEQ ID NO: 570955 - DNA, 593 bp, Homo sapiens
tctttgtccctgtcatttttattgacacgatttgtgtatatacagggactctgacatgagtagatatctcatagttcattttaggtccctcttatattggaagtttatctttatatttttattcattatttcatttctcccagaaatctaggcggtttcttttctatgaaaaatatmttttaatttgatgagctaggaagctatatcttaatagatctcatgatagacagacataataaacatttatttaaattgatgttgcaaaggcaaaataaatgtcatttttaaaaaattacgagatgaccttttgaaacaaggctaatgctctcataccaaaatgtataagtgatatagaaaacattacttttcatttcgtcatgatctgcaaccacacacatgacatttctatttgaaaaggtcaggagggatgacgtgattgcttaccaagattaacactacaatttaaattagatattttacgagtgtattattgaaatttttttaatgatcactgggaaataattgattaatacatcagaataatttcccattctaaaattatcatggccatgtgcaatcatctaaaatagaag

SEQ ID NO: 570956 - DNA, 620 bp, Homo sapiens
caagataatgtagatttgatataaaatacttggtaattcaatgtgaagtcaatttgagacaggaaaagtgaggttaatataaggttgaaaagacatgggataagtcttaaaagggcactcatggaatgtatcagaagatgaagacagagcaaatgcagatctcattgagaaaaaaatgtaagtgaraaaagatatatcaataccttgcttgcgttggaggtacaaagaaaaagaagtctacaacagatgtgctgaagctcagaaaatggcactacaaagtgtggcactttgacatgctaagtactttgaactaaagaagcagcctcaaaacgaagatctttctgaacttgtcttaccaccccgtctctctaccctgtttctcccctaaaactctcagagaggctttctgtgaactttcccttatctgactaagggaagttcctccagaagcaatgcaattgttatgaaccccttccctggaatccacattaaccagagaagattatctcatgtagcaagagaggagactaaaggtctttctgtccaggataccatatctacagaggctttacatccatttttctgagagttcatcagaccatgtctgtgcaaaaaccggg

SEQ ID NO: 570957 - DNA, 539 bp, Homo sapiens
cagaaatcagagtttcagaaatcaaatacagtgagttactccaaaaaaagacagcaaataatgactttgacacattccaacaatcttagagcaaatagaataatgtccactgtatctaattataattaataataataggtaacacaatgaacwgattatgtgcaggtactgttctaggcatttcgcatatattcattcaagtattctcacaacaaccctttgaggtatatagtattgctccattttacattgaggaatctgagacacaaatgactaatacacttgagatcaataagtgccagagccaggatttgaacctgagaaaaacagattcagaatccaggcttgtaccaattctctatactacatatcaaaaatccatgaagttacctaccagctaacttcaactgttttaaaaattggttaaaaatcttgtttttaaaaatgagataacatttatttaatttgtataatgtgtaaggtgctgagctttacattggttggatgaaaaggattaaaaggcagtgttgctttcttgc

SEQ ID NO: 570958 - DNA, 481 bp, Homo sapiens
atacacttgagatcaataagtgccagagccaggatttgaacctgagaaaaacagattcagaatccaggcttgtaccaattctctatactacatatcaaaaatccatgaagttacctaccagctaacttcaactgttttaaaaattggttaaaaatcttgtttttaaaaatgagataacatttatttaatttgtataatgtgtaaggtgctgagctttacattggttggatgaaaaggattaaaaggcagtgttgctttcttgctattttctatattctagccataagaatacaactttaatttcctggtgacattatargacataaaagaacaaattagtatagtcagatatttactactaaaatagctaaattacccaattgctcagaatttattgattactcgacaatgtagactgggccttaactttgtgaaacaaaaacagctccataaagattgcttgtttgtttgtttctttatg

SEQ ID NO: 570959 - DNA, 506 bp, Homo sapiens
acacagaattggtgtgcacgatacatctttgttaaattcattctatcagcattcagaatagttgcatggaattaaaacatctgtgtctaagtccagttatgccacttcaagctctrcagcatggggtcagttttctcatctgcataaaaaggataatgataatgaaataggttgttatgatggtcaaatgtggtaatatatgagaaagtgccttgttaactctaaagtgatggagaagtaaatattatttgggatatgcatttagctatgtaactattcattttaaattttacatctaattatattttgtaaaatgctttgcatttgtataaattgtttttgctataagctttcattcatgcaaaagaagtctcaaaagctctaaggtttaattatttcatatttaagcatcactcaactctaccacaatttcactaagtcaggaactaattatatggattcatttttgtcaccaattatgtatgtgcaaaaaaaacgaaaaaacc

SEQ ID NO: 570960 - DNA, 506 bp, Homo sapiens
acacagaattggtgtgcacgatacatctttgttaaattcattctatcagcattcagaatagttgcatggaattaaaacatctgtgtctaagtccagttatgccacttcaagctctgcagcatggggtcagttttctcatctgcataaaaaggataatgataatgaaatasgttgttatgatggtcaaatgtggtaatatatgagaaagtgccttgttaactctaaagtgatggagaagtaaatattatttgggatatgcatttagctatgtaactattcattttaaattttacatctaattatattttgtaaaatgctttgcatttgtataaattgtttttgctataagctttcattcatgcaaaagaagtctcaaaagctctaaggtttaattatttcatatttaagcatcactcaactctaccacaatttcactaagtcaggaactaattatatggattcatttttgtcaccaattatgtatgtgcaaaaaaaacgaaaaaacc

SEQ ID NO: 570961 - DNA, 616 bp, Homo sapiens
tgtgcacgatacatctttgttaaattcattctatcagcattcagaatagttgcatggaattaaaacatctgtgtctaagtccagttatgccacttcaagctctgcagcatggggtcagttttctcatctgcataaaaaggataatgataatgaaataggttgttatgatggtcaaatgtggtaatatatgagaaagtgccttgttaactctaaagtgatgkagaagtaaatattatttgggatatgcatttagctatgtaactattcattttaaattttacatctaattatattttgtaaaatgctttgcatttgtataaattgtttttgctataagctttcattcatgcaaaagaagtctcaaaagctctaaggtttaattatttcatatttaagcatcactcaactctaccacaatttcactaagtcaggaactaattatatggattcatttttgtcaccaattatgtatgtgcaaaaaaaacgaaaaaacccctttgatatttatcgaggttatttgtgattgtaaagggcccaatattaaatgaactggttttgaaactataaatttgttccaaaatagtgttagtaagttcctcaccataaaataagcatg

SEQ ID NO: 570962 - DNA, 643 bp, Homo sapiens
tgtcattggtcatgactgacagtaaaagaatgcaggcagaaaacgtgggcataaaattttatttytaaagctaaaacgaaaacctgatatttttggtagaagtgaaagacaaatatttgccctaagaggtagatcagtggccatctgaataactgtatctatacacaggtatttctaattaataattcagtgtagagaaatctcaaatggagagccgaagaagcctgtttttttttctatattgtacatattttaattaatttcatagattaaagtcttcaaaggatactgacaaaattttcacaggtgaagcttagtttgtgacaggcttttatgggaggaaagaggtaagcggtggactaggtaaaaaaagagacaaaccaacaaacaaaataaaatagaaaataaacaaaaaaagtaaaaaagacatacctaactaaaatgccaattttactttttactgtactttttctaggagatatctgagagagtttaagaaaatataaacaagagatagtcatgctaacttttagaagagatgacatctgttgaattcttatttgttgatgaaattgctttggaaacatctgcttctctctgttactccctggaagtgacagtatgacacaaagaacactgtacc

SEQ ID NO: 570963 - DNA, 643 bp, Homo sapiens
tgtcattggtcatgactgacagtaaaagaatgcaggcagaaaacgtgggcataaaattttatttctaaagctaaaacgaaaacctgatatttttggtagaagtgaaagacaaatatttgccctaagaggtagatcagtggccatctgaataactgtatctatacacaggtatttctaattaataattcagtgtagagaaatctcaaatggagagccgaagaagcctgtttttttttctatattgtacatattttaattaatttcatagattaaagtcttcaaaggatactgacaaaattttcacaggtgaagcttagtttgtgacaggcttttatgggaggaaagaggtaagcggtggactaggtaaaaaaagagacaaaccaacaaacaaaataaaatagaaaatamacaaaaaaagtaaaaaagacatacctaactaaaatgccaattttactttttactgtactttttctaggagatatctgagagagtttaagaaaatataaacaagagatagtcatgctaacttttagaagagatgacatctgttgaattcttatttgttgatgaaattgctttggaaacatctgcttctctctgttactccctggaagtgacagtatgacacaaagaacactgtacc

SEQ ID NO: 570964 - DNA, 633 bp, Homo sapiens
caggcttttatgggaggaaagaggtaagcggtggactaggtaaaaaaagagacaaaccaacaaacaaaataaaatagaaaataaacaaaaaaagtaaaaaagacatacctaactaaaatgccaattttactttttactgtactttttctaggagatatctgagagagtttaagaaaatataaacaagagatagtcatgctaacttttagaagagatgacatctgttgaattcttatttgttgatgaaattgctttggaaacatctgcttctctctgttactccctggaagtgacagtatgacacaaagaacactgtacctgattcctcgtaaattctagatgaatatacattaagaaacagtacaaataaagacatatccctccctatttaacmctacctatctttcactcattctaagtcatggcaaagtggatgtagaataggtattggaagaaggtagttataactgccatttataaataccagctatgactgtgtcactagtttcagaagtatggactaaaataattatgaaaatgtgtgccagatgtggtggctcacacctgtaatctcagctattcaagaggccaaagtggcagaatcccttgagaccagggatttgaggctgcagt

SEQ ID NO: 570965 - DNA, 541 bp, Homo sapiens
ggaataattttcagaaactgggctttctgtattttccctgttggctatttcagaccagttcccgaccmttctccatccttctccatgccctgggaaaccgacttttatagactgcaaaagtatgctctcttacactttggtttcttattgaggtcaaataataaaaatcactgccaaaaaatgggaaggcagaaggagagtgagatggtgcatttattccactctgatgggcaatatattcatctatattgatggttgtctcttataacatttttaataaccacattctttgacccttgcaatctagagtggtgtaagctgttttctgttgctagtcttaatatactttgcaatccctttttggttttatgtaaccctacccatagctttgtaaatgttctctttgttgacgtcttccaaattaccatatttgaacatacttaacttgctgggatctggacctacactgaaatggcactgggaaattgaattataaagctgatgtataggattggcttccttccttgtttgaagagtgtgc

SEQ ID NO: 570966 - DNA, 541 bp, Homo sapiens
ggaataattttcagaaactgggctttctgtattttccctgttggctatttcagaccagttcccgacccttctccatccttctccatgccctgggaaacygacttttatagactgcaaaagtatgctctcttacactttggtttcttattgaggtcaaataataaaaatcactgccaaaaaatgggaaggcagaaggagagtgagatggtgcatttattccactctgatgggcaatatattcatctatattgatggttgtctcttataacatttttaataaccacattctttgacccttgcaatctagagtggtgtaagctgttttctgttgctagtcttaatatactttgcaatccctttttggttttatgtaaccctacccatagctttgtaaatgttctctttgttgacgtcttccaaattaccatatttgaacatacttaacttgctgggatctggacctacactgaaatggcactgggaaattgaattataaagctgatgtataggattggcttccttccttgtttgaagagtgtgc

SEQ ID NO: 570967 - DNA, 541 bp, Homo sapiens
ggaataattttcagaaactgggctttctgtattttccctgttggctatttcagaccagttcccgacccttctccatccttctccatgccctgggaaaccgacttttatagactgcaaaagtatgctctcttacactttggtttcttattgaggtcaaataataaaaatcactgccaaaaaatgggaaggcagaaggagagtgagatggtgcatttattccactctgatgggcaatatattcatctatattgatgrttgtctcttataacatttttaataaccacattctttgacccttgcaatctagagtggtgtaagctgttttctgttgctagtcttaatatactttgcaatccctttttggttttatgtaaccctacccatagctttgtaaatgttctctttgttgacgtcttccaaattaccatatttgaacatacttaacttgctgggatctggacctacactgaaatggcactgggaaattgaattataaagctgatgtataggattggcttccttccttgtttgaagagtgtgc

SEQ ID NO: 570968 - DNA, 633 bp, Homo sapiens
tttggctaattttcccaagacaccctcataataagcagatgttattctttggccttccagaaagtcaataaaccaaatgtcttgatcatgtgaaaaaacttttgctgtgcactattgacttgtgcactcctgctttgactgggccacttccacctctcagtggccattactttgattgkgctttgtcttcaagatggtactggtaaagccatgtttcatcacctgttataatgctttgaataaatcgttcaggattgtgatctcacttatttaagatttttattgaaagctgtgctcttgtctacagttgatttgggtacaaagctttggcacacgttgagtgaaaagtttgttcaactttaatttttcattcagaattggttaagctgaatcagttgagataataacagtgaaacagcaaaagaactaacacaactaactccattttgtttaaagggcttttaaccatttctgtacataggcaaggataatttaggagcactaagataacatgcaaaaacaacaatcatgtagttttaaaactaactctggaaaggagaagtatgtaaacctttaacaatgttttgttaaacatttataggaacattgttacctgactaaggatgaagaaat

SEQ ID NO: 570969 - DNA, 567 bp, Homo sapiens
tgctgtttaaactttctcagttgacattttcactgaacataaagtcaatgttcaataaaaaatatttctaaattgcagtgttcaaagaaaaattttaattttgttttatggtaaaccccatcaataagaacargtaaatatatatgtatatatatttgcatatacataatgtaatatatatgtgcattaaatatttatgtatatatacacatatatatgcaatatttatatgtaattcatatatatatacatatatgcattataatgttatgacttattagggctttagaaattgctgattctccatagaatcacagtgagaatttttgttttttcacaagcattacttcaggcaggaaaatgcaagatttttattaccccagttgagtatactaggcattttgtcatagtattagatacaatttattagcattaacacactacaaacgtgtgttaccagagtgtatgataaaaaaaacaaccctgcggaatatgccccaataaataatttacattaaggtcatagggcccttttatcctccaacaccaaagcagagtgctaatttg

SEQ ID NO: 570970 - DNA, 531 bp, Homo sapiens
tctcatatcttatgtgaaatcaagtggatcataataatataaataaagcagaaaactattgcaactgccacttttattctttcaggcataaaaaagaatgtatgaataaaatctctcatgaaaaatacaaataaattttatgaagataatgtttctagtgccaagtctaattttgaagtacttggaatatggcatagaattcaaatattacgttgtggatcagggtcttcaaatatagtgtactaatataaataggagaggaacttccagatagctcagaaatttacatttttaacaatatttatacagaaagaaggaacagtcttttctctctttgcaaattttcagttaaatctcctataattgtcatactatggggaaacatgtaaaaaatcttgtgaccggaagagtaagtcttgggctgtgaaccttgcaattcattcaktaatatttttgcaaggctttcagtgtttattatcctttagttaatctgggtgtctaattgccccttatgtcccacactagccaata

SEQ ID NO: 570971 - DNA, 662 bp, Homo sapiens
tgtttattatcctttagttaatctgggtgtctaattgccccttatgtcccacactagccaatagaatgtctactgaaattccacaatttctgcatacaagctattctcagatactgaatatcaacatttaataagtatgaaatcctaaattacgtggataagcagtaatatttataaatcttggagcacaatggtgaagaaatactgatcagggtgattttgactataaatatctgcttcttatgtgatgaatccagattatctcccacaatttggattgaagccactcttagacaaattttagctcctgttcattaatggatttaatttaattctactatataactcaatagaatttaattttgagcttcagccaaatgactctgaagcttatcaggtacaataagcaaataagacttgcaaaaagaattttaatrtggaagggggggcattagccatctcagaactaattttaataatatgaagctgatataaaattagagtgacagagcaataaaacagaattgatagctaggaaataagacctattatgtatcagtttattacatgataaaagagaaagcacaaatcaaggaggaaaggaatttatattaactagtattgaggcaattggctaaatacttggaaaattattaatttat

SEQ ID NO: 570972 - DNA, 393 bp, Homo sapiens
aatttaaaatatattacatacaactagatctggaggtaaaagacagtctaaattacaacttaaagctatgttcatttcatgatatttttaatagcatgataaaagttagattatctaattatttttcattaaatccatacccattaataatstatgcttattaatatcagaataataaaataaagaaggaaaataagaagagatttttgttttacaaatgtatttcactttatttactttttatcttatttatttgagatagggtcttattctgtcatcttggctggagttcagtggtgtgatcatggctcactgcagcctccatctacctgggcccaagctatcctcccacctctgcctctcgagtagctggcactacagcgcatgccacca

SEQ ID NO: 570973 - DNA, 558 bp, Homo sapiens
tttttaaattttttatagagcataaggtctctatgtctatgttgacctaggatggtctcgaactcctggcttctagcgatgctcccacctcggcctcctaaactcctgggattcaaggcgtgagccaccatgctcagtcaattttcttttatttttagcagctttattgagatataattcatatcccataccattcacttattcaaaatttgtaagccaatggttttcattatattcatagatttgtgcaataattaccatgatcaattttagaatgttcttattactccccaggraaaaaaaaatttcgcccaaccctgtgctccccagccctaaacacacattaatctacttcctgtctttacagatttgcctactctgaaaatttagtataaatgaaatcaaaataggcagtcttctgtgactgagtcttttcacttacaatgtttaaaaggttctttgatgtttttgcctatagcaatacttcattccattttatggttgtataatattctattttacagtacaaaattatatatgcatatataatttaaaaaa

SEQ ID NO: 570974 - DNA, 475 bp, Homo sapiens
caccatgctcagtcaattttcttttatttttagcagctttattgagatataattcatatcccataccattcacttattcaaaatttgtaagccaatggttttcattatattcatagatttgtgcaataattaccatgatcaattttagaatgttcttattactccccaggaaaaaaaaaatttcrcccaaccctgtgctccccagccctaaacacacattaatctacttcctgtctttacagatttgcctactctgaaaatttagtataaatgaaatcaaaataggcagtcttctgtgactgagtcttttcacttacaatgtttaaaaggttctttgatgtttttgcctatagcaatacttcattccattttatggttgtataatattctattttacagtacaaaattatatatgcatatataatttaaaaaaatttattcatcagttaataggcatttggttatttccactttg

SEQ ID NO: 570975 - DNA, 602 bp, Homo sapiens
tggacatacatttttattcctattaggtaaatgtttaggaacggatactggctgagtcacawggtaacttcatgctgaacattttggaaaattgccaaactgtttcccaaagtggctgaacaatcttgcattcccaccaacagtgtatgagatttcaaatttctccacattctcttcaccacttgttagttcctgtctttttggttataaccatcttagtaggtgtgaagtggtattgcattgtgactttgatttacatttccctaatgactaaggatatcaagcatctttgaatgtgctgttcaccatttgtaaattttctttgagaaaaagtctattcatttactttgccaattttctgattgagttcttgtcttaattattgagttttaagatttctttatggcttctacttacgagttctttatcaggtatataatttgcagatgttttctttattttataaattgttttttaaattaatgttcttcaaagcaaatgtttttagttttgatgaagttcaatttgtttttgtcttttgtttgttccatgtgcttttatgtcatatctaagaattcatttccttacccatggtcatgaag

SEQ ID NO: 570976 - DNA, 479 bp, Homo sapiens
taactttggcctattattctaaagttggcttccagaatccaatctctattctagttattcattctttactcaaatatagttttaaggcccagtctttgcctagcacacaattgaaatgttgaccataatacccccttgatatctttctcatgctttattctctgtgaagaatagcagcgtgcacctttgtttattcctcatgaataaaaatatcaataagaatatatgagtgagagcatagtatgtattttataacacattgatttgtcctgtgaccctaggcaatatatattttattaaaattatacaacaatgaattcatcctgttcttcaataatttatctgagtaaattctttacaatgggattttttaacacggaatgtcacagataaagcctggatcgtctcatcagaaattttttacaaattattaaatgaactggmtattacttggactcacggtttctaaccttcagtct

SEQ ID NO: 570977 - DNA, 554 bp, Homo sapiens
cacagataaagcctggatcgtctcatcagaaattttttacaaattattaaatgaactggatattacttggactcacggtttctaaccttcagtctcacttggacttctaaggatgcaactaactccttcaaactagtgagatacagaaaatgtagctgcaatactatagtacaacattaacactcccatgcacaaaactgaaagggatcatataatactggtgtgtctacrctgagatgacatattgcacgctaacaaacattgcaaaatccagcacatcaagaaaatgaaaaattgttgaatagcaggtgcattggaatgttagatgccaatgagatccaggtattttgctaactgttctaaacacatttcttctgtgaagaggaagcaatacaatggtgattgcttctcttctgtgcctgccttgtatcacactttcaaaagaaaacagtctttttaaccataatttacaatgcattatgtaattggctgctgcagtgaatatgcagaaagtatttgtttaatttagaatttaagaactgctgagcttggtc

SEQ ID NO: 570978 - DNA, 554 bp, Homo sapiens
ggaagaaaaaaaaaaacttctggtaaaatgttatggggagaaaatggttgggaatcctctaaagttaaaggatattagagaaaacactatttctacacttctaccctttaaaaagctcaaagacaaggctacacaagtttaaggcgacatgccaaaaactgaaatacctattaaagcaaaaataaatgtacttcagagaaagttactagaatctagaatctccacaaatcaagaatgcccaatataccataaaatatggcaagacatgcaaataaacaggaaaatgtgacactcatcaagaacaaaagcagtcaacagaaatggaccctaagatatctgaaatatatttagctgataaagatctaaaaacgtgttataaaaaggtttaaagaagtaaaaaaaawtaaagaaaaaattaaatataatcttaatgagtgaattaataagggtcctaggcagagaaatagtacctataaaaatgaaccaaataaaataaattcagaatgaaaaactataatacatttttaaaaattcactggataagattaatagta

SEQ ID NO: 570979 - DNA, 554 bp, Homo sapiens
ggaagaaaaaaaaaaacttctggtaaaatgttatggggagaaaatggttgggaatcctctaaagttaaaggatattagagaaaacactatttctacacttctaccctttaaaaagctcaaagacaaggctacacaagtttaaggcgacatgccaaaaactgaaatacctattaaagcaaaaataaatgtacttcagagaaagttactagaatctagaatctccacaaatcaagaatgcccaatataccataaaatatggcaagacatgcaaataaacaggaaaatgtgacactcatcaagaacaaaagcagtcaacagaaatggaccctaagatatctgaaatatatttagctgataaagatctaaaaacgtgttataaaaaggtttaaagaagtaaaaaaaaataaagaaaaaattaaatataatcttaatgagtgaattaataagggtcctaggcagagaaatagtacctataaaaatgaaycaaataaaataaattcagaatgaaaaactataatacatttttaaaaattcactggataagattaatagta

SEQ ID NO: 570980 - DNA, 515 bp, Homo sapiens
acttggtaagctgaggcaggaagattgcttgagcccagaagtttgaggttacaataagccatgattataccactgcactccctgggtgtcagagcaagatcctgtctcaaaaaaaaaaaaaagcaatttagatataactcaaaagaaagattaatgtaaaattaattagaaygactgcttttggaaagaaattgtaaggaatatgatgagggaagggtagaaaaaggttttcaaagtgcagtaaatatttgattttttaacttgggtagagaaatgtttgctatatacaaaatgtaaattgcgtacaaaatataaaacactgttattggctctcttttattgaatattgtcacagaaattttgtaacttattttcccaaagcatctggtactactattattcccttttatgtagaagcaaccttaggcacatattaacccagccaaggtcacacagaataaattatccaagatagcatggctagcaagtttcagatctgggatttaaaccgtggt

SEQ ID NO: 570981 - DNA, 515 bp, Homo sapiens
acttggtaagctgaggcaggaagattgcttgagcccagaagtttgaggttacaataagccatgattataccactgcactccctgggtgtcagagcaagatcctgtctcaaaaaaaaaaaaaagcaatttagatataactcaaaagaaagattaatgtaaaattaattagaatgactgcttttggaaagaaattgtaaggaatatgatgagggaagggtagaaaaaggttttcaaagtgcagtaaatatttgattttttaacttgsgtagagaaatgtttgctatatacaaaatgtaaattgcgtacaaaatataaaacactgttattggctctcttttattgaatattgtcacagaaattttgtaacttattttcccaaagcatctggtactactattattcccttttatgtagaagcaaccttaggcacatattaacccagccaaggtcacacagaataaattatccaagatagcatggctagcaagtttcagatctgggatttaaaccgtggt

SEQ ID NO: 570982 - DNA, 515 bp, Homo sapiens
acttggtaagctgaggcaggaagattgcttgagcccagaagtttgaggttacaataagccatgattataccactgcactccctgggtgtcagagcaagatcctgtctcaaaaaaaaaaaaaagcaatttagatataactcaaaagaaagattaatgtaaaattaattagaatgactgcttttggaaagaaattgtaaggaatatgatgagggaagggtagaaaaaggttttcaaagtgcagtaaatatttgattttttaacttggrtagagaaatgtttgctatatacaaaatgtaaattgcgtacaaaatataaaacactgttattggctctcttttattgaatattgtcacagaaattttgtaacttattttcccaaagcatctggtactactattattcccttttatgtagaagcaaccttaggcacatattaacccagccaaggtcacacagaataaattatccaagatagcatggctagcaagtttcagatctgggatttaaaccgtggt

SEQ ID NO: 570983 - DNA, 496 bp, Homo sapiens
aaacaattgcaatataattggataatgtagtccaaaaaaattacttccttcaaaacagagtaataatttggctataaaaatacttctatatttgttaaagttatgtataaaaatatacacactcacacawatgtgttcttagtatatagctgatttgataggctcagaatatatgtgtattaaacactctgtagtggattaaaatttctgtaatcctattagtttccaattttttagaaatgatcacatttgttttggagtaattaataactgcagtgatttttttaagttgaatatcttataaaatgtttctctatggctatttctgaatctctctactcaaccctaccaggcataagttgatattttgggtaatcagtggatgatttgatattggattttcaatattatacatgaaacatgtatacctttctctttccaaaaacggagtttaaattaatggatttgattggcagggggtatagttaggatgagc

SEQ ID NO: 570984 - DNA, 553 bp, Homo sapiens
ctattttgcttcaccaccccaaaatttcaccttagattataaggtgatcatcactggacacacctccaagagaagggtaggcccctagaagccaaactaacaggagtaacagatcttcccttctaaaaatagtgactatcctgtattaataattaaagatcagsaaaggacagatgcaagtttaacactggaatggtccttaattaaagatcctctagacaggaatttcaaaactgctttgtggtgctccatgcctccttggacttgctacagatttgtgagttgttttgtgaaaagtcttgggctctcagtgcttttgtgcaattagagatctttcacatactaaagggctttagttctatgtgcagcctcatgctcctttacaattcccagattatgtatgctcttgccttccctctggttaaggacacatttccggtgctggagccgtatggcataatggcaggagcatgggctttgaaactaaacaagctaagctccattctcaggactgccactcattaacctgttgctggtagctctgggcatcact

SEQ ID NO: 570985 - DNA, 617 bp, Homo sapiens
ttgttttaacccagaaggccaaggtctccagatgttaggtcacagccctgcattctgcctcttttttttgctctgtttccatgtccttcaaataactaactcaagctcaaattttaacagaaattgaactgaccagcagccaagggagttgacacgtgatttatgagtcaggagacttgaagatggtgacttaacacagcttccagatgctgaaaacgaaagtgactcaagacatacactccaggttgaaggcatatgccaaaaagagaaaagtgggaagtgtgatttagggcctatcttccaaagggtaatgatgaatctcmtcagaggcatagcatttcactttcaatcaggatacaaagatagcaggaaacatttataccaaaagggaaatttgttcaaaaagtagaaatttatgcaaagataattttttgaggtgatatttttgacagtagagctggcaactgtgtttagaggtcattcccacactctgggtaccactcatgactgtcatgctctgacgagctcctaatctctctcctaaatccttcctccctccagcttcacagatgagacagagtggagatgaagaaacagtctcaaaattataactgtga

SEQ ID NO: 570986 - DNA, 580 bp, Homo sapiens
ctcaaatactgatgtgcatgagaatcatctggggaacayatgtaaagtacagattcttgacttttccatctagaggctctaattcaataggccctcaccacagcctgagaattagctttttcttaagcacccaggtgactttgattgggttagaacaagtccatatcctgagaaacactagtttacaagctcagtcttctaaatgttaactttttttcgtcttaaaaacctttcacataggttctacctcagagctatttagaactagaatctagcaagagaataggaggtaggaggacagtagagtatctctgcagtagattcagaagatcatctagaattgggaaccactgtcttaagttttatttttccctaaaattaaaaatcattatcaacacatgagaattatttgatttcagaaccatgtttctcttaagtctgacaaaaagactgaaaggaaaactgtaggcttttcctcgtgtaaatgaacatttttaaaagatatcaggtacccaaatacaatgtgatattttaacattttatccttaagtgataacattgtatgtttcatttaaatttt

SEQ ID NO: 570987 - DNA, 477 bp, Homo sapiens
tttatgtcatagttagcaaggctttccactctctacagtgtatataagctgggcacagtggcttgtgcctatagtcccagctacatgggaggactgcttgaagccagcagttcaagaccagcccgggaaacatagcaaaatcccatctgtaaaaaaaaaaaaaaaaattagccagacatggtggtatggtgcctgcagttccagatactcaggaggctgaggcgggaggatggcttgagcccaagygtttgagaccagcctgggcgttacaggaaaactctctctctctctctctctccataaacacacacacacacacacacacaccacaccacacacacacacacacacgttttcttctagcacttctctgatttctttccttttctttctctactttttaaaaaatgtttactgaacaatccattttatgccactgatcagcaatgccacttttattgtagactaaatatgtat

SEQ ID NO: 570988 - DNA, 477 bp, Homo sapiens
tttatgtcatagttagcaaggctttccactctctacagtgtatataagctgggcacagtggcttgtgcctatagtcccagctacatgggaggactgcttgaagccagcagttcaagaccagcccgggaaacatagcaaaatcccatctgtaaaaaaaaaaaaaaaaattagccagacatggtggtatggtgcctgcagttccagatactcaggaggctgaggcgggaggatggcttgagcccaagtgtttgagaccagcctgggcrttacaggaaaactctctctctctctctctctccataaacacacacacacacacacacacaccacaccacacacacacacacacacgttttcttctagcacttctctgatttctttccttttctttctctactttttaaaaaatgtttactgaacaatccattttatgccactgatcagcaatgccacttttattgtagactaaatatgtat

SEQ ID NO: 570989 - DNA, 564 bp, Homo sapiens
ttactttacatacattgtccagttaaatttcccaacaatcctattttatagatgaaatgaaaaaagaatggggacgtgaagttacttgcccaagtctctctcagatgccaaacaaagcccctgttcctgccaaacagactcctttgaactttttaacttcaatattaatcctttgaagcaaaataaataaaaaagggcaatacccaagtgggatgcatataaatcgcttaattagtagacatttattccacaaatatttgttaggtgccaattatttgccagactacatcacaagagggtaaamtcagtgtcacagcagacagctacaaatggtgctttttgcactttgcccatacccttgccacaggaaccctcacgcctgggtcttgctgtgtttgtgagctagtccttccagctgccaagggctcagagatgttgcttcttttgctgtttcatcttctgggttatcaagcttgctgctcaggccactgtgcccttgacctttttaggctctagaagttacctcaagggggaatgtttagttcacccaaaatttaagccgtt

SEQ ID NO: 570990 - DNA, 510 bp, Homo sapiens
aagtttctctttcgttatttttaggaatatcacagaaaaaaagcacaaaattgttaaaatcttgcaaataataaatgacactcaaagaacatcacacataattccatatgtatcaatttgagcaacattgcactgagccacaataaatctgtgcagaacaaattatatccttttactataaacattaaacaatataaaacaacacataattttcctgtgctttgttatcaccatcataaccatcattttgatgtgtattatttaaactttgtgtggacctagtgttctagacaattctatyatcagaaagatgaacctctcttgtccttcggtaattaatagtttcatttgcatctactcgcacattcaacttttcattcagttctgaaagtacacatgggttcactcattcattctttcattcacttcagaaagcacacatcctctccaagtattctttgcagtacaataggaaaaattatattgttactaagtgacagcaaacagaat

SEQ ID NO: 570991 - DNA, 614 bp, Homo sapiens
gcctaataacaatatactaccttatttattaaatatttgtaagtgcttttaatgtaaaaaaccatgcattttatcagggccagctaaaggtggcccttgattttctttttgatatattacctccatgctcccactctccctccacaaattctatccctgcatctacaattccaagccatttctaaattttggtcagattttacagttttccacacaaatatcagataaaaatgaatttcagtttatagatgtgtcttcacaactaatcagattaagatattttaaaagatgttcttctgtgtgtggtattcttataaaataatatataatgtctgatttaagtcagtgggtatttgaaaatctcagaggagacaacagttatagagaataggcagacgggtaatttctgaaagtcagagggaaaatgatggctttctgayttttaactagcaatgatggtcacacacggcaggatctcttttgtatacagctgtctacagaggaagcagtgaaataaaagtggaagttcacaagagaacaaaaggacatacatgtgtgtttgttcgtttaccctagaaaacccttacaacaatgtctcctcatctgcaaatttc

SEQ ID NO: 570992 - DNA, 566 bp, Homo sapiens
ttagcatgcttttgatatttaagatgggataagttttgggtattcatttttattaaattaattaattttaattttattttctcatgtacatagctatgcatagcaagaggagaaattttataaatccttctatttcayaagaatatatgcacttggcaccctgcattgaaactttatgccagataaaaaatgctagaacatgaccccatcaccccttcatacgtctatttcaatattgtccctaaaacagagatagcaatgaaaatcctaattttaactttgcattaattttcattatttctctcatggctatggtataaaaatatctatgtctttcctatcatccaatctttcttttttccttgcccaatatttcatttacatgtagaaaataccactgcaggaaaactgttcaaggccatccctctactcctggtctttaaagaatacaccacacaacattgattttgttctcatattaatcactcagccttcacaggaacactactggatgtgatctctcaaaaagactcagccctagctatcaactcaagtgctgtcagtag

SEQ ID NO: 570993 - DNA, 566 bp, Homo sapiens
ttagcatgcttttgatatttaagatgggataagttttgggtattcatttttattaaattaattaattttaattttattttctcatgtacatagctatgcatagcaagaggagaaattttataaatccttctatttcacaagaatatatgcacttggcaccctgcmttgaaactttatgccagataaaaaatgctagaacatgaccccatcaccccttcatacgtctatttcaatattgtccctaaaacagagatagcaatgaaaatcctaattttaactttgcattaattttcattatttctctcatggctatggtataaaaatatctatgtctttcctatcatccaatctttcttttttccttgcccaatatttcatttacatgtagaaaataccactgcaggaaaactgttcaaggccatccctctactcctggtctttaaagaatacaccacacaacattgattttgttctcatattaatcactcagccttcacaggaacactactggatgtgatctctcaaaaagactcagccctagctatcaactcaagtgctgtcagtag

SEQ ID NO: 570994 - DNA, 566 bp, Homo sapiens
ttagcatgcttttgatatttaagatgggataagttttgggtattcatttttattaaattaattaattttaattttattttctcatgtacatagctatgcatagcaagaggagaaattttataaatccttctatttcacaagaatatatgcacttggcaccctgcattgaaactttatgccagataaaaaatgctagaacatgaccccatcaccccttcatacgtctatttcaatattgtccctaaaacagagatagcaatgaaaatcctaaytttaactttgcattaattttcattatttctctcatggctatggtataaaaatatctatgtctttcctatcatccaatctttcttttttccttgcccaatatttcatttacatgtagaaaataccactgcaggaaaactgttcaaggccatccctctactcctggtctttaaagaatacaccacacaacattgattttgttctcatattaatcactcagccttcacaggaacactactggatgtgatctctcaaaaagactcagccctagctatcaactcaagtgctgtcagtag

SEQ ID NO: 570995 - DNA, 566 bp, Homo sapiens
ttagcatgcttttgatatttaagatgggataagttttgggtattcatttttattaaattaattaattttaattttattttctcatgtacatagctatgcatagcaagaggagaaattttataaatccttctatttcacaagaatatatgcacttggcaccctgcattgaaactttatgccagataaaaaatgctagaacatgaccccatcaccccttcatacgtctatttcaatattgtccctaaaacagagatagcaatgaaaatcctaattttaactttgcattaattttcattayttctctcatggctatggtataaaaatatctatgtctttcctatcatccaatctttcttttttccttgcccaatatttcatttacatgtagaaaataccactgcaggaaaactgttcaaggccatccctctactcctggtctttaaagaatacaccacacaacattgattttgttctcatattaatcactcagccttcacaggaacactactggatgtgatctctcaaaaagactcagccctagctatcaactcaagtgctgtcagtag

SEQ ID NO: 570996 - DNA, 525 bp, Homo sapiens
atgtattacagagatatttagtcttcagatgtatatgaggaaggacttaaggaccacagtgatccaccacatttctaaaatgtgcatcatttaaatggcaatatattttatatacatgcaaataaaatattttaaggcttaggaatcaggtgtatttgcccaaaaggctttatagggatatccaataatttgaattgaccttttttgttatgcaagtgattaataagtctatatgttaaaacatgagtcaaggcactacttctgttcagttctatgagctgctgttgctgagtagaattcccattgtgacataatgactttaaaagtttaaatgatggactcattgaccccttcttccccagtcactcctcattgtaaaaaaaamatgctttcataaaaaagcaaatagtaggtatagacaaaagaaaagtgactccattgttataaaccactgatatgtgaaccaaatttaaaactttttatatgtcttggatacaatataagaaaatgtgcactataaatctt

SEQ ID NO: 570997 - DNA, 624 bp, Homo sapiens
caaaactccttcatgttaaaaactctcaataaaccaggtattgaaggaacatactttgatataataagtgtcttctattgacaaactcacagccaacctcacactgaataggcaaaatctggaagcattccccctaaagactggcacaagacaatggtggtctctcctttttaacataatattggaagttttggccagggcagttgggcaaatgaatgaaataaaacgtattcgaatagaaaatgagaaagtaaaactatgcctgcttgcagattacattattctatatctagaaaaccgcatattctgagcccaaaagcttgataagctgataaacagcttcagcaaagtctcaggacacaaagtcaatatgcaaaactcactaacattcctatacaccaacarcagtcaagctagagccaaatcaggaatgcaatcccattcaccattgccacaaaaatacctaggaataaaatacctaggaataaagctaaccagggaggtaaaagatctccacaaggagaactataaaacactgctcaaagaaatcagtgatgacacaaatggaacaacattccaggctcatggataggaagaatcaattgtgaaaatggccatactacc

SEQ ID NO: 570998 - DNA, 567 bp, Homo sapiens
attgtacataagtctgctcaaatgcatgctccattgtcccttcagatttcactgacaaacacaagtttaaagataacattattagcaataccaagaccaagacagaagagcattaaaccaaggaaggggctcattaaattagcaatccaatgcaatatttcgtgttgcttgcccaagaatctagcccagccactattgcaytggggcagcattttggagccatctgcataagacttggtttagacatgagcttctggaaggaagggggagaaaactgaaaaaggactagtgaaaagagaaggctgataatcaaggtcaatacagagcctagaaactaaaattctaaatacataggtgaacaaaggaagctaacctatacagtaacattctgtaaattaattcacttttcaaaataaaaataataatgaaaattttgaataatttaaaaacaattacacttaagtcctcaaaaacatggagaacatttatgtgcataagcggaaacaagaaatcacaaaataaaaaataacacaacaaaataagaaggatgaagaaaactaaataatt

SEQ ID NO: 570999 - DNA, 567 bp, Homo sapiens
attgtacataagtctgctcaaatgcatgctccattgtcccttcagatttcactgacaaacacaagtttaaagataacattattagcaataccaagaccaagacagaagagcattaaaccaaggaaggggctcattaaattagcaatccaatgcaatatttcgtgttgcttgcccaagaatctagcccagccactattgcattggggcagcattttggagccatctgcataagacttggtttagacatgagcttctggaaggaagggggagaaaactgaaaaaggactagtgaaaagagaaggctgataatcaaggtcaatacagagcctagaaactaaaattctaaatacatrggtgaacaaaggaagctaacctatacagtaacattctgtaaattaattcacttttcaaaataaaaataataatgaaaattttgaataatttaaaaacaattacacttaagtcctcaaaaacatggagaacatttatgtgcataagcggaaacaagaaatcacaaaataaaaaataacacaacaaaataagaaggatgaagaaaactaaataatt

SEQ ID NO: 571000 - DNA, 528 bp, Homo sapiens
aaaaccacatgttatcatacaatacagattctgatgtgaagtgaagacctgaatcaggttatggacatgtctataacttgcctatgatactaggagacatatttatgcttttctttttccttaatatttatcaaatgggcttaatgatcttgtctgcaaaaatgttattatttttagaatcacatgagttaatggattgaagaaaaattaacccccacccccccccaacacacaagcattttaggggagacattgttggtctaaaataaaaagaaaggaaaactcagagagcttgcaaagttaataacctattttctgccactaaattttcaagtgaaacatgagatagttattatccctgcccrtaattccatagctcccttctcaagtcgtgtttcttatgcaccagaattgttgtttgtgatcacccattgaatttatgcatgcttcaatccttacagagcctagtatttctacagccttgactgtacatagacatcaaggcagagactgcagagtaaaatattg

SEQ ID NO: 571001 - DNA, 579 bp, Homo sapiens
aagaatattaagaagttctgctcatatcttagtagatcatatcatgtgttatctgcttgaaataactgctcctggcactagaaaccacatgccaaagatgcaccattgctgcttctcttggtgattactgtttctgctatgcaccaatatgtatggaacgtacagaatgaattgtggcaagtggaaagatgraagaagataatctaaagaacaaataatgtgcaaatgggaaatgagtgtggaaggttgcattatggctcacaagtactcattgctccacatggatggaggattatactctcctattgcattgtcatcatgtttgggactatgagttttatcaatgaaataggaacagatgtcggttgcatcactttcaagcagaagctttaagagccagtttgctggtagtttgctgtatctctcttccttctttgtaggaataattatgttccagaaagagattgctctgctattctgggtccaaaaatgaaaataatattgaacagagctgaaccaactcatgaaggatatccctaatgaaattaagatataaccttacttgttataagccatggg

SEQ ID NO: 571002 - DNA, 622 bp, Homo sapiens
gttaaatagatattcaaagagtaatatcatatccagttatccccattttatcctctgttattatactgatcatagtgtaattgatagatgcatttaaagaagatggtacacttgctgatggatatagaaaacattcattgtaaatacattttatgagattggataaatgtgagaggtaggatagaggaaagagatatagtatgaactatggcagagtaaatatgacacaaatatgttgacagctttccctagagagatgagatttatttaccctaatgtatgaccagagtatggcataagtaattcatgccaattccagctctaacctttaaaaagaagggcattttatgcttcttattacttagaatagcttmtagagctctgactcaccaattgaaaagtcaaactaatatactagaaagaccatggagagacaccctgaagctacatgaagaaccaaaggaactcctcagaatctagtgttccagttgtccccaccagggtaccagacgtatacataatgaagccattttggaactgacttccttatcctcagttactccaattcacagcttgtgagtgagagacagatgccccagccaagcccttcccaaatctttgg

SEQ ID NO: 571003 - DNA, 509 bp, Homo sapiens
gaattcagtcccttgtgattgtagggacaaggtccctattttcttgctggtcataaactgagatgcatttctagctcctagaggccacckcatttcttggctcatgggccctttccttcatcttcaaaagaagcaatggataatcaagtctttctcatgttccatctctctgacaagcccttctgcccacagtttccacttttaaaaactcatgtgattatattgggaggacataggtaatccaagataatctccccaatttaaggtccatgccttcattttaatttctaaccctaaaattcatttttgccacataatataacatagacacaagctctcaagattagaaataaatgccatttcttgtattttcagggttgtctcttcaaccatagatctgattttcatcactgtggtttgtgaagatttctcacttgtgtttatcttgtctatacctctctacattctactacattctaagtaaggctctccttctgcacagtgaataa

SEQ ID NO: 571004 - DNA, 591 bp, Homo sapiens
ttatagcttgttttagggggtaaatgtttactgtcacaataccaatatgagcaaaaataaaaattaattcacaaattttaaagtggctctcctacagatgaaactrtttcacatgcttttctcatatgacccccatatgctgtcttttgagatacatatcctcattttagatttcctagggggaaatcgaagttcagaaatgttctggaaaatgacatgttaacatcagataagaagcgacttgagtaagatttgagtctaggtttcaggcatgtgaattactaactctgccaagctctcccttcatttgccctggcctgccttcctgattacacatattggtctagagtggaatacctagctaccacatcctaccattttgataatggcatccgctcaaattgcatatgaatatgtcctattactgtattgtttttaaacacaaatcagttttcttgggtaacaggaccattgtccagttagatcctttagtcctgattctagttgtagactattccaaccaatactttgacttaatatcttacagtcaagccaatggcttatatcaatatcaacgtgcattttaaatat

SEQ ID NO: 571005 - DNA, 465 bp, Homo sapiens
ggatctgacctcttgtgttacaaaatgcatggacttctccctaatttttttgtgtcccttgccctctgcccagactcatgataccaagctgacttcccattccttgttctctctggcatgcactatttggcaattgtccaaaaccttggttgtagtcattaaatttgatcactggcatatcaaagggcccattaaaggtgtaagagactatgcagcaacttatgagtttttcaatacacaattytattattggggactggcagaaatccaggttaaaattggtatttttgcctacgtataatatacagtgaaaagctcaagtttctcgttgccgcagcatctgctcctgggaaatttaagaggccaaaaagtggaaaatcaagtcagggctatagcttggatttcaggataaataaggaattggtaagccattcatgttgcttttagatataaataattttaggc

SEQ ID NO: 571006 - DNA, 613 bp, Homo sapiens
ttgtttgttggttgctcttaaccacagggatgttaacttctattaactagctttataactgtatatgtcaagctcccctggctaccactgtgaccatgtctctcattacaataattacatctactggatttttgatgattatgcaccacgacctggcctctattattccagagtcctctctttcattactgaattcaatgagcatattgatataacagcacctgctactgttagtcctggcatacaagaaagcagacatcactgaacttggtattgaagcacctctcagctgtgcatttcttactgctttggtaaacatgtcttctgaacccttttgagaacaaaatgaacatctctgcaccctcttttgctccattatccactaactgccaggtcaggtattgcacttcctctttgatgtgagccaatacttttccagtttctagaattatcttagtagcattttagaaacatctggagtttttgccaaagtattaaatcttttgttttaagagaatgctctcatctcaataaagtctttcttaatcagtgttatgtgtcatcctcctttgattcagcatgttsaatacccactcacattatatatgtttct

SEQ ID NO: 571007 - DNA, 529 bp, Homo sapiens
cttaatacctgggtgacaggatgatctgtgcaacaaaccaccctggcacaagtttatctatgtgacaaacatgcacatcctgcacatgtgcccctgcttaaaataaaaattggaaattaaaaaaaaatgtttctatgaaaaaacttctctatgaaaaaagttttctatgagaaacaacactctggagctcttcacatacatcatttcctggagatttttaatgcagtatagtttttaaatactctgaaatgtcctgtgaaaagtaaacctggttaaactgattgaacctgatattttccaaaacaaatatatagatacacacagasagatacatgtatgcgcacatatgtgtacataaatatgtatttaaattaaaataaatgaaaaagtagtagtcaaatatgcagatctatgtcatatatacagatatgtatatgtgactgctacttttttgtttaattctcttacccctatctttctcttttctatgtatgcaggtatgtaacagatatgcaattgtaccttggaa

SEQ ID NO: 571008 - DNA, 592 bp, Homo sapiens
acaagtcctattaatgcaacccttgtttgcaaatcaagtttacttctcaaattactttttgtggtatgagtttttaaagcctcatttagaagtaaagactagacataaatgaggaactaagtggttctttttataatgtcaatcttttggaaaactaaaacatagtttttccagattgagaacatgttggtaacattactaggaaaaggtaggaatattaaaaaattaagtcagtcgtcattttctttactaccttatcttcctcaccactccaaaaaacataaatattatatggcagaaaaccaaataaatgatttagaataagagatgtgttcgcaaaaatttgctatgaattataatacaaygtatgttatttcactatataggaaaaatgcctttttagaaaaatggctctgaagttttgaaaaagttttttctaaacatgaaagtacgatgacattattgacaaaatgaccatgacttatttttaaaacaccaatagcaaaggaagaaggtcaagggtatagtcgtatcttctaaaattcagaaataaattttgaaaaataatttgaagatacaacagcacaattct

SEQ ID NO: 571009 - DNA, 559 bp, Homo sapiens
gcttcccttggctaggggagggagttccccaaccccttgtacttcgtgagtgaggtgatgccccaccctacttcagctcaccttccttgggctgcacccactgtctaaccagtcccaatgagatgagctggttacctcagttggaaatgcagaaatcacccaccttctgccttctgcgttgatctcactgggagctgcagaccagagctgttcctatttggccaccttgccagccaccctgacttgtttattttcgatgctaacctgtgggttaccaaatattgggaaatggtgtgctgagaggagaatataaagacaaagtgtggatccagtgcagaaaattttacagcttcctgtggaataagaaaatgttggaagcttaagaaacttttaatttacctaataaagccttgtattttatagaagcatgaggccyacccatttttgtttactctatattcattcaactacttttttttcttttattattattatactttaagttttagggtacatgtgcacaacgtgcaggtttgttacatatgtatacatgtgccat

SEQ ID NO: 571010 - DNA, 610 bp, Homo sapiens
agtattacttttcaaggactgtcctacctaaagaatggtttgatttttcattataggaacttcccaaatgctttatcaaccttcaggggaagtcatagaccgagtttacagcttgagtctttgaatccttccccacaaatcctcacctcactattttctctaagcccagactgttgtatcatgattctcacacaattctaatcaaatcctctccttcagagacccatcttaaaccaaacttgcaattctcaataaattctgatctccccttctctcctctgagatgctgatagaaatttacaaaggctgtactctctcccttgccagtgtattagttttctattgctgctgtaacaaattaccacaaacagtgttgtaaacaatccagacttgttatcctacagtcctcttggtcagacattcaatgtgggtctcactgacctaaaatccaggcatcagcagggtagaggttcctcmtgcaggctctgggctcctgtgtctgacttttccagcatctagaggctgcctgctgtcctcagcccctggccccttcctccatcttcacagtcagcaatgataggctgggaggccttctcacgctgccatctct

SEQ ID NO: 571011 - DNA, 566 bp, Homo sapiens
ttgggaggctgaagcaggagaatcccttgaacttgggaggtggaggttacagtgagccgagattatgtcattgcattccagcctgagcaacaagagtgaaactctgtctcaaaaaaaaaaaaaaaagaaaagaaaagaagtttattttctcacagttctagaggctgacaaattcaggatcaaggagacagtgaggtccttttggcatctggtgmggtccttttcgctgcattctcacctggcagaaggtagcacggcaagagggccagacgctgtgtgaagcctctgttagaaaaacctttatccccttgatgagggaggagcccgcatggccttaaaggcccatcttttaatactgtcacattggccattaagtttcaatacctgaattatggaggaggcacattcagatcacagccataagccaatgtgatgttggaagctcatggacattcttttttgattgcttcagttttctggtgaggtagggagctaagaatgagactgggagaagagacactggcatttcgaggaaagagaaaagagagaaaaagtgttatctaaga

SEQ ID NO: 571012 - DNA, 566 bp, Homo sapiens
ttgggaggctgaagcaggagaatcccttgaacttgggaggtggaggttacagtgagccgagattatgtcattgcattccagcctgagcaacaagagtgaaactctgtctcaaaaaaaaaaaaaaaagaaaagaaaagaagtttattttctcacagttctagaggctgacaaattcaggatcaaggagacagtgaggtccttttggcatctggtgcggtccttttcgctgcattctcacctggcagaaggtagcayggcaagagggccagacgctgtgtgaagcctctgttagaaaaacctttatccccttgatgagggaggagcccgcatggccttaaaggcccatcttttaatactgtcacattggccattaagtttcaatacctgaattatggaggaggcacattcagatcacagccataagccaatgtgatgttggaagctcatggacattcttttttgattgcttcagttttctggtgaggtagggagctaagaatgagactgggagaagagacactggcatttcgaggaaagagaaaagagagaaaaagtgttatctaaga

SEQ ID NO: 571013 - DNA, 566 bp, Homo sapiens
ttgggaggctgaagcaggagaatcccttgaacttgggaggtggaggttacagtgagccgagattatgtcattgcattccagcctgagcaacaagagtgaaactctgtctcaaaaaaaaaaaaaaaagaaaagaaaagaagtttattttctcacagttctagaggctgacaaattcaggatcaaggagacagtgaggtccttttggcatctggtgcggtccttttcgctgcattctcacctggcagaaggtagcacggcaagagggccagacgctgtgtgaagcctctgttagaaaaacctttatccccttgatgagggaggagcccgcatggccttaaaggcccatcttttaatactgtcacattggccattaagtttcaatacctgaattatggaggaggcacattcagatcasagccataagccaatgtgatgttggaagctcatggacattcttttttgattgcttcagttttctggtgaggtagggagctaagaatgagactgggagaagagacactggcatttcgaggaaagagaaaagagagaaaaagtgttatctaaga

SEQ ID NO: 571014 - DNA, 578 bp, Homo sapiens
cttttacccctctaagaccaaatgcccaactggagcatttatgctgtttgtgcagcattgcccagctgcagagaagcccaaggctcagagggtaagaagtgactggaagttgtcttgctacgtatgtggtgcaggttctttaactttcataaaaatatatttgataagatggtcaatttgcatgagtatttacccaatcagagggtgcagagaacagttatatggagatttttttttaagctattacatttacatcatttagaaatcaaaaygagataagttacctaccaagggtaccttccccatttctacgcccatcatagggagctgagaatggcctgactaataaatttgcattagaattaacaaccacagggatggcatactttacaacagcaacccagggacaaggaaaggggagaggatgttaccaagcctagggaaacaactcaggctcatggtgaacagggagggaaactgataatgtctaactaacacaattttaaattcagtaagaaaatggtttgttagatcatgtagctcacttactcgccattgaaaaatgctgtgagtgtttc

SEQ ID NO: 571015 - DNA, 578 bp, Homo sapiens
cttttacccctctaagaccaaatgcccaactggagcatttatgctgtttgtgcagcattgcccagctgcagagaagcccaaggctcagagggtaagaagtgactggaagttgtcttgctacgtatgtggtgcaggttctttaactttcataaaaatatatttgataagatggtcaatttgcatgagtatttacccaatcagagggtgcagagaacagttatatggagatttttttttaagctattacatttacatcatttagaaatcaaaatragataagttacctaccaagggtaccttccccatttctacgcccatcatagggagctgagaatggcctgactaataaatttgcattagaattaacaaccacagggatggcatactttacaacagcaacccagggacaaggaaaggggagaggatgttaccaagcctagggaaacaactcaggctcatggtgaacagggagggaaactgataatgtctaactaacacaattttaaattcagtaagaaaatggtttgttagatcatgtagctcacttactcgccattgaaaaatgctgtgagtgtttc

SEQ ID NO: 571016 - DNA, 351 bp, Homo sapiens
gtgattggacccctgcactccagtctgggtracaaagtaagaccctgtctcaaaaaaaaggaaataattttgttctaaatttttagatataaatttatatgaaagtttattgaagctgaatcaacatctcttcgttttctcccccttttttcccttttgtcttcctgacataagtttacacttaatgtaggtaatccagtccagcccagtctggcaaggtatttaggaggcccacaggggaggctgctccattagactgaaattactttaagctcttaagcagagattactcttctccacaaaaagagatgatcctcagtagcagtgattatctgtaatttcttgaagttc

SEQ ID NO: 571017 - DNA, 351 bp, Homo sapiens
gtgattggacccctgcactccagtctgggtaacaaagtaagaccctgtctcaaaaaaaaggaaataattttgttctaaatttttagatataaatttatatgaaagtttattgaagctgaatcaacatctcttcgttttctcccccttttttcccytttgtcttcctgacataagtttacacttaatgtaggtaatccagtccagcccagtctggcaaggtatttaggaggcccacaggggaggctgctccattagactgaaattactttaagctcttaagcagagattactcttctccacaaaaagagatgatcctcagtagcagtgattatctgtaatttcttgaagttc

SEQ ID NO: 571018 - DNA, 553 bp, Homo sapiens
aataggagcctggttccctgaagtcactgtaaaatcaccacaccacctttggagttatttatataatggagaattgacattgttttgttgtttgttgattttttcccctgctatatgcagacaaacctaatattaaccagttcagcatggaatgaataacatgagttttaagttgtttgagtctaaggsgatggctgaaagtcctgccagagttgtcttataagtagttggaatgatgggactggcagtcaggtaagaaatgtacagaatcatctatttggcaaatgtctcttgagcttctcctatgtgtcaggcactgtgttgggtcctaaaagtaaaaatattaatactactaaattacctatttcctacccactagtagcttctagtttaggagaaatatagctatctaaagatacttgcattgcattacgataggtgattaaataagggacaaggaagataaaattgattttatttaggaagttagtgaagactcataatgtcatcatccacctcatgttgtaaaatcatttggacatttaaaagtcta

SEQ ID NO: 571019 - DNA, 626 bp, Homo sapiens
tcttatgcacgtgatgaatgcagccatctgggaataaccatttggaaaacaatatcacataattgtgtaaaactgaacagtttacttagcctaatgacccaaatgatcatttttatactgtaaggataatgatacatactttagggaagctcttgtacatgtttatacagaaatatatacaagattgtctgcagcatcattgtatatactaacaaaaatttgtccatcaacagaattacataatggtatatcacacaattgaatattatatagcagtgaatgtgaataaactaaacttacaagcattaacataggtaaatcttcaaaacatgttgagtaaaaaagcaagtagaaattatatgattccactttaatagactttatttttagagcggttttaggttcacagaaaaattaagcagaaatagagctcccacataacctctaacttcmcccactccccaccactgcatacagccttccctcattaacactctgcaccaaagtggtatatttgttacaaaagatgagtctgtgttgacacatcattaacaacccaaaacccatagtttacaattgaggttcactctttgggtttgaatattttataattttaacaaatgtac

SEQ ID NO: 571020 - DNA, 556 bp, Homo sapiens
tctttacatttctatggtagcccaaattatctgctgtgtttttgtatttactgggttaaagtggcttctagacttgatttccagactttctctgaacctaattttatgtatcttttatgggaatatttatttatttgctcatcaagatttcagccagaataaagactgtgtgaaaaaagcaaatcaaaacaaaataaagtaaaacaaaataaaccatcaccatcccctctacaaaaacaaaaatagactaacgtataaaactcattttttttcttgaggatttaatttgatttttctcattttttctggctttgagatctgtaccactcaattgtgaaaaatcaaattcaartgctttgaggtataaatatttacagtgatttcatttctttaatgccaaatattaagtggatattggatgggtgtatggaaggttagatagatggatggatgtttagatgaatggctggatatatagtgaatgtttaattcagcctataactcaggatatttgaaactaaaaatgcaagcacagtatgggaataattggttgctt

SEQ ID NO: 571021 - DNA, 532 bp, Homo sapiens
agaaagcagaaatatgctaatctgaagacattcatttattagccaaaaatgtaattaatctatgctctgtacgggacattcttcatttactctcccagctctgtggcccacctttctctgtaccttggttgctgaacttaatggattgcatctgtcaggatcccttgacctctgttgtccaggtgcagtcaacccattggaggcactggaaggacagtggggagcaggagagagcccattagcttctcctaatggcctgcggtgttyataatgttagggtcctttctgcatgctcaacactcagccagtgccttctctcatcggagtccaataacatgttttcttcttttcccctttaagactagacatggcaaaaccttgctcctggtaactgttacctagtaactgttgctagctcctgggaactttattcttttattacccttaatcctgccctcactttgtaaataatcccatttttacactatttttaataacctctttgagtatgtcaatgatttttgccagaacc

SEQ ID NO: 571022 - DNA, 586 bp, Homo sapiens
aaatgaaaaggaagaaagaaatcaaattttccgaaacatttctgaaaaatgtttccttcacatattacaatgaaggaaatgtaccaatggcttccctcaaggtgttctctggtcttatattcctcagagagcagctgctttgccaaagtggtaaactggctgccaaaggctaaataatgatattaggtaggtggtgatactgtttgtgatgctgttatacatgatgtagaatatgccttaaatcaataagtagtgccatyccctctgcagatataatatatgaacggatctgggaaacaagaagtagatgtgggaatagcccctcttacattacactagtagtaaagtagatgtggcatcagtgtgttaggaaagtgagtatccaaagaattaatgcttccatcagggagcataatcatgattctattgaaatagaaattaagacttatctcgagctaacatgaacttttcattttgatgtaccaacaggcagagaaaagggtcaatgctatgggttgaataattaattcaattgccaaggaaacttttttcttccaactagtgggggcaaaaagacccctcaaaa

SEQ ID NO: 571023 - DNA, 657 bp, Homo sapiens
ttttaataaaattttggaaaacaaatttgattgtcttcatkctgtttttaatattgtttggaaaattaactttcctctctcaaaaaataaaagttttcacctttttttttttgaaatctttgagttatcactttggttaaatgaatgacttattttacaatgacctgtgatcctattttgtgatatcaaatatttgaaacctttgatatttgacaagctttcctaaatcaaattataaattatgtttttttttctgaccgaatcaatcctttaagatattaggttccctaaagtccaaaaaaaaaaaaaaacataatttggcttatttggtacaaaaattatacaggaagcattgtcaaatatgaaatggtgttgtgttttctttgggcatatggtataactatgttattgatatgtgttccaaaattatgggaaactcctataattctgatataacttagtgtatattatcagtaataatagtaattgttatgttaaaattattgcatgccaacaaatttttttgtcaattgtgtctttgactacagttgccctaaaacttttcatcacccatggaccattgttgtctagttttggtcctttttagaaggtggttttataatcagctatacaacaggtgctcttgaatgcaggtct

SEQ ID NO: 571024 - DNA, 557 bp, Homo sapiens
tgcagtccagcatgggtgacagagcaagactgcctcaaaaaaaaaaaaaaaaaaaaaaaaaaaaagagaaaaagaaagtctgccaataaaaaaaaaaatttctcttgtagttttccaacctagcttcctttattcctcctttttggacccttctaaccatagcagccaagactggtccaacatatctcatggtttacccaggaaggatgcaattggactggagtgtgcatgtgagttggtgtttgattcccaacagcgtttggtggatatggagtgccttggctgaattcaccctctctgaaggcagtagggtttggtggccaggagcatggattctggagtgagacagacctctcagaccattcactgcytctgtctgtggtgggggacgcatctaaacttccattttctcatctgaacactgcatgagattattgagcttcttaagagaattaaagagaataatctgtgggaagtgtctggcatgatatctggttcataggaagtgttgcttctgttgtttagctgcataataagccactccaaagcttagtggc

SEQ ID NO: 571025 - DNA, 583 bp, Homo sapiens
gctaataaagacatacctgagactgggtaatttataaaggaaagaggtttaatgtactcacagctccacatagctggggaggcctcacaatcatggcrgaagacgaagagagagcaaagggacatcttaggtggcagcaggcaagacaaatttgtgtaggggaactcccctttataaaaccatcagatatcatgagacttattcactgtcatgagaacagcatgggaaagacccgcccgcatgattcaattacttcccactgggtgtctcccacaatatgtgggaattatgggagctacaattcaaggtgagatttgggtggggacacagccaaacgacatcactcatcataggcacatttcccacccactctcaaggggagaagatcacacagagcttgtgcaccaaggggaaagaatcttagcggccacctcataaatctacctcctacaatgggagaattgtaaggaatgtagaatcaacaggactttgctggttgaatgggggatatgcaacactgcccctcacaataccttgtagtcatatagggccataaaaccttaaagcagttttacatatgtga

SEQ ID NO: 571026 - DNA, 583 bp, Homo sapiens
gctaataaagacatacctgagactgggtaatttataaaggaaagaggtttaatgtactcacagctccacatagctggggaggcctcacaatcatggcagaagacgaagagagagcaaagggacatcttaggtggcagcaggcaagacaaatttgtgtaggggaactcccctttataaaaccatcagatatcaygagacttattcactgtcatgagaacagcatgggaaagacccgcccgcatgattcaattacttcccactgggtgtctcccacaatatgtgggaattatgggagctacaattcaaggtgagatttgggtggggacacagccaaacgacatcactcatcataggcacatttcccacccactctcaaggggagaagatcacacagagcttgtgcaccaaggggaaagaatcttagcggccacctcataaatctacctcctacaatgggagaattgtaaggaatgtagaatcaacaggactttgctggttgaatgggggatatgcaacactgcccctcacaataccttgtagtcatatagggccataaaaccttaaagcagttttacatatgtga

SEQ ID NO: 571027 - DNA, 583 bp, Homo sapiens
gctaataaagacatacctgagactgggtaatttataaaggaaagaggtttaatgtactcacagctccacatagctggggaggcctcacaatcatggcagaagacgaagagagagcaaagggacatcttaggtggcagcaggcaagacaaatttgtgtaggggaactcccctttataaaaccatcagatatcatgagacttattcactgtcatgagaacagcatgggaaagacccgcccgcatgattcaattacttcccactgggtgtctcccacaatatgtgggaattatgggagctacaattcaaggtgagatttgggtggggacacagccaaacgacatcactcatcataggcacatttcccacccactctcaagggkagaagatcacacagagcttgtgcaccaaggggaaagaatcttagcggccacctcataaatctacctcctacaatgggagaattgtaaggaatgtagaatcaacaggactttgctggttgaatgggggatatgcaacactgcccctcacaataccttgtagtcatatagggccataaaaccttaaagcagttttacatatgtga

SEQ ID NO: 571028 - DNA, 583 bp, Homo sapiens
gctaataaagacatacctgagactgggtaatttataaaggaaagaggtttaatgtactcacagctccacatagctggggaggcctcacaatcatggcagaagacgaagagagagcaaagggacatcttaggtggcagcaggcaagacaaatttgtgtaggggaactcccctttataaaaccatcagatatcatgagacttattcactgtcatgagaacagcatgggaaagacccgcccgcatgattcaattacttcccactgggtgtctcccacaatatgtgggaattatgggagctacaattcaaggtgagatttgggtggggacacagccaaacgacatcactcatcataggcacatttcccacccactctcaaggggagaagatcacacagagcttgtgcaccaaggggaaagaatcttagcggccacctcataaatctaccycctacaatgggagaattgtaaggaatgtagaatcaacaggactttgctggttgaatgggggatatgcaacactgcccctcacaataccttgtagtcatatagggccataaaaccttaaagcagttttacatatgtga

SEQ ID NO: 571029 - DNA, 533 bp, Homo sapiens
ttgctatgctgcccaggctggtctcgaactcctagcctaaagcactcctcccaccttggcctcccaaagtgctaggaatataggtgtaagccaccgcatctggccttggtgatcaatcctgagtatgaatggaacctcgtgcatggatcctatagaccctagaagcctccctccctattctccagcagctccacgtcctcagttcatcactagattctaggtgccatgaatcaggaacctcatccagtttcactraccattatacacctagcatcttccacagtgtcaggcactcaatatttaactttgaataaataaataaatctattcttttacctaccatgtagtagatcacacaaagcactgtttgtcatatcactccattaaaaactatccaagtgactcctcatttcatgaaacaaatccaaattcctcacacccatcttctgtgtgcccactgacaaacctttctttcctatcccacctggaactcctcctgctcccaggctggttcctctccaacccttccacat

SEQ ID NO: 571030 - DNA, 638 bp, Homo sapiens
ttttttattcattttgatgataytgtaactgggattttttcttaatttcagtttttgaatcatttattgctggtgtatagaactatagatttttggatattgatcttatgtcctgaaatcttgaacttgtttgtaacttttgataattttcctgtggatgccttagaattttctgtatataaaatcaagttagcttgagcaacatagtgagactccatctcttaaaaaaaatttaaaaagttagccaggcatagttgtcagtgcctgtagttccagctacttgggaggctgaggcagaaggatcacttgagcccaggagtttgaagctgcagtgagctatgatcgtgccagtgtactccagcctggaggacagaatacctcacctcctaaaaaaagaatcaggtcatctgtgaatagagatagtttcacttcttcctttctaatctgaagggttaccccccaccccccaacgccttattgccccagctagactctccagtataataaataaaaatggctagagcacacatcttgcccttgttcctgatcttaggagaaagaaattaatcttttgttatgaagtatgatgttaggtgtgtgtttttcatagatgccctttataaggttgaagaagtttg

SEQ ID NO: 571031 - DNA, 606 bp, Homo sapiens
tttcttttgtaaattgcccagtctagggtatgtcttcatcagcagcgtgaaaaaggactaatacaaccatgttttacaggagttagtaaaaccacatcacccaaggatgcaaacttgaayatgagccactagccactgagttcactcataaatcacaaggacacaaagattatctgtataattcactagagttagttgctgtagctactaaaacaagtggcatcagaattgtatgggaactggctatgatgtcagtttggttatatttttgaatgaattgccttctagacaaccaaggcagaaaggccatcttgtatccttagcactatccttaactgtttttaacatcttaagagccactattctaagaactggaaatgtgaaaattttctttccttcctgataacgactttaaaatatactaaatattttcctgcttaagacaatgaatttaaaaaattttgtcctgaggattcaaattcattattctaaaccctggcctctgtgatttgctgcagctgtggatgatgaggggcactgagatgagtgagggtcactccctgttctgcccctggaagctggggtcccatcaagcccctttaagtc

SEQ ID NO: 571032 - DNA, 606 bp, Homo sapiens
tttcttttgtaaattgcccagtctagggtatgtcttcatcagcagcgtgaaaaaggactaatacaaccatgttttacaggagttagtaaaaccacatcacccaaggatgcaaacttgaatatgagccactagccactgagttcactcataaatcacaaggacacaaagattatctgtataattcactagagttagttgctgtagctactaaaacaagtggcatcagaattgtatgggaactggctatgatgtcagtttggttatatttttgaatgaattgccttctagacaaccaaggcagaaaggccatcttgtatccttagcactatccttaactgtttttaacatcttaagagccactattctaagaactggaaatgtgaaaattttctttccttcctgataacgactttaaaatatactaaatattttcctgcttaagacaatgaatttaaaaaattttgtcctgaggattcaaattcattattctaaaccctggcctctgtgatttgctgcagctgtggatgatgaggggcactgagatgagtgagggtcactccctgtwctgcccctggaagctggggtcccatcaagcccctttaagtc

SEQ ID NO: 571033 - DNA, 484 bp, Homo sapiens
ttaattcacatggtattatgtcctccaactccctccatgttgctgcaaaggacatgattttattctttttaatggctgcatagtattccatggtatatctgcaccacattttctttattcartccaccattgatgggcatctaggttgattccacgtctttgctattgtgaatagtgcagtgattaatatacaaatgaatgtttcttttcggtataatctgttttcctttcggatatacctagtaacgggattgctggaaaaataaaaataggacaaaaaaagacacttctaaaaagaagacatccaagcagccaacaaacatatgaaaaaatgcttaatatcactgattatcagataaatgcaaatcaaactgcagtgagataccacctcacaccaggcagaatggctatgattaaaaagtcaaaaaacaacagatgctggcaagactgtggaggaaagggaaggcttatacgctgttggtgg

SEQ ID NO: 571034 - DNA, 484 bp, Homo sapiens
ttaattcacatggtattatgtcctccaactccctccatgttgctgcaaaggacatgattttattctttttaatggctgcatagtattccatggtatatctgcaccacattttctttattcaatccaccattgatgggcatctaggttgattccacgtctttgctattgtgaatagtgcagygattaatatacaaatgaatgtttcttttcggtataatctgttttcctttcggatatacctagtaacgggattgctggaaaaataaaaataggacaaaaaaagacacttctaaaaagaagacatccaagcagccaacaaacatatgaaaaaatgcttaatatcactgattatcagataaatgcaaatcaaactgcagtgagataccacctcacaccaggcagaatggctatgattaaaaagtcaaaaaacaacagatgctggcaagactgtggaggaaagggaaggcttatacgctgttggtgg

SEQ ID NO: 571035 - DNA, 484 bp, Homo sapiens
ttaattcacatggtattatgtcctccaactccctccatgttgctgcaaaggacatgattttattctttttaatggctgcatagtattccatggtatatctgcaccacattttctttattcaatccaccattgatgggcatctaggttgattccacgtctttgctattgtgaatagtgcagtgattaatatacaaatgaatgtttcttttcggtataatctgttttcctttcggatatacctagtaacgggattgctggaaaaataaaaawaggacaaaaaaagacacttctaaaaagaagacatccaagcagccaacaaacatatgaaaaaatgcttaatatcactgattatcagataaatgcaaatcaaactgcagtgagataccacctcacaccaggcagaatggctatgattaaaaagtcaaaaaacaacagatgctggcaagactgtggaggaaagggaaggcttatacgctgttggtgg

SEQ ID NO: 571036 - DNA, 641 bp, Homo sapiens
atgctcatcaatgatagactggataaagaaaatgtggaacatatacaccatggagtactatgcagccatagaaaagaacgaggacatttctttggagggacatggatggagctggaggccattatcctcaacaaactcatgcaagaacagaaaaccaaatatcgcatgttctcacttataaggagaagctaaatgatgagaacacatggacacataaaggggaacaacatgcactggggcctttcagaagatggagtgtgagaggaaggagaagatcaggaaaaatgatgaatagatactaagctaattacctgggtgatgaaataatctgtacaacaaatgcccacsacacacgtttacctatgtgacaaacctgcacttgtacatctaaacttaaaagttaaacaaagaaacaagagagagagaaagagaatttctagggagctgatacagtttggatatttgtccccacctaaatctcatgttgaattataattcccagtgctggacgtaggtcctggtaggaggttgtttggatcatgggggcagaccctcatggcttggtgctctcttcctgatagtgagttcccatgagatctggtcatttaaaactgtgtgtgtgtcccctcacccaccagcct

SEQ ID NO: 571037 - DNA, 583 bp, Homo sapiens
cagtttggatatttgtccccacctaaatctcatgttgaattataattcccagtgctggacgtaggtcctggtaggaggttgtttggatcatgggggcagaccctcatggcttggtgctctcttcctgatagtgagttcccatgagatctggtcatttaaaactgtgtgtgtgtcccctcacccaccagcyttctctctcttgctcctgtccccgctttgccttccaccgtgactgtaagtttcctgaggtctcctcaaaagcagatgctggcgttatgtttcctgtacagcctgcagaactgtgagccaaccaagccttttattttatatattacccagtgccaggtattttcttacagcaatgcagaaatggcctaatacaggagaccacatacgatatttgagacagtgccaagctcttgggaaagagaacaaaacagagctcctccggacaatatattatgataaatttcacaagagatgtcaggacccaagcacaccaaggaatgagagactaatgctttttcctcagatgtccatatttgtcctaaaggtgagtaggagtttaccagctagaagaggg

SEQ ID NO: 571038 - DNA, 573 bp, Homo sapiens
ttcttcctctctcttaggcagagctcctgatgggccaattatgcctccacttctggagactgataaaattctacaatggggacatgagatctgatcagccaccaacagtccagatgattcaacatggaagagagagaaagagttagctaccctttgggatgaactatgatcaacgggaaagagaaggcagggggatactgagacataaatcccattttgttttttcttcctgggacttctccctgttccctttttccctaccagatgaattctgtgtggtaaccaagcacacctacctagtgatctcctgggtctctttttgacatgtctgtttgtttcatatttcattaaatgtatttgttgagctattgcaatacagacactctactaggaactaaggggacatagaaattaaygaggactgacttcatctgtgggaaacctatgagggcttccctgggaaggacatgtttaaattagtacttgcagtgtactgtgataatagcaataagccaagtgttctagaggaacaagctgtgacacacgatcattgtgagggcccctaccaatgac

SEQ ID NO: 571039 - DNA, 561 bp, Homo sapiens
tctatgcaaataaggaagtaagcattcattcgtataattctgtggcaagttcttgggagggatgtccctatactttacttcayctcatcatccctatgttatagacgaggaaactgagggtcagggagacaagtaactttctaagactccccatcccatgtgaggtagcgaagaaaatcaagatcaacattgactgactgagagtccaagctttttctcaacaatttatggcccttcagctagattgcttttaagtgaaagaaggatagaaaaaaaaaaaaaaccttatgaaatgagctaaggtatctccctttctgaaatagaagtgttccaacaaaactgattctaaaagcaatttctacacagcaaattcaaattttctagtgaccctgagatagagacatgagctaaatgcttttatggaacaagacagaaagaccacagcagaagattgccatggaatgcttactaggtgcttacctagttgtcccattcacaaaaaacttatcagagatgctgttgttattcccatgtttacacgtgaggaaactgggaacagtg

SEQ ID NO: 571040 - DNA, 659 bp, Homo sapiens
atccaaatttactcatccacagaaaccatgaaatgataactgttctttgaagctgctaaatgtggggattatttgttgtacaacaacacataaataagacaataatcttsctcccaattttaagatagtttctccataagtcattgctaaggtgtattagtccattttcatactgctatgaagaaatacccgagactgggtaatttgtaaagaaaaagaggtttaatggactcatagttccacatcgctggggaggccaaggcttcacaatcatggcagaaagtgaaagaggagcaaaggcacatcttacatggtggcaggcaagagagtgtgttcaggggaactgcctttataaaaccatcagagcttgtgagacttattcactatcacaagaacagtacaggagaaacccacccccatgattcaattaactcccaccaggttcctcccatgacatgtggggattatgggagctacaattcaagatgagatttgggtggggacacagccaaaccacatcataagtcatacctcaaaagtctagctattgaaataaaatcattgataaagaacaattgaaaagccaagatcacaacttaccacgactcattggcaaaattttccccaaagttctataaaaccagtgattctccatatta

SEQ ID NO: 571041 - DNA, 465 bp, Homo sapiens
ctcaccagatgccaaatatgccagcaccttgatctcaaacttggcctccagaaatttaagaaataaatttgtattgttcataaaatacctagcctcaggtattttgttatagtagcacaaatgaattaagacacattttttcccacaatcacctctaaaataaactatttgcatccaaatcctcatctcggggtttgcttctagtggaatctaagcctaggttgtgttatgccattcaggtgcrtttaactgttaaaagcagacaggcagagcaacagcccaaaggcataaaccagattcatcagcatccagggttgagtcatgtgacaaccttggcaaatagattataaaatctttgacttgttaagtgcaacagtctttaaatttgtgttgatctatagttaatactgacagaattaatctagtctgacaattggagaatgagagaatgttaataaataagat

SEQ ID NO: 571042 - DNA, 533 bp, Homo sapiens
gaattctgctcgcatttatgttaccctccaacagcaggttctaaagcagagttgccttgttctccaatgtctcagggttttagttacagatggsatgaaaaggttcttttagtttcttactagcagcttccatttctctaagactcagacataggccatgaacagactgatctgcagaacttcattagactgattgctatgcgtttgtcgtcaagccaaaattttctatgggaagaacatttccttcccttgaagatacctcagtccctcatttatgaaaatttctggccatctcacctagaagttccctagcatatcaccacgactttgatttctaaaaatattcaaatataggctcaaacctggattcaagctacagttagatattttgcatctctcagtcccataacactcagatccttgtaaccagagacttactgatcattcttttcttacactgaattggcaagctagtaatgtaacatatcaaaacaaaaccacacattaaatcatcatcaataagaatatcctga

SEQ ID NO: 571043 - DNA, 621 bp, Homo sapiens
ggaaacttccaagacatttaggtgaacctcccaccaaaccaatataataagccttctcaagatctctgaccaaagatcttgaagcasagaaagtgattccttgacacccaggttcctcaatatccaggcttgagtcatgggacaaccttggcaaatagattgtaaaatgtttaacttcctaagtgcaacaggcttcaaatttgtgctgatctatagatgatttgaaacagaatttatctgatctgagaattggataggaaatctatgaaatagctgttagtaattaaagagcattttcaaaatgtagccagtcaattagataagcacaactcattggataagattttttaaaaacattacattttcaccttttattgcctttctcaaatgtattcaggagaagaagatgaaaagttgtcaggaaacataactttattttattattgtagtcctccagttatattaagccataaaacaaccttcattcagttactgaaagtatctggtcaagacactactcaacagttcaatccttattcatgcttagacttctcctaattctcaccccacataaacatagaaaaattatttttaaataaaataagcaattcaaaaatcata

SEQ ID NO: 571044 - DNA, 509 bp, Homo sapiens
gttgcctcacttcagagacaaggaaattgagacccagagaaattaggaaatttgatcaaggtctcccaggaaagcaatgacacaatcaggactggaacccatgtcctcaattcttattttcatgctctttcatttcactgttttaaaacgtaggtcttattattattcagggatgacaaggccaacagttaaggagacagctgccattgaaaagagagtttgttgtgctyatagatcccaagaggaaggggtgcgtcgtagcatgagggagccatatgggaaggcaacagtatgggtcgggataccgagggagtagagggaaatgtggacaagaacctttactgtggtttctgcaggaagaaatgagttagggagggaaagcaggattaaaattggctattttgaataatttcagtggtcctgggacatagaggatgtccctaattgtctggtacctagccctggggtgatgagagcaggtcaatagtggcccagagtgtgacagctgg

SEQ ID NO: 571045 - DNA, 509 bp, Homo sapiens
gttgcctcacttcagagacaaggaaattgagacccagagaaattaggaaatttgatcaaggtctcccaggaaagcaatgacacaatcaggactggaacccatgtcctcaattcttattttcatgctctttcatttcactgttttaaaacgtaggtcttattattattcagggatgacaaggccaacagttaaggagacagctgccattgaaaagagagtttgttgtgcttatagatcccaagaggaaggggtgcgtcgtagcatgagggagccatatgggaaggcaacagtatgggtcgggataccgagggagtagagggaaatgtggacaagaacctttactgtggtttctgcaggaagaaatgagttagggagggaaagcaggattaaaattggctattttgaataatttcagtggtcctgggrcatagaggatgtccctaattgtctggtacctagccctggggtgatgagagcaggtcaatagtggcccagagtgtgacagctgg

SEQ ID NO: 571046 - DNA, 585 bp, Homo sapiens
cacaaaatatccacagtatatcaaggactatagcctgtaatttagataagactttctagaaggaatgatgcctgcactaagttgttagcaaagtaaaatggaaaaaataaaagcataaaacaggctcagctctgagaaaaaagcacactgtgtccagggcactagctaaagccccagtctagccagaattttagacctacaggtcttctttattttttccacagtactaaatacaagtcctggtatacagttagtatacagtaaatatttgtcaaataaatcatttaaaatggacattactcaaatcaataagaagaaaaaaaaaacaagcccatcaaaaaacaggctaaggacatgaatagacaattctcaaaagaagatatataaatgaccaacaaacacaagaaaaaatgctcaacatcactaatgaccaggaaaatgcaaatcaaaaccacaatgtgataccaccttactcctgcaagaatggccataatcaaaaaatcaaaaaattgtagatgttggcrtggatgcagcaaacagggaacacttctaccctgctggtggaaatgtaaattattataacaa

SEQ ID NO: 571047 - DNA, 564 bp, Homo sapiens
ctaatcaccttcgaagggccccacctctcaatactattgcaawggggattaggtttcaacatatgactttggaggagataaatattcatactatagaaatggcagagcaaagacccccaaatggagcttctacagcaaacagctaaaattctaaagggggaaaaacataaaatgtcacatgtaaaccatgttttttatacatgtatataggagtgtgtatgctacaaatgggctgcggatgagaaaatatattagcctgaacttgcattgctacaaagaaatacatgagactgggtaatttacaagaaaataggtttaattagctgaaagttctgcaggctgtacaggaagcatggtgctggtatctgcttggcttctggggaggcctcaggaaacttataatcataccaaaaggtgaagggggagcaggcacatcacatggccagagcaggaggaagagagcaaaggggaaggtgccacacacctttaaatgaccagaactcacttacaagaactcactattgcaagaactgtaccaagggatttcatgagaaatccaccccc

SEQ ID NO: 571048 - DNA, 564 bp, Homo sapiens
ctaatcaccttcgaagggccccacctctcaatactattgcaaaggggattaggtttcaacatatgactttggaggagataaatattcatactatagaaatggcagagcaaagacccccaaatggagcttctacagcaaacagctaaaattctaaagggggaaaaacataaaatgtcacatgtaaaccatgttttttatacatgtatataggrgtgtgtatgctacaaatgggctgcggatgagaaaatatattagcctgaacttgcattgctacaaagaaatacatgagactgggtaatttacaagaaaataggtttaattagctgaaagttctgcaggctgtacaggaagcatggtgctggtatctgcttggcttctggggaggcctcaggaaacttataatcataccaaaaggtgaagggggagcaggcacatcacatggccagagcaggaggaagagagcaaaggggaaggtgccacacacctttaaatgaccagaactcacttacaagaactcactattgcaagaactgtaccaagggatttcatgagaaatccaccccc

SEQ ID NO: 571049 - DNA, 564 bp, Homo sapiens
ctaatcaccttcgaagggccccacctctcaatactattgcaaaggggattaggtttcaacatatgactttggaggagataaatattcatactatagaaatggcagagcaaagacccccaaatggagcttctacagcaaacagctaaaattctaaagggggaaaaacataaaatgtcacatgtaaaccatgttttttatacatgtatataggagtgtgtatgytacaaatgggctgcggatgagaaaatatattagcctgaacttgcattgctacaaagaaatacatgagactgggtaatttacaagaaaataggtttaattagctgaaagttctgcaggctgtacaggaagcatggtgctggtatctgcttggcttctggggaggcctcaggaaacttataatcataccaaaaggtgaagggggagcaggcacatcacatggccagagcaggaggaagagagcaaaggggaaggtgccacacacctttaaatgaccagaactcacttacaagaactcactattgcaagaactgtaccaagggatttcatgagaaatccaccccc

SEQ ID NO: 571050 - DNA, 564 bp, Homo sapiens
ctaatcaccttcgaagggccccacctctcaatactattgcaaaggggattaggtttcaacatatgactttggaggagataaatattcatactatagaaatggcagagcaaagacccccaaatggagcttctacagcaaacagctaaaattctaaagggggaaaaacataaaatgtcacatgtaaaccatgttttttatacatgtatataggagtgtgtatgctacaaatgggctgcggatgagaaaatatattagcctgaacttgcattgctacaaagaaatacatgagactgggtaatttacaagaaaataggtttaattagctsaaagttctgcaggctgtacaggaagcatggtgctggtatctgcttggcttctggggaggcctcaggaaacttataatcataccaaaaggtgaagggggagcaggcacatcacatggccagagcaggaggaagagagcaaaggggaaggtgccacacacctttaaatgaccagaactcacttacaagaactcactattgcaagaactgtaccaagggatttcatgagaaatccaccccc

SEQ ID NO: 571051 - DNA, 510 bp, Homo sapiens
actttatttttgaggcaaattccctctatgttctgagatttaaaaaaccatttgatacagccccacttagttatgcaaatagacttgttttcccttgaatgtcttccacctccaaaccttaaaagcagaataataacctcagggcacatgatcctcatacttacagtggagggttaactgtgtgcatacagtgaagcactggaggctcccaaagatcatctttttggaagtctgggttcactgccctttgctggcatttgtggagacagcctgtagggcagcttaagagtaccttccactcagccctaggaactccctgccacatgtaagggaggctcctccccagtagggtggatggggttayattatgttaaagattagattagggtgaaaaagatgaaaagttttcagtgtgtgtgtgagaattttcctctgaaggagtttttctcactttgggagctacaggtctcgaccatactcagcatttggagtatatttcagctcaaaata

SEQ ID NO: 571052 - DNA, 271 bp, Homo sapiens
ttagtgtacgttaagtgcttaggacaatatctgtctcatggtaaatgcttagaaagaagtttgctaaataaagcaaatattctatatcagttcctggtacaatcaaccttcagtaaatgtttgttaatactattattaacaataatagtagtaaattaagcaacatgatttataaaggaatygcaaacagcaaatgatttttcaaaagtgaaaacaaacatgggaaattgatgaattctactttggacatctagcatttaaggtgactctt

SEQ ID NO: 571053 - DNA, 271 bp, Homo sapiens
ttagtgtacgttaagtgcttaggacaatatctgtctcatggtaaatgcttagaaagaagtttgctaaataaagcaaatattctatatcagttcctggtacaatcaaccttcagtaaatgtttgttaatactattattaacaataatagtagtaaattaagcaacatgatttataaaggaattgcaaacagcaaatgatttttcaaaagtgaaaacaaacrtgggaaattgatgaattctactttggacatctagcatttaaggtgactctt

SEQ ID NO: 571054 - DNA, 554 bp, Homo sapiens
tggtgttatgcagccaagttctcctaattcccttacccctgctttgcctggtggactcctctatgagatcactaaactgccttctgtctgcactatttgaattattattccctttgcaataattttcaggagtggaggacattcatggacacaggggaattctcacttcaaataaagcatatcttctctcagttagaaacggaaagaaaaaaaaggtgagtgtatgtgtgaggaaacctgatggcaaggactcaagtctccaagtgacaacccccaactccatggggggatgagtcatgcttactgagctcagaagctgarcagactccaaccctgtgggcagcccctctgtcttaattaaagtctcctatgcccccacatcaatggagtgtgggcgccactctatagaggcaaccagagtgagtgcgtgctgggcaaatggcagctcgattacacaaatccctgtgcttgcaatgtggtcctgacccaggttctgaacttgcacctcctgctgctggcacctgttcgtgctcctctcaggtctccctcttgct

SEQ ID NO: 571055 - DNA, 610 bp, Homo sapiens
attgggagagaactcataaaaaaatgcagtaacaaagtatattttaaaaccatacaaacgcatgaaagtatacaactcacaggttttatatagcaattatataattgagactacaaagcacatagataacaattaacattataacatatcaatattatgtgaggtttgttcctgtcataatgttaaytgaatctatagatctatccgtaaagatgtgggaaagtccatttgaacataaatggattaaaaactcaacctaaaatatatagattggtagaatggattttaacaagaggatccaaccatatgctgcttataagaaatccccgactgatatgacacagtctcaaagtaaaagggtggaaaaagattccttgcaaatgaaaaccaaaagttaaaggagtagctatattaatatcagataaaacagactttaaatcaacaacagtaaaaacaaggtgaaaaaggttattatataatgataatgggatcaattcaataacaagatataacaagcctaaatatatatgcatcaacactagaacacccagatgcatgaaacaaatattactacaactaagagaaaagatagatagcaatgtaataatag

SEQ ID NO: 571056 - DNA, 571 bp, Homo sapiens
gttaggggttggtgagccctatacatgttggccaaggatgtgataaaagacagctaattcctcatcttccatagaaggaaatcagtcartaatgcctgaaactgacaagtccagaaacagcagggaaaacatgtcaactcaacatatacagggaaatgtcaaaaggaacaacaaaagtaatgagagctactgcttttggatgagtccagtaaacatgggcagtggatggggtcagggagagagaatatattgttcttgtcctattgagctacttgcatcttcaaatggtattggccacataactgtcataaagacaaaaactaagttaaaaataaaaacaagtaagaaccacagtttgaaggaaaactgagagccttcctccaaatgctgtatggaagcagttagagctcttatgtttgctagatccaaggagggctgaaataaatagcctagattaactggagagtcaacaagatgagttcacagacaatttctcctcatgaccttttgctgtacactcgaaaagtcttgcctataaaggggcacatgtttatatatccaagcagagctt

SEQ ID NO: 571057 - DNA, 504 bp, Homo sapiens
gggaaaaaatagaacagagcattcaagaactagggatatctattccatrttattaaacaatctagtacagatataattggaatctgagagacatatgtgaagaagtaatgtccaagaatattccagaagttaacaacagactggaaaccacaaatccaagaaaattggagaacatcaaacaaggaaaataaaacataacaacttgggtatataattgtcaagctattaaaaacaaaaggcttcttctccagatttctatatgtttttaaggaattaaaggaaaggccttctgaagaaaccataaaagccattactttcttttgcaaaggacaaaacttaagcaaagaactaacttaaacatgaagaggaattgactgtctcatataaatgaaaagtaagatatattttctaatccagaatatttctggattcaggaattaaatagtatcatcaggattgtgtgattctgttgctgacatctgcctttcaccctgctggggccca

SEQ ID NO: 571058 - DNA, 504 bp, Homo sapiens
gggaaaaaatagaacagagcattcaagaactagggatatctattccatgttattaaacaatctagtacagatataattggaatctgagagacatatgtgaagaagtaatgtccaagaatattccagaagttaacaacagactggaaaccacaaatccaagaaaattggagaacatcaaacarggaaaataaaacataacaacttgggtatataattgtcaagctattaaaaacaaaaggcttcttctccagatttctatatgtttttaaggaattaaaggaaaggccttctgaagaaaccataaaagccattactttcttttgcaaaggacaaaacttaagcaaagaactaacttaaacatgaagaggaattgactgtctcatataaatgaaaagtaagatatattttctaatccagaatatttctggattcaggaattaaatagtatcatcaggattgtgtgattctgttgctgacatctgcctttcaccctgctggggccca

SEQ ID NO: 571059 - DNA, 514 bp, Homo sapiens
caaacaaattaagaaataacctcaaacttaacaaaacagaacaaagtcttccctgaaggtcttggagaaccacgtgagatcagatcacaacccaaggtctgccctgagaaatggggaaagccagggacctgccacacctcccttcctcttgtctaactggagatgagaaactaacttaattttcatgatcttactatgttagcctcatacgtaatcatcttctcttttgtctaaatggttccctattttcaccttatacttaactatcatatatagggcwtatgaatacatttatctcagatcccattcagaagttgcaaaggaatacattattaataaatcaaatatttctacattacatggaagaaagtgtggaacagttaagaggatgggtactggtcccaaagagtccagagtttaaacccttactctatattatctacacgatctgcgcatgtcgcttatttttaatgagttttagtttcctcatttgcaaacagcgtgacacttgtcc

SEQ ID NO: 571060 - DNA, 514 bp, Homo sapiens
caaacaaattaagaaataacctcaaacttaacaaaacagaacaaagtcttccctgaaggtcttggagaaccacgtgagatcagatcacaacccaaggtctgccctgagaaatggggaaagccagggacctgccacacctcccttcctcttgtctaactggagatgagaaactaacttaattttcatgatcttactatgttagcctcatacgtaatcatcttctcttttgtctaaatggttccctattttcaccttatacttaactatcatatatagggcatatgaatacatttatctcagatcccattcagaagttgyaaaggaatacattattaataaatcaaatatttctacattacatggaagaaagtgtggaacagttaagaggatgggtactggtcccaaagagtccagagtttaaacccttactctatattatctacacgatctgcgcatgtcgcttatttttaatgagttttagtttcctcatttgcaaacagcgtgacacttgtcc

SEQ ID NO: 571061 - DNA, 563 bp, Homo sapiens
aatcaaaaatggagacttcattgtaaargtactggtgtcttagtcaatgcagccagatggtaggtaagggctagaagcaggaagccacaggagttaaggcctcccggtgtgcttcccctgtctctcctgcctactttctgtgtctgtttgcagtgtccaccataccgtgggcatgcagcagctggccatgctggcactcctgttgtcacattctagtgatccactcaaacttgagtctggactctcttagttataacttcaaattcccagggagagacctttcctttgccaatggggtcaaatctagtcagatattatgtaaatttcctatggactgagagagggacagttattgttggtaaggactgacaagctatccaaaaattttccggtggaaatctccaaaggaaatatcattgacttttcttcattcaagagagcatcacatgctatattctttgcaacagtgatattcttatatttatagtaagattcttctagtttctggaatgccagtgctgaaaagcagaatgctgagagagattaactataaaataacttta

SEQ ID NO: 571062 - DNA, 563 bp, Homo sapiens
aatcaaaaatggagacttcattgtaaaagtactggtgtcttagtcaatgcagccagatggtaggtaagggctagaagcaggaagccacaggagktaaggcctcccggtgtgcttcccctgtctctcctgcctactttctgtgtctgtttgcagtgtccaccataccgtgggcatgcagcagctggccatgctggcactcctgttgtcacattctagtgatccactcaaacttgagtctggactctcttagttataacttcaaattcccagggagagacctttcctttgccaatggggtcaaatctagtcagatattatgtaaatttcctatggactgagagagggacagttattgttggtaaggactgacaagctatccaaaaattttccggtggaaatctccaaaggaaatatcattgacttttcttcattcaagagagcatcacatgctatattctttgcaacagtgatattcttatatttatagtaagattcttctagtttctggaatgccagtgctgaaaagcagaatgctgagagagattaactataaaataacttta

SEQ ID NO: 571063 - DNA, 488 bp, Homo sapiens
agaaataatgagcaaatgtgggcttaaggacaattcctaggaaataactttaggtgagtgcaggcacatcaaattgacaggaaacaaacgaatcagaagtctattccttctttttattgcttactaaaaaattctgtgggtatcaagactgcttgtaggtccattttcccagcagaaaaaaaggtggtaaaagctgcttaccctccaccaaggacaagatccccccaaaccccatcagatgtggccctgggagatgatgtcaaagggagggcccccacagagggtcaagccagagtcaaakgatgtcacacaagggaatctccccaaatagaaggactggagtctaattgagggtctttccacatccttctgggaaaagggtgccttctacaacttggccatcaggttttcatcattgccgtagatcagtgactgcagcatggaccccaagcttccctttcgtcagttgcagtttttcttgtgattat

SEQ ID NO: 571064 - DNA, 576 bp, Homo sapiens
aaaaaaaaaaataggaaggatcttattttctcactgctattaactgaatgtttgcatagccccaaaattcatatgttgaaacctaatccccaatgtgatggtatttggaaatcagtcctttgggaaacaattgtgccatgagggtggaggcctgttgatgagattagtgcctttataagagacaggaaagagcttgcttgctctctctctctcggctgtctgccatgggaggargcaaagaaagagatgaccatttgcaaactatgatgaaagccctcaccagacatcagtctgctgacaccttgatcttggatttccccacccctagaactgagaaatagatgtttgttgcttaagctgcccagtctattgtactttttttattgcagcccaaacagactaagacagttacctacatcccttaagcccctcccctcctcagtgttccacttaactttcatgtcccttgcattaactctgataaaatccaaattgcttgtcacaggcagactatttaatgctgttatcacatgagtgtcttctctttgggtatttgagaaaaactctaagtggcaa

SEQ ID NO: 571065 - DNA, 416 bp, Homo sapiens
ggaaaagtcattttgcttgctgctttgacattcacatcatttctgtccctaagcccctgagctggtgcttatttcaagcactgcaggaaaaccacgctccaccgaagaggttgttacctcaggcctctgagctcattccacgctgcctccctctctgactcctgtgtcttctgctaccaagggaaatttgcttgtctctttgcaatctagaatttgaagattttctttccaatcattgatataaattgcttttcccccagtcttttcatttaaatttcctttccaccatcamagattcgctttctggaaaaaaacgtggaatttggggcgggagttggtggctcatgcctgtaatcccagcaatttgggaggccagggcaggaggattgcttgagcccaggagctggagaccagtc

SEQ ID NO: 571066 - DNA, 416 bp, Homo sapiens
ggaaaagtcattttgcttgctgctttgacattcacatcatttctgtccctaagcccctgagctggtgcttatttcaagcactgcaggaaaaccacgctccaccgaagaggttgttacctcaggcctctgagctcattccacgctgcctccctctctgactcctgtgtcttctgctaccaagggaaatttgcttgtctctttgcaatctagaatttgaagattttctttccaatcattgatataaattgcttttcccccagtcttttcatttaaatttcctttccaccatcacagattygctttctggaaaaaaacgtggaatttggggcgggagttggtggctcatgcctgtaatcccagcaatttgggaggccagggcaggaggattgcttgagcccaggagctggagaccagtc

SEQ ID NO: 571067 - DNA, 416 bp, Homo sapiens
ggaaaagtcattttgcttgctgctttgacattcacatcatttctgtccctaagcccctgagctggtgcttatttcaagcactgcaggaaaaccacgctccaccgaagaggttgttacctcaggcctctgagctcattccacgctgcctccctctctgactcctgtgtcttctgctaccaagggaaatttgcttgtctctttgcaatctagaatttgaagattttctttccaatcattgatataaattgcttttcccccagtcttttcatttaaatttcctttccaccatcacagattcgctttctggaaaaaaacgtggaatttggggcgggagttggtggctcatgcctgtaaycccagcaatttgggaggccagggcaggaggattgcttgagcccaggagctggagaccagtc

SEQ ID NO: 571068 - DNA, 649 bp, Homo sapiens
gaattcatacaaattgcagactgcagcgttctgagaaacatctttgtgatgtttgtattcaggacacagagttgaacattccctatcatagagcaggttggaatcactccttttgtagtatctggaagtggacatttggagcgctttcaggcctatgttggaaaaggaaatatcttcccataacaactagacagaagcattctcagaaacttatttgagatgtgtgtactcaactaagagaattgaaccaccgttttgaaggagcagttttgaaacactctttttctggaatctgcaagtggatatttggctagctttggggatttcgctggargcgggaatacatataaaaagcacacagcagcgttctgagaaactgctttctgatgtttgcattcaagtcaaaagttgaacactccctttcatagagcagtcctgaaacactccttttgtagtatctggaactggacttttggagcgctttcagggctaaggtgaaaaaggaaatatcttcccataaaaactggacagaagcattctcagaaacttgtttatgctgtatctactcaactaacaaagttgaacctttcttttgatagaggagttttgaaatgctctttttgtggaatctgcaagtggatatttggct

SEQ ID NO: 571069 - DNA, 526 bp, Homo sapiens
tactggaaggaaatatataaagccctcaacagttttatcctgggatgagaatagaaattttaggtggggaaattttacttttcatgtaaaatatttctgcatkaaaaattatttattttatttttttaaattttttaaactagttgaagtgatatttctcaaacctgcagcaggaggagcctattataattcccttctgttctcctatactgcttttcataaactaagaagtgggccttgttttttgtcctttctttgtcaaaatcatttttgtcctgatttcttaacatatagaaaaactccaataattatacaaaagaagataaaaaccatactattaacattgcagctgatagtcttcttgcttcttctatacgtagctgcattcacattgagtatgcaatttcaaattctcacttttaacttaatatcacaacattgcgaaagtaatacgtatctgctgaagaaaattcagaaaacataggaaagtaaagataggaaaattaatctattacccatggacagt

SEQ ID NO: 571070 - DNA, 526 bp, Homo sapiens
tactggaaggaaatatataaagccctcaacagttttatcctgggatgagaatagaaattttaggtggggaaattttacttttcatgtaaaatatttctgcatgaaaaattatttattttattttttyaaattttttaaactagttgaagtgatatttctcaaacctgcagcaggaggagcctattataattcccttctgttctcctatactgcttttcataaactaagaagtgggccttgttttttgtcctttctttgtcaaaatcatttttgtcctgatttcttaacatatagaaaaactccaataattatacaaaagaagataaaaaccatactattaacattgcagctgatagtcttcttgcttcttctatacgtagctgcattcacattgagtatgcaatttcaaattctcacttttaacttaatatcacaacattgcgaaagtaatacgtatctgctgaagaaaattcagaaaacataggaaagtaaagataggaaaattaatctattacccatggacagt

SEQ ID NO: 571071 - DNA, 526 bp, Homo sapiens
tactggaaggaaatatataaagccctcaacagttttatcctgggatgagaatagaaattttaggtggggaaattttacttttcatgtaaaatatttctgcatgaaaaattatttattttatttttttaaattttttaaactagttgaagtgatatttctcaaacctgcarcaggaggagcctattataattcccttctgttctcctatactgcttttcataaactaagaagtgggccttgttttttgtcctttctttgtcaaaatcatttttgtcctgatttcttaacatatagaaaaactccaataattatacaaaagaagataaaaaccatactattaacattgcagctgatagtcttcttgcttcttctatacgtagctgcattcacattgagtatgcaatttcaaattctcacttttaacttaatatcacaacattgcgaaagtaatacgtatctgctgaagaaaattcagaaaacataggaaagtaaagataggaaaattaatctattacccatggacagt

SEQ ID NO: 571072 - DNA, 497 bp, Homo sapiens
tgttaaatgaagagttaatgggtgcagcacaccaatatggcacatgtatacatatgtaacaaacctgcacattgtgcacatgtaccctagaacttaaagtgtaataaaaaatatatatataaataattcttctctaatatgcattaaamcccaatcataaatcttgttttcataaaaaatttgtatacaaatgtagcagttatttggacacaatttcattgacaaattcttagcatgaaaatcagattcttaatattttgttgttgttgtttgtaatgtatatcttgtttccctaaggaaaaaaatatttgtgtgcaaaatatgggtggttgctttgttagacaaagagatacttttactggaaatcataaaaagacagaagcatctaattctgggaaagaatgctcaggtcttgccctttagtggtgcatttctaccttaactggtggccttgcatatgacatatgccttaggagccacctgagggttactgagag

SEQ ID NO: 571073 - DNA, 539 bp, Homo sapiens
tttttagtagtatgctgttggaaacaagaaaaaaaaagaaagttaaggtaggcaggaagacaaggtaaaaaggaaaagttatgtatacactgcagcagcagcagaactaagtcacacatcactgaactaggctggtcaagaacaagaagtttcttggctacattattaccagctgatttaagtcatsgttactttcactagggtagtcaagaaagctgtttctgttttcttccctatttgccctgaggtcttgttatgagatcccagaaaccatgatcacgaccaagataaagaacacgtcctcaccctcaaaagttttctcatgctcctctgcaatccatcctcattccctgttccaggcaactattgatttgctttctgttgcaaacttcagttcttaataactgtaagtatatggtaaacactcttttttgggtctggattcttttacttagtgttaactgttttgaaattcatacatgtattgctgaaagtatcaatagttttctcttttttattgctgagtagtattccattat

SEQ ID NO: 571074 - DNA, 522 bp, Homo sapiens
ggattgcactgtgcacaaaagttagttatgcagttttgatcatgttaaaaggccagtactccacttgcaaaacaaaatataaaactaagccatttattgaggtggtcagaggactgtttttagcattggctcagaaacaaaacaraactaaacaaaaaatcccagctggtttaccttaggcaagtcacttaaacactcttggaacaaagttcaatcttcagtgaagtgagaactgtgattagcactatttgggaggttctgacatttggacatgagaactctccttttactgttatccagccattgaaataagcttcaattttctgcagtgacttcggtctcatgactacttctcagtccaagaactgggctttctaggaactcaggacaattgcaactggagttgcaacacaaaataaagagcaactcttgctgaggacactcacaagtgtgtgtgtgtgtgtgtgtgtgtgtgtacgtgtgtgtgtgtgtgtgtatatacatatatatatatatatatat

SEQ ID NO: 571075 - DNA, 510 bp, Homo sapiens
gtggctcatgtttgtaatcccagcactttgggaggccaattgagtggattgcttgaggccaggagtttgaaactagcctggccaacattgtgaaaccccatccctactaaaaatacaaaatttagctgggcatatgcctgtagttccagctactcaggaggctgaggcataagagtcatttgaacccaggaggcagaggttgcagtgagccgtgattgcaccactgcactccagcctggacgacagagtgagactctttcagaaaagaaaagaaaacaaaacaaaacaaaagaatacaaaaggaaaagaaaagaaaagagaaaagaaagaaaaaagaaaagaagagagaaaaaagaaaaaagaaagaaaaagaaagatagaaagaaagaaagaaaagaaagaaagaaagaaagaaagagaaagaaggaaggaaggaaggaaggaaggaaggaaggaaggaaggaaagraggaagggagggaaggaggaagggagggaaagagagaggtac

SEQ ID NO: 571076 - DNA, 299 bp, Homo sapiens
ctggagaggagtgagcagaaaaattgagwacaggatctcagaaggtacaaaaagctacgcagaaggtacaaaaatctgttgcctaatacagcctaatgacaagtcacaaaaattaccttactgaattagaaagaccttatcttgattgtatgggattaaaccatatgaaattgctgataattgattggttctgacctacaaaaatgccagttcagctagctcaacctgatagtatgagtcacacggggtgaatgctatgaagacgctctgcctccacctatcctggtgatacaggtctg

SEQ ID NO: 571077 - DNA, 582 bp, Homo sapiens
gaattcccttagcatttgcttgtctgaaaatgatctcatttttcctttgctaatgaagcttagtttggctggatataaaattcatcattggcatttcttttctttaagaatatcaatcataggcccccaatctcctctggcttgcagggtttctggtgacaggtctgctattagcccagtggggttccctttctaggtgacctgcaccttctatttgcctttaacatttttctttcatttyaatctgagagaatctgatgactatgtgtctcgtcttagagatgatcatcttgcatagcatctcacagaggttctctacatttcctgaatttgaatgtttacatctctagtgaggttggggtagttttcagggataatatcctcaaatatgtgttctaagttgcttgctttctctccctttttcagggatgccaatgagtcatatttttaatctttttacataatctcatattcctcataagttctatttattcattgtttaaaaagattttctgagttatttttgagaaccagtttttgagctctgagattctttcctcagcccagttgattctgctgttt

SEQ ID NO: 571078 - DNA, 643 bp, Homo sapiens
ttaatcgttgtgaagggggaacttcaatgtgtatatatttgtttccatataaaatcagaggattagcagtgattgcaacattctaagtatgaaactggagtgtgccttcacttttctgtctttttgcaatagagccttccaggctgaaattttcctgtcagtggaaaaaactttggaatacagttaacttaaattcttagcatatttttattgttaattgtggttgagataatccaatgccttttaaagggattagtagctagcttttgttttcaacytaaactgtggtgttcttgcctaccttatgcaattaatgaacttgtgaaaagtatgtataaatccgtttttgtagtataagtctttaatttgtaatggggagttggctttataaaaggatattctactagagtgaatgttcagcgcttcatttatttcctgtattaaggttatttttaaaataaggcacatcaagttgattggaaaggtgttcatagagctagaagtaagagggaaagggctatgaaatggcgaccaggcatatcttatcaatcaggagacagaaagcacagtttccatgaacagagaaagttgaatgtaaagaaattaaacataacaggagtaatgagggattgactggtaagaa

SEQ ID NO: 571079 - DNA, 598 bp, Homo sapiens
tatgagatgttaaaacccacagataaatgcaaattagaaccaaagaacaccaagaacagaaacattaaagtataacatatttcagaaaagggaggctatagcaaacagtctactactgatgggcacacaaattgctacaactttcaggagaggaatttggcagtaacctaacaaaactacaaatgtactattcttttgacagagcaaactaacttctagaaagtaccctaaagatacacatacctctctcacaatacaaaagtaacaaacgcacaaggttattcattgcagactgtttgtaattgcaaaatgctgggaaaacacctaaacaccccagccttagtaaacgattatcctttccctttttttctccttcaaagaagttggggctaatctttgtaatttagtaatttgaaaaattactctatgtaattttacagtatgaacttacatcttgtttggtagttmttttattttcctcttttatttaaaagttaaaaacataaaaagattaaaaaaaaccaaaaacattaggaactttcaataagcaaggcagggatgcgagcatacatttaaaaaaattacttgtgagcaagta

SEQ ID NO: 571080 - DNA, 595 bp, Homo sapiens
tgcatccaacagaggtctaatatccagaatctataaggaacttcattcaacaagcaaaaaccaaataagccaattaaaaagtggacaaaagacagaaacaggcacttttcaaaagawgacatacaagcggccaacaaacacatgaaaaaatgctcaacatcactgatcaaagaaatgcaaatcaaaactacaatgaaataccatctcacactagtcagaatggctactatgcaaaagccaagaaacaatagacgctggtgaggctggggagaaaagggaacacttatacactgttggtgggaatgcaaagtagttcagccactgtggaaaacagtttggagatttctcaaagaacttgatacagaactaccatctgatatagcaatcctattcgtagtatatatccaaaaggaaataaaacattttactaaaatgacacatgaaatgttcattgctttggtatacagaaaataatttgtaccttcagaagctggattccaaataaatttgaaaagtaaaatacataaaaataacaaataaccaaggttaataaatagaataaattaaaaaactgatatatttaactacctaaaaa

SEQ ID NO: 571081 - DNA, 595 bp, Homo sapiens
tgcatccaacagaggtctaatatccagaatctataaggaacttcattcaacaagcaaaaaccaaataagccaattaaaaagtggacaaaagacagaaacaggcacttttcaaaagatgacatacaagcggccaacaaacacatgaaaaaatgctcaacatcactgatcaaagaaatgcaaatcaaaactacaatgaaataccatctcacacyagtcagaatggctactatgcaaaagccaagaaacaatagacgctggtgaggctggggagaaaagggaacacttatacactgttggtgggaatgcaaagtagttcagccactgtggaaaacagtttggagatttctcaaagaacttgatacagaactaccatctgatatagcaatcctattcgtagtatatatccaaaaggaaataaaacattttactaaaatgacacatgaaatgttcattgctttggtatacagaaaataatttgtaccttcagaagctggattccaaataaatttgaaaagtaaaatacataaaaataacaaataaccaaggttaataaatagaataaattaaaaaactgatatatttaactacctaaaaa

SEQ ID NO: 571082 - DNA, 576 bp, Homo sapiens
acaggtccctgccactacacccagctaattttcgtatttttagtagagacgggggtttcaccatgttggtcaggctggtctcaaactgacctcatgatccaactgcctcagcctcccaaagtgctgggattacaggcatgagccaccgcgcccaaccctcactttttgataacagcattatcctgataccaaagccagacaaagcacaaaaaaagagaactaaagcacgatatcccttatgaaaatataggcaaaaatctcagcaaaatgctagcaatactaacaaaatactagcagcactactgtataatcaaaggattgtaaactatcaccaagtgagatttatcccaaaaatgcaagtgtggctcaacatattataaaccgatcagtgtaatatactataacagtaaaatgaataagcacatgattatttcaattgatgcagaaaaagcattgatgatatacaactctcttttatgataaaaatacccaataaactaagcacagaagggaacttctgcaacatgayaatgggatataaaaaactgacagttaatatcgtgctcaatggtgaaa

SEQ ID NO: 571083 - DNA, 522 bp, Homo sapiens
atattggaagttatgatatccttcagctagttgcaaagactaaagaaaatatgctactcaaggtaaatgatttrtaacccctgagcagagtcacagtctctctctctctctctgtctctctctctctctctctcacacacacacacacacacacacacacacacattttagaatcttcaaaaaccacttccaatacaaactaggtatctgaagtaaagagatactcattttggctgaataaaaggcaaattcattttgtgtttttcaacttatttttagagaaagctttgaaatgacattacaagtcatgtcttttgcagccctgtcataaccatgtcactgtactttcagcttctcaattccttggcaggtcacatgcattgtcatgttgaatatcagtattttaaaagaatagctgtcaacatcagtggcatcctgaaaaagatgtacaaagaagctcatattacccagaaaaatctcacattgtctttcatacttcagaaataaaaagggaaaaggaaa

SEQ ID NO: 571084 - DNA, 486 bp, Homo sapiens
aaccactgacaaagagcatgcaatactttccaaccagctgatcaacttcttatgagagttttactccctctctctcgctttactattcactgatgcaattccttaaactgccactcttctccccctgccagaagaagggaacctcatgatggttataagtcagttaggggagtttctgtacctcactcagattgatgagagactgactytcattgtgaactctgattcaatgttattcattgatggatcatacctcaaaactgatattgaaaattatcactaatttaagctctactttagaatatattttctatctgaggtaaaatcaacccatataatggaatttattacacttactagagcttgtcaattagctgaagaccatgtagtaaacatagagcaggtatgcttttagagtactacatgaatttgggatgctttggggaaaaaaagaaattcatcatctctgctggaatccccatgaaa

SEQ ID NO: 571085 - DNA, 502 bp, Homo sapiens
ttataaccctaccttgtcaccataaaaaattcaytcctattggacactgacatgaaagccttatgttacgttttgtgattaagcagttttctcttacagcttatttacaagggaaagagaaaggaaacaagaaatagtttcaaaaaaacagccaaaatttcagtaatcattaaaatcaacacaattaaatactctttttttggaatgaaatttcgctcttgttgcccaggctggagcacaatggcacaatctcagctcactgcaacctgtgcctcccgggttcaagcaattctgcctcagcctcctgagtagctgggattgcaggcgcctgccaccacgcctggctaatttttgtatatttagtagagacagggtttcaccatgttgaccaggctggtcttgaacttctgacctcaggtgatccacccgcctcggcctcccaaaatgctgggattacaggcgtcagctaccactaccagcaattaaatactctttttaaaag

SEQ ID NO: 571086 - DNA, 502 bp, Homo sapiens
ttataaccctaccttgtcaccataaaaaattcattcctattggacactgacatgaaagccttmtgttacgttttgtgattaagcagttttctcttacagcttatttacaagggaaagagaaaggaaacaagaaatagtttcaaaaaaacagccaaaatttcagtaatcattaaaatcaacacaattaaatactctttttttggaatgaaatttcgctcttgttgcccaggctggagcacaatggcacaatctcagctcactgcaacctgtgcctcccgggttcaagcaattctgcctcagcctcctgagtagctgggattgcaggcgcctgccaccacgcctggctaatttttgtatatttagtagagacagggtttcaccatgttgaccaggctggtcttgaacttctgacctcaggtgatccacccgcctcggcctcccaaaatgctgggattacaggcgtcagctaccactaccagcaattaaatactctttttaaaag

SEQ ID NO: 571087 - DNA, 502 bp, Homo sapiens
ttataaccctaccttgtcaccataaaaaattcattcctattggacactgacatgaaagccttatgttacgttttgtgattragcagttttctcttacagcttatttacaagggaaagagaaaggaaacaagaaatagtttcaaaaaaacagccaaaatttcagtaatcattaaaatcaacacaattaaatactctttttttggaatgaaatttcgctcttgttgcccaggctggagcacaatggcacaatctcagctcactgcaacctgtgcctcccgggttcaagcaattctgcctcagcctcctgagtagctgggattgcaggcgcctgccaccacgcctggctaatttttgtatatttagtagagacagggtttcaccatgttgaccaggctggtcttgaacttctgacctcaggtgatccacccgcctcggcctcccaaaatgctgggattacaggcgtcagctaccactaccagcaattaaatactctttttaaaag

SEQ ID NO: 571088 - DNA, 502 bp, Homo sapiens
ttataaccctaccttgtcaccataaaaaattcattcctattggacactgacatgaaagccttatgttacgttttgtgattaagcagttttctcttacagcttatttacaagggaaagagaaaggaaacaagaaatagtttcaaaaaaacagccaaaatttcagtaatcattaaaatcaacacaattaaatactctttttttggaatgaaatttcgctcttgttgcccaggctggarcacaatggcacaatctcagctcactgcaacctgtgcctcccgggttcaagcaattctgcctcagcctcctgagtagctgggattgcaggcgcctgccaccacgcctggctaatttttgtatatttagtagagacagggtttcaccatgttgaccaggctggtcttgaacttctgacctcaggtgatccacccgcctcggcctcccaaaatgctgggattacaggcgtcagctaccactaccagcaattaaatactctttttaaaag

SEQ ID NO: 571089 - DNA, 469 bp, Homo sapiens
ataaaaaattcattcctattggacactgacatgaaagccttatgttacgttttgtgattaagcagttttctcttacagcttatttacaagggaaagagaaaggaaacaagaaatagtttcaaaaaaacagccaaaatttcagtaatcattaaaatcaacacaattaaatactctttttttggaatgaaatttcgctcttgttgcccaggctggagcacaatggcacaatctcagctcactgcaacctgtgcctcccgggttcaagcaattctgcctcagcctcctgagtagctgggattgcaggcgcctgccaccacgcctggctaatttttgtatatttagtagagacrgggtttcaccatgttgaccaggctggtcttgaacttctgacctcaggtgatccacccgcctcggcctcccaaaatgctgggattacaggcgtcagctaccactaccagcaattaaatac

SEQ ID NO: 571090 - DNA, 551 bp, Homo sapiens
ttgtcacaatacttgccctttatgatatttcaataagaatcacctgccaaataatatggtgatatccataccmacaacaattccattgacttatgagttaaaaatttactttttactgcagatggttggttcccatgccctgagaaacacaagatgctccatggaaatgctgatgattttaccttcataaaaccagttttattcacatgtcacatgcctcagaagtcaagcacaacctactcaaaactttagctctgcagtatagaggtctccttcttctccaagctaagatcttttggggaagaagagcttataaattgatcagaatttgctcccacaagttccagtgagcagagtagtaactgagaacccaggctttgtggccttataaatctgaatctactagctgtgtattcttgggaaagttacttaacatcttggagcctcaatattctcattaaaaaatgagaatttaaaagtagcattgtcataggtactgatggctatgtggtgtcatgtgattcttggcgcaggtccttcatgacattgta

SEQ ID NO: 571091 - DNA, 551 bp, Homo sapiens
ttgtcacaatacttgccctttatgatatttcaataagaatcacctgccaaataatatggtgatatccatacccacaacaattccattgacttatgagttaaaaatttactttwtactgcagatggttggttcccatgccctgagaaacacaagatgctccatggaaatgctgatgattttaccttcataaaaccagttttattcacatgtcacatgcctcagaagtcaagcacaacctactcaaaactttagctctgcagtatagaggtctccttcttctccaagctaagatcttttggggaagaagagcttataaattgatcagaatttgctcccacaagttccagtgagcagagtagtaactgagaacccaggctttgtggccttataaatctgaatctactagctgtgtattcttgggaaagttacttaacatcttggagcctcaatattctcattaaaaaatgagaatttaaaagtagcattgtcataggtactgatggctatgtggtgtcatgtgattcttggcgcaggtccttcatgacattgta

SEQ ID NO: 571092 - DNA, 551 bp, Homo sapiens
ttgtcacaatacttgccctttatgatatttcaataagaatcacctgccaaataatatggtgatatccatacccacaacaattccattgacttatgagttaaaaatttactttttactgcagatggttggttcccatgccctgagaaacacaagatgctccatggaaatgctgatgattttaccttcataaaaccagttttattcacatgtcacatgcctcagaagtcaagcacracctactcaaaactttagctctgcagtatagaggtctccttcttctccaagctaagatcttttggggaagaagagcttataaattgatcagaatttgctcccacaagttccagtgagcagagtagtaactgagaacccaggctttgtggccttataaatctgaatctactagctgtgtattcttgggaaagttacttaacatcttggagcctcaatattctcattaaaaaatgagaatttaaaagtagcattgtcataggtactgatggctatgtggtgtcatgtgattcttggcgcaggtccttcatgacattgta

SEQ ID NO: 571093 - DNA, 551 bp, Homo sapiens
ttgtcacaatacttgccctttatgatatttcaataagaatcacctgccaaataatatggtgatatccatacccacaacaattccattgacttatgagttaaaaatttactttttactgcagatggttggttcccatgccctgagaaacacaagatgctccatggaaatgctgatgattttaccttcataaaaccagttttattcacatgtcacatgcctcagaagtcaagcacaacctactcaaaactttagctctgcagtatagaggtctccttcttctccaagctaagatcttttggggaagaagagcttataarttgatcagaatttgctcccacaagttccagtgagcagagtagtaactgagaacccaggctttgtggccttataaatctgaatctactagctgtgtattcttgggaaagttacttaacatcttggagcctcaatattctcattaaaaaatgagaatttaaaagtagcattgtcataggtactgatggctatgtggtgtcatgtgattcttggcgcaggtccttcatgacattgta

SEQ ID NO: 571094 - DNA, 497 bp, Homo sapiens
gcttttgtgcctttgagcatagtcataaattagtacacagaggaagcagggcagtgacagctatacatttttctatagaaaatcagctattaaatcaagaaccaagagaaccatctcagcctggacactgagaaccgaagccacaccttcccactgatattaacatgactttgttattctattgttccattagtattacttttygaggactgtcctacctaaagaatggtttgatttttcattataggaacttcccaaatgctttatcaaccttcaggggaagtcatagaccgagtttacagcttgagtctttgaatcgttccccacaaatcctcacctcactattttctctaagcccagactgttgtatcatgattctcacacaattctaatcaaatcctctccttcagagacccatcttaaaccaaacttgcaattctcaataaattctgatctccccttctctcctctgagatgctgatagaaatttacaaagg

SEQ ID NO: 571095 - DNA, 497 bp, Homo sapiens
gcttttgtgcctttgagcatagtcataaattagtacacagaggaagcagggcagtgacagctatacatttttctatagaaaatcagctattaaatcaagaaccaagagaaccatctcagcctggacactgagaaccgaagccacaccttcccactgatattaacatgactttgttattctattgttccattagtattactttttgaggactgtcctacctaaagaatggtttgatttttcattataggaacttcccaaatgctttatcaaccttcaggggaagtcatagaccgagtttacagcttgagtctttgaatcsttccccacaaatcctcacctcactattttctctaagcccagactgttgtatcatgattctcacacaattctaatcaaatcctctccttcagagacccatcttaaaccaaacttgcaattctcaataaattctgatctccccttctctcctctgagatgctgatagaaatttacaaagg

SEQ ID NO: 571096 - DNA, 581 bp, Homo sapiens
aatatgcagccagagatttgttatcaacagtcatcaagagggaaggataaacacgaaaggcttgtgggaatgataattgttagaatgtccaagcatcaataatttgtgacaacctaggacatctcaaaagtctgtatgttggattgctttgaattggatttatcacatcctatgctatcgtgaaaaacaagtttgaaatgtaaatgagcaacacatcttgaccagcaggcggcagtcttacctcatataatttctttaaaagcttgcagaaagaattacagtaaattattttttttwaattgtactgaaaatttattagaatggattttttaaatgccaaattcacaactaaaatgcaatttattgcaaaaaattcaaaattcctttttgtctcagtataaaaaacattgaatgtatctattagaaattaatgaacaattttgtaaatgatacaaaagaaaattttaacaaatggtgaaacattttcttatctcaggacaccaaattaaaaaaaatttagggcaggtgcggtggctcacacctgtaatcccaactactttaggaggacaaggcaggaggaa

SEQ ID NO: 571097 - DNA, 544 bp, Homo sapiens
ccagccacttcctggcccctgtccttggtcaccagggttgaggatgatggaagaatgtggtgatcattcaccactgcccttagctacccaatggcctcccagcccttcctgatggcagaagaggttgaagcctggggttggggctgaaaggactcttccactgtcctcttcttgtccctgcttccccaagcatgggctgygggcttgctagtttcttgccagtttcttcaggcactgttacacctgccccagttttattcaagataccttgggtgttatggatgacccctggggatttcctcagaatcccctaaaatctagtccacctgtcagaattgcagctctgtctggggttgcagtaagagcaagcagttgcttgaaagaggcctgggggtgggaccatggaatgacaagaaacagaatttaagaagcaggtaggtatgtcttcattttatactcttgtcaaccgagtgtaactttttaatggaatcagtatatttaatataaacaaatgcatattgattgttttggggagagagtgttt

SEQ ID NO: 571098 - DNA, 244 bp, Homo sapiens
aataaataggccagatttgtctaacagtttaggaacactgcataattggtagtgacagttcatttaygaaagaactagaatgtctttttttttaagccataaaataaattggacagtgactcttatcccatgatttatttatggtggaagattaataaaaacattaagcatgatgaatgtattttcagtgacaggattacagcaaaaaaaaaaaatactagcaacaataaaaataaaatgaatt

SEQ ID NO: 571099 - DNA, 244 bp, Homo sapiens
aataaataggccagatttgtctaacagtttaggaacactgcataattggtagtgacagttcatttacgaaagaactagaatgtctttttttttaagccataaaataaattggacagtgactcttatcccatgatttatttatggtggaagattaataaaaacattaagcatgatgaatgtattttcagtgacaggattacagcaaaaaaaaaaaatactarcaacaataaaaataaaatgaatt

SEQ ID NO: 571100 - DNA, 600 bp, Homo sapiens
ttctgaaaatatgattactttataaaawgaaaattaaaagttatttcaataacccaggtcccgagtctcttctctgaaactcttggagaaaggtgtatttagcaatttaaaaacattcagctgttataaaggtaatataatacatatgctgggtgtgataccattagtgggtctaaagaaacatctcataatcaaacacattaatagttctttagtgaaatgtgtaaatatttacactgagtggtttatacaaagaccatgaatagcctcacaccagtccaggtcaggttttgccacaaaagaatttcagttgaggtcaggttttactgccaaatgaattatgaagaaaagtttgatttttgaaacttcttgaagaagttttggacttgcaggagggattgagcatctgtattattaaataacttttgatattacttttataaagcaatactgacttttcagagttgagttcattgctatataacttgtctataggtgttagattataaaaataaaatttaaatgctggcgtcccagtaagaaatgcaaatcccaggacattcaaatacccaggtaattagagttttatggattcatgac

SEQ ID NO: 571101 - DNA, 671 bp, Homo sapiens
ggactatctgtatgatatcgcagttcattatttcaccataacttcttagagggcacagaattattacaaggttccaagaatttacacttgctctcagcactgtccatgataaactgcataaatgaaacacatttgctacttggatccattctcttatgtatttttttcagattatacttaataaaagtatcactatgacaggaaggtatatgaagtttgggaagtttacatgagcatccccatattggcaaacataagaaactactgttctaatcccagccctgtgtcctgtgtttgtaagatttcaaattctacctatacccaacatcctgaatgctgtggcaatgagagagaatgtttttaatttcagatatttgctttctccttgaatccaaaactgaaggatacacataagcaaagcattgtggtagtgcatatctactgaataatcttgtaatctatccagatatcctgtgtccaaaatgcactaccatttagtagatgaagttgggctccacagtaaaaatctttgtgttcaaatcctggctccactgctgtgtcacttttgcaaattgcctagaatctcctctaycataaaattgggataacagctttatctattgcactgggttattgtgagaattgaatgtataggtgagttagaagagtgc

SEQ ID NO: 571102 - DNA, 630 bp, Homo sapiens
taactggcatgaactcttctttcctgtggtcaccgtgacatttgtcacatttgtgatgtttgggcatagattgcagaacaaatagtatcatatgcacrtaatacacacatatgtacacatgcacatgaatatacacatataaacacaaaccataaacatacctggtaacatatacatacacacatgttcacacatatatagacacatgcacacatacacaccaacctacatgcacacatacacaccgacctacatgcatgtatatccaggcatgtgtagacatatctacacacaaacatacatgcacatactacatgcacatactcaacgacacatatatccactagatattccaaaaatgattttaaacattcagtgtttgaatatgtgaaccacaccaataaaagctggattaaaacaaaacaaaataaaaagaattatatcagtcttctcgtcaaaaattatgaaagcaaggagagtggagtaaaatatgcagtgttaaaaagaaacctagaattctatatctagtgagcttatctttcaaaggtaaagaagaagttctttctcaaactaaagtgaaaggatttcattgcccacagatctgccctgttagaaatgtttttaaagaaa

SEQ ID NO: 571103 - DNA, 612 bp, Homo sapiens
tgatgtttgggcatagattgcagaacaaatagtatcatatgcacgtaatacacacatatgtacacatgcacatgaatatacacatataaacacaaaccayaaacatacctggtaacatatacatacacacatgttcacacatatatagacacatgcacacatacacaccaacctacatgcacacatacacaccgacctacatgcatgtatatccaggcatgtgtagacatatctacacacaaacatacatgcacatactacatgcacatactcaacgacacatatatccactagatattccaaaaatgattttaaacattcagtgtttgaatatgtgaaccacaccaataaaagctggattaaaacaaaacaaaataaaaagaattatatcagtcttctcgtcaaaaattatgaaagcaaggagagtggagtaaaatatgcagtgttaaaaagaaacctagaattctatatctagtgagcttatctttcaaaggtaaagaagaagttctttctcaaactaaagtgaaaggatttcattgcccacagatctgccctgttagaaatgtttttaaagaaagttctcagagagaaagaaaattatacaagtcagaa

SEQ ID NO: 571104 - DNA, 623 bp, Homo sapiens
ttcgatttcaattaacttagcttgtgactgctgtatcaatggtgaatcatgcctctttgaggagtgagattaacaaaaataaatgaaagtaatgagggtggcagccagggcaaaatcaccctttcattacattactttctaccaaataactttacagtgttcctatcagaaggaagaaaaaaaagacttcagaagaattataattggcaatccttcattagcaaaaattaaatcaatcaagaaaggcctctggttctttgatttgggtccagcatattcactttcctcacttccaaagccttggtttcatgtctcccccaaccccctacttaaatttgcagcaccatgacaaccattatatattttacttgtgcatccatttagaatctattttccaccatgcaaagtccatgaatgttgaaggttttttcctactttattcacaactgaatttccagtatgtagaacaatttttgacacatagtacatgttcaataaataaatwacttttttcacatcaacatcaaatttatttctactatattatatgatgccaacaaataagatataaattattactaaaaataataataatattaacaaacttgagagatatgtagtga

SEQ ID NO: 571105 - DNA, 592 bp, Homo sapiens
gctcctaattatttagtagcagctttactgaaatgtagtccatatacggtagaattcacccatttaaaatgtacaatttggctgggtgtagtggctcacgcctgtaatcccagcactttgggaggccaaggcaggaagttcacctraggttaggaattcaagaccagcctgcccaacacggcaaaaccctgtctctactaaaaatacaaaaattagccgggcgtggtggtgcatgcctgcaatcccagctacttgggaggctgaggcagggagaatcacctaaatccgggaggcagaggttgcagcgagccaagatcgcgccattgcactccagcctgggtgacagagcaagactccatctcaaaaataaaataagtaaaatgtacaattcattggattttcgtgtactctcagagttatgcaaccatcaccacaatcaatgttagaacattttatcatctccataagaaacctagtaccctttagcaatcaccctctcaaacccccatctcctttctcccccagtcctagtcaagcacccactatttattttatatctatatagatttgcctattctgaacatttaatgga

SEQ ID NO: 571106 - DNA, 571 bp, Homo sapiens
ctcactacaacctccacctctcgggttcaagcgattctcctgcctcagcctcccaagtagctgggattacaggtgcccgccaccacgcccggctaatttttgtatttttagtagagatgggattttgccatgttgcccagactggtctcgaactcttgaccttgtgatccacccgcctcagcctcccaaagggctgtgattacaggcgtgagccaccacacccagctggatatgcaactatttatccattcactagttgaaggacacctggacggtttccaggttttggcgattatgagtaaagccactgtaaatgttaacatacgcttttgtgtgaacataagtttttatttctcttgggaaaatccctaggagtaggttggctggatcaaatgatacatatatgtttcagtttatttttaagaactactaaactgtttttccaaagtggytgtaccattttgtattccaccagcatgtatgacagtttagttgcttatttgccacaagataaagacctgctaagtaagaatgagttaaaaatgctcaagaagatactggtccctaatat

SEQ ID NO: 571107 - DNA, 461 bp, Homo sapiens
ttaccactataaaagccccatgccaatctcctttccttgccctctaagctcttcccagaaaagactcaattacataagtaatacatcttttcacatcttcttggtgtgtgtatgacatcatcattctcaacatccaaaccagatttttggtgagggtctatcctgtccctgtgtagagggtttaaaacactcttaaaagatgttttctctggatatggaattctaattttttaagtattttattttaccataatgaagattaattctactgtcttttgacttccaktgtggctatcaagatgtcagatgtccagtcaatttgtctcttttttttttttttttgagacagagtcttgctctgtcacccaggctggagtgcagtggcgtgatctgcgctcactgctcgctctgccttccgggttcatgccattctcctgagtcagcctcccgagtagctggga

SEQ ID NO: 571108 - DNA, 442 bp, Homo sapiens
actcaagaatacaatgctttctctctcctcagctctcattcagagggctttctccccagaggggcaggacatcagcatttctcattctgccgtagctgcwtgctgtcaaagctagatttaggataaatgtggtgaaaggtgggggctcccttcttcaacccagcacccactcataaaatggaggctcttccttggtcatggtgctgctgagaatactggaatctgagttgccctggccccagctcataaagtggtgattgtgtgccaggagaggcaagctgaaaatacctgaggttgctagacactccctacccacactgagctctcagcagctaaagcaggagtgtcattcatcgagaagcctgctgttttccccacattcactgccacagctgagtttcagaaatgtttccttaaggaaaagtggccataaaaaagatag

SEQ ID NO: 571109 - DNA, 553 bp, Homo sapiens
tatgtaaatagtttatttaatgaaaatgtaaagtataataccacatactttggtgaaatgcaggctccaactgcattgatagatgtcaatggatttacatttatcacctatttcaaagccctttcctcaacagcaaaactatttatatacatatgtgtgtgtgtgtgtgtgtgtgtgtgtgtgtgtgtgtggtgtttatcacaggaaggctttattaaattttcatttctgttaaggccatgaaagtaacaaacacacatttacaatacaaagcttaataagctaaagaaaataggagaaaccattattccccattctcactataaatagctgaagaaaatttctgcatctaagtgactcctgttatttctcaaagtgataacaatatgactactgtataaatgtttgtagtttgaatatgacatagtgatacataactacacatatctgtagttcaagagttacattcaagttattaacatgtatataatctcttgttctacatcaagcaatttgrctgtataagaatgatatatattctattttctatatt

SEQ ID NO: 571110 - DNA, 372 bp, Homo sapiens
acgggaagaggagggagagagraaagagaacatttcttgtcattttaattttttaaaataatcttcagttaaaaggatgataacttactgttattcagttctgacctgaatataagcccagagttagaagcttgaaaaatccaaacaacaatgtaattttgataaggaccttaaaaagccattgaaaaaaatatgataaattatccccttgcaataatatagctttggtttctggagaattgtttctacagttgattttcgtaatagatgaactcatttggagctatttttctcttcctctctttgctgaaactccagtttaaaagaaaaaactttcagtcaaactcattaaaagtaacacttttgtaaaaa

SEQ ID NO: 571111 - DNA, 568 bp, Homo sapiens
aggtttttggggaacaggtggtgtttggttatatggataagttttcagcggtgagctctgagatttgggtggacccataacccaagcagtgtacactgtatccaatgtgtagtctttcatctctcactcccctccaaccctttcccctgagtctccagagtccattgtatcattcttatgcctttgcatcctcatagcttagctcccacttatgagtgagaacatacggtgtttggtttttcattcctgggttatttcacttagaataatcatttccagttccatccaggttgttgtaaatgccatatgtatacatgtttatatatacatatatacatatatacrtatatacgtatgtacgtatatatgtatatatgtatacatatatgtgtatatatgtatatacatatgcatacatatatatgtatacttatatatatgtatgcatatatatatatatcacaatttctttatcttctcgttgattgatggccatttgggctggttccatatttttgcaattgcaaattgtgctgctataaacaggcatgtccaagtatctttattg

SEQ ID NO: 571112 - DNA, 473 bp, Homo sapiens
caataacaacccacagccaacattatactgaatgggcaaaagctgaaagcattccctttgaaaactggtacaagacagggatgccctctctcaccacttctattcaacatagaattagaagtccttgccctggattttacaggttatgtataytggcagaatatttttggtgttgtaatttgggttgtgaagcagcagacagcactaaatagcaatgaccggtagataggctcttgcttagtcatgtggctcttttgtatttctgtgtgttcacagcagtgctctctagtagggggtaggagtagagatgaccccctcaccaggtctgctcctgggccttgggggagctcctttgttcagtgccaccatacccactttatctctattagttgttcccagccatagggctcccttgggcagagtccatgactggcagacaggccatagtcttcccagactggccctgtggaggg

SEQ ID NO: 571113 - DNA, 310 bp, Homo sapiens
tgcttccattttccacagttttgtgccattaatatgcatattattgtcataataaaaattaaaatgcaaaaaagaaccttytgctatctgacactctcttacagatctcaacttaatctttcactccttccagatttctatcttcagatgcaattcacgctgaaagtcatctggcaatacaccatgtacatctttgaaaaagtaaaatcttcagctacatctttgaaaaagtaaaatccatggacttccttttttctttgaaaagttcacccacttatctttttcactgttctttaaggtcccttcattg

SEQ ID NO: 571114 - DNA, 575 bp, Homo sapiens
ttcattctttgacctatagcttaaaagtatgttgtttaatttccacctgattctccaatcttccttctgcttttgattactaatttcatttcattgtgattgaaaaaaatactttttgtgattttgatcttttaaaatctatcaagaattgttgtatggcctaatgtttgtgcacttgagataaacatatattattctgttgttgtgtggaatattctgtatgtctgttaggtatagttggtttgtastgttaagtcttcaatttccttattgatgttctatggagaggttctatccattattgatagtggggtattgaaacagccaactatcactgtctagttctcctttcaattctgtcaacctttgtttcagtgtccataataaattatttctgaaacatagttacactcatgtaacatattgtctgtgactgcttttgtgatataacagccgacttatgtatttgggacaagaaccatatggttttcaaagcttaaaatattcactatgtgggccttacagaaaaagtttgccaacccctggtctaaaaaatggcagaacctcagaaagac

SEQ ID NO: 571115 - DNA, 514 bp, Homo sapiens
tggtctcagactcctggcctcccaaagtgctgagattagcggcatgagctactatgcccagccctatttctctttaatggccttggcacttttgatgagtactcatcagttctttgtagactatcttttcatttgattttatgtaatattttcttgttattagattaaggttatatattctttggccaagattaccacatacgttatatacctttcataatgcatgatatcagcaggtactttatattaatatgtcttagcactggcaatattaacattgatcacttggtttagttggtatctgccagatactccactgtaaagttactgtatccttctttgtcyttaataaatgttctgggagacatacttaagaccatgcaaaaacccgactttattcttacccattagttttagcatccatcagtgagccttagctacaagtgtgagcatagtgttctaatgatattttctattgtcttcatttcttctacatttactaactggaattctt

SEQ ID NO: 571116 - DNA, 489 bp, Homo sapiens
aaacccagctataagctgtgtacaggaacmcactttaaatataaagatacatatatagattaaaagcaaatggatggaaagagattactgtagtaacactaatcaagctggagttgctgtaattattttaaatagagcatacttcacagcaaggaaagtgtcagaaataaagaggggtattagataataagaaagaggtcaaatcttcaggaagacataacaatccttaaaatgtatgtgcctaacaacagacaatcaaaatatgtgaggcaaaaaactgatagaactgcaaggagaaacagattaatctactattacagttggagagttcaacacccctgtattggaaatggacagatcgagcaggcaaattgtcagtgaagacagagttgaactcaacaacactatcaattaactggatgtaatggatatctatagaccacttcatccaacaacagcagaatacacattcttctcaagctcacaagg

SEQ ID NO: 571117 - DNA, 550 bp, Homo sapiens
ataacaatccttaaaatgtatgtgcctaacaacagacaatcaaaatatgtgaggcaaaaaactgatagaactgcaaggagaaacagattaatctactattacagttggagagttcaacacccctgtattggaaatggacagatcgagcaggcaaattrtcagtgaagacagagttgaactcaacaacactatcaattaactggatgtaatggatatctatagaccacttcatccaacaacagcagaatacacattcttctcaagctcacaaggaacattcattcacaagaatagatcatactctgggccataaaacataccttaacaaatttaaaagaatggaaattatacaatgtccactctcagaccacaatggaattaaactagaagtcagtaaagatagctggaaaatccccccaaataatggcagattaaacaacatgcctttaaataacacatggatcaaagaagaaatgtcaacagaaattttaaaatatttttaagtaaatgaaaatgaagataaaacttaaaaaaatgaaatgcagtaaaa

SEQ ID NO: 571118 - DNA, 550 bp, Homo sapiens
ataacaatccttaaaatgtatgtgcctaacaacagacaatcaaaatatgtgaggcaaaaaactgatagaactgcaaggagaaacagattaatctactattacagttggagagttcaacacccctgtattggaaatggacagatcgagcaggcaaattgtcagtgaagacagagttgaactcaacaacactatcaattaactggatgtaatggatatctatagaccacttcatccaacaacagcagaatacacattcttctcaagctcacaaggaacattcattcacaagaatagatcatactctgggccataaaacataccttaacaaatttaaaagaatggaaattatacaatgtccactctcagaccacaatggaattaaactagaagtcagtaaagatagctggaaaatccccccaaataatggcagwttaaacaacatgcctttaaataacacatggatcaaagaagaaatgtcaacagaaattttaaaatatttttaagtaaatgaaaatgaagataaaacttaaaaaaatgaaatgcagtaaaa

SEQ ID NO: 571119 - DNA, 491 bp, Homo sapiens
tacatatgtatttcttaagacattgtgttgagaatggtattttttttcagcttaagtttaatgagctttgtggttgttttacagagcaaagatagcctactgcactgaaatgtagtattattaaatgtttctacttccagtccttcagaagacccaaccaggtcttttcattcctgctcccatagtctgtaaatcctaaacttgctgcttgctgcttgtcagtaaaatgttgcatataatttagttagatttcatgtttttrtttctttaatttacaaggtaagtgtgataagtgtactgaagacttcaaagctcagaaaaatatttaaaagcagatatattgaccaggtgcagtgggtcacccctgtaatcccagtactttgggaggctgaggcaggtggatcacctgaggtcaggagtttgagaccagcctggccaacatggtaaaaccctgtctctactaaaagtacaaaattagccaggcatggtgg

SEQ ID NO: 571120 - DNA, 472 bp, Homo sapiens
atgtttttttatcagtgaccatatgccagagcatggggacatcatggagaataagccaggcatcctttctgttctcatgaggcttactgactgtctgaagcatctraagcaggtgatagggatagggtttggacgttttgtcccctctgaatctcatcttgaaatgtgacctccaatgttggaggtgaggcctggtggaaggtgtttgggtcatgggggtggatccctcatgaatggcttcatgcccttttagcagtaatgagtgagttatcactgctttgagttcttgagaaatctggttgtttaaaagagtcgggagcacctctctccatcagctcttgctttggctcttgccatgtgatgaacctgctccactttcaccttttgccatgagtggaagcttcctgaggccctcaccaggagcagatgctggcaccatgcttcctgtacagcctgcagaactgtgagccaa

SEQ ID NO: 571121 - DNA, 586 bp, Homo sapiens
ttacttctgcttccctctatattttaatgtctccagaaatccaaagaagccactatgctgaaaatactttgagtgggttagagtttcgctcaaggaagtgctgtagtagaaaatggccatttctctgtgctgtgttcaggtgagttagcaaatccgctgggatctgacacaagtcacttttgtactcaatagaatccatcatgagggagtgaggtggtgcctgaactcttatgtctaaatagtttctcacagagaaaaatttagagtttctcactaaaggaaactaatttctttgtgggatttctcayggacagtcttgtaatgcttttcaaaatcaagcttattataaactaaaaatacaggggcccctgaacaaaagtagttggttgacttcatgacgcctgttctggccagatggctcatgaatgattatgattcccaagtggaattcccaaaatagacctctcctctgcactttagtccattatttctagctttcttccggacatttccactcgattctcctgcaaactcaacctgtcccagtggagcttaccatctttcccctaactcatcctctaacttt

SEQ ID NO: 571122 - DNA, 523 bp, Homo sapiens
aattttcaccttaatttccctctttatctgctcctgctggtagccaccaccaacatttctatcccttcccaattactaactccccaatattttgcgtactgacaaagtcgttttgatttaagggttttgtcatctaattatcacatgaaaacaagtaaataatagtaaacactrggaagctacagtgcttctggactccttcaaagtaattatttttgctttttatttcacagctgttgctttccacctgggatggtaactggaagtaactggtgacagactagaactctactttcagtttcttttttcacattttaaaagtaacttttttggctgagcgcggtggctcatgcctgtaatcccagcactttgtgaagccgcgggaggatcacctgagctcaggagtttgagaccagcctggccaacatggcaaaaacccatctctgcaaaaaatacaaaaattagccaggcatggtagtgggctcctgtagtcccagctactccagaggctgaggcgggagaa

SEQ ID NO: 571123 - DNA, 523 bp, Homo sapiens
aattttcaccttaatttccctctttatctgctcctgctggtagccaccaccaacatttctatcccttcccaattactaactccccaatattttgcgtactgacaaagtcgttttgatttaagggttttgtcatctaattatcacatgaaaacaagtaaataatagtaaacactgggaagctacagtgcttctggactccttcaaagtaattatttttgctttttatttcacagctgttgctttccacctgggatggtaactggaagtaactggtgacagactagaactctactttcagtttcttttttcacattttaaaartaacttttttggctgagcgcggtggctcatgcctgtaatcccagcactttgtgaagccgcgggaggatcacctgagctcaggagtttgagaccagcctggccaacatggcaaaaacccatctctgcaaaaaatacaaaaattagccaggcatggtagtgggctcctgtagtcccagctactccagaggctgaggcgggagaa

SEQ ID NO: 571124 - DNA, 664 bp, Homo sapiens
tgatatgacagttatgtttgatcttaatataattttcttctgctttctgtttacatgtcatacatatgcaaatacataaacataagtataaatgtatacacacacacagagatatgtattgtgtgtatgtatatatgcatatacatatatatgcttttcaaagtgtggtttgtttttcctcatttttaaaaaattatagttcttatagttargaaactttgcatttgtatactagtggtgtattagttatttgttgctgcttaacaaattaccacaaagttagcagcttaagaagacacacatttattatccacaatatctgtgggtcaagagtctgggtatggcttagctgggtcttttgcttcaaggttttttatgagatgttggctagggctggcatctcatctgttacaagggaaggatccacttccaaccacacatgggtgttggcaggacccagtttcttgaaggctctcagacagagggcctcactctcctgctaactgccagccagaggttaccctgagtttcttacaacatgggtttctccatatagtggctgtctacatcaaagtcagtaagggaggatgtcaatggaaagagtttactagcaagatagaacttggaatcttctataatcacagaagagacatcctgtcaaatt

SEQ ID NO: 571125 - DNA, 664 bp, Homo sapiens
tgatatgacagttatgtttgatcttaatataattttcttctgctttctgtttacatgtcatacatatgcaaatacataaacataagtataaatgtatacacacacacagagatatgtattgtgtgtatgtatatatgcatatacatatatatgcttttcaaagtgtggtttgtttttcctcatttttaaaaaattatagttcttatagttaagaaactttgcatttgtatactagtggtgtattagttatttgttgctgcttaacaaattaccacaaagttagcagcttaagaagacacacatttattatccacaatatctgtgggtcaagagtctgggtatggcttagctgggtcttttgcttcaaggttttttatgagatgttggctagggctggcatctcatctgttacaagggaaggatccacttccaaccacacatgggtgttggcaggacccagtttcttgaaggctctcagacagagggcctcactctcctgctaactgccagccagaggttaccctgagttycttacaacatgggtttctccatatagtggctgtctacatcaaagtcagtaagggaggatgtcaatggaaagagtttactagcaagatagaacttggaatcttctataatcacagaagagacatcctgtcaaatt

SEQ ID NO: 571126 - DNA, 601 bp, Homo sapiens
tcagttttaataatgtattttttaatgtcttgcagaattcttgaaaatttaacaagctctgagtctctttggtcaggctcctacccaccactcattcatgtttcctgtatttgttcctttttatggctgagtagcattccattgtgtggataagttacaatctattctccactgctatcattttgtcatttcagtagtattatataaatcatgtagtatgtaaccttttgcgattggctttttgcactcactataatttgttagagatttattcaggttgttgggcatatcaataacttgttcctttttgatgcagagtactatttcatgatatgtgtgtaccaaagtttgtttaaccattcrtcattgaaagacatctggattgttttcagttttggctattatgaataaagctgctgtgaacactcatgtacagctattgtgtgagcataagtcatcgtttctctgcaataatgaccagaaatgcaattgtcaggtcatctggtagtcatacatttagttttttgttttttgtttgtttgtttgttttgagactctgtcacccagcctagagtgcagtgacatgatcttggctcactac

SEQ ID NO: 571127 - DNA, 528 bp, Homo sapiens
gccaggcacagtggctcatgcctgtaatcccagcactttgggaggctgaggcgggtggatcacccgaggtcaagagttcaagaccagcctggccaacatggtgaaaccctgtctctactaaaaatacaaaacttagccaggcgtggtggcttacgcctgtagtcccagctacttgggaggctgaggcaggagaatcacttaaacctgggaggtggactttgcagtgagccaagatcacaccactgctctccagcctgggtgacagagtgagattccctctcaaaaaaaagtaaatggatgaaaaaaggtagatcatgcaaatatcagttaaagtaaaggaggagcaactatattaatgtgagatagagtagaatacagaacaaagaaaagtaccagtcacagagggaacattacataatgacaagagtgaattcactaatgagacatrataatcctaaacgtatctgtaccaaagaataggtaggcaaaatatgtgaacaaaaactgatagaactgaaaagagagaca

SEQ ID NO: 571128 - DNA, 627 bp, Homo sapiens
aagcagcatggttctttggcaaggccataaactcttgcttagtgtacagagtcagaagagccctgaagttaaagaaggtttttagtcaccctatgcataatagaattactctatagctaggccagaagtgatctggtgggggagttggatctgccagtcgcttttgacagtgaggacacagaatgccttttccactgagagtgagtgagtgtgagtgtgagagtgtgtgtgtgtgtgtgcacgtgcgcacacacatgcacatggtgctgaggcagcagagcagtgagcagagattgagcctttaaacactggcccccacccagagagaaacagctctcttgtttgctcagcgagcgctttgggtacatcaactggcctcaagggcttgaagttagccaggtgcagtggcccatgcctgcaatcccagcagttcaggaggccaaggggggcagatccsttgagtccaggagtttgagaccagcctgagcgacacggcaaaatcccatctctataaaaaatacaaaaatcagccacgccaatagccccagttacttgggaggctgaggcgggaggattgcttgagcccaggagatcgaggctgcagtgagctgagatcgtgccactgta

SEQ ID NO: 571129 - DNA, 519 bp, Homo sapiens
tgtgtgtgtattggtagaagtatgtacatacatatgtgtgtatgtctgtatgtacacacagtaatgtgtatgtrtatgtatagatatatatatgtgtctgtcaatattgtttcatcagttttaaccaatgtaccacatgaatataagaactaataatagaacaaattagatcagaggtgggaaagcgtatatataggaacccactgtactatctctttgatttttctctaaatctaatattgttataaaatataaagttatttttttcaatattcttagctcacaggaattacaaaatccatctgtaggttggattcaatctctaagccatagtttcttgacttctgatctaagagatcttcatttcgaggtcggttttcatctttttgaagcattttggaaatatctttgtgagatatggcacattctgttggtggtaaactctatttttgtttgtctgaaaatttttctattttattctttctttgaataaagtttagctaaggaatgcaattttag

SEQ ID NO: 571130 - DNA, 519 bp, Homo sapiens
tgtgtgtgtattggtagaagtatgtacatacatatgtgtgtatgtctgtatgtacacacagtaatgtgtatgtatatgtatagatatatatatgtgtctgtcaatattgtttcatcagttttaaccaatgtaccacaygaatataagaactaataatagaacaaattagatcagaggtgggaaagcgtatatataggaacccactgtactatctctttgatttttctctaaatctaatattgttataaaatataaagttatttttttcaatattcttagctcacaggaattacaaaatccatctgtaggttggattcaatctctaagccatagtttcttgacttctgatctaagagatcttcatttcgaggtcggttttcatctttttgaagcattttggaaatatctttgtgagatatggcacattctgttggtggtaaactctatttttgtttgtctgaaaatttttctattttattctttctttgaataaagtttagctaaggaatgcaattttag

SEQ ID NO: 571131 - DNA, 586 bp, Homo sapiens
tggtggtaaactctatttttgtttgtctgaaaatttttctattttattctttctttgaataaagtttagctaaggaatkcaattttaggttgacagcatgttctttaagtattttgaagacactatgctctgtccttcttttgtctgtgagaaatctgctgtaatttgtcttttctttccgaccacttgtaatacctcttgtttgtctctaatgttctatagtctctgggataggcctgattgtgtgttcaaaaggagatttcttattattcctgtttgaattttgggaaggattcttgacactgaagttttctatcttttaataattttatatattttaataatatatatatatagcagtctttatttcttcaaacattcttagttatcaaatcctcatattcttgctcctaaccctttgacattcacccctacatgccaaaatctgttagctggatcttgctattctctgcctgattactttttgcttgatcctaagggcacactcagcccaggcacaaagaaaattcaaagggtgaatgacctaatgtttccagaagcatcctttatttaatgatggataaga

SEQ ID NO: 571132 - DNA, 490 bp, Homo sapiens
acagcatggtgatgatagttaayaataatgtattgtatacttgaaaatgctgagatcagagcttaaatgttctccccacacacataaaaataacaatgtgaagtgagagacatgttatttagcctgattgtggtgattatttcacaatatatcaaaatatcatgctgtataccataaatatttacaatttttatttgtcaaaaacatatgaagataatatttttgtaaaaaaaaaaaagctatttggaagcattcagtaatgacctaaaaactttaattagaagacagtggtgaaataaaatcaatatattttttacatgttttttacatcaacactatttgtgatatatttaactagaggagacatctgtagctttggagaatcccccatccattctcctttttctggttagaagcatcttcagtttcctttggaagactcacttctactccactgtgtgcagccttcgtggaaataccaataggtgct

SEQ ID NO: 571133 - DNA, 490 bp, Homo sapiens
acagcatggtgatgatagttaataataatgtattgtatacttgaaaatgctgagatcagagcttaaatgttctccccacrcacataaaaataacaatgtgaagtgagagacatgttatttagcctgattgtggtgattatttcacaatatatcaaaatatcatgctgtataccataaatatttacaatttttatttgtcaaaaacatatgaagataatatttttgtaaaaaaaaaaaagctatttggaagcattcagtaatgacctaaaaactttaattagaagacagtggtgaaataaaatcaatatattttttacatgttttttacatcaacactatttgtgatatatttaactagaggagacatctgtagctttggagaatcccccatccattctcctttttctggttagaagcatcttcagtttcctttggaagactcacttctactccactgtgtgcagccttcgtggaaataccaataggtgct

SEQ ID NO: 571134 - DNA, 493 bp, Homo sapiens
gtacagcatggtgatgatagttaataataatgtattgtatacttgaaaatgctgagatcagagcttaaatgttctccccacacacataaaaataacaatgtgaagtgagagacatgttatttagcctgattgtggtgattatttcacaatatatcaaaatatcatgctgtatacmataaatatttacaatttttatttgtcaaaaacatatgaagataatatttttgtaaaaaaaaaaaagctatttggaagcattcagtaatgacctaaaaactttaattagaagacagtggtgaaataaaatcaatatattttttacatgttttttacatcaacactatttgtgatatatttaactagaggagacatctgtagctttggagaatcccccatccattctcctttttctggttagaagcatcttcagtttcctttggaagactcacttctactccactgtgtgcagccttcgtggaaataccaataggtgctc

SEQ ID NO: 571135 - DNA, 546 bp, Homo sapiens
cctgcactacaccataaactcaatgagagctgcaaccctgttcttctttttactattgtatacccattgttaaccactgagattggcacatactaggaactgtaataaaatctgctgaataaatgaatgaataaacataaaaatatgtttaactacatatttttccataatgttttattacatggatgattatttaatttatttattttcagacagaatctcsctccgtcgcccaggctggagtgcagtggcatgatctcagctcactgcaaccttcacttcccaggttcaagtgattctccttcctcaacctcccaagtagctgggattacaggcacatgccaccacacccagatagtttttgtatttttaatagagacaacgtttcaccacattgctcaggtgggcctcaaatgccttacctcgtatgatctgccctccttggcctcctaaaatgtgattacaggtgtgagccactacacccagcctggttttatatagtgataatcgattatgttattctagaatttacctaatgatcacata

SEQ ID NO: 571136 - DNA, 628 bp, Homo sapiens
tttattttatttttctaatttttttttttttgagacaaagtctcacactgttgcccaggctggagagcaatggcacgatctcagctcactgcaacctctgcctcccaggttcaagtgattctctgcctcagcctccccagtggccaccacacttggctaatttttgtatttttaatagagacagggttttgccatgttgkccaggctggtatcaaactcccgatctcaggtaatctgcctgcctcagcctcccaaagttctgagattacaggcgtgaaccactgtgcctggccttacctgtcaattaaaataataataataataatgaaaataataataataataattggctagctacttaaaatagaacataattttgtttcagattcaaagacgtaaagtttgatagagatgggaggtaggtaatttatgtgggtgaagccagccaggtgcttgttgtcatgtggaacgtaaggacccatgtcacgagataatctgattttgcaaagaaagccagaaatctgaacttgtatgggaaattatctgatttttctaatggcttaacttgttttgaaaactctgtgaatgccaaataaaatggattcaaatcataaacggcaaggttttg

SEQ ID NO: 571137 - DNA, 571 bp, Homo sapiens
tagtttggctatttctctaggagcccttggggatgagactgagccattttcctgcagctggctgcaaagcaggccactgaaaaagatcagtatgaaagaacaaggcatactgttggtatatgcgtcactgtgggccagagctttttgtcataggattcagtcaaactcaaaatgcaagatgaaagtcatcctctttgtaaccgttttaaaaataatacatagaaaagaagtgaacagaaccatgttttccaaagtcctgatgctaaaaatcacaaaatcttaatagttcctgagctggaaatgtggactgcttggcctgggatcaagtctagaatttgatgttcttggcaggtacatcaagtggttagtatcagcagagaagctaaggaaatactgaagtcgaaggataaaggatgattccctccctgtaatggctttactctgagttacctactgtgtgttgtcctgggcttacttccaggcaattctcataggtttrtggttacatgctggattttgggatgagatgatcctgagtttgaatccaagctttgagattatattgtaagtt

SEQ ID NO: 571138 - DNA, 545 bp, Homo sapiens
attttttagtaattattacctttaaaaatgccatggaaacagaaacagtgattcttgaaacataatctgctttttatatataataatgaatatggaggtggctttaaagccagttaaatttgaaacatgcttcacttatgcagattagctccttcaatatactttcactttggtcatgttgcaacagtactgacattttgaaaatactcagaaacagtyaaaatttgattgaccccgctaacttttcaaaagcctttgaccaataatcaggtactatacaatttgttttgatccctaaatggaattaaatggcaccaaaggcagattactctcctttatggagtgttaaaaaatgtattaatatttacaagtatatatgtacacatttacgtgtaagtatgtgcatctacttattttactatcttaactaattacaagataaaatgagcaagaagaattttaaaaatatcctcattaacaatatttgtaaccgtaattttacatacatcagtaaccatgattttaattacattttttgtgatata

SEQ ID NO: 571139 - DNA, 452 bp, Homo sapiens
atttaatgatctttctctctctcttccccccgcccccgtatagaaataggtgttacataagaaacacctggagtgcttgagtgaamatcattattaccagctcctgcctgggattattaattggtgtggaatctttaacagaaacacccaaacaaatgacaatgaagccgtttctagaccacaatttgagttgtgcagtgatatggtttggctttgtgttcccacccaaatctcatcttgaattgtaatcccataatccccacgtgtagtgagagggacctagtgggaagtaattgaatcatgggcgtggtttccaccatgctcttctcctgatagtgagtgagttctcatgagatctgatggttctataagcatctggcatttcccttgatggcactcattctctctcctgctgccttgtgaagagctgccttctgccatgattgtaagtt

SEQ ID NO: 571140 - DNA, 571 bp, Homo sapiens
atttaaaaaccaaatacaatttttataaaaataaaatttcagaaatgataaatacttcactgagaaatgtatcttgaattcccataataaaatctggctgcagagtgctttactaattaatgaagtaatttgttacaatgagaatatatcttgaaatgtacacacctaggaccataaaatagtgcttgtttaaaaatatttatatatatgaatatatgattaccatttttacctctttcaatctattcctttcatttatttcctcaagtattaattaggttcagaaacaagacacatcttatctctacatggaaattcaaataaagccttgaaagkctaaataataaaaattaatataagtaatattttatctctatactgcaatgataaatggattttgcacaggtcaacaggttttaaaatattagtactattctaataaactactgcttacactatttctgtttctttgtccctatattcaaggtgaagagtagctgcactgacgctatgtaagctatttgcatctattttatttacacctatttgtttcttgtttctagacacgtaa

SEQ ID NO: 571141 - DNA, 583 bp, Homo sapiens
aaggtttatgtaataatttagctcttagatttctaattttagggtggataacttctttttaatggttttataaccaatattacttgaatgggctgtaggaggaatcatccttaaatgactcttctaggagtttctagtaaataattccagatattatgtaatttttatgtgaaagggagtaatttttaatgtttcaaagactaatggaatgaaagtgtaaaatggaaaactgagttgaaattacagtattcagaagtgctgcttttgctactgttagtattatctcttacatgtacatagctctgtattgtctttaaaatatttttatatagattataacaggggtccccaacccccagagccatggaccaggccacacagcaggtgagcagcaggcctgccagcattcccgcctgagctccacctcctggcagatcacctgtggcattccattctcataggagcacaaaccctcttgtgaactgtgcatgygagggatctaggctgtgtgctccttattagaatctaactaatgcctgatgatttgaggtggaacagtttcatcctgaaaccatcccctcac

SEQ ID NO: 571142 - DNA, 470 bp, Homo sapiens
tgtctggcttcagatttcacatcactattaaacatatggyatatactcacttctaatctgtttcacaatgggttttaggagatccagccacacctagaagggaaaaaagaacagattaagacctaagttctcaatgaaagagtgcaagtattttgagattttgtttaaagctgtttaaaatcaaaatatttttgaggatatgaggccgtctgttccatttttctccagaatgccgtatcttacgttgtctaccacttttataaaacggatcctaatttgctgatattatccctgagcttgaaaattaaaattgctcctagactcagatacacatggttaactaagaagttttctattctcatttatacatttatcatatttacctatttggaaaatattaatgaatgatttcatttgtgactatcagccgagtgaaatacgtacattccttattgaaacagaatacatag

SEQ ID NO: 571143 - DNA, 586 bp, Homo sapiens
gacttgtcagcagagccagatgtgttttttccaacagggaaaaacaatccaaataatatggatctaattaccactgggctcgatgatggttctctggactatgtgtcagagagaaatgcattttatattggaaaagaaggaaagagccccaaatcaaaaatacctacctttgctcaagacaaaaatctacagagtatttggatctcatactcccttatctactgcacatgtcactgagaatccattgaaaggaaatcctgcagaactcaaaactaaacaaaaataccaaatgttgagctccagagaagtaaaccctgattctgacaaaggttatttctttctcaaagattatattgccaagccctatggaaagtcacccagaatgatgattcaccccctagtagatgaaaatagaaatttttcttcaaagttttcagatgataaaactctggaagrcaacagcccaagtggaagtgacatcatgattattcttcatgatggtaaatagattgaacatattcacattccagatccaggagcaatggtaaccagaggagaaagcaggacattgccaagtgaaatcact

SEQ ID NO: 571144 - DNA, 557 bp, Homo sapiens
agatataagctccatgaagacagttactttgactaccttcaatattgctgttattttgctactaaaacagtccctgtatcctggtaggttctcaaaagtgaaagagaagcctaggcaacatagcaaaaccccatctctgctaaaaatacaamagaattagccaggagtggtggcatgcacctgtaatcccagttaggaagctgaggtggaatttcctgagctcaggaattcatggctacagtgagttgtgattgcgtcattgtacttcagcctaggtgatgggagtgagaccctttccatggaaagaaaaaaaaaaggagagcattaaacacaaataaaaattgtgtgcttactttaggtgtcttaagaagttttaatttataagtgtttgatggcaatgtggaaagttaagtgtcctgaagaaaaaagtcaaacatggaatggaaagataaagctctcatgacatcatgaggccatttcctaaatagtcgtatcataatacttctgattcaaacatcaacaaatagatgcagtagaaacttggaaatctcagccat

SEQ ID NO: 571145 - DNA, 438 bp, Homo sapiens
ctctcaatgaaagcttggatagtattgactggaaaaaatagataatgagcaaaaatcttatccttggcctgtagtgaagtctgtcattccaaattcyaaatggaaataaatgcctttgcagcatgggaaagacacgtctttttatgtctaattcaagagttcagggttgttctgggctttgaacattaattaattgtgaaacacatgtgagcaactattttgtgcaatgagctaatgaaggagctggttcattcatgtcatgaatgtcaacctggcagtttgccaggggtacaaacatgtcttctatgaatccacaggctgagtaattacaatacagggggggataaatgtgatctaaagggaagtgaaatgaatggaatgagtgtctgggatttcatgccagtgtttgagctctccttctggcacatagagataggg

SEQ ID NO: 571146 - DNA, 452 bp, Homo sapiens
aagatctcagatacacacaaaaattaaatacagaggaaaaaaaagctttctgaacaagtagaggattgctaaagattgtaatctggccatagcaaatgaacagttgtccccattagttaaaatgctatgctatgtagttagccctttgggaatcctcctcactcatgctgctctttgaatcagagatgccagcttcttttgagaaattcacctcctggcatcacagcacaaaartagctcagattagtcacatagggagtctagtcataaaagaaaatgaggggtaaaaaacttacaaaaatcaagtcataaaagaaggtaatatgctttggctctatgtctcccacccaaatctcatgtcaaattgtaattccccatgatggtggagggacctggtggaaggtgatgggagcatgggggtggattttctccttgctgttcttgtgatagtg

SEQ ID NO: 571147 - DNA, 452 bp, Homo sapiens
aagatctcagatacacacaaaaattaaatacagaggaaaaaaaagctttctgaacaagtagaggattgctaaagattgtaatctggccatagcaaatgaacagttgtccccattagttaaaatgctatgctatgtagttagccctttgggaatcctcctcactcatgctgctctttgaatcagagatgccagcttcttttgagaaattcacctcctggcatcacagcacaaaagtagctcagattagtcacatagggagtctagtcataaaagaaaatgaggggtwaaaaacttacaaaaatcaagtcataaaagaaggtaatatgctttggctctatgtctcccacccaaatctcatgtcaaattgtaattccccatgatggtggagggacctggtggaaggtgatgggagcatgggggtggattttctccttgctgttcttgtgatagtg

SEQ ID NO: 571148 - DNA, 452 bp, Homo sapiens
aagatctcagatacacacaaaaattaaatacagaggaaaaaaaagctttctgaacaagtagaggattgctaaagattgtaatctggccatagcaaatgaacagttgtccccattagttaaaatgctatgctatgtagttagccctttgggaatcctcctcactcatgctgctctttgaatcagagatgccagcttcttttgagaaattcacctcctggcatcacagcacaaaagtagctcagattagtcacatagggagtctagtcataaaagaaaatgaggggtaaaaaacttayaaaaatcaagtcataaaagaaggtaatatgctttggctctatgtctcccacccaaatctcatgtcaaattgtaattccccatgatggtggagggacctggtggaaggtgatgggagcatgggggtggattttctccttgctgttcttgtgatagtg

SEQ ID NO: 571149 - DNA, 452 bp, Homo sapiens
aagatctcagatacacacaaaaattaaatacagaggaaaaaaaagctttctgaacaagtagaggattgctaaagattgtaatctggccatagcaaatgaacagttgtccccattagttaaaatgctatgctatgtagttagccctttgggaatcctcctcactcatgctgctctttgaatcagagatgccagcttcttttgagaaattcacctcctggcatcacagcacaaaagtagctcagattagtcacatagggagtctagtcataaaagaaaatgaggggtaaaaaacttacaaaaatcaagtcataaaagaaggtaatatgctttggctctatgtctcccacccaaatctcatgtcaaattgtaattccccatgatggtggagggacctggtggaaggtgatkggagcatgggggtggattttctccttgctgttcttgtgatagtg

SEQ ID NO: 571150 - DNA, 639 bp, Homo sapiens
agggtgcaagcctcaagccttggcagattccacatggtgttgaacctgcaggtgcacagaagggaagagttgaggtttgggagcctcagtctagatttcagaggatgtattaaaatgcctgttgcaggcagacttctcctcatggagaacctctactagggtagtgcagaggagaaatgtggggttggagccaccacacagagtccccagtggggcactccctagtgcagctataagaagaaggccaccatcctccagaccccagaatagtaggtccattgacagcttacaccatgctcctggaaaagctacaggcagtcaacatcagcctgtgaaagcagccacaggggctgtaccctgcagagccataaaggcagagcttcccaaggctttgggagtctaccccttgcatgagtgtgcccttgatgtgagacatggagttaaaggagattattttggagctttaagatttatgactgccctgctgggtttgggacttgtgtggggcctgtagcccctttgttttstccaatttctcccttttggaatgggagcatttacccaatgcctgtactcccattgtatcttggaagtaactaacttgtttttattttacaagcacatagggagaagggattt

SEQ ID NO: 571151 - DNA, 588 bp, Homo sapiens
ttgccttgtctaagataaccctttggacttgatcttttgagttaacactcaaatgagctaagacttgggggactgttgagaagtcatgctgcttttgttttgaaatgtgagaagaacatgagatttaggtggggccaggaacagaattatatagttttgttctgtgtccttacccaaatctcaagccaatttgtagttcccagttttgggggagggatctggtgggatgtgattggatcacgggagtggattttccacatgctgttctcatgatggtgagtgagttcccatgagatctggttgcttaaaagtgtgtagcacyttccccttcactctctctctctcctgctccactatggtaagatgtatttgcttccccttcaccttctgccatgaacgtaagtttcctgaggcctctcagccatgcttcctgtacagcctgtggaactgtgagtcaattaaacctcttttcttcataaattacccagtctcaggtagatctttatagcaatgtgagaacggactaacacagaaggcttgttttgagatctaattatgtgatgttacaaactactacattgtttaaat

SEQ ID NO: 571152 - DNA, 386 bp, Homo sapiens
aagaggtgaatatgggccattgtataaatgttrccatctttactaatagagcttctctgaagttcttgggggaaaaaaagaccccagaagggattactgtccctagagtactgcttcttgcaagatttatgtaaagttgaaggctcttttgagggaagacgacagggagaagtcaaagagctttctctcattcatgtcagggagacatccatgctgctactctctcaactttactccattttaatagtggaaggaatgaaatttgttatacacttctgacacagaattgacttacgttgccaaaaaattctggttgactatggtaatcatgttcaatggatcaactgaaaagaccatacatcattatgtgttttagctctagagga

SEQ ID NO: 571153 - DNA, 386 bp, Homo sapiens
aagaggtgaatatgggccattgtataaatgttgccmtctttactaatagagcttctctgaagttcttgggggaaaaaaagaccccagaagggattactgtccctagagtactgcttcttgcaagatttatgtaaagttgaaggctcttttgagggaagacgacagggagaagtcaaagagctttctctcattcatgtcagggagacatccatgctgctactctctcaactttactccattttaatagtggaaggaatgaaatttgttatacacttctgacacagaattgacttacgttgccaaaaaattctggttgactatggtaatcatgttcaatggatcaactgaaaagaccatacatcattatgtgttttagctctagagga

SEQ ID NO: 571154 - DNA, 386 bp, Homo sapiens
aagaggtgaatatgggccattgtataaatgttgccatctttactaatagagcttctctgaagttcttgggggaaaaaaagaccccagaagggattactgtccctagagtactgcttcttgcaagatttatgtaaagttgaaggctcttttgagggaagacgacagggagaagtcaaagagctttctctcattcatgtcagggagacatccatgytgctactctctcaactttactccattttaatagtggaaggaatgaaatttgttatacacttctgacacagaattgacttacgttgccaaaaaattctggttgactatggtaatcatgttcaatggatcaactgaaaagaccatacatcattatgtgttttagctctagagga

SEQ ID NO: 571155 - DNA, 495 bp, Homo sapiens
ataggctgggaatacacaggttgttggtttttgagatttccctccctgtgctttcatgccagctgtgaaagagtcaaaaggctcctaactgtcaaaataaaaatgacacttggtcacagaggaaacagattataggtcaattgcattgatgactttttaamtatgagaagccattaatgttactgagtaagcaaatctgtttgcataaccagatttttataggctactgggaataaaggttttcctaagtgggcgatttgtacaacgatagcatttgggtctctgatggaacagctctgatgaggaaatgttcctttaattatgtggaaggccaattaccactttatagccacattgttttgcagattgcatataatttcaccatttccatagcttcagcactataattctggagaaaattcaggcaccaagaagacacttgaggcacattatgctggagacaaagatgttttaacaaattcaatttaagcttca

SEQ ID NO: 571156 - DNA, 495 bp, Homo sapiens
ataggctgggaatacacaggttgttggtttttgagatttccctccctgtgctttcatgccagctgtgaaagagtcaaaaggctcctaactgtcaaaataaaaatgacacttggtcacagaggaaacagattataggtcaattgcattgatgactttttaaatatgagaagccattaatgttactgartaagcaaatctgtttgcataaccagatttttataggctactgggaataaaggttttcctaagtgggcgatttgtacaacgatagcatttgggtctctgatggaacagctctgatgaggaaatgttcctttaattatgtggaaggccaattaccactttatagccacattgttttgcagattgcatataatttcaccatttccatagcttcagcactataattctggagaaaattcaggcaccaagaagacacttgaggcacattatgctggagacaaagatgttttaacaaattcaatttaagcttca

SEQ ID NO: 571157 - DNA, 495 bp, Homo sapiens
ataggctgggaatacacaggttgttggtttttgagatttccctccctgtgctttcatgccagctgtgaaagagtcaaaaggctcctaactgtcaaaataaaaatgacacttggtcacagaggaaacagattataggtcaattgcattgatgactttttaaatatgagaagccattaatgttactgagtaagcaaatctgtttgcataaccagatttttataggctactgggaataaaggttttcctaagtgggygatttgtacaacgatagcatttgggtctctgatggaacagctctgatgaggaaatgttcctttaattatgtggaaggccaattaccactttatagccacattgttttgcagattgcatataatttcaccatttccatagcttcagcactataattctggagaaaattcaggcaccaagaagacacttgaggcacattatgctggagacaaagatgttttaacaaattcaatttaagcttca

SEQ ID NO: 571158 - DNA, 495 bp, Homo sapiens
ataggctgggaatacacaggttgttggtttttgagatttccctccctgtgctttcatgccagctgtgaaagagtcaaaaggctcctaactgtcaaaataaaaatgacacttggtcacagaggaaacagattataggtcaattgcattgatgactttttaaatatgagaagccattaatgttactgagtaagcaaatctgtttgcataaccagatttttataggctactgggaataaaggttttcctaagtgggcgatttgtacaacgatagcmtttgggtctctgatggaacagctctgatgaggaaatgttcctttaattatgtggaaggccaattaccactttatagccacattgttttgcagattgcatataatttcaccatttccatagcttcagcactataattctggagaaaattcaggcaccaagaagacacttgaggcacattatgctggagacaaagatgttttaacaaattcaatttaagcttca

SEQ ID NO: 571159 - DNA, 537 bp, Homo sapiens
ctgcaacgaatcccaaaagtgtgtagttgagctgactgcaaggtgcttgacacgcaagagaatttataaatgggattcggcctctggaaagtggtggtagttccagatttatgtggatgttactttgtttttccctataaaatctattctttaaactgtcaaggctcctggctgcagtcctttgctggtggcagtgggctgggtactgccacyggggagaaatgctccccacttagggaaagggaaactggttctctttaagaggcagagggaggtttccagtgccagtttgtttggaggcaaaatggctgttgtattaaaattgcccaaacttgggctggtgcctagtgtgtttagagctcaaagccatgattgttttcatttttttttttttggttgttggttttccatccttttgcatggcaggtttctgctaatagcttcaacctcaagagtcccattatacagacactaatagcacctactgtgtgtcagtctgtagtgcctactatgtgccaggcattggagataatataa

SEQ ID NO: 571160 - DNA, 541 bp, Homo sapiens
tggccgagttcaactttttaagattccacatataagtgagatcatgtggtatttgtcgttctgtgcttggcttatttcacttaacataatatcctccaggctcatccatgtggtctcaaatggcaggatttccttcgttttgaaggctgaatagtattccattgtgtacatacaccacattgttgctggaagtgtaatggaggccagtttggggaggagggggaaaagattcactctaagtctagatgctccagcacccacccaggatgtgtgcaaggaagtgcaggatgctcctgattttgcaaactgtggtttgtgggactccaaagcccctatccttccacgatgctttctgtcttgttatcacatttccttggaggagaaccctgctctggctttgtccctgggcatgagatggcaaaggatggtgcygctgggagaccctcacgtctgcacactaagggctgctttccttctccattcctccttcaagtatctgagcagctcctgtgtgccagctgctggtctaggagatggatgg

SEQ ID NO: 571161 - DNA, 541 bp, Homo sapiens
tggccgagttcaactttttaagattccacatataagtgagatcatgtggtatttgtcgttctgtgcttggcttatttcacttaacataatatcctccaggctcatccatgtggtctcaaatggcaggatttccttcgttttgaaggctgaatagtattccattgtgtacatacaccacattgttgctggaagtgtaatggaggccagtttggggaggagggggaaaagattcactctaagtctagatgctccagcacccacccaggatgtgtgcaaggaagtgcaggatgctcctgattttgcaaactgtggtttgtgggactccaaagcccctatccttccacgatgctttctgtcttgttatcacatttccttggaggagaaccctgctctggctttgtccctgggcatgagatggcaaaggatggtgctgctgggagaccctcacgtctgcacactaagggctgytttccttctccattcctccttcaagtatctgagcagctcctgtgtgccagctgctggtctaggagatggatgg

SEQ ID NO: 571162 - DNA, 591 bp, Homo sapiens
attttgcacatggtgaaatcaatcaatcaacaaggacatgggagacccaaaatggaatacaaacagaaacaaataaacttaactgtatttcaaaaataataacataatcacactgaaggtgggagagaaggagtttggggaggaactaacytaagtaactttggaacacagtattttgactacatactccaagtctcaggctaaagaataaaagagctgcaaatacatgttgtactctggttactaaattaggagtggcaggggtgaacaattctaaaactcctttaaatgtattccaaaattgagcaaataagtaacatattgtggctaatgagagtcagtttcttggtgtcaaatgagggattacacataagaaagaacaaactctcaggtatcaaaattggacatatcagcatgaatttatgattttaatatacaaacagatagacatagaaatatacacataaaaccgggtgtggtaattgtagcactttgggagaccaacactggcagattgcttcagctcacccttggcaacatggcaaaaccctgtctctacaaaacaatacaaaaattagacaggcatggtag

SEQ ID NO: 571163 - DNA, 293 bp, Homo sapiens
tgcccaggttttactgcttgttrtcaagggaatgaaagtctcatctttttccacatcttaaccagaagcatacctttcagaggtgtgaagagtcaacgtcaattgttatgacatggatacaaagaagcagaggctagtttggaaaactggcctcagagggacgaagaaaagattttttctgctagtatggcaatctcatttctcccttcttgagtgggacattgcatcacttggatccttcatgagtggagtgcaaaatctcctccatcttctcctttctgtggaggagaact

SEQ ID NO: 571164 - DNA, 423 bp, Homo sapiens
cctccccataacttagtgttgtcagtgttctggatttttcccagtctaataggtgtgtagtgggatctcattgttgttttaatttgcttttccctgatgacatatgggcatcttttaacacgcttatttgaaaataaaaaaatctttggtgaggtgtatggacaccaaaggttttggccccttttttcatttgattttttgtgttcttacggttcaattttttttgwaacggagtcttgctctgtcgcccaggctcacctcccgggttcacgccattctcctatctcagcctcccgagtagctgggactacaggcagccgccaccacgcccagctaatttttttgtatttttaatagagacagagtttcaccatgttaaccaggatggtctcgatctcctgatctcgtgatccacctgcatca

SEQ ID NO: 571165 - DNA, 583 bp, Homo sapiens
tctcctgcatcagcctcctgagtagctgggaccacaggcacacactaccacgccccactaatttttgcatttttagtagagacgaagtttcaccatgttggccaggctggtctcgaactcctgacttcaggtgatccacccacctcggcctcccgaagtgctgggattactggcatgagccaccaccacgcccagccgagacactcttttatcttaataacaactcccacacacattgtctagggtttaaattaggctggccttatttctactacttgcaggcacaggagataaaactaatgcatgggattcatgacttcctgaacagacmctttgaggattctatgagaagaaacacttgaaaaggctcagagtgggctctcaggaagggaccgttattattacctctgtggcattccattacacgtcttcatcccctgcgacccctttctgactcccgaggatcacagaggaaatagctctctgaggtgagagaagatagtaacaggagaacagactgtgggtgagaaaactgggacccttgtgaagagacagagaggaagtgtgacaaagccggtgatgg

SEQ ID NO: 571166 - DNA, 583 bp, Homo sapiens
tctcctgcatcagcctcctgagtagctgggaccacaggcacacactaccacgccccactaatttttgcatttttagtagagacgaagtttcaccatgttggccaggctggtctcgaactcctgacttcaggtgatccacccacctcggcctcccgaagtgctgggattactggcatgagccaccaccacgcccagccgagacactcttttatcttaataacaactcccacacacattgtctagggtttaaattaggctggccttatttctactacttgcaggcacaggagataaaactaatgcatgggattcatgacttcctgaacagacactttgaggattctatgagaagaaacacttgaaaaggctcagagtgggctctcaggaagggaccgttattattacctctgtggcattccattacacgtcttcatcccctgcracccctttctgactcccgaggatcacagaggaaatagctctctgaggtgagagaagatagtaacaggagaacagactgtgggtgagaaaactgggacccttgtgaagagacagagaggaagtgtgacaaagccggtgatgg

SEQ ID NO: 571167 - DNA, 531 bp, Homo sapiens
gctgctgtccccactgcaaatgctgctgcacccaaagcaggcatctggacattggcatcctcacaatcatgccccctggagagcaaaaatagccagcacccaaggaacatggctatagcctgacttcctccttccccatctcaccacagcgaagctcactggtgggacacgttttgctaaactagaactccacttgcagaatcccaacctctgcatttcagggaggcacacagaaggaaggtggggtcaggtgcactctgctccatgggctattatgatattaaatgagatgatgcaggcaatggacttagaacagtacctggaacgtcatgagaatcataaatggatgttatttatgttgtattkttacctgctgcaggacttctcagagcctttattctgccaacatatacaattttttttcctggtagtaaaatttgtataacctgctatgtcttctattttgttttctcagcttagagacaaatcttagattcaattatagcacttttagagagcccagtgcctttc

SEQ ID NO: 571168 - DNA, 427 bp, Homo sapiens
tgtgctggagtaaacaggtaaaatggaagagagagctgaaaaaattacccagaataaagcatggagaatacataaaatatgtaaaatatccacaaaaggtagatacagaggaaatattgagaaggtttatcatatataaaaatggagtttcaaaaagaaaacaagaggtggcatttttcccctgctctacaggtctgtggaactttaaaccagagggggtgatataggatatcttgcagaagaaatttctaagaagcaaagcattcaagaggtaacttgggtgccttaaaargcatttagttttatgcattcacaaagagatgatttggaattggaacttatgtttaaaagggaagcaaagcataaaagtttagaaaatttgcagcctgacaatgcaatagaaaagaaaaacccattttctgaggag

SEQ ID NO: 571169 - DNA, 503 bp, Homo sapiens
gattttaggaactggcagacttatggtgtcagttattgaaatctgttccaaaatccgcctcctcacaggactccatttttggccatcaaagtagtctattttataaatgtcttgatgtgttgtcttttgtctttgccacatatactctaagacacacagactgggaagtgggtcagcaaatatatgtatggctacttacaaagtgttttctatagttatgctcccacaattggagataggctaagaaatatatgtactgtrtctctcagtaaagggctaaatcaaagctgtctgcacgagggggaggaaaagggctgcttggattttagtttaattgagaagacacagaaatacgccaaacttgggagttgaggttattttttggaacatgaagataatgtaagtgtccccacaagctctttttcttttcttcaataaatacatcctgtgttgatttcttcacattcacaagattgtgccctcatggaatctaaggccaacat

SEQ ID NO: 571170 - DNA, 511 bp, Homo sapiens
ccacactcactatcatacctctttatataatatattcttttattattttaatatagaaatgggtattgagaaggagaggacacggaaatgtggcatgctctcttccttgtkttctttctttgtgtcccttctttccttccctcataccttcctttttatattcatactctcttttgtgtaatatgtgattattttcttgtgctcaaaatccataacataaaatttaccattttaaccatttttatgtgtacagttcagtaacattaagtgcattcacactgttgcacaaccatctccaccatccatctccagaacattttcatctccccaaactgaatctctatacccattaaacactaactcctcactttctacttcctgtctctatgaatttgactactctcagtacctcatatgaatggcattatgccgtatttatccttttgtgatgggctttttttgcttagcataatgtctttaaggttcatccaggatgtagtgtgtctctttt

SEQ ID NO: 571171 - DNA, 618 bp, Homo sapiens
ggattgagctttccatgaggattcaaacagaatcagaagaattgcaagggaggtaaaggagacgcttatgttaacttccagaaaggggtcccgatacagaccccaagagaaggttcttggatctcaagcaagaaaaaattctaggagaatccatagagtaaagtgaaagcaagtttattaagaaagtaaaggaataaagaatagctactccataggcagagcaacagctcaactaagaatagagctatttcttgattaaatgctaaacaagggatggattactcatgacttttctgggaaaggggtaggcaattcccagaactgaaggctcctccyctctttacaacatatctggtaacttcctgacattgcccgtggcatctataaactgtcatggtgctggtgggagtgtcttttagcatgctaacgcattataattagcactaaggatcagtgaggataaccagcggtcactttcatcattatcttggtttcggtgggatttggctggcttctttacagccaactgttttatcagcaaggtctttgggacctgtatcttgtaatgacctcctatctcattcagtaactaagaatgccttaacctcctgggaatgc

SEQ ID NO: 571172 - DNA, 531 bp, Homo sapiens
caacttctgtgtcctaggtagtaccaggggatgtggcttattttctttagtaaagagaccacataggcataaaagccagttaaattttacaataacccacagtaacctctaagacctatttgatttttgtaccagtcaagtagatgagttaaacagggatatgatatgaaccattttctctgcatcactgtagtctctggtgggaastataatttctatgtagaattaatctctgctcttgaattcctttttggctgggaatgacatgtccatacacacccacttggcccttcctgtcaaaatagtcttcattctatggctcagaaaaccactctgtggatttaaacaatataaccaagtatttttatttaaactatacatttaggaactggggaacaataataatttttaattcaaactatggaagagactaggccataacttcatttcactagacctacatagcctcactccctctaaatctgacccaaggacaatggtagaactgtgggtctctgtgatttagtgtca

SEQ ID NO: 571173 - DNA, 531 bp, Homo sapiens
caacttctgtgtcctaggtagtaccaggggatgtggcttattttctttagtaaagagaccacataggcataaaagccagttaaattttacaataacccacagtaacctctaagacctatttgatttttgtaccagtcaagtagatgagttaaacagggatatgatatgaaccattttctctgcatcactgtagtctctggtgggaagtataatttctatgtagaattaatctctgctcttgrattcctttttggctgggaatgacatgtccatacacacccacttggcccttcctgtcaaaatagtcttcattctatggctcagaaaaccactctgtggatttaaacaatataaccaagtatttttatttaaactatacatttaggaactggggaacaataataatttttaattcaaactatggaagagactaggccataacttcatttcactagacctacatagcctcactccctctaaatctgacccaaggacaatggtagaactgtgggtctctgtgatttagtgtca

SEQ ID NO: 571174 - DNA, 566 bp, Homo sapiens
taagactgaatgattaaagtttaaggtcagattgatagctgattttaagactgggaaacaaatgtacatacttgttatttgcctaaggtcatcaagtttcaaagccacaaactttrgtctgaaagctaattcatatattaaaagttaaaaaaagtggagaaattatcaagcacatacttttttttaaagcattcttacaactatcactaaagactctgccattcataagttttctgtatctcaactaattataggctgaacgattcctcaccaaagaagcaattggtaattttcattttccaagaatagccacagtaacaaaggtagttaaaatgagtggtcatttgcaacattttccctccatctctctaaaaaatcttgtatagaaagacatttataagcttgagatgaaagagacactgtagctctagcacagaatgctctcagtggaggctgaggcggaaggcgggcatctatcttgtcttcaagtagcttcactgttttgtgtaaagtggagattttaggtataagttatgaaaaccacttttgtaaattctgtggtttca

SEQ ID NO: 571175 - DNA, 614 bp, Homo sapiens
cacaaaacgtgcacacaagattttgtagcagctttgttcatgattgacaggacttggaggcagagagatggtctatcaagccaggaaaatacatggaggaaacttgggttcgtattgctgcgtggaagaggccagtcaaagagggctgtatattgtgtgattccaactatgtgacattcyggaaaatgcagaatgatggagacaatgaataacacatggttgttggcagattaagtcagcaggatacacgcacaaacaaaaaggctgaacacaaagaagtttgcaggaaatgaattcattctatataatgctacactggtgcacatgtgccatcatatgttgagacctgtagaatgcacagcaccagggagtgaaaaccatagtatgaactgttgactttgggtggtgatgaaatgtcaacgcatgttcatcaatgacaacaaatgcatcactctgattcaggatgttaatggtggggtgggaggaagggatttatgagaaatctttgtactttcttttcaattttcttctgaatctaaaacttctctaaaaaatttctacttaaaaatatatttggatatatatgcttttaaaaaattctagtgttctccaga

SEQ ID NO: 571176 - DNA, 502 bp, Homo sapiens
ctatacagtatttctatatccagtgaaaatctttcaaaaatgaaattaactccaagaagacaggaaaaaaaaaatcccttaccatcctactatatttttagtgaatgagaccaaaatacaaayagctcatttgatgcatcgaactcccacctattaaatctgtttcttatagaggattcaagttcaaccaattttctctatcgagtttcaacttcctggtccaatacttttcctcagcattaccaattaaaaattaaggaaactgaaggttattgagtattccaggcttaggtgatccaatgttatcataaaatacaaccaactagtgctggaataccttggtctattgtgacatcccgaaaggtgagaatatgacatctatagctttacttgcaaagtgaagttacttcaaattaacttcatattagcaatgatatgcaggatatgtaaaatatgaaaagaaacccactatatatttgacagtttattccaccattgagtt

SEQ ID NO: 571177 - DNA, 502 bp, Homo sapiens
ctatacagtatttctatatccagtgaaaatctttcaaaaatgaaattaactccaagaagacaggaaaaaaaaaatcccttaccatcctactatatttttagtgaatgagaccaaaatacaaacagctcatttgatgcatcgaactcccacctattaaatctgtttcttatagaggattcaagttcaaccaattttctctatcgagtttcaacttcctggtccaatacttttcctcagcattaccaattaaaaattaaggaaactgaaggttattgagtattccaggcttaggtgatccaatgttatcataaaatacaaccaactagtgctggaataccttggtctattgtgayatcccgaaaggtgagaatatgacatctatagctttacttgcaaagtgaagttacttcaaattaacttcatattagcaatgatatgcaggatatgtaaaatatgaaaagaaacccactatatatttgacagtttattccaccattgagtt

SEQ ID NO: 571178 - DNA, 602 bp, Homo sapiens
gtaggtttctaggaacttatccatcttctattttatctgatttgttcatgtataatagttcatagtagtctcttatgatcttctgaaattctatagtatcagttgtaatatttcttctcttatttctgatttcaattgtttcatttctataactttttctgcttatttcagttccataattttttgtgcttatttcagttccataactttttgtgctttttgttatcttagtaaaacctcttaatctcattgatcttttctatagttcttctcattttgttatttatttctgttctgaactttgttgtttctttcctctgctaactgtgggcttagtttttttttttctttttaagtcccttgaggtataatgttaggttgtttmttggataattttctttgttgatgtagacacttattgctataaactttggtatggtttggctctgtgtcccgacccaaatctcattttaaattgtaatccccacatgttgagggagggacctggagggaggtgattgggttatggcagtggtttcctctattctgttctaaagatagtgagtaagttctcatgagatctgatggtttaaaagtgtttg

SEQ ID NO: 571179 - DNA, 543 bp, Homo sapiens
agcactagtcacaatagcaaagacaaggaatcaacataaatgcccattaatggtagactggataaaaaaaatgaggcacatggccaggcgtgttggcttatgccagtaatcccagcactttgggaggctgagcggggtggatcacaaggtcaggagatcgagaccatcctggctaacatggtgaaactccgtctctactaaaaatacaagaaaaaaagaaattagccgggcgtggtggcaggcacctgtagtcccagctactagggaggctgaggcaggagaatggcatgaacctgggaggcggagcttgcagtgagccgagaatgcaccactgcactccagcatgggtgacagaatgagactgtgcctcaaaaaaaaaaaaaaaaaagaaagaaagaaagaaaatgaggcacatgyacaccatggaatactacaaagccacaaaaaagaaggagttcatgtcctttgcagcaacatagatggagctggaggccattgcccttagcaaactaatgcaggaacagaaaaccaaatactgcaggt

SEQ ID NO: 571180 - DNA, 669 bp, Homo sapiens
ccattacatgaagattgagttataatattctttccaaacattagcaaagtaaattgaactggatgaagcaaagaaatgtacagatgaaaaaaaaaaggtgaaggaaaagtaaaatgtaatacaggaggaataaagtagttgaaaaaattggagtgaaatagccagactccagagggaaatggattctttaatgtgatatatccataatctgattttggtcttaaatgcaaagtaaaactatgaaaaaagcattgatatcataatgtgttctctttgcagatacgcgaattgattcttacatratatgagagatataggtgagtcaaaagactgcagaacttccaattttatctcctcagccagttattaaccactcattttttgaaagtccaacattaaatggataccaaaaacctagtttcatttattttgctctgaatgacattttataagtttaaagttctctagcttcaagtatttttcttatgctttagtctaaacattatttgattttactttatcttattaaattatcttagtacaccccttaatgtatgtatgttaaaatgtttagaagaatcacttaatttcttcgttaatctattttctgttttaaaaaagccttaatacattttatttattttcccactcagactttgtctcaaatta

SEQ ID NO: 571181 - DNA, 476 bp, Homo sapiens
ctgcctctcctgggtgggccattgccccaccctgcttttcttcattctcagtgaattgagtggtttgccttgccagtcccaatgtgagaacctgkatgcttcagttgaaggcactgaattcacttgtccctgtcattcctctctgtgagtgctgtggactacagctgcttctaatcagccatcttgacccctcaatccatttccgttttctaatccaaaatatattatgaacagaagtacatacaatagaagggaaaggaaattaacatggttaagcaccgattctattggccaacatcatgctaggagtatctattatctcatttcatacaaagggaagagaagttgctataacaactgtaaccatgtacaatgtaatggtaatatctagatatataaaatatatatttgccttgtgagtttggaatggagtaaaaagaagagaactagcattaaataagcaacccatttttatt

SEQ ID NO: 571182 - DNA, 476 bp, Homo sapiens
ctgcctctcctgggtgggccattgccccaccctgcttttcttcattctcagtgaattgagtggtttgccttgccagtcccaatgtgagaacctggatgcttcagttgaaggcactgaattcacttgtccctgtcattcctctctgtgagtgstgtggactacagctgcttctaatcagccatcttgacccctcaatccatttccgttttctaatccaaaatatattatgaacagaagtacatacaatagaagggaaaggaaattaacatggttaagcaccgattctattggccaacatcatgctaggagtatctattatctcatttcatacaaagggaagagaagttgctataacaactgtaaccatgtacaatgtaatggtaatatctagatatataaaatatatatttgccttgtgagtttggaatggagtaaaaagaagagaactagcattaaataagcaacccatttttatt

SEQ ID NO: 571183 - DNA, 542 bp, Homo sapiens
ctaaatacacaaaaattagccaggtgtggtggtgcatgcctgtaatctcagctacttgggaggstgaggcacgagagtcacctaaacccgggaggcagaggttacagtgagctgagatcccaccactgcactccagcctgggagacagagtgagatgccatctcaaaacaaacaaacaaacaaacaaacaaacaaacccaaaacagccaagcatggtggttcatgcctgtaatcccatcactttgggaggctgaggcaggcagatcacctgaggtcaggagttcgagaccagcctggccaacatggagaaaccccatctctactaaaaaaatagaaaaattagctgggcgtggtgtcatgtgcctgtaatcccagctactcgggaggctgaggcaggagaattgcttgaacctgggaggtggaggctgcagtgagtggaaatcgtatcactgcactccagcctgggcaacagagcgagactccgtctcacaaagaaataataataaaaataaaataaaataaaataacacataaacaagctt

SEQ ID NO: 571184 - DNA, 524 bp, Homo sapiens
cagcatgacatttctacttataataaaacaaaaataaccacatatttttcttctgtcctcaagttgttcaatatctatcataattttaatagtcctgaatgcaatccaaatggtacacttatctaatcacctgaaaataatatgaccagcatataagcaataaaagtgggtaaaatattcagtggaaatgttcatctcacacaagaattcttatccaactcaagtttttggtttcctaggttacataaatattgaaaacacatttaaaaaaatcagtcttgttcacagactcttagaatcattgaacctttaactttcctagygggaagagaccagaaagagggaaaagtagagaagccaaaacacataaaaatatttacaaagtgagttaagccttctttatcttacaggtaaagaaaccgaaacccagagagactgaacagtctacagaagatcacccttcttgttggcttcagtttaaaatgaaaggcaacctaacatagttcagaatatccatttaacag

SEQ ID NO: 571185 - DNA, 616 bp, Homo sapiens
caataacattcttaatttgctaggtggctttgctcattgtttcccaatatttggaaacatacaccatgttgcagcctgtttcaccaaaacaacaaacaacaacattgcacagctggataagaagaaaggtggagaaaggaattgtcgttgctactcccttcagcagaaggacgtagcaaggacaattgttttatgcaccattgctaagctgagtgatcaaccaaaacccagatttaaataaagctgatatgaaggagttgccacatttttctttccagttatctctatttctttacttcatttgataagggttttttgaattacctaatctatgtcatatgagttatcataatgcttaaaattcaaggcatgttaattaaataccttgagagagaaaaaatcaggcccaaagggaacccaaagaaagagacaagtgattctaaatgggagaratcagctgaggctttatggaaaaagatactgcttgatcttgacttttaaaaacagaaattaaacaaaaaacttcttcctgatgtgtaatatacatatggaaatttgcacacactttcagtgtacaggttgatgaattattctgaaatagaagcaaaacatttca

SEQ ID NO: 571186 - DNA, 515 bp, Homo sapiens
tcaactgtgggagctttaagtcaagaagaaaaacaggaatcaaccagaattgtaaaagacaccccagattgaggagaggaggatggtggcaagcagcccccatgacagcacctagttgacagaagtgagtgaagtcccagtacgtgagagaggcagagagcctctctctgtaacttaacttcccactggggatctgagcaactgaggctgaggaagaacattttgtttctcccaagttctggagctaacttgtggagagccctggagatactgtgagggaaagagacacttggaaaagctgcagacattttcccagaccaaggaccaagaacaggatgccattttttaatctgggcacatccaaattcagctattacttggcaacccagcagtgtggctacacaggcatcttagtcaggccagagattggagcacctcctctggaatggggtgrggccccccacagccagaactgtggaaatcgcctcagcagtagggctaaaattgtgctttac

SEQ ID NO: 571187 - DNA, 514 bp, Homo sapiens
acacacaggaaaataattctaaaactagaattaccagtgcatccagatgcaaaagaatgagtgcaataattctggcatcatgaaaaatctgaatgtagtaacaccgccaaataattgcactggatctccagcaatgatccttaccaaaatggaaactcagaaatgacacaataaagaattaacagcatggattcaaggaagtcaatgagatctaagacaaggttgaaaatcaacacaaagaagttttaaagcaatctgggaaatgaggraagagataaacatctttaaaagaaatcaatcagagcctctggaatttaaaaactcacttatggaatttcaaaatataactgaaagctttatcagtagactcgatcaagcagaagaaagaatttcagagcttgaagactgttcttttcaaccaacccagtcagacaaaaattaaaaaaaaaacaaaattttaaaaaacaagcaaagtctttgaggaatatgggatatgtgaaacaaccaaacctat

SEQ ID NO: 571188 - DNA, 571 bp, Homo sapiens
aatgacctaaataccccacttaaaagacacagagtgacaagttgaataaaaagtataactcccatccattcactgttttcaagagactcatctcacatgtaatgacacccacaggctcaaagtaaagggttggagaaagatctacaatgcaaacagaaaacaaaaaataccagaggtcactatttttatgtcagataaaagagattttaaatcaacaacagtaaaacaaaaggacaaagaagggcattatatgatgataaagtgtttcactcaccaaggagacataactatcccaaatataaaatgcacccaacattgaagcatccagattsataaaacaagtacttctagacgtacaaaaaaaaagacttgaagaactacacagtaatagtggggaacttcaacaccccgctgacagcattagataggtcattgaggcaggaatctaataaagaaattctgaactgaaacttgacacttagcgaatagagtatgggccaatggagtatggcgggaagatcacatacaggtacagaacagagatgtacagaatactccacctatcaactac

SEQ ID NO: 571189 - DNA, 433 bp, Homo sapiens
taagtcacttttcagagtagtaagttagtgacctagtaaccttccctctaatgaccagtagttttttttctgaataccattatgaactcatagattattgtttgcatttgatgtatttcaggccattgcagtctttattgttttggatgcttacattgtctcatctaggttaataattatctcttcaagttkactttcatgtctttttgacgtgatcctgttggactttgatggcttccttactttctggcaaaaaagatgttccaggatcaatatactgcaccatacatggagtcagccatttctctagggaaccttgattccttttagtagagaacacagtttgaggtcttggactgaatgacttttgtgaacctcctttcctgagactacagcctgcatccctgcatatagcccgtttggagctcttgct

SEQ ID NO: 571190 - DNA, 433 bp, Homo sapiens
taagtcacttttcagagtagtaagttagtgacctagtaaccttccctctaatgaccagtagttttttttctgaataccattatgaactcatagattattgtttgcatttgatgtatttcaggccattgcagtctttattgttttggatgcttacattgtctcatctaggttaataattatctcttcaagtttactttcatgtctttttgacgtgatcctgttggactttgatggcttccttrctttctggcaaaaaagatgttccaggatcaatatactgcaccatacatggagtcagccatttctctagggaaccttgattccttttagtagagaacacagtttgaggtcttggactgaatgacttttgtgaacctcctttcctgagactacagcctgcatccctgcatatagcccgtttggagctcttgct

SEQ ID NO: 571191 - DNA, 385 bp, Homo sapiens
agatctcctaaaactgctatatagttctgcctcactcttacaaagattgatctcttgagagttttgtgctctactcccagatgkggtctttctggttctgaagcttttgcttcagtcaccctgaattttgccagccctatgcatgctataccttggattgccaacttgccctcactgaagccagtttctctggttagaatagttgccccaacccatgcctaatactctagtaaacaaggttctacctgggcttaggttaacttttgctcctttgggccctgtgttctaccagcattccatttatctgaaactctccgtcaccttaagaacttatctgttctttaatgatttgctgctgcttcctgggttcgaaagaacccagttc

SEQ ID NO: 571192 - DNA, 460 bp, Homo sapiens
atgcataggtcagggtcttagggagtgattcattctagcagaactccctggattttaaggcagatgttccatttattaattgacaaaggaggcatatttctcccctggtaacccaaagatttaggtcattttcccagagactccatttccactgtgagggttcttggaaaactaagcagaggatgaggaaaagtctgtgaacaagcttgctggtctctccctgtcctamaaaagagcatacctcttctgtaaccagaaggccgttttgattagtcaaggctggacagactgagattgggtgtgtgtgtgtgtgtgtgtttgtgtgtgtcttgagacagggtctcactctgtcacccaggctggagtgcagtggtgagatcagagctcactgcagcttccacttcctgggctcaagggatcctcctatttcagcctccagagtagctgggactatacgaat

SEQ ID NO: 571193 - DNA, 460 bp, Homo sapiens
atgcataggtcagggtcttagggagtgattcattctagcagaactccctggattttaaggcagatgttccatttattaattgacaaaggaggcatatttctcccctggtaacccaaagatttaggtcattttcccagagactccatttccactgtgagggttcttggaaaactaagcagaggatgaggaaaagtctgtgaacaagcttgctggtctctccctgtcctaaaaaagagcatacctcttctgtaaccagaaggccsttttgattagtcaaggctggacagactgagattgggtgtgtgtgtgtgtgtgtgtttgtgtgtgtcttgagacagggtctcactctgtcacccaggctggagtgcagtggtgagatcagagctcactgcagcttccacttcctgggctcaagggatcctcctatttcagcctccagagtagctgggactatacgaat

SEQ ID NO: 571194 - DNA, 460 bp, Homo sapiens
atgcataggtcagggtcttagggagtgattcattctagcagaactccctggattttaaggcagatgttccatttattaattgacaaaggaggcatatttctcccctggtaacccaaagatttaggtcattttcccagagactccatttccactgtgagggttcttggaaaactaagcagaggatgaggaaaagtctgtgaacaagcttgctggtctctccctgtcctaaaaaagagcatacctcttctgtaaccagaaggccgttttgattagtcaaggctggacagactgagattgggtgtgtgtgtgtgtgtgtgtttgtgtgtgtcttgagacagggtctcactctgtcacccaggctggagtgcagtggtgagatcagagctcactgcagcttccacttcctgggctcaagsgatcctcctatttcagcctccagagtagctgggactatacgaat

SEQ ID NO: 571195 - DNA, 393 bp, Homo sapiens
gattgaattattaagtaattttaaaaaacactactgcytttcccaatcctaccaagtaaaggatgctagataaaagaaatctcaagttaggccaggtgcagtggctcacacctatagttccaacagtttgagaggcagagatgggagtatgttttaaggccatgagtttgagagcagcctgggcaacacagcaagacctcctctctacaaaaataaaaaaaataaatttaataaaataaatatagccaggcatgacggtatgtacctatggccccagttactcatgtggctgagatgggcagatctcttgattctaggagtttgaggccagcttgggcaacatagcaagacttctctctctacaaaaatgaaaaaaatgcctgacatggtggt

SEQ ID NO: 571196 - DNA, 393 bp, Homo sapiens
gattgaattattaagtaattttaaaaaacactactgcctttcccaatcctaccaagtaaaggatgctagataaaagaaatctcaagttaggccaggtrcagtggctcacacctatagttccaacagtttgagaggcagagatgggagtatgttttaaggccatgagtttgagagcagcctgggcaacacagcaagacctcctctctacaaaaataaaaaaaataaatttaataaaataaatatagccaggcatgacggtatgtacctatggccccagttactcatgtggctgagatgggcagatctcttgattctaggagtttgaggccagcttgggcaacatagcaagacttctctctctacaaaaatgaaaaaaatgcctgacatggtggt

SEQ ID NO: 571197 - DNA, 393 bp, Homo sapiens
gattgaattattaagtaattttaaaaaacactactgcctttcccaatcctaccaagtaaaggatgctagataaaagaaatctcaagttaggccaggtgcagtggctcacacctatagttccaacagtttgagaggcagagatgggagtatgttttaaggccatgagtttgagagcagcctgggcaacacagcaagacctcctctctacaaaaataaaaaaaataaatttaataaaataaatatagccaggcatgacggtatgtacctatggccccagttactcatgtggctgagatgggcagatctcttgattctaggagtttgaggccagcttgggcaacatagcaagwcttctctctctacaaaaatgaaaaaaatgcctgacatggtggt

SEQ ID NO: 571198 - DNA, 354 bp, Homo sapiens
gggcaacatagccaaaacccccctccctagccccacccccaccccgtccctaccaaaaatacaaaacagcagggcatggtggtgggcgcctgtagtcccagctactcaggaggctgaggcaggagaatcacytgaacccaggaggcagacgttgcagtgagccaagaccacgccactgccagcctggatgacagagcaagactccacctcaaaaaaacaaaaacaaaaacacaaggttaagagggaccccagaccttacagatacaagtttaagagggacccctaagcaaaaaatgccaaccctttttctcccaatcattgaaacaccaggagggtttaatagttttgcagcct

SEQ ID NO: 571199 - DNA, 354 bp, Homo sapiens
gggcaacatagccaaaacccccctccctagccccacccccaccccgtccctaccaaaaatacaaaacagcagggcatggtggtgggcgcctgtagtcccagctactcaggaggctgaggcaggagaatcacttgaacccaggaggcagacrttgcagtgagccaagaccacgccactgccagcctggatgacagagcaagactccacctcaaaaaaacaaaaacaaaaacacaaggttaagagggaccccagaccttacagatacaagtttaagagggacccctaagcaaaaaatgccaaccctttttctcccaatcattgaaacaccaggagggtttaatagttttgcagcct

SEQ ID NO: 571200 - DNA, 354 bp, Homo sapiens
gggcaacatagccaaaacccccctccctagccccacccccaccccgtccctaccaaaaatacaaaacagcagggcatggtggtgggcgcctgtagtcccagctactcaggaggctgaggcaggagaatcacttgaacccaggaggcagacgttgcagtgagccaagaccacgccactgccagcctggatgacagagcaagactccacctcaaaaaaacaaaaacaaaaacacaaggttaagagggaccccmgaccttacagatacaagtttaagagggacccctaagcaaaaaatgccaaccctttttctcccaatcattgaaacaccaggagggtttaatagttttgcagcct

SEQ ID NO: 571201 - DNA, 414 bp, Homo sapiens
ggtctcgaactcctgacctcaggtgatctgtctgccttggcctcccaaagtgctgggattacaggcatgagccattgtgcctggccaaaattaatactttttatattaaatttacatatgtatacgttttttctttttgataccgggtctcacactgtcacccargctggagtacagtggcacaacctctgctcattgcagcctccacctgccaggctcaagcaattctcctgcctcagcctcccgagtagctgggattacaggtaagtgccaccacacccagctgatttttgtgtttttttgtagagacaaggtttcaccatgtttcccagactgttctcaaactcctgagctcaaagcagtccacccaccttggcctcccaaagtgctgggattacaggtgtgagccatctt

SEQ ID NO: 571202 - DNA, 414 bp, Homo sapiens
ggtctcgaactcctgacctcaggtgatctgtctgccttggcctcccaaagtgctgggattacaggcatgagccattgtgcctggccaaaattaatactttttatattaaatttacatatgtatacgttttttctttttgataccgggtctcacactgtcacccaagctggagtacagtggcacaacctctgctcaytgcagcctccacctgccaggctcaagcaattctcctgcctcagcctcccgagtagctgggattacaggtaagtgccaccacacccagctgatttttgtgtttttttgtagagacaaggtttcaccatgtttcccagactgttctcaaactcctgagctcaaagcagtccacccaccttggcctcccaaagtgctgggattacaggtgtgagccatctt

SEQ ID NO: 571203 - DNA, 414 bp, Homo sapiens
ggtctcgaactcctgacctcaggtgatctgtctgccttggcctcccaaagtgctgggattacaggcatgagccattgtgcctggccaaaattaatactttttatattaaatttacatatgtatacgttttttctttttgataccgggtctcacactgtcacccaagctggagtacagtggcacaacctctgctcattgcagcctccacctgccaggctcaagcaattctcctgcctcagcctcccgagtagctgggattacaggtaagtgccaccacacccagctgatttttgtgtttttttgtagagacraggtttcaccatgtttcccagactgttctcaaactcctgagctcaaagcagtccacccaccttggcctcccaaagtgctgggattacaggtgtgagccatctt

SEQ ID NO: 571204 - DNA, 414 bp, Homo sapiens
ggtctcgaactcctgacctcaggtgatctgtctgccttggcctcccaaagtgctgggattacaggcatgagccattgtgcctggccaaaattaatactttttatattaaatttacatatgtatacgttttttctttttgataccgggtctcacactgtcacccaagctggagtacagtggcacaacctctgctcattgcagcctccacctgccaggctcaagcaattctcctgcctcagcctcccgagtagctgggattacaggtaagtgccaccacacccagctgatttttgtgtttttttgtagagacaaggtttcrccatgtttcccagactgttctcaaactcctgagctcaaagcagtccacccaccttggcctcccaaagtgctgggattacaggtgtgagccatctt

SEQ ID NO: 571205 - DNA, 254 bp, Homo sapiens
ctgttaccaatcgggggttcccataactgtcttcttgggtttaataatttgctagaacagtttacggaactcagaaaaacagtttattttctttttttctgagagggtcttattttgttgcccaggctggtgtgcaatggtgcagtcatagctcattgcagccttgattgtctgggytccagtggttctcccacctcagcctccctagtagacatgcctgcaccaccacatctggctagtttcttttatttttt

SEQ ID NO: 571206 - DNA, 597 bp, Homo sapiens
catttgctccagatatatttcaagtgctcaacagccayatgtggcaagtggctgccattttgtgcagcacatatatgaagattttcatcattgtagaaaattgcattggacagtggagagaaaacatgattcatagaaaaactattgttatttaaatacagtgttctatattagtcagtgggataataccatatcatagttgaatggcaatagcaattctgtaagactcccaagctatatgtgatctaatttactgcttctcagtctttgctatgcattccaatcctgggtatcctgttaaatttatttcttctagtagttctgagatgggctgcctttctacatttctaacaagatcccaggtgatgctgatgctgctggatggtagatcacactttataaagcaaggggctagactctagatatgcactttttattaaatagtacagcagcctgtagccacatgtggctattaatctttgaaatgtgggtagtctgaattgtgatgttctgcaaatataaaatatgccacagatttctaagactgagcatggaaaagaaaatctccgtaattttttatattgatcgtatactgca

SEQ ID NO: 571207 - DNA, 597 bp, Homo sapiens
catttgctccagatatatttcaagtgctcaacagccatatgtggcaagtggctgccattttgtgcagcacatatatgaagattttcatcattgtagaaaattgcattggacagtgkagagaaaacatgattcatagaaaaactattgttatttaaatacagtgttctatattagtcagtgggataataccatatcatagttgaatggcaatagcaattctgtaagactcccaagctatatgtgatctaatttactgcttctcagtctttgctatgcattccaatcctgggtatcctgttaaatttatttcttctagtagttctgagatgggctgcctttctacatttctaacaagatcccaggtgatgctgatgctgctggatggtagatcacactttataaagcaaggggctagactctagatatgcactttttattaaatagtacagcagcctgtagccacatgtggctattaatctttgaaatgtgggtagtctgaattgtgatgttctgcaaatataaaatatgccacagatttctaagactgagcatggaaaagaaaatctccgtaattttttatattgatcgtatactgca

SEQ ID NO: 571208 - DNA, 597 bp, Homo sapiens
catttgctccagatatatttcaagtgctcaacagccatatgtggcaagtggctgccattttgtgcagcacatatatgaagattttcatcattgtagaaaattgcattggacagtggagagaaaacatgattcatagaaaaactattgttatttaaatacagtgttctatattagtcagtgggataataccatatcatagttgaatggcaatagcaattctgtaagactcccaagctatatgtgatctaatttactgcttctcagtctttgctatgcattccaatcctgggtatcctgttaaatttatttcttctagtagttctgagatgggctgcctttctacatttctaacaagatcccaggtgatgctgatgctgctggatggtagatcacactttataaagcaaggggctagactctagatatgcactttttattaaatagtacagcagcctgtagccacatgtggctattaatctttgaaatgtgggtagtctgaattgtgatgttctgcaaayataaaatatgccacagatttctaagactgagcatggaaaagaaaatctccgtaattttttatattgatcgtatactgca

SEQ ID NO: 571209 - DNA, 556 bp, Homo sapiens
aaagtgtccttgtttatgcttgcgagtgcttgtatgctgaaaggaagaattatatattgataataaatgtaaacagcaactacaaatggctcataatttctaagatcctctttttagaactgcagattttgaaatgcttggtcttatgttaagcgccaactttacctcagacacgggtcatgggtaactaagggttgggcagacaatcaaactcttcaatttctctcttattggtctcttttcctcctcaggtcctctttcaaattgctgcaaaattttctattcccaaacacacccttagaacacactctgcttaaaggagtataaagtctccatgttgcccttggatttcaccagctcagcggtgaggccaatagcacacagtcctcccagccttccatccccacactgtgcactctgttcttcagccagagggaactttatgtgggctctttgatgccaacaggtttgggcawattcttttcctttattttaaaatatactctcttacctattttattttaaataacagctgtattaaaatataattcacata

SEQ ID NO: 571210 - DNA, 617 bp, Homo sapiens
cacagtatctggaaagttttctctagtaraaatttattgttttggggcttgatggcttttgtgggtttataacaacccatgaaacaacaatggcaatcctctaacaacaacggcatcttcagtggtgtaaccctcccagactttcatgatgttctccctgtagaggttctcttccatagcattgacaatcccctccatagagtatcatgtgcaataaaccttaagaatcgtaggaccccctgatctagaggctgtattagagaagtgtttaggggcaagtagacaacttttatatcttcagtgttgaactcatggggttctggttggttaaggacattgttcaatatgaacaaaactttaggaagtttttccttaatggaaagttacttcctgatttcagggaaaaagaaataattgaaccaatcagaacaagcattctcgttgtccagatgtttttgttgtacagtcataaacttgaagctggtgtttatcttttctctaccaggctcatgggttagcagctttatataacagatgtgggtcgtcctgatcatcaacctgtctttgcacaaaacactagagttagcctatcccttccttccttaaatcctgctgat

SEQ ID NO: 571211 - DNA, 486 bp, Homo sapiens
cccaggttcaagcaattcttctgcctcagcctcctgagtagttgggactacaggtgcacgccaccatgcctggctaatttttgtattkttagtagagatggggtttcatcatgttggccaggctggtcttgaaatcttgacctcagtgatctgcctgccttggcctcccaaagtggtgggattacaggtatgagccaccatgcccagcctgttaatttggatttttttagaagccacattaaaataacctcaaatttaattttagtaatatattttgtttgtcctaatgcatcccaaatataatcatttgggacgattataatcaaagtaatcacgttaaaaattaagatattttataatcttaaatattttataaaataattgagacttataatctcttttcatactaaatctttgaaacctcatgtatattttatatttatagcagatttcaatttggagtggctagtgaccaccatattgaac

SEQ ID NO: 571212 - DNA, 486 bp, Homo sapiens
cccaggttcaagcaattcttctgcctcagcctcctgagtagttgggactacaggtgcacgccaccatgcctggctaatttttgtatttttagtagagayggggtttcatcatgttggccaggctggtcttgaaatcttgacctcagtgatctgcctgccttggcctcccaaagtggtgggattacaggtatgagccaccatgcccagcctgttaatttggatttttttagaagccacattaaaataacctcaaatttaattttagtaatatattttgtttgtcctaatgcatcccaaatataatcatttgggacgattataatcaaagtaatcacgttaaaaattaagatattttataatcttaaatattttataaaataattgagacttataatctcttttcatactaaatctttgaaacctcatgtatattttatatttatagcagatttcaatttggagtggctagtgaccaccatattgaac

SEQ ID NO: 571213 - DNA, 597 bp, Homo sapiens
aatagcaaaaaaactaacaacccagttaaaaatgggctaaagacttgagaagacgtttctctaaagaagacatacaaatggccagcaggcacgtgaaaagatgcccaacgtcactaatcatcagagaaacacaaatcaaaaccctgatgagataccaccttacacctctcatratgtttactatgaaaatacaaaacatgacaaatgtctgtgagaatgcagagaaattaaaacccctgcatggcgttggtaagaatgcaaaatggtatagatgctatgaaaaaaacagtatggaggttcctcaaaaaattaaaaataaaactactgcatgatccaacaattctatttcaaaatatttacgcaaaaaaattgaaaccagaatctccaagagacatcactcccacgttcagttacagcattattcacaatagccaagatatgaacccaacctaaacagccactgatagatggatcaataaaatgtagtctatacatacaatgaaatattattcagtcttaaaaaaagaaattctgcgatatgcaacaacatgggtgaaccttaaggactttatgttaggtgaaatcagctttttattt

SEQ ID NO: 571214 - DNA, 597 bp, Homo sapiens
aatagcaaaaaaactaacaacccagttaaaaatgggctaaagacttgagaagacgtttctctaaagaagacatacaaatggccagcaggcacgtgaaaagatgcccaacgtcactaatcatcagagaaacacaaatcaaaaccctgatgagataccaccttacacctctcatgatgtttactatgaaaatacaaaacatgacaaatgtctgtgagaatgcagagaaattaaaacccctgcatggcgttggtaagaatgcaaaatggtatagatgctatgaaaaaaacagtatggaggttcctcaaaaaattaaaaataaaactactgcatgatccaacaattctatttcaaaatatttacrcaaaaaaattgaaaccagaatctccaagagacatcactcccacgttcagttacagcattattcacaatagccaagatatgaacccaacctaaacagccactgatagatggatcaataaaatgtagtctatacatacaatgaaatattattcagtcttaaaaaaagaaattctgcgatatgcaacaacatgggtgaaccttaaggactttatgttaggtgaaatcagctttttattt

SEQ ID NO: 571215 - DNA, 600 bp, Homo sapiens
attttctgaaatatgatactgtacagcaaaaaataactgttcattgtccttatccttgaatgtcaatttggctgctgtaacatgttgaggtcatacttgctttctctgaggctgttgtatgagtggctccataaaatgtgaccgtggagaagtctgaggactgctggttacygccctattattaggttctctaaaatttagatgggatgctcaaaagagtcttacctttaatgtctaataactattaggctattcatagctttgtgccaacttttcctgggatacaaggctatattatctgtacacatatcttttttctgatctatttgcttggttttcttttgggggggatatcaaagtatatacatttgtctcctttgccttctgcagtgctcatttgatcttttatcctgggactttttgtttatttccattttccactgctgtttttctcaatcctgtcctccaggtttcttactgcactctcatagtgctgattttctctgtctgcttccacgtagacctggtttctgtgatggattcagtgacctctcctacgtatgtcctcaattctgctaagtcacgtttcatctctctttc

SEQ ID NO: 571216 - DNA, 591 bp, Homo sapiens
ttggaataccagggagcatactgcaaaactggatagggaatcacaacagtgacacctgggttctgaaacaaagctatgctcttttcagtgagccttttataataaaaaataactgcttgctgctgatagtcctctagagatcagaaacatgagcacaggacatgagtaaacagtagcctctgatctgtactgctcatcatgaccttggtgttatctgatgcatcaactcataaaacttggaatgcccaacagtttctctttaccaagtagaagtaatatatgcaagattcggcttgagaaggtcataaaaacacaagaattttacatgagcagatggatccatttcccaatgtgcctgccacataagccatatttcctaaatccacacatagggccttagagaaaattctctatggctggggagaaaatcattcaagccttgtttgcagatggcactttattaaatgttggtatgagtggcaagtgtattgctatagtcattatagccccacttgtgagtagccttggatgataytgaaaaacggagaaattccattgaacagaacttatttttaaatcaactttattaag

SEQ ID NO: 571217 - DNA, 521 bp, Homo sapiens
tgctaaccaggatttcctaaaataactttatctcagaaatagagaaactgttcatgaaatggaggatttgccaatggaggtaaaagttcctgttcaaagattattaaaggcttgatttcacatgtgtgatatgtrtcacgtcatgacaaatttcagatgcttacttcctgggaagctttcaaagttgaggcaacagaagacataagctaatagcacaaaataaattatattaaattttccttaaacatgaatagaaagacagaggagcagtggaacaagagacttcttttcttttttgattttgagccaccttgccttgcctcttgtctacttctaaagggagtacctggccagtgacacaatatttttcagatttactgttctgttattttattttattttattttattttattttattttattttattttattttattttactttacattctgggatacaagtgcagaaagtgtaggtttgttacataggtatacatttgccatggtggtttgccgcac

SEQ ID NO: 571218 - DNA, 521 bp, Homo sapiens
tgctaaccaggatttcctaaaataactttatctcagaaatagagaaactgttcatgaaatggaggatttgccaatggaggtaaaagttcctgttcaaagattattaaaggcttgatttcacatgtgtgatatgtgtcaygtcatgacaaatttcagatgcttacttcctgggaagctttcaaagttgaggcaacagaagacataagctaatagcacaaaataaattatattaaattttccttaaacatgaatagaaagacagaggagcagtggaacaagagacttcttttcttttttgattttgagccaccttgccttgcctcttgtctacttctaaagggagtacctggccagtgacacaatatttttcagatttactgttctgttattttattttattttattttattttattttattttattttattttattttattttactttacattctgggatacaagtgcagaaagtgtaggtttgttacataggtatacatttgccatggtggtttgccgcac

SEQ ID NO: 571219 - DNA, 610 bp, Homo sapiens
aaatacagcatgttctcatgtataagtgggagctaaatattgagtactcatggacataaaaatggcaacatagtaggttttaatttatcctcataatcaccaaaatattactttctcattgtacrgataagtttacaagattgaaataacatgaggacttattcagctttccaatttgtaaagcattaagtgacaaccctagatagaagctcatgacatctaatttagccctaataccacagtgttaatttaaaattggacttgccttaggcatggctcacctggattctcaaagattattttacaaaaaaaattttatagctacattatttctcattctccagcaaacatttaatatacagaaatttttaaaaattaattaactttgcagataataatcaataaccgattatatgtaaaatacttcatattatttttactgtgtaaccaaaattagttctaaaagcaagtaatagtttatccaatataacacagagcgctgaggatcagaaacactaagcactattttaatttgttaaataaaattattgtaaacttaaaagtgagaaaaagcagtggtaactgccccctgagatggtatattgtcaac

SEQ ID NO: 571220 - DNA, 632 bp, Homo sapiens
tcatgtttttacattcctttttatctctcccctttctctttcaaaattgcttcatcagttgtgatcttctccagtttatatcatttacatattgttcagtcaccagaggttcaaaggttgctttagtcttattcctaaaatgaaactaaatcaatatgcagtgcccgtcgtccttctgtttttttattttttttaacttttattataagttcaggtacaggtgcaagatgtgctggtttgttagataggtagatgtgtaccatggtgtttaaccacacagatcatcccatcatccaggtattaagcccagtattcattagctattcttcctgatgttcttccttcccctaacctcccacaggtgcccastgtgtgctgctcctcgcatgtgttctcattgttcagctcccacttataaatgagaccatgcagggttaggttttctcttcctacattagtttgctgaggataatggcttccaactgcacccatgtccctgaaaaggacatgatctcattcctttctattgagcgtaatcctccatcgtgtatatataccacatattcttcatccagtctgtcattgataggcatttgggttgattccatgtcttttctattgtgaatagtgct

SEQ ID NO: 571221 - DNA, 493 bp, Homo sapiens
gtactatacaaaagacattagcaattcttcaagtttctttcctaatttgaagtagacacatcttaggagagaacacagacaatagaattgtccaagtaaacttaagggtacttctgttattactacatttattaccctaaagagaagaataaatatgttcctttcctcataatttgaaaatataagaacatgggcacttcatgaattgtgtagtgtcttgaacttggattttcaaaagtgttgtatgattcaatagtttttatttacaatgataacataagtaaagaaaagtagtaaaatgatttcaaaatcagtttctctcaactataaggaggtggttgatggccatgtatttctcatcaaagacagtgacatcaggcttttatacaaaagacaggygataagaaatgctaccaaggatgtggagaaaagggaaccctcatacactgttggtgggaatgtaaattagtacagcctctatggagaacagtat

SEQ ID NO: 571222 - DNA, 620 bp, Homo sapiens
cttttttatggctgcatagcattccatggtgtatrtatgccacattttctttatccagtctatccctatggtaacttttctgacacctgcttaaagcccaaaaggtctgaaggattgtgaagccctgttttcacggtctgtattcatactgaaaatcaggatcaaatgagcttttgcccttctgttccactggaggtttctgtgctccctgagctcaccttaggacacttgcgttactgtttgacagtgtactgccccagttaaactctccacctggcactgtccctggagcgggttgtgcctgggtggcgtgcagccaggtgtttggtgccagatgcaagagccccttggggcttgcccccccacccccacctcaccgggtcagtgaaaaaacgataagttctacatgatctaggccttctctacctctctgacctcctttgccctttgttcactctcttgcagccacatcatactctaacgtgcccagcacagtcctagtctagggcatttgcatctgctcttcctgctacctgaaatgttcttctccaaagctggtcacattgttcactccttcacttcatttgggtctacacaaatggtaccttcccagagagttt

SEQ ID NO: 571223 - DNA, 620 bp, Homo sapiens
cttttttatggctgcatagcattccatggtgtatgtatgccacattttctttatccagtctatccctatggtaacttttctgacacctgcttaaagcccaaaaggtctgaaggattgtgaagccctgttttcacggtctgtattcatactgaaaatcaggatcaaatgagcttttgcccttctgttccactggaggtttctgtgctccctgagctcaccttaggacacttgcgttactgtttgacagtgtactgycccagttaaactctccacctggcactgtccctggagcgggttgtgcctgggtggcgtgcagccaggtgtttggtgccagatgcaagagccccttggggcttgcccccccacccccacctcaccgggtcagtgaaaaaacgataagttctacatgatctaggccttctctacctctctgacctcctttgccctttgttcactctcttgcagccacatcatactctaacgtgcccagcacagtcctagtctagggcatttgcatctgctcttcctgctacctgaaatgttcttctccaaagctggtcacattgttcactccttcacttcatttgggtctacacaaatggtaccttcccagagagttt

SEQ ID NO: 571224 - DNA, 620 bp, Homo sapiens
cttttttatggctgcatagcattccatggtgtatgtatgccacattttctttatccagtctatccctatggtaacttttctgacacctgcttaaagcccaaaaggtctgaaggattgtgaagccctgttttcacggtctgtattcatactgaaaatcaggatcaaatgagcttttgcccttctgttccactggaggtttctgtgctccctgagctcaccttaggacacttgcgttactgtttgacagtgtactgccccagttaaactctccacctggcactgtccctggagcgggttgtgcctgggtggcgtgcagccaggtgtttggtgccagatgcaagagccccttggggcttgcccccccacccccacctcaccrggtcagtgaaaaaacgataagttctacatgatctaggccttctctacctctctgacctcctttgccctttgttcactctcttgcagccacatcatactctaacgtgcccagcacagtcctagtctagggcatttgcatctgctcttcctgctacctgaaatgttcttctccaaagctggtcacattgttcactccttcacttcatttgggtctacacaaatggtaccttcccagagagttt

SEQ ID NO: 571225 - DNA, 620 bp, Homo sapiens
cttttttatggctgcatagcattccatggtgtatgtatgccacattttctttatccagtctatccctatggtaacttttctgacacctgcttaaagcccaaaaggtctgaaggattgtgaagccctgttttcacggtctgtattcatactgaaaatcaggatcaaatgagcttttgcccttctgttccactggaggtttctgtgctccctgagctcaccttaggacacttgcgttactgtttgacagtgtactgccccagttaaactctccacctggcactgtccctggagcgggttgtgcctgggtggcgtgcagccaggtgtttggtgccagatgcaagagccccttggggcttgcccccccacccccacctcaccgggtcagtgaaaaaacgataagttctacatgatctaggccttctctacctctctgacctcctttgccctttgttcactctcttgcagccacatcatactctaacgtgcccmgcacagtcctagtctagggcatttgcatctgctcttcctgctacctgaaatgttcttctccaaagctggtcacattgttcactccttcacttcatttgggtctacacaaatggtaccttcccagagagttt

SEQ ID NO: 571226 - DNA, 603 bp, Homo sapiens
actttcttgggttattgtaaatactagacatagggatatacaatgccattcttgcaattctcatatcttcctctctaaattttctttttttgtgtcattgttcccatcaatcttctagyccccaggacagagaataggcattcttgtcttcctatccctctccctcctaatcagctatagaagctggggaactttcctttatcctcctgggcagctaggctatagatcccagccttctagcagttagatgaacgagttctggccaacaaaatgtaggtaaaagaggtgtttttatcttctggcctgcagcagaagctcttttgcaaccttccattctgtctgtctgccctcatttgctggtcatatgcagaggatctcactgaggactatgtggattgtgttggagccacaaggcagaaggagtctgggccctgaatgactgcatggatcaagcctctctattcactcacatggtcctgtgatatgagtgagaaataaacctttactgtgttaagccagttagatttgtggttgtttgttacagcaattagtctgtgcagatgaatccaccaacaatttagaagtcctctcagagatagccaa

SEQ ID NO: 571227 - DNA, 499 bp, Homo sapiens
ttcacatccctgaagtaggaactggagctctgtaccaggcacttcttgtatttcctcttttcctcatctggagagggatgaaggagatttttttgtaggaggtatgttcacatggggaggtcagaactaccagaaaggcattttttttttttttcaaataatggccatccttattggggtaaagtggtatctcattatgggttgacctgtatttccctagtgactagtgatggtgagcatcttttcatgtgcttattagccatttatatattttctttgaagaaatgtctattcaaattatttgcctactttttaatcatttttttgttgttaagctgtaggagttctttatatattctggatatgaagccattatcaaatatgtaattwtctcccattctgtgggttgtcttttaactctcttgaaagtgtctagactgggcacagtggctcacgcctgtaatcctagcactttgggaagccaaggcaggtggatcac

SEQ ID NO: 571228 - DNA, 527 bp, Homo sapiens
tgttataatcacaaacacatagatacatactactatattcatatttattatttgtatgtgtattcatgctcttcagtgaaattttctaayattataagctcttgaaatcactctcactgcacccataagcacacaatgaagtagtttacataaactacatagtataggtcctttccagaaagaaaaaaagaaaaaactcttggcctactggatagaaaagttacaaattatccatccaaagcacagatcataaacctgaccccctttttagatttttattaggactgaaataattgatactgacagaacaaagagaagattgttacaaccataaaaatcattttgctgctactaatataactgaatcctacgtctaatggattatgtggccaggccagcctcataacatcatctagtaactaactctgtccatatgctggcgttcaatggccaaaggccccatttaattaagaagatggatttatatgcactaataattcaggttaaagctttgagaccatagtatt

SEQ ID NO: 571229 - DNA, 442 bp, Homo sapiens
agacccccatctcaaaaaaaatgaagaaagaaaggtggaagggagggaagggggaggaagctgtgacccatcmggtgagtttggaaagtggtttctcaaccagtttattgatttcaattcacttagatgctaaataaaagtgttatgtttttgtttttggacaagtttattctttggggacacacttttcccttttaaaattccatttccttttcaaaacacaagatttttccagacaacgtttgttttcatgggatcccagcactctggggagtctctctctttcctccatccagctgcctcctgcccttccttgggccttggcttagatgtcaccttctctttggagacctgccccaactccaagtcttggctagcttgccatctgtgttggctttacaatgtgtcagtgcggcaaggcagaactgcattttccagaatt

SEQ ID NO: 571230 - DNA, 651 bp, Homo sapiens
ccaaaaatatttattttgcaggaggttttatggccatttcattttgagaactcaagtcttggattggaactgaggatatgtaataaaacctcaaatagatataaatgtaaatttgtgtacgtatatatttaggtgcacatatacatgtgttcgtgcgcacatgggtgtacgcacgcacacacacatacacacatttttctttactctgtccagtgagagtttctyggaacactgacattgttaataggaactggtacacctagtcctagatcttggattctaagcactactttccaataaaaggaattagggacttttgtggaaatcaaccaccagttccaaagctggggctggagatgcacaagatagtcctagaatatatttttatgtcagaaatcaaggaagctctcaaagaatgaagggacatgccaaggggatatactggccaaatgtgaagtaatttggacatcaaaataaataataattgtttttaacccataaagtaaaatccataaatccacactgaagatgaatgtggaataataaataaataaataaacaaataagaaaaggagaaagtttttctttgcagtaggaagtcagtaataaatacggaggcatgatatgttcagaaaatcaccatttgacaac

SEQ ID NO: 571231 - DNA, 651 bp, Homo sapiens
ccaaaaatatttattttgcaggaggttttatggccatttcattttgagaactcaagtcttggattggaactgaggatatgtaataaaacctcaaatagatataaatgtaaatttgtgtacgtatatatttaggtgcacatatacatgtgttcgtgcgcacatgggtgtacgcacgcacacacacatacacacatttttctttactctgtccagtgagagtttcttggaacactgacattgttaataggaactggtacacctagtcctagatcttggattctaagcactactttccaataaaaggaattagggacttttgtggaaatcaaccaccagttccaaagctggggctggagatgcacaagatagtcctagaatatatttttatgtcagaaatcaaggaagctctcaaagaatgaagggacatgccaaggggatatactggccaaatgtgaagtaatttggacatcaaaataaataataattgtttttaacccataaagtaaaatccrtaaatccacactgaagatgaatgtggaataataaataaataaataaacaaataagaaaaggagaaagtttttctttgcagtaggaagtcagtaataaatacggaggcatgatatgttcagaaaatcaccatttgacaac

SEQ ID NO: 571232 - DNA, 495 bp, Homo sapiens
atacagggtttacattacaacaggcactcaaaatcaaagccaaagcatcccactgaacctacaacatgtatatataggccgaggggggcaaatcacctgaggtcagtagttcaagaccagccttgccaacatggtgaaagcttgtctctactaaaaatacaagaatttgctgggcatggtggcacatgcttgtattcccagatactcgggaggctgaggcaggagaatcgcttgaactcrggaggcagaggttgcagtgagctgagattgcaccacagcactccagcctgggcaacagagtgaaactctgtcttgaaacaaaacaaaacaaaatagaaagaagtaactgctacaccatatgcacagatatccatggacggacacagaaaacatgaaaaagcaaggaaatgtgacactgccaaaggatcacaacaactgtgcagcagcagatcctaatcaaaaggagttcctcaaaatgccaaaagaagacattta

SEQ ID NO: 571233 - DNA, 495 bp, Homo sapiens
atacagggtttacattacaacaggcactcaaaatcaaagccaaagcatcccactgaacctacaacatgtatatataggccgaggggggcaaatcacctgaggtcagtagttcaagaccagccttgccaacatggtgaaagcttgtctctactaaaaatacaagaatttgctgggcatggtggcacatgcttgtattcccagatactcgggaggctgaggcaggagaatcgcttgaactcgggaggcagaggttgcagtgagctgagattgcaccacagmactccagcctgggcaacagagtgaaactctgtcttgaaacaaaacaaaacaaaatagaaagaagtaactgctacaccatatgcacagatatccatggacggacacagaaaacatgaaaaagcaaggaaatgtgacactgccaaaggatcacaacaactgtgcagcagcagatcctaatcaaaaggagttcctcaaaatgccaaaagaagacattta

SEQ ID NO: 571234 - DNA, 584 bp, Homo sapiens
tgtactaaatagggaaaaactgaaagcctttcctctaagatctggaacatgacaaggatatctattgtcaccactgttattcaacatggtaattatgtcttagctagagcaattagacaaaagaaaggtgcaaagggcatccaaattggaaagaaagaaatcaaattatcctcgtttgctgatgatatgatcttaaaaaacctaaagactccataagaaaattattagaactgacacaaaaatagtaaagctgcaggataccaatttaacatacaaaaatcagtagcatttttatatgccaacagtaaacaatgtgaaaaagaaattaaaaaacaattccatttacaataggcataaataaaattaaatatctaggaattaaccaaagaagtaaaagttctctataatgaaaatttttaagcactggcaaaagaaactgaagaggacaccaaagaatggaaagatattccatgttcatagattggaaaaattaatatggttaaaatgtccrtaataccccaaaatagtctagagattcaatctctattcaaaatacctatgacatgtttcacagaaatacaaat

SEQ ID NO: 571235 - DNA, 586 bp, Homo sapiens
atactatgatggtctttaactcacatatcttttctgtgcataaaatttcttattttcttgtctgtaaagtaaaagaaaatgtcaataaagaagagaaaatcactttaagaacatttaagattttattagtatgaaaattgaggatcttagaaattcactgtatacctgaggaaatgaaagttgttagagatagagtgatttgcctataattactcaaggagacataaaggctacattgtctttgacagtggagaagaatccaggcccaaacctgtgtgtgtaagtacattaataactgcttttttatagaaataaatttctccattatttgtcaaaaataatgttgtgataagataaaattaggtcataattctcacaaaatatgatagtcataaatgctatcaaatattgtgatacttttgtttgatgcaggattataatttactaccccagaagttagttgtgcttcaatgaataaaacatggatgaaaacatgttctttgtacacttttggctgacagcattgaccctgggcatagtttaccacgtgtatttcttctgayttcagcaagtacccaagccgaga

SEQ ID NO: 571236 - DNA, 450 bp, Homo sapiens
ttacaatagctacaaataaagttaaataaccttgcatttaacttaatcaaataagtgaacaatctctataataaaaactataatgatggaagaaatggaacaggacaaaaaaaaaaggaaagatattctatgtcaatgggctagaagaatcaatattgctaaaatattcatactacccaaagcaggttacgagtcaagacaatccctagcaaaataacaatgacattcttcgcagaaatagaaaaattaatcctgaaatttttaaagaaccagaaaagaccyggaatagtcaatactatcctgagcaaaaagtacaaaactggggccaggcacagtggctaatgcctgtaatcccagtcctttgggagtcaaaggcaggaggattgcttgaggctaggagttcaagagcagcctaggcaacaaagtgataacccatcgctacaaaataaa

SEQ ID NO: 571237 - DNA, 450 bp, Homo sapiens
ttacaatagctacaaataaagttaaataaccttgcatttaacttaatcaaataagtgaacaatctctataataaaaactataatgatggaagaaatggaacaggacaaaaaaaaaaggaaagatattctatgtcaatgggctagaagaatcaatattgctaaaatattcatactacccaaagcaggttacgagtcaagacaatccctagcaaaataacaatgacattcttcgcagaaatagaaaaattaatcctgaaatttttaaagaaccagaaaagacctggaatagtcaatactatcctgagcaaaaagtacaaaactggggccaggcacagtggctaatgcctgtaatcccagtcctttgggagtcaaaggcaggaggattgcttgargctaggagttcaagagcagcctaggcaacaaagtgataacccatcgctacaaaataaa

SEQ ID NO: 571238 - DNA, 525 bp, Homo sapiens
agttgggaagaaggggaccttgacccttacctcacatcatacacaaagattaactaaaaataaatcatagacctaaatgtactagctgaaactataaaatttctaaaataaaacataggagagaatctttgccaccctggggtagaaacagaggacacaaaaagtatgaaccataaaagaaacatttcataaatcagacttcataaaatttaaagtatcagctcttccaaaggcaacgttaagaaaatgaaaaagcaagccacagattaagaaaaagtattcacaacatatatacgttaaagcaaactaaatatggcctgagaaggactccatacttctacatttgtgtccttgtggatgaactgtaacctagcttcataggcagacaaaactgaaaacctaacttagtagtatgcacctgtaacaatagctaagtmttggccagtcccagcggccagacttcaaccattcattcactgctgtgtgttcaaactgtgttccaataaggcacaggctgaactgtaa

SEQ ID NO: 571239 - DNA, 580 bp, Homo sapiens
tcctccagaagtatttaaatacaaataattgattcctgttgtcaagaagctctaccagcctcagtggctcacacctctaatcccagcattttagaaggccaaggcaggaggattacttgggctcaggagttcaagaccagcatgggcaacataatgagaccttgtctctacaaataataataataataatgataaaataaccagatgtggtggtgcaaacctgtggtcccagctactcrggaggctgaggcagaagaactgctggagccgaggctatagtgagtcaagattgcaccactacattccagcctggctgacagagcaagaccctgtcaaaaataaataaataaataaaaactgctcaaactagaacaagcagaggagacactttggttctcacactaactcattctatctcactctggaaccaggcaaagccacttggaattttgccagtatttccttcaactataaagtgaacgtagttgagttagtagttatctaaggttattcttagctcctaaactttatgttttccttgctgtgggctatcataatatcactgaggtgatggctccac

SEQ ID NO: 571240 - DNA, 580 bp, Homo sapiens
tcctccagaagtatttaaatacaaataattgattcctgttgtcaagaagctctaccagcctcagtggctcacacctctaatcccagcattttagaaggccaaggcaggaggattacttgggctcaggagttcaagaccagcatgggcaacataatgagaccttgtctctacaaataataataataataatgataaaataaccagatgtggtggtgcaaacctgtggtcccagctactcaggaggctgaggcagaagaactgctggagccgaggctatagtgagtcaagattgcaccactacattccagcctggctgacagagcaagaccctgtcaaaaataaataaataaataaaaactgctcaaactagaacaagcagaggagacactttggttctcacactaactcattctatctcactctggaaccaggcaaagccacttggaattttgccagtatttccttcaactataaagtgaacgtagttgagttagtagttatctaaggttaytcttagctcctaaactttatgttttccttgctgtgggctatcataatatcactgaggtgatggctccac

SEQ ID NO: 571241 - DNA, 543 bp, Homo sapiens
ctcacttcaaccccctatgattccatctccaacctgaccaatcagcactccccacttcccaagcccctacccaccaaattatctttaaaaactctgatccccgaatgctcggggagactgacttgagtaataataaaactccggtctcccgcacagccggctctgtgtgaattactctttctccattgcrattcccctgtcttgataaatcggttctgtctaggcagagggcaaggtgaacccactgggtgattacattactactctccctagacaactgactgactctttggatggctgtatactaatagctaacattataagaaaaaggaaaaatccttacttaaacaaaaaaataggaccaggaaacaaaggaaagtaaagatgaataattaaatattatatatatgggaaaacaatctttaaaaaatgtatgcttttatataaatatatatttatatacatttattacaatcttattgatataaaaggtgttcagcaaaccatttagaaataatagtaaaatatatgacatcacttaaa

SEQ ID NO: 571242 - DNA, 543 bp, Homo sapiens
ctcacttcaaccccctatgattccatctccaacctgaccaatcagcactccccacttcccaagcccctacccaccaaattatctttaaaaactctgatccccgaatgctcggggagactgacttgagtaataataaaactccggtctcccgcacagccggctctgtgtgaattactctttctccattgcaattcccstgtcttgataaatcggttctgtctaggcagagggcaaggtgaacccactgggtgattacattactactctccctagacaactgactgactctttggatggctgtatactaatagctaacattataagaaaaaggaaaaatccttacttaaacaaaaaaataggaccaggaaacaaaggaaagtaaagatgaataattaaatattatatatatgggaaaacaatctttaaaaaatgtatgcttttatataaatatatatttatatacatttattacaatcttattgatataaaaggtgttcagcaaaccatttagaaataatagtaaaatatatgacatcacttaaa

SEQ ID NO: 571243 - DNA, 578 bp, Homo sapiens
tcattttctgttaattcttcctttaatacagaaaaaataaaatataatttcttccttcaatacagaaaaaaataaaatctagcagagccagaatcyttccctagtacctcctcaataatgaaccactttgaaagtctgatgtattttctatttgggtgtcaggctatattagctcaaaatctgaatataagagcaattgtgctaggtcacactcagatgtaatccaactcttatccagtaaaaatggaaattccctaggtgtgctaataattacaatatttgaggtaaattagcaggaattcttgcatacatggtactaattatcttttactagcaaacatcttgactggttttcaagttttataattgtattttctataggcatagcactatatattttttcaaagtgttttagcatacataattcttggggtaagcttgtaagcagctaaggcacttattatcctatttttctggtgagtacatggaaacccaaggaagagatatgacttcacttactcaagattatttagagacatgacagcaacattagttcttttgacttactgttcaagtgc

SEQ ID NO: 571244 - DNA, 539 bp, Homo sapiens
aaatcagcaagaaaaaaattaaataatcccatcaaaaagtgggctaatgatatacatagacatttttcaaaagaaagtatacaaatggccagcaaacatatttaaaaatgctcaacatcaataatcatcagggaaatgcaaattaaaaccacaatgaaatacgaccttactcctgaaagaatggccattattaaaaagtcaagaaacaayagatgttggcacggatgtgaggaaaagggaatgcttatacattgttggtgagaatgcaaattagtacagcatctgtggaaaacagtatggacattttttaaggagctaaaagtagatctaccattcaattcagcaacccaactactgtgtatctacccaaaggagaataagtcatagatgaaaaagacacaagcacatgtatgtttattgtggtccaattcacaattgcaaagatatggaaccaacttaaatgtccatgtcctttgcagcaacttggttggagctgaagaccattattctaagtgaagtaattcagaaatggaaaatca

SEQ ID NO: 571245 - DNA, 606 bp, Homo sapiens
ttggccaaaatgctgatggtgatatgagcaatgaaatccaggttgaggtggtctcagatgaagatgaggaacttgttgggaactggaataaaggttactcttgctatgctttagtagagacaggaggcattttgtccctgccctagagatctgtggaactttgaacttgaaagagattatttagggtatgagtgggagaaatttctaagcagcaaagtgttcaagaaatgatgtgagtgctcttaaaagcatttagtttttttttcttttttattatgctttaagttctagggtacatgtacaaatgtgcaggtttkttacatatgcatacatgtgccatgttggtgtgctgcacccattaactcgtcatttacgttaggtatttctcctaatgctatccctcccccaaccccacctcatgacaggccccggtgttgtgttcctcaccctgtgtccaggtgttctcattgttcatttcccacctatgagtgagaacatgcggtgttttgttttctgttcttgcgacagtttactcagaatgatggtttccagcttcatccatgttcctacaaaggacataaattcatccttttttatggttccata

SEQ ID NO: 571246 - DNA, 386 bp, Homo sapiens
gtttctgtaacttcaaaaggaagttagcattttccttgcagaggtgctgaggattgaatgagagaatacctggaaagcattaggcatgtagcacacttagcagatggtggttggctccctctgcttttccaccagtctgtggcctacagtttaaatggtgggaagaaggacatgagatytgaggctggggaaggaggtatggggttctaggcaagggaggaagcctcttaggcctggagcaagggagcagggtcctgggcaggtgacagagccccacagtgccctagctaccctattaatgggcccagaacctggaagccagccaccatgtgccctcatgcccagggtcttcctgcaggtggagatgaagagccaagagtctcaga

SEQ ID NO: 571247 - DNA, 386 bp, Homo sapiens
gtttctgtaacttcaaaaggaagttagcattttccttgcagaggtgctgaggattgaatgagagaatacctggaaagcattaggcatgtagcacacttagcagatggtggttggctccctctgcttttccaccagtctgtggcctacagtttaaatggtgggaagaaggacatgagatctgaggctggggaaggaggtatggggttctaggcaagggaggaagcctcttaggcctggagcaagggagcagggtcctgggcaggtgacagagccccacagtgccctmgctaccctattaatgggcccagaacctggaagccagccaccatgtgccctcatgcccagggtcttcctgcaggtggagatgaagagccaagagtctcaga

SEQ ID NO: 571248 - DNA, 534 bp, Homo sapiens
ttcctgtaaacagaatgtataatggaaatacggaaactgcctaaagtgggattattcactgctactgtgatgctactgtaatgtaataaattattaaattgttgcaaagtgctgtttttgccttaaaattttatgtgtcttgaaaactatagtattaagagtattgagactgtgaaaatgctggggacagttggcatgagataatcagtttttatttttatgaaattgtaatgtaactatgcaagtgtgtttattaaaggaacaaactaaaaagaagttacgggaattttaaaaagttgtgggatgaaaaagttatgggataaaaaatgctgtggaaaagttgtggcaaaagaagttgtgaaaaaaagtagaaaaatgttttatgaaaagtattttaaaaagttatgaaaaggaagttaygggatttttttttaagtcatgggataaaaataaaagcaggtctctgtcggcacaagcctggagaagtgggactggagacttcgcccccgccatggaccaaccaccccttcccag

SEQ ID NO: 571249 - DNA, 550 bp, Homo sapiens
gtgtgacacatatatgcttcatatgcagagaaggacatgatttcactacagtgtaactattcccagaattcaatgcctgtatttctaaattgttctagatactctgcaacaacctgagaatgttatgtttttccctaaaacttccatccattactgagtgtctatggtcatagttaactcaattgcaatgtgacctctggccaagcccattcctagttttttttttaggtgatttttaattttaartttttattttgattgtttcctttttgttttttctaatctagcagtggttggtaaatttcaacatctgtatatccctgtgtctttgcacctgctggtctctgcttggaatatctcaaggttttattcacctggaaaaaatttctactcacccttaaagaatcagcttaaataggtcggtgtggtgactcatgactgtaatcccagcactttgggaagcaaaggcgggtggatcacctgaggtcactagttccagactagcctatccaacatgttgaaaccttgtctttactaaaaatacaaaaaa

SEQ ID NO: 571250 - DNA, 563 bp, Homo sapiens
tgatctcagtagaatatgttgctgccaactcatttcagatggatctcttgcaacactgggttagggaggaaaataacaatgacaacgaacacattataaagctttagagcctaattcatctatatcggttaagatcctccccttaaataggaggatcacttaagcccaggggtttcagaccagcctgggcaacatggtgagaccccagctcattaaaaaaaaaaaaaaaagaagaatgcatttggctgcaaggaacagagaytcaaacaatagtagtttaaacaactagaaatttattttcttcttctaacaggaaatctggcagtggcagcctagcacttggtcagtagcctctgggtaatgtgtctgggtggctaagaagaggcgagacagaaaactgctgggactttttaaagcctttaagtatgtgtgactgttttgccctctgaactcttgtattagtcactattgctctgtaacaaattacctcaaaccttagacacttatgatataaaacatttattatctcataatttccatgagtcaggaatccaagagtagcg

SEQ ID NO: 571251 - DNA, 601 bp, Homo sapiens
tgcaaatcagatgcaaaattttaaatatccttaattttttgaaccaaattattgccatttgtagaaaattatgtgagtttttgtctcagaatccacatctggtaatgtaattgatgactcactctagtttctttgtaaaaaattgcaaacaaatcaggaaatatccttccttattttcatttcagattggtatgcattgtcagagttaaactttgtatatttgtgtatatttatatacttgtgacatttacaaaataaggcagccaaaattaattcatatgggcacgtccaaacaaccactcattgctttgactattaaatacttatatatggtaataattaccaaatttgttattttatatatcttgaaattgaatattttatgttttttatgtattttaaatawtttttctatttgttatttggtaagacactatacatgtatatcctcaatagaaagtccttttctcagttctctaggctgtgttaggtaaaaccatgaaaacctacacatatttaaacttttctattgatggagttttggggtttgtttattccctttccattaaaattatatggtaattgaagtcaagagtgctat

SEQ ID NO: 571252 - DNA, 683 bp, Homo sapiens
attgggtaaaaagataaactgtatggcatgggttattatgtttttgtaatgctatctgtttaattctrttttatactttccagggaaagcctcacaggtaatacttctcttcaaatttctgtgtgttttagtctttttgtgctgttataatggaatgcttgcagttgggtaatttataaagaaaagaggttcatttggctctcagttctgaaggctgtacaacaagcctagtgtagcatctgcttctagtaagggcctcaggaagcttccaatcatggcagaaggtgaatgggagccagtgtgtgcagagatcgtatggtgagaaaggaagcaagttggggggaggtgccaggctctttgtaacattcagctcttaggggaagtaagggagcaagaactcactcattctctccctcctcccagggaagacattaatttattcatgagagatccaccgtcatgacccaaacacctctcattaggcaccacttccaacattgggatcaaattttagcatgcagtttggaaggacaaacatccacactgtagcactgtgcaaataaattactaccatggaataatgtattttatgttaaaatattataagaaaatcattttaaaggctactataataaaataaaactacccacccaggtaatgttttaaattcttttttattttaa

SEQ ID NO: 571253 - DNA, 683 bp, Homo sapiens
attgggtaaaaagataaactgtatggcatgggttattatgtttttgtaatgctatctgtttaattctgttttatactttccagggaaagcctcacaggtaatacttctcttcaaatttctgtgtgttttagtctttttgtgctgttataatggaatgcttgcagttgggtaatttataaagaaaagaggttcatttggctctcagttctgaaggctgtacaacaagcctagtgtagcatctgcttctagtaagggcctcaggaagcttccaatcatggcagaaggtgaatgggagccagtgtgtgcagagatcgtatggtgagaaaggaagcaagytggggggaggtgccaggctctttgtaacattcagctcttaggggaagtaagggagcaagaactcactcattctctccctcctcccagggaagacattaatttattcatgagagatccaccgtcatgacccaaacacctctcattaggcaccacttccaacattgggatcaaattttagcatgcagtttggaaggacaaacatccacactgtagcactgtgcaaataaattactaccatggaataatgtattttatgttaaaatattataagaaaatcattttaaaggctactataataaaataaaactacccacccaggtaatgttttaaattcttttttattttaa

SEQ ID NO: 571254 - DNA, 539 bp, Homo sapiens
tttcatgggctggcattgagtgtctgtggcttttccagatgcacagtgcaaggtgtcagtggatctaccattctggggtctggaagacaatggccctcttctcacagctccactatgcagtgtcccagtagggactctgtgtgggggctccaaccccacatttcccttctgcactgccttagcagaggttctccatgaaggctccacccctgcagcaaacttttggctggacatccaggcatttccatacatcctctgaaatctaggcagaggttctcaaacctctattcttgacttctgtgcacccacaggmtcaacaccaaatggaaaccaccaaggcttggagcttgcaccctctgaagcaaatgcctgagctgtacgttggccccttttagccacagctggagccgaagcaactgggacacagagcaccatgctatgaggctgcatacagcagggggcgccctgggcccagcccaggaaaccatttttccctcctagtgctccaggcctatgataggaggggctgctatgaaggt

SEQ ID NO: 571255 - DNA, 611 bp, Homo sapiens
gagtttctccatgttacccaggctggtcttgaacttctgggctcaagcagtctgcctgccttagcctcccaaagtgctaggcccaggtgcaattttaaaggagcaatagattggaatttcctctttctttttttttttttttaaattttgaattttgctgacggaagttcaaatgttattcagtgtgtgaggttcttcacatcaaaacaaatatcttttccctgtctgatgaattcgaaagttcctgtcacgtttctatccacaggttaagtgtatcttagcagacytggctactgttccactgtgattgagttatgaagcatgtacagctagcaaggtttctgtaggtaaaactagggagtaacagtatctactactgaccactccctcttccccagggaattaaggtggcctgaagcgtttaattataaaagaaacaacaaatagatcctaggagttatgcagaaacatcctaaagagatgtggtgttgcctttcaattgaggctagacattagtccatgtaatgaaaacctggatccttgtgggtagggtagagagtgaggagggctagtccatcatgcagcatagaaaacgggggggataatgacca

SEQ ID NO: 571256 - DNA, 499 bp, Homo sapiens
attacacagacgtttcaacgtggttgttgttggtttttttttkgttttttttttttttttttttttttggtctgtccaagcctgtcagcagatttgctactgctctgggcatcaaatacaacacatcaggtccaagcaattttaccagctcagcgtttttattttacccctgtaagacaagtgaaatgctgtttttaagatacaaattggcctggacaattttttttagtatctaatatttcttgggcacctcatatgtaggtaatatttctctagtacaactaagcaagaagatgaagttcctaagttccaaaagaccgacacctaaatggaaagatagtacaaacaggtgggtttgcatatgaagattcagtgccctctttagtacatattaaaaggcctgggtcactggaaaaatacataccaatgcctggcaaccccatacaaccccagcagagcatcaaaattaagctctgctcagttgtgggaagcttccatg

SEQ ID NO: 571257 - DNA, 576 bp, Homo sapiens
tacagtctgtggaactgtgagtcaattaaacctcttttcttcataaattacctagtctcaggtagttctttatatcactgtgagaacagactgatacactccatctctctaataacaagttcttggtagaggcacctgaggaaggcctttgttgaaggccccagataaaaagacctctaatggtaggcatctggattaggaatgaagatttgtgtaagaccctagtkggccacagtggggctgaatccttaactgaaactccctttagaaatggcaataaaagtgaccacaacaaaaaaaaaatctgagcgcagctcaactctaattagtttggctcagcccacaaaccaatagcctagcacaagaaaagaaatgcccattttcagcagtaattattatttacaactttttttttctgtactaatcatgacgtctactctcttattttattttattttattttattttattttatttttttgtttcattgaccagactcttagttttattttattttattttatttttttaattcattattattatactttaagttttagggtacatgtgcacaat

SEQ ID NO: 571258 - DNA, 576 bp, Homo sapiens
tacagtctgtggaactgtgagtcaattaaacctcttttcttcataaattacctagtctcaggtagttctttatatcactgtgagaacagactgatacactccatctctctaataacaagttcttggtagaggcacctgaggaaggcctttgttgaaggccccagataaaaagacctctaatggtaggcatctggattaggaatgaagatttgtgtaagaccctagttggccacagtggggctgaatccttaactgaaactccytttagaaatggcaataaaagtgaccacaacaaaaaaaaaatctgagcgcagctcaactctaattagtttggctcagcccacaaaccaatagcctagcacaagaaaagaaatgcccattttcagcagtaattattatttacaactttttttttctgtactaatcatgacgtctactctcttattttattttattttattttattttattttatttttttgtttcattgaccagactcttagttttattttattttattttatttttttaattcattattattatactttaagttttagggtacatgtgcacaat

SEQ ID NO: 571259 - DNA, 606 bp, Homo sapiens
gaacaacatcaactgaaataaaaaagagtaaaatcatatcctcaaaattctataatacttatcaataaataatcaggaacccagcaaaactaattttaaaaaagaaaaaaacaaaaatactttttatgaacgaaattagagacaaccacgtaagtatccccactaaaggaattttaagaatatacttcagtaatatggaaaagataaaagatactaaaataaatatctgagaaataaaagttgycatgtgtacaaattttaccaaacaatgaatgtatacaagctataatgcagtcttatttatgttgctaaaatattcaaataaaaattattaaaatgctcatatatcacaaggggtataataggaggaagtattttagctcctttattctggaagaagttaaagtattaattcagtcactgtatattaatagatgcatgataaatttcaaggagagtaaattcaatcaatcagaataaaaggcaaaaaagagaaaagcatggaagttatggtgtgacatataaggggaaatacaagttaaaaatcagaaataattctgttgaaaacagaagagactttctacactcccatttcttacagtaagt

SEQ ID NO: 571260 - DNA, 588 bp, Homo sapiens
ttctggccaggcacggtggctcacacctgtaatcctagcactttgggaggccacggcaggcggattgcctgagctwaggaggtcgggaccagcctgggtaatatggtgaaaccccgtctctactaaaatacaaaagattagccgggcgtggtggcgggtgcctgtagtcccaactactcaggaggctgaggcaggagaatcgcttgaacccaggagatagaggctgcagtgagctgaggtcatgctactgcactccaacctgggtgacagagcaagactccatctcaaaaaaaaaaaaaaaaattctgtgttcttcatgcaaggaaattagctaaatttaagttattggctcatatttttatttcaaaatttgttcacaatgactttactttttaaaatttagtgttgaatttaatgttgtagaggcaaagtctagagccagtttaatagcagttctattttatatataacttgtcattataggattattcatgttattgttggttatttacccttttttgtttttctttgtttgcccgcatttgcctgccctcactccaccataaaattctactacttgtgttaaac

SEQ ID NO: 571261 - DNA, 588 bp, Homo sapiens
ttctggccaggcacggtggctcacacctgtaatcctagcactttgggaggccacggcaggcggattgcctgagctaaggaggtcgggaccagcctgggyaatatggtgaaaccccgtctctactaaaatacaaaagattagccgggcgtggtggcgggtgcctgtagtcccaactactcaggaggctgaggcaggagaatcgcttgaacccaggagatagaggctgcagtgagctgaggtcatgctactgcactccaacctgggtgacagagcaagactccatctcaaaaaaaaaaaaaaaaattctgtgttcttcatgcaaggaaattagctaaatttaagttattggctcatatttttatttcaaaatttgttcacaatgactttactttttaaaatttagtgttgaatttaatgttgtagaggcaaagtctagagccagtttaatagcagttctattttatatataacttgtcattataggattattcatgttattgttggttatttacccttttttgtttttctttgtttgcccgcatttgcctgccctcactccaccataaaattctactacttgtgttaaac

SEQ ID NO: 571262 - DNA, 590 bp, Homo sapiens
gaatagcaatgcaagaatcaggcctatagtattagagataattctcacaggttaaacataattttgtatacacggcctcttcagaatatctcttctgtctgttagttcctgacaagcagattgcggtactgaaatttcgcaagtgatagttaaagccatccctgagccaacctggggatatcaataaatgtctcatttcttgaatattctctcttacatatttttcagattcttctcttaactcagttttataatctattaaggaaataagattggtgattttgggckggggtgttagggagaaggtggaaatttcttgaagaaaaataatcacaatataaaataaacaacaattgcatggtaacataaactttcaaatgtacttcatgttttgtgataatttgtttcaatgtaaagatttatgaattcgaagtttgtcattacaacatggccaatatctagtcctaaactgtttgctttgagcacatacttgacatccaataagagaacaatttattgttttaaaggaggttagaagaaaagtaataatttctgaatgcctttctatttggcagtttgtaagcggtttt

SEQ ID NO: 571263 - DNA, 590 bp, Homo sapiens
gaatagcaatgcaagaatcaggcctatagtattagagataattctcacaggttaaacataattttgtatacacggcctcttcagaatatctcttctgtctgttagttcctgacaagcagattgcggtactgaaatttcgcaagtgatagttaaagccatccctgagccaacctggggatatcaataaatgtctcatttcttgaatattctctcttacatatttttcagattcttctcttaactcagttttataatctattaaggaaataagattggtgattttgggcggsggtgttagggagaaggtggaaatttcttgaagaaaaataatcacaatataaaataaacaacaattgcatggtaacataaactttcaaatgtacttcatgttttgtgataatttgtttcaatgtaaagatttatgaattcgaagtttgtcattacaacatggccaatatctagtcctaaactgtttgctttgagcacatacttgacatccaataagagaacaatttattgttttaaaggaggttagaagaaaagtaataatttctgaatgcctttctatttggcagtttgtaagcggtttt

SEQ ID NO: 571264 - DNA, 560 bp, Homo sapiens
gttatgctgtagtttttcacttgtattatttctgtcacatatatttttttcaaatattttcaatccatggctggtttaatccatggatgtgaaacctggcattatagacagccaactgtatatggattcaatgctttcaatttccctctagtcactgcttttattgcatcccacaaattttggtaagttgtagtttcattttgtcttgagatttcttctttgacccatgtgttaattagaagtgtgttgtttaatctccaagtattttgcgattttccagctatctctctgttactgatttccagtttaattccattgaggcctgaaaacatacagtgtatgatttctattattttaaattctttaaggtgtgatatatggcccagaatgtggtctatcttgacgaatgttccatgtgaacttgagaaaaacgtgtcctctgctatcactggataaagtaatcataggtgtcaattatctccagtcaactgatggtgccactgagttcaaygatgtccttactaattttggcctgcaggatctgtccatttctgacagaa

SEQ ID NO: 571265 - DNA, 577 bp, Homo sapiens
tatcaattttacagtttcttttaaaagccaataaaagtatccataaatatttattataaaaatgaattaatggacatagagaatagaagaatgttacaaaagctgggaagggtagtgtggaggggacatggagattgttaatggttacaaaataatggtttgaaagaataaataagacctagtatttgatagcacaatagggtgattatagtcaataataagttaactgtgcatttcaaaatgttataaggtataattggactgtttttacctcacaggataaatgatttatgtaaaggatcccccatttccatgatgtaattattttatattgcatgcctgtatcaaacatctcatgtgccctatacatttatatacctactatgttcccacaaaaattaaaaattaaaaaaattaaaataagatattttaaaatacatttttgtatgttttcgttcacttgctgctctccttcatgatctctggtaactaccaatatgctctctatcttcatgagattcacttttttagcttctttataattacattttrtagttgcttttattttaaaatcaat

SEQ ID NO: 571266 - DNA, 609 bp, Homo sapiens
gctgtaatcttccctctgagtactrcttttgctgtatcccatagatttgggtattttgtgtttccattattatttgtttcaaaaatgtttacatttccttcctaatttctttattgacccactggtcattcagaaacatatttttaatttccatgtatttgcatagtttccaaaatttctcttactattaatttctagttttattttattgtggtctgaggagatggttgatattatttcaactttttgaataatttaacacttgctttgtgacctaacttatggtctatctttgagaataatccatgtactgagctaaagaacgtgtattctgcagctgtttgatcaaatattttgtaaatatatgttatatccctttgttctatagtgtagattaagtgcaattttttaaaattagttttctgtgtgaaagacatgtccaatgctgaaagtggaaggtagaagtccctagctattattgtattggaatctatgtctctctttacctctaacaatacttgttttatgcatctgggtgcttcagtgttgggtgcagatgtacttaaaattgttatattgtcttgataaattgacatctttatcattata

SEQ ID NO: 571267 - DNA, 507 bp, Homo sapiens
gagacattgcaactgatactgcagcaaatcaaaagataaataatggctactgtgagcaaytatatgccaattatatgccaataagttgaaaaattatatgtgagcaattatatgccaataagttgaaaaatctagaagaaatagagaaatcgaaatcctagacacatacaaactgccaagattgaaacagaaggaaatccataacctgaacagaccaataacaagtaacaaggtagaaaccataataaaaataccccagtaaagagaggcctgggacccaatggtttcactgctgaattctaacaaacatttaaaaaaagaactaattctaccaaacatttaaaaaagaactaatactaatccaacacaaactattcaaaaaaatagagagggaggccatgctttcaaattaattctatgaggccagtgttaccctgatagcaaaaacaaagacacatccaaaatagaaaactacagaccaatatctctgatgcatattgatgcaaa

SEQ ID NO: 571268 - DNA, 507 bp, Homo sapiens
gagacattgcaactgatactgcagcaaatcaaaagataaataatggctactgtgagcaactatatgccaattatatgccaataagttgaaaaattatatgtgagcaattatatgccaataagttgaaaaatctagaagaaatagagaaatcgaaatcctagacacatacaaactgccaagattgaaacagaaggaaatccataacytgaacagaccaataacaagtaacaaggtagaaaccataataaaaataccccagtaaagagaggcctgggacccaatggtttcactgctgaattctaacaaacatttaaaaaaagaactaattctaccaaacatttaaaaaagaactaatactaatccaacacaaactattcaaaaaaatagagagggaggccatgctttcaaattaattctatgaggccagtgttaccctgatagcaaaaacaaagacacatccaaaatagaaaactacagaccaatatctctgatgcatattgatgcaaa

SEQ ID NO: 571269 - DNA, 370 bp, Homo sapiens
ttccattccgttccatttctttccgttctgtacaattcctaccgttcgatttcattttgttccagtccattcctttcgcgtccattccattccatttcactccattcgattccattccattcgattccattccactcgattccacttcgttccatttcattgcattccattctattcacctctattgccttccattccattccattcgattacattccatgcgattccattcgaaatygaatcaattacattgcaatccattactattgagtccgttttattccagtccactgcattctggtccattccatttgattccattccattctattccattccatacagttgcattccattggattccattcta

SEQ ID NO: 571270 - DNA, 370 bp, Homo sapiens
ttccattccgttccatttctttccgttctgtacaattcctaccgttcgatttcattttgttccagtccattcctttcgcgtccattccattccatttcactccattcgattccattccattcgattccattccactcgattccacttcgttccatttcattgcattccattctattcacctctattgccttccattccattccattcgattacattccatgcgattccattcgaaattgaatcaattacattgcaatccattactattgagtccrttttattccagtccactgcattctggtccattccatttgattccattccattctattccattccatacagttgcattccattggattccattcta

SEQ ID NO: 571271 - DNA, 510 bp, Homo sapiens
ccactttaatccacccctttccactccacttcatcccaatccacyccactccattccagtccactctattccatttgactccactcctctccactccactccattccgtcccattcctttcaaatcccctccattccgttgcactcctctccactccactccactccactccaattgtcaccactccactctactcctttccattccgttccattccactccactcaattccattcccttccattctgttccattccatttcattccattgcactccgatcttcacataaaatctagacagaagatttctgagaaacttttttgtgatatttgcattcacctcacagagtttaaccattcttttgattgagcagtttggtaaaagtcttgttgtagaatctacaaaaggatatttgtgagtgctttgaagcctgaggtgaaaaagtaaatatcttcacagcaaaactagaaagatggtgtctgagaaagtgctctgtgatgtttgaattc

SEQ ID NO: 571272 - DNA, 510 bp, Homo sapiens
ccactttaatccacccctttccactccacttcatcccaatccactccactccattccagtccactctattccatttgactccactcctctccactccactccattccgtcccattcctttcaaatcccctccattccgttgcactcctctccactccactccactccactccaattgtcaccactccactctactcctttccattccgttccattccastccactcaattccattcccttccattctgttccattccatttcattccattgcactccgatcttcacataaaatctagacagaagatttctgagaaacttttttgtgatatttgcattcacctcacagagtttaaccattcttttgattgagcagtttggtaaaagtcttgttgtagaatctacaaaaggatatttgtgagtgctttgaagcctgaggtgaaaaagtaaatatcttcacagcaaaactagaaagatggtgtctgagaaagtgctctgtgatgtttgaattc

SEQ ID NO: 571273 - DNA, 510 bp, Homo sapiens
ccactttaatccacccctttccactccacttcatcccaatccactccactccattccagtccactctattccatttgactccactcctctccactccactccattccgtcccattcctttcaaatcccctccattccgttgcactcctctccactccactccactccactccaattgtcaccactccactctactcctttccattccgttccattccactccactcaattccattcccttccattctgttccattccatttcattccaytgcactccgatcttcacataaaatctagacagaagatttctgagaaacttttttgtgatatttgcattcacctcacagagtttaaccattcttttgattgagcagtttggtaaaagtcttgttgtagaatctacaaaaggatatttgtgagtgctttgaagcctgaggtgaaaaagtaaatatcttcacagcaaaactagaaagatggtgtctgagaaagtgctctgtgatgtttgaattc

SEQ ID NO: 571274 - DNA, 510 bp, Homo sapiens
ccactttaatccacccctttccactccacttcatcccaatccactccactccattccagtccactctattccatttgactccactcctctccactccactccattccgtcccattcctttcaaatcccctccattccgttgcactcctctccactccactccactccactccaattgtcaccactccactctactcctttccattccgttccattccactccactcaattccattcccttccattctgttccattccatttcattccattgcactccgatcttcacataaaatctagacagaagatttctgagaaacttttttgtgatatttgcattcacctcacagagtttaaccattcttttgattgagcagtttggtaaaagtcttgttgtagaatctacaaaaggatatttgtgagtgctttgaagcctgaggtgaaaaartaaatatcttcacagcaaaactagaaagatggtgtctgagaaagtgctctgtgatgtttgaattc

SEQ ID NO: 571275 - DNA, 369 bp, Homo sapiens
aatttggtagtggagcgctttgmggcctatggtggaaaaggtaatatcttcatataaaaactagatagaagaattctgacaaacttctttgtgatgtgtgatttaatctcacaagagttgaacttttcttttgattgagcagttttgaaatattctttttgtagtatctgcaagtgggcattttgagcgccttgaggtctatggtcaaaaatgaaatatcttcacataaaaactagacagaagaattctgagaaacttctttgtgatgtgtgatttaatctcacagagttgaacctttcttttgattgagcagtttggaaacactcttttagtagagtctgcaagtggacattttgatcgctttgcggc

SEQ ID NO: 571276 - DNA, 369 bp, Homo sapiens
aatttggtagtggagcgctttgcggcctatggtggaaaaggtaatatcttcatataaaaactagatagaagaattctgacaarcttctttgtgatgtgtgatttaatctcacaagagttgaacttttcttttgattgagcagttttgaaatattctttttgtagtatctgcaagtgggcattttgagcgccttgaggtctatggtcaaaaatgaaatatcttcacataaaaactagacagaagaattctgagaaacttctttgtgatgtgtgatttaatctcacagagttgaacctttcttttgattgagcagtttggaaacactcttttagtagagtctgcaagtggacattttgatcgctttgcggc

SEQ ID NO: 571277 - DNA, 369 bp, Homo sapiens
aatttggtagtggagcgctttgcggcctatggtggaaaaggtaatatcttcatataaaaactagatagaagaattctgacaaacttctttgtgatgtgtgatttaatctcacaagagttgaacttttcttttgattgagcagttttgaaatattctttttgtagtatctgcaagtgggcatttygagcgccttgaggtctatggtcaaaaatgaaatatcttcacataaaaactagacagaagaattctgagaaacttctttgtgatgtgtgatttaatctcacagagttgaacctttcttttgattgagcagtttggaaacactcttttagtagagtctgcaagtggacattttgatcgctttgcggc

SEQ ID NO: 571278 - DNA, 590 bp, Homo sapiens
gataatcatgtggtttttgtctttggctctgtttatatgctggattacatttattgatttagcttttggcaaattttaacacctatttttgacaaaaagcttccagcaaactggaaacaaaagaaatttctcagccttacaaagaataactgcaaaaacacatatcaacatttaaaaaagaaactgtttttagagtagtttcatgttcataacaaaattgagcagaaggtacagaggtttcatatatattcctggccgtcacataygcccagtcttccccactatcaacaatcccaaccaaagtggtacatttgttacaactgaacttacatattattcttaaccagagtctacagtttacattagggtttatactttgtattgtacattctgtgggtttggacaaatctataatgatatacgttcatcattacagcaccatgaaggataattttactgctctaaaattcctctgttctccatctattgaatcctccctctcctttaatgtctatcaatctctgatccttttactgtctctgtagttttcctttttgaaaatattatacagatgcaaagatactgtatgt

SEQ ID NO: 571279 - DNA, 590 bp, Homo sapiens
gataatcatgtggtttttgtctttggctctgtttatatgctggattacatttattgatttagcttttggcaaattttaacacctatttttgacaaaaagcttccagcaaactggaaacaaaagaaatttctcagccttacaaagaataactgcaaaaacacatatcaacatttaaaaaagaaactgtttttagagtagtttcatgttcataacaaaattgagcagaaggtacagaggtttcatatatattcctggccgtcacatatgcccagtcttccccactatcaacaatcccaaccaaagtggtacatttgttacaactgaacytacatattattcttaaccagagtctacagtttacattagggtttatactttgtattgtacattctgtgggtttggacaaatctataatgatatacgttcatcattacagcaccatgaaggataattttactgctctaaaattcctctgttctccatctattgaatcctccctctcctttaatgtctatcaatctctgatccttttactgtctctgtagttttcctttttgaaaatattatacagatgcaaagatactgtatgt

SEQ ID NO: 571280 - DNA, 592 bp, Homo sapiens
tcacttcaggttcagcaactcacagctctcacctatgacataatattacttctgtggtcaaaacacttagacctggatttcacaggaatcttgtgcttgcctggctgctagggaggttttcatcatcttccttatctcacagttcaaaacccagggcctccaagctcttgctacggtggccgttcactggcaggaggcttctgggaaggttctccttttctgtcatttttcttattcgtgtttttttgtctcattggtgtttatctgcagaactttgtttccttctgctcaattcataatcagagtgcttttcctcctggctgaattcataagtgtttatgcaaaaagaggttggcgcagagccaggcgactgacgacacccggctcatctgccaagtggatatcaaattgttgyatctcgttctgccattcacagctcctgctgtggggctgggtcatctgccagctctccaaggagctggcgggaaaccgctgcaatcagagccaacccagggcccgtgtgagcccgccttggcacagcactccagctgcccccagtgcctttggggacacatctgctttgccaggcagg

SEQ ID NO: 571281 - DNA, 346 bp, Homo sapiens
agctactatttggagttggacagtagtgcatgtgacyttgtgtcacagcgggaatgtgagctggatgacaaatggagatttggacttgtgataattggcctctgtgtcattgtgtggaagactgactggtccctttatttcctgtagcttgactaccacacaaatgaatccattcaaatgttggcaagtggagcagagtcccaggacaggtaaggcactttccctgctttttcttaagatcaatccccatgcgtagaaattaaagtcacatcccacacgatcattaaagtagagagtgcattctgcaggatgagtgaaaaggcatttatgattcttgggggcagat

SEQ ID NO: 571282 - DNA, 476 bp, Homo sapiens
aacctttgagtcattgggtcattaccctggaaaggggcagtaactcccgggtgttgccttggcaatagtaaactcacatggcacactggtgggcatgtctgatggaaagctgcktctgccccagccttgttttagctagtcgtcaattaggtctggtgtccaagccctgcctgtggagtcaagtcctgcctcctatctcacagtggcgtgatcatggctcactgcagactcaatattcccgggctcaagcagttctcccacttcagcctcctgagttgctgggaccacaggcacgtgccactaagcctagccacatttttttgtattttttgtagagatggtgcttcactgtgttgcctaggctggtctcaaacccctgggctcaagaaatctacctaccttagccttctaaagtgctgggattacaggtgtgagccactgcacccagcccaaccttacatttttaatatcaagtc

SEQ ID NO: 571283 - DNA, 471 bp, Homo sapiens
gtaacctttgagtcattgggtcattaccctggaaaggggcagtaactcccgggtgttgccttggcaatagtaaactcacatggcacactggtgggcatgtctgatggaaagctgcgtctgccccagccttgttttagctagtcgtcaattaggtctggtgtccaagccctgcctgtggagtcaagtcctkcctcctatctcacagtggcgtgatcatggctcactgcagactcaatattcccgggctcaagcagttctcccacttcagcctcctgagttgctgggaccacaggcacgtgccactaagcctagccacatttttttgtattttttgtagagatggtgcttcactgtgttgcctaggctggtctcaaacccctgggctcaagaaatctacctaccttagccttctaaagtgctgggattacaggtgtgagccactgcacccagcccaaccttacatttttaata

SEQ ID NO: 571284 - DNA, 476 bp, Homo sapiens
aacctttgagtcattgggtcattaccctggaaaggggcagtaactcccgggtgttgccttggcaatagtaaactcacatggcacactggtgggcatgtctgatggaaagctgcgtctgccccagccttgttttagctagtcgtcaattaggtctggtgtccaagccctgcctgtggagtcaagtcctgcctcctatctcacagtggcgtgatcatggctcactgcagactcaatattcccgggctcaagcagttctcccacttcagcctcctgagttgctgggaccacaggcacgtgccactaagcctagccacatttttttgyattttttgtagagatggtgcttcactgtgttgcctaggctggtctcaaacccctgggctcaagaaatctacctaccttagccttctaaagtgctgggattacaggtgtgagccactgcacccagcccaaccttacatttttaatatcaagtc

SEQ ID NO: 571285 - DNA, 476 bp, Homo sapiens
aacctttgagtcattgggtcattaccctggaaaggggcagtaactcccgggtgttgccttggcaatagtaaactcacatggcacactggtgggcatgtctgatggaaagctgcgtctgccccagccttgttttagctagtcgtcaattaggtctggtgtccaagccctgcctgtggagtcaagtcctgcctcctatctcacagtggcgtgatcatggctcactgcagactcaatattcccgggctcaagcagttctcccacttcagcctcctgagttgctgggaccacaggcacgtgccactaagcctagccacatttttttgtattttttgtagagatggtgcttcactgtgttgcctaggctggtctcaaacccctgggctcaagmaatctacctaccttagccttctaaagtgctgggattacaggtgtgagccactgcacccagcccaaccttacatttttaatatcaagtc

SEQ ID NO: 571286 - DNA, 488 bp, Homo sapiens
atagatgcagaaaatgccttcgacaaaattcarcagcctttcatgccaaaactctcagtaaaccagatatcagtggaacatatctcaacataataagagctatttatgacaaacccacagccaatatcatactgaataggcaaaaactggaagcattccctttgaaaactgccacaagacaaggataccctctctcaccactcctagtcaacatggtgttggaagttctggccagggaaatcaggcaagagaaagaaataaagggtattcaaataggaagagaggaagtcaaattgtctccattagcagatgacatgattatatatttagaaaaccccatcatctcagccccaaatctccttaagctgataagcaacttcagcaaagtctcaggatacaaaatcattgtgcaaaaatcacaagcattcctatacaccaataacagacaaatagagagccaaatcatgagtgaactcccattcacaata

SEQ ID NO: 571287 - DNA, 522 bp, Homo sapiens
tcacgccattctcctgcctcagcctcccgagtagctggaactacaggcacccaccaccacgcctggctaattttttgtatttttagtagagatgggatttcaccgtgttagccaggttgatctcaatctcctgacctcgtgatctgcccgcctctgcctcccaaactgctgggattacaggcgtgagccactgtgcctggcccacatattgtacttttatatgaaatgtcctaaataggcaaatctatacatacagaaagtggattagtggttgcctagggctagaggggttggaaagaaatggggagtgacttcttatgataatgagattttggggggaagtgacraaaatgttctaaaattgattttggtgatggttacacaactatgtgaatatactaaaaatcatctaattgtacacattaaatgggcacataattcatatacatgatacgtggatatcatgtatgagtatatagtatcatgtaactatcacatatgtaaatgttaattattcctcaa

SEQ ID NO: 571288 - DNA, 593 bp, Homo sapiens
catcattagaactgattatcctagatgattttaagatacctcaaaattgcataattctaaaatagaaccattttgcctcactttacttataattctaggcaattttaaagttcttcattttctaatataaaaaatgtatctttcaggtgatacatgacaatggacattcagaaactactgaccactcttgaagtcaagatgtacttttgactgagaataataaggagcacaaaacttgtcattagggttaactgtaaactagcaacttcattttactygcagtgccatcagatatttaacccagtagaatgaatatagtccaagtcatttactatgcttgttggtttcttagagagaaatttgaggatgatagcagagtgttctgttcaacgttccaaacaatgtttcatacaagtaaagaacaaacatttcttattacacagatggctgattaattttgtttgcaagagaaacagatgctaaccctaggcattctttccagtgtcttctaaatgatttgtctaaaacaattcagcctatgttaaatcattctgggtaaattttaaaaagtaaatataattataattattatt

SEQ ID NO: 571289 - DNA, 487 bp, Homo sapiens
tgccaagcctaatatatatatrtttatttttattttttttttttaacaaaatctcacttcttcgcctaggctggagggcaaaggcacgatctcagcccactgcaacctctgcctcttgggttcaagcacttctcctgcctcagcctccccagtagctgtgattacagtcatgtaccaccatgcctggctaagttttgtgtctttggtagagatgaggtttcactctgttggcccggctggtctcgaactcctgacctcaagtgatccacccacctcagcttcccaaagtgctgggattacaggcgtgagccaccgcgcccagcccttatgatataattttaacctcattttagaagtcgggacttaatgaggactgaaatcaggactttggggcagcttgtataattacagctcctataatccttgtcaacatgatggaactacaagaccctcctgatctttgagtctgtcactatgagccacttcc

SEQ ID NO: 571290 - DNA, 627 bp, Homo sapiens
tattgttccatcttccaaacattcaccaccactcccaattgcctctcattttcttctagctaattttaaaaaatatttcctccagcagcatttcctcagggaagcacttcttgactctacagattaggctatatctctctaccatctactcttagagctcctgtgtttattccatttttgaatttatgactcagttgtaatttcatatttttttctgttattgtatcattaggtgctcatattttccactattgtgtgagtcataagggtagaaaatacgtcatattttctttgccagtgaattcccagtatctagcacacttcttgacacataytaagtacagtagtccccctttatctttgggggaaacattccaagaccccagtggagttttgaaaccacagatagaactaacaatacaattgccagcaattaaaacaccattctgttcatcttttccacccacaaatttaatagtcctttccatcttgactaagcactgattacacattgcggttgtaacttttgcagtttgaggtgtgacaacaaaattagtacaaatttctttctttttcttcacaatttcatggatagattttcttccttaccataaatcttagaagcct

SEQ ID NO: 571291 - DNA, 499 bp, Homo sapiens
tggaacttcctccaagatagatgatatgataggccacaaaatgagcctgaataaatttaagaaaattgaaattatatcaagcactctctcagaccacagtggaataaaactggaaatcaactctaaaaggaaccttcaataccatgcaaatacatggaaattaaacaacctgctcctgaatgatcattgggtaaaaaacaaaatcaagatggaaatttaaaaaattctttgaaytgaacaacaacagtgacacaacctatcaaaacctcttggatacagcaaaggtggtgctaacaggaaagttcatagccctaaacacctacatcaaaaagattgaaagagcagaaactgacactttaaggtcacacctcatggaactagagaagcaagaacaaaccaaacacaaacccagcagaagaaaggaaataaccaagaccagagcagaactaaatgaaattgaaacaaacaaaaaaatacaaaagataaatgaaacaaaaag

SEQ ID NO: 571292 - DNA, 277 bp, Homo sapiens
gagaaaatcttcacaatctatacacctgaaaaaggactaatatccagaatctacaatgaactcaaacaaatcagcaagaaaaaaagaaacratcccatcaaaaagtggactaggacgtgaatagacaattctcaaaagaagatatacaaatgaccaacaaacacatgaaaaaatgctcaacatcactaatgatcagggaaacacaaatcaaaaccacaatgcaataccactttactcctgcaagaatagccataatccaaaaaattaaaaaacagta

SEQ ID NO: 571293 - DNA, 537 bp, Homo sapiens
taaacatccctgcctgacagctctgaagagagcagtggttctcccaggatgggattcgagctccaataacagacagactgcctcctcaagtgggtccctgactcccatgtagcctgactgggagacatctcccagtaagggctgacagacacctcatacaggtgggtgctcccctgggacgaagcttccagaggaaggatcaggcagcaatatgtgctgttctgcagcctctgctggtgatacccaggtaagcagggtctggagtggacctccagcaaaytccaacagacctgcagctgaggggcctgtttgttagaaggaaaactaataaacagagaggaatagcatcaacatcaacaaaaaagacatccataccaaaattccatctgtaggtcaccaacatcaaagaccaaaggtagataaaaccacaaagatagggagaaaccagagtaaaaaggctgaaaattccaaaaactagaatgcctcttctcctccaaaggaatacaactcctcgccagcaagggaacaaaactggac

SEQ ID NO: 571294 - DNA, 519 bp, Homo sapiens
agacccatatctcttgccatatatataaatcaagtcaaaatgatcaaatatctaaaagtaagatgccaaactgtaaaactactagaataaaacatagacaaaacactataggccatttgtctaggcaaagattttatggctaagacctcaaaagcacaggcaatgaaaacaaaaatagacaaatgggactatattaaactaaaatgcttttgcacagcaaaggaaacaatcaagagagtaaaaacaacttggtgattgggagaaaatatctcaaaatgattcatctgaccagggactaatatccagaatatataagaaagtcaaccaatgcaacagccaaaacaacaacagcagcaacaaataatcccactaaaaattgggcaaaagatatgaatagacatttctcaaaagaagacagaaatgkccaacaggtatgaaaaattgctcaacatcactaaagattagggagacacaaatgaaaatcatgatgagatattatcttatcccagttagaatggc

SEQ ID NO: 571295 - DNA, 573 bp, Homo sapiens
ataacaggaaatatcctctccatagggtgtacacagaaaatgactttgtaactttacttcatcctctccatttacatagtgcataccccaaataactaatggaattctctagggcatatttaaactccccagaattctgtaacagggcctttgagcccctatgctcaggcccactcccaccctgtggagtgtactttcattttcaataaaacacttaattccttccttgctttgtttrtgtgttttgtccaattctttgttcaagacaccaataatctggacaccccccaccattaacagtggctccacatctctctagggtgaaaaccctaagagacaagtgaaaggccctttgccacaaccactgctaaggtccctggccatgctgcctcttagctaggaaaggaagctcagagctatggcatacaacccaggagtctcaagccatgagctgcagtcaccactcacttaagtgccatctactggatcacagcctaaaatttaacaccaaaaatatttttgctaatatcccccctgtgaaaccaaggacaagaatttagctacaaacaaaga

SEQ ID NO: 571296 - DNA, 566 bp, Homo sapiens
tgtgtggtataaaattttgagcgagttaaccgttttttttcttgtactttaaagatattgatttattgctttctgccttatttagtctcttatgagaagactgctcgcattcttatctttggtcttctatatataatcgttttttttttcctttggatgcttttaagattttatcttcatatttggttttcagaagtttagctttcatatgcycaagcattttttaattactttttctgctttaaaccctggctttttaaatctgctatttgctctcttttattcattttggaatattatttgccattatcttttttaatatattctgtgccatagtctctttcttctcctcataaaacctcaattatatgtatgttagattatttgatatttttctatggctactgaatattctattctcttgttattattgtttcttcatttttctgtcttttttagtttggataatttgcattggtctaacttaaagttcaacaattcctttcactgctatatccagactgttgataagtcattcagcagaaaatttatcaaataaattattc

SEQ ID NO: 571297 - DNA, 533 bp, Homo sapiens
tcacaagatctgatggttttataaatggcagttttttctgctctctctctctctctctcctgctgccatrtaagatgtgccttgctttcccttcaccttctatcagaattgtaagtttcctgagcccccgccccagacatgtagagctgtgagtcaattaagactcttccctttacaaatcacccagtctctggttgtatctttataacagtgtgagaatggactaatacagagaattggtactgggagttggggcactgatgtaaaaataacctgaaaatgtggaagcaactttaaaactgggtaatgggcagaggttggaactgtttggagggttcagaagacaataggaagatgtgggaaagtttggaactccctagaggcatgttgaatggttttgaccaaaatgctgatagtgatatagacaatgaagttctggctgaagttgtctcagatggaaataataaatttattgagaaccggagtaaaggtcattcttgctatgctttagcaaaaaggtcagtgacattttg

SEQ ID NO: 571298 - DNA, 487 bp, Homo sapiens
taagggtgggtctctgtaagcactgaaatacaaaatagaattgtataggaaatggaaaagaggggagattgaaagcaatagatataagctgcccatcaaggaatgcaggcacacaataagggagtcaagaaagcaaaatgaaataatgttgctaagggactcaaaggaaataagaaaagtttctataaatatayccaagagaaagaacaaaacagggagaaaaacactgtaaagtgagaattgtgagcaggctgactcaaggaatgaccataagcctatcacatcttttattcttctccgttgtcagtaaaatctggaaaaagaacaaatagaaaaagtagagttcttttgttgttgttgttgaatgtgtatgggattggaggacactattaatgacgataataggtgaagccattattgcaggaaaatagcaaatgtgaaataaaattttatgatgtgctcttgcatgttaaaagtaaatgcttct

SEQ ID NO: 571299 - DNA, 580 bp, Homo sapiens
taaacatgttcagggaagatggaagcaaaggggtaaaaagaaaacacaatattcaaaatgttactaattgattataagattttatttctgcaaatgttcagtttcaaaatttcatactaaagaatctaaaattaataattatagcctgtctattttcacctrttcttttgggaaactctttaatagtgcttattcaactaacatcccaaagagaaatgggaaacagtgtgtaaaatctagatacatacagatgattctcaaatacagaaagtaaatgaggccagttctaaatatgtaggttacatatttttgggacttataaagagaaaaatgagaaaggtcgtatggtggtctgaataatttttgcaactagacactgaacatgtcctacataaacatgtatgggagaaaaagtaatatatttttctcacccactgaaatgatcatagctgatatccctataacaaaagacaaactaacaagagaaaagcaataataaatatatttaactgtatttttatgtgacatgggatccctcagaaatgaagacccaaagatgcataaaatactgtgtattttc

SEQ ID NO: 571300 - DNA, 543 bp, Homo sapiens
tgaaaattccaaaaaccagaatgcctcttctcctccaaaggatcacaactccttgccagcaagggaacaaaactgaatagacaatgagtttgacaaattaacagaagtaggcttcagaaggtgggtaataacaaactcctccaagctaaaggagcatgttctaacccaatgcaaggaagctaagaaacttaagaaaaggttacaggagctgctaactagaataaccagtttagagaagaacgtaaatgacctgatggagctgaaaaacacagcatgacaacttcgtgaagtatacacaagtatcaatagccaaaytgatcaagcaaaagaaaggatatcagaggctgaagatcaacttaatgaaataaagcatgaagacaagatgagagaaaaaagaatgaaaaggaacaaagtctccaagacataagggactatgtgaaaagaccaaacctacatttgattgctatacctgaaagtgatagggagaatggaaacaagttggaaaacacacttcatgatattatccaaaagaacttccccaac

SEQ ID NO: 571301 - DNA, 551 bp, Homo sapiens
tgacagacactcatattgtatgtatttcctctcattacacacatgttccactgtcccatcagagttcatttactcaacacaagtgcaaagataaaattttcaaggcattcaaacagcaacagcaagctttaaaccaagcaagagacccttctgagtttgaaccctatatgactttacaggtcacacgcccctgaagccactcttgatggcacagcaaaaatgggcaaagcctagaacaatgccgacattgttgagttgccacaacaaactaccttcagatatatatttttttaatttattattattttactttaagttttagggtacatgtgcacaatgtgcaggttagttacatatgtatacatgtgccatgctggtgtgctgcacccactaacttgtcatctagcattacgtatatctcccaatggtatccctccccactcccccaccccacagcagtccccasagtgtgatgttccccttcctgtgtccatgtgttctcattgttcaattcccatctatgagtgagaatatgcggtgtttggtttttt

SEQ ID NO: 571302 - DNA, 323 bp, Homo sapiens
catttattgaggaagtttcaacatttttacatacacgtacaatgcttacacacaaagtcaacattgtgataatgcactttcgtgggtcaaatttgtaaaaccctgcataaaacaaattagaagtctttaaaagtctttacacaatttataccctagtactggaaatgatgtgaagatgaaatacacagcatagtgaattaatactatgtgtggatggatgaaactcatatacaattgagtaatttggcatgagagaattcttgtatttttcacctgcattttcactttttctatgatctttwaaacactcactgcacttgaat

SEQ ID NO: 571303 - DNA, 586 bp, Homo sapiens
gatacttccaaaactacaggaaagaaaagaggagcccaaatagatcgcagcaatttttctgaatggagaaaccgattgtaggttgcagctgaggtggctggaatttatgaagaacattccagagaagaaagagtcgaactgagaaagagatctaaaaatctasaaatgagtcttcttgaattttttgagtgaacaacatattatgcatgtgcagagtaagatttcacaaggccacacagagaacagtttctaaggggcaatgagcggcatgaggatttcactggttcaacaatgttgaaagccattagagtttgaactagccaaagtgaaaagactcactgagcatctcccagtgtttaaataagaactcaggaaagtcagcttccaaagtagggcttatctactcctatcagaagaaaaactcttaaatcagccttaaaaccttaaaaataggcaccaactggatcaaattaatgtgccagtaaattaactgtctgctcaaaataaaattcaacacacttctaccaaagacagaagtctagaatctaaataatacagtatgaaaaatatcaaatataaaataaaa

SEQ ID NO: 571304 - DNA, 586 bp, Homo sapiens
gatacttccaaaactacaggaaagaaaagaggagcccaaatagatcgcagcaatttttctgaatggagaaaccgattgtaggttgcagctgaggtggctggaatttatgaagaacattccagagaagaaagagtcgaactgagaaagagatctaaaaatctacaaatgagtcttctwgaattttttgagtgaacaacatattatgcatgtgcagagtaagatttcacaaggccacacagagaacagtttctaaggggcaatgagcggcatgaggatttcactggttcaacaatgttgaaagccattagagtttgaactagccaaagtgaaaagactcactgagcatctcccagtgtttaaataagaactcaggaaagtcagcttccaaagtagggcttatctactcctatcagaagaaaaactcttaaatcagccttaaaaccttaaaaataggcaccaactggatcaaattaatgtgccagtaaattaactgtctgctcaaaataaaattcaacacacttctaccaaagacagaagtctagaatctaaataatacagtatgaaaaatatcaaatataaaataaaa

SEQ ID NO: 571305 - DNA, 586 bp, Homo sapiens
gatacttccaaaactacaggaaagaaaagaggagcccaaatagatcgcagcaatttttctgaatggagaaaccgattgtaggttgcagctgaggtggctggaatttatgaagaacattccagagaagaaagagtcgaactgagaaagagatctaaaaatctacaaatgagtcttcttgaattttttgagtgaacaacatattatgcatgtgcagagtaagatttcacaaggccacacagagaacagtttctaaggggcaatgagcggcatgaggatttcactggttcaacaatgttgaaagccattagagtttgaactagccaaagtgaaaagactcactgagcatctcccagtgtttaaataagaactcaggaaagtcagcttccaaagtagggctyatctactcctatcagaagaaaaactcttaaatcagccttaaaaccttaaaaataggcaccaactggatcaaattaatgtgccagtaaattaactgtctgctcaaaataaaattcaacacacttctaccaaagacagaagtctagaatctaaataatacagtatgaaaaatatcaaatataaaataaaa

SEQ ID NO: 571306 - DNA, 230 bp, Homo sapiens
tggaaaacactctttttgtaatatctataaagggacattttggagcccacagagacctatactaaaaamcaaatatcccaggataaaaactagaaacaagctatgtgtgaaaatgttttgcaatgtgtagaatcatctcagagttgaaccttgttttaattgggcaggttggaaacattatatttgtagaataaaggaagggacattttggagctcattgaggcctatag

SEQ ID NO: 571307 - DNA, 230 bp, Homo sapiens
tggaaaacactctttttgtaatatctataaagggacattttggagcccacagagacctatactaaaaaacaaatatcccaggataaaaactagaaacaagctatgtgtgaaaatgttttgcaatgtgtagaatcatctcagagttgaaccttgttttrattgggcaggttggaaacattatatttgtagaataaaggaagggacattttggagctcattgaggcctatag

SEQ ID NO: 571308 - DNA, 230 bp, Homo sapiens
tggaaaacactctttttgtaatatctataaagggacattttggagcccacagagacctatactaaaaaacaaatatcccaggataaaaactagaaacaagctatgtgtgaaaatgttttgcaatgtgtagaatcatctcagagttgaaccttgttttaattgggcaggttggaaacattatwtttgtagaataaaggaagggacattttggagctcattgaggcctatag

SEQ ID NO: 571309 - DNA, 454 bp, Homo sapiens
atttttgtatttctagtagagatggggttgcaccttgttggtaaggccggtctcaaactcctgtcctgaggtgatccacctatcttggactcccaaagtgctgggattacaggtggcaggcactgttcctgggcttttttttttttttttttttttttgkgagactgtcactctattgcataggttggtgtacagggcgcgattttggctcactgcaacctccaccacctcccaagttcaactgattctcctgccttagcctctcaaataattgggattacaggcgcacaccaccacacctggctaattttttttttttagcagagtctagttctgtcacccaggctggagtgcagtggtgcaaactcagctcactgcaacctctgcctcccagattcaagtgagctccagcctcagcctcctgagtagctgagactacaggtatgtgttacca

SEQ ID NO: 571310 - DNA, 635 bp, Homo sapiens
gtctcaaaaaaaaaaataataataattcttggcaggacgtggtggctcacacctgtaatcccagcactttgggaggccaaggtgggtggatcacctgaggtcaggagtttgagaccagcctgactaacatggagaaactccatctctcctaaaaatacaaaattagctgggtgttgtggtgcgtgcctgtaatcccagctactcaggagggtgaggcagaagaatcgcttgaacacagaaggcagaggttgcagtgagcygagatcacatcactgcactccagcctgggcaacaagagcgaaactccatctcaaaaaaagaaaaaaaaaatgtttactttggataaatacttagaaatggaatttccaggtcagcctttagatttttttaatggatttaataagaaaaacctttacttgaggatgtataaagctttaaaagacagggtccctattcttaagttaaaaataaagcagcatttgtaaggtaatattcagaaaacatcagataacatcctataaagtcctcctgttcatgctgatgacattggatggccagttaaggatgacacttcattctgtctcctgcaaccatggtcctgacatgtctaaatgatactggccctatgagaacac

SEQ ID NO: 571311 - DNA, 635 bp, Homo sapiens
gtctcaaaaaaaaaaataataataattcttggcaggacgtggtggctcacacctgtaatcccagcactttgggaggccaaggtgggtggatcacctgaggtcaggagtttgagaccagcctgactaacatggagaaactccatctctcctaaaaatacaaaattagctgggtgttgtggtgcgtgcctgtaatcccagctactcaggagggtgaggcagaagaatcgcttgaacacagaaggcagaggttgcagtgagctgagatcacatcactgcactccagcctgggcaacaagagcgaaactccatctcaaaaaaagaaaaaaaaaatgtttactttggataaatacttagaaatggaatttccaggtcagcctttagatttttttaatggatttaataagaaaaacctttacttgaggatgtataaagctttaaaagacagggtccctattcttaagttaaaaataaagcagcatttgtaaggtaatattcagaaaacatcagataayatcctataaagtcctcctgttcatgctgatgacattggatggccagttaaggatgacacttcattctgtctcctgcaaccatggtcctgacatgtctaaatgatactggccctatgagaacac

SEQ ID NO: 571312 - DNA, 435 bp, Homo sapiens
agcttttattttattttattatttttaaagagacagggtcttgccctgctgcctgggttggaatattggcatgatcatatagctcacagcatccttgaactcctgggctccagggaccctctgccttagcctcctgagtagctgggactacaggcacacaccacaatgcctagctaattttaaaaaagtttttattttgtagagatgaagtctcactatgttgcccaggctagcctcaaactcttggcttcaaatgattcttccwccttggtgccccaaagtgttgggattacaggcatcagccacggcacctggcctgagcaggttttaataagtcaccccatgtttggagaatttctaacattattaatattactttcccagtgtagaagccaggaactcaagtttttaaacttcctttgtcatgaaggcata

SEQ ID NO: 571313 - DNA, 598 bp, Homo sapiens
tattatgaaacaaaataaaacaaatcggtcagaaataaaaggagagaaatcatgcatatggcacaatcaagttaaaaagatgataactaaattactgaataatgtgctaagcacattatataaattataccttttaatccaacaaaaattaaaagttttattaaaaagcaggtaatatttttatttgcrtgttagaaaattgaggttttgagattagattacagggcatggtcacaaagctagaaagttgttgactcagagatttaattcagatctgtctcattccgtaacaggtcagagtttagtaatctggaaaaggagatctgcggtttcaatccaagttggggagtgccatttggcatatgtggactatgtaactcactgggaaactgtgtctcttgctgctaaatactagttgtgtataatatatgaattctgtgttatcgaagtgctttgttccagaaggagtcagcttctcattagcaacccagggcagcaagctgaatgtattataactcaaaaccaaaatagaatcttactttcacataggtaaatagaatcttactttcacataggtaaatagaatcttaccaaaata

SEQ ID NO: 571314 - DNA, 222 bp, Homo sapiens
gatattcagttgtatgtgctaatatggccaaattcttttttaaaatactaaaaactggggtaaataactgtatccctgaagttcatatgttgtccacacaaacacacatgcacgttcacacgcacwcacacacacacacacacacacacacacacacacacagtttttcttgtgatccagtaaataaccaatgaatatctagcaaatgagaggatgtttaga

SEQ ID NO: 571315 - DNA, 576 bp, Homo sapiens
tggtgagtctgtgcatgtgctattcactgtagggtaggcacttgcatgataagagcttgtgtttgtttttccacaatttcaactctttctctacaggaaataagactctcacttggggaaatcttagcagatttaggactcagtatctgcttctgaaggcagaagttagaatccctgagttcatcattttcttttatcactgtgtccactaaacttaggagcaacyaatgagcttcattatgttccttgtttctccgcatgtggtcaaaggtattatgtatagagtcaataaactccttgcctgtcatgagccgtgaatcgtgggtgtcaaatgaatttagtttgcataattctgtaagtggtttacaccaaggactgtcagtgttctccatactattagaagtagagttcttagcatttttgggtctaatcatattaagcagcccactccagaaaccctaacgaaagaactccatccttaatattctgcttctctagaaacactcctggtaccaaaatctgtattagtcagggttctctagagggacagaactaataggagatatatatatatat

SEQ ID NO: 571316 - DNA, 581 bp, Homo sapiens
ttgtgtttgtttttccacaatttcaactctttctctacaggaaataagactctcacttggggaaatcttagcagatttaggactcagtatctgcttctgaaggcagaagttagaatccctgagttcatcattttcttttatcactgtgtccactaaacttaggagcaaccaatgagcttcattatgttccttgtttctccgcatgtggtcaaaggtattatgtatagagtcaataaactccttgcctgtcatgagccgtgaatcgtgggtgtcaaatgaatttagtttgcataattctgtaagtggtttacaccaaggactgtcagtgttctccatactattagaagtagagttcttagcatttttgggtctaatcatattaagcagcccactccagaaaccctaacgaaagaactccatccttaatattctgcttctctagaaacactcctggtaccaaaatctgtattagtcagggttctctagagggacagaactaataggagatatatatatatatatatmtatcttgtggaatcacaagatcccttaataggccatctgcaaaatgaggagtaagg

SEQ ID NO: 571317 - DNA, 435 bp, Homo sapiens
gtgatctcctttgaaaagcttagaatctgtggtcattgaaataattaaaattaatatctctttttgtagtttgactttaattttgaaattttacatatttatttattattttgttaatgttgaaatagaatatattatatataatttataatatactttttgaaacttttattttacattcaggggtacatgcgcaggtttgttatgtaggtaagttttatgtcactggagtttgatgtatagattatttcattgcccaggtcatagcatagtacctgatagtatctacataagtaggtcctgttgtcagttgttctcttctttgtgtccatatgtcctcaatgtgtagctcccacttataagtgagaacatgtagtatttggttttcagttcctgcrttagtttgcttagggttatggcctccagatccatcca

SEQ ID NO: 571318 - DNA, 500 bp, Homo sapiens
actgggtatctacccaaagaaaaagaagtcattacatgaaaaagccacatgcacaagcatgttcatagcagcaraatttgtgattacaaacatatgaaaccaacctaaatgctcatcaaccaacaagtggattaaaaaatgtggtatgtatacaccatagaatactacagagccataaaacagaatgtaataatggcctttgcagcaacttggagctggaggacattattctaagtgaagtaactcaggaatggaaaaccaaacattgtgtgttctcacttataagtgggagctaagccatgaggatgtacaggctttcagtacttgtggggaagagtgggaaaggggtcagggataagactacgcattggatacggtgtacattgcttgggtgacgggtgcaccaaaaactcagaaatcactactacagaacttatccatgtaaccaaaaaccacctgcaccccaaaagctattgaaataaaataaagataaaaaactt

SEQ ID NO: 571319 - DNA, 500 bp, Homo sapiens
actgggtatctacccaaagaaaaagaagtcattacatgaaaaagccacatgcacaagcatgttcatagcagcagaatttgtgattacaaacatatgaaaccaacctaaatgctcatcaaccaacaagtggattaaaaaatgtggtatgtatacaccatagaatactacagagccataaaacagaatgtaataatggcctttgcagcaacttggagctggaggacattattctaagtgaagtaactcaggaatggaaaaccaaacattgtgtgttctcacttataagtgggagctaagccatgaggatgtacrggctttcagtacttgtggggaagagtgggaaaggggtcagggataagactacgcattggatacggtgtacattgcttgggtgacgggtgcaccaaaaactcagaaatcactactacagaacttatccatgtaaccaaaaaccacctgcaccccaaaagctattgaaataaaataaagataaaaaactt

SEQ ID NO: 571320 - DNA, 500 bp, Homo sapiens
actgggtatctacccaaagaaaaagaagtcattacatgaaaaagccacatgcacaagcatgttcatagcagcagaatttgtgattacaaacatatgaaaccaacctaaatgctcatcaaccaacaagtggattaaaaaatgtggtatgtatacaccatagaatactacagagccataaaacagaatgtaataatggcctttgcagcaacttggagctggaggacattattctaagtgaagtaactcaggaatggaaaaccaaacattgtgtgttctcacttataagtgggagctaagccatgaggatgtacaggctttcrgtacttgtggggaagagtgggaaaggggtcagggataagactacgcattggatacggtgtacattgcttgggtgacgggtgcaccaaaaactcagaaatcactactacagaacttatccatgtaaccaaaaaccacctgcaccccaaaagctattgaaataaaataaagataaaaaactt

SEQ ID NO: 571321 - DNA, 500 bp, Homo sapiens
actgggtatctacccaaagaaaaagaagtcattacatgaaaaagccacatgcacaagcatgttcatagcagcagaatttgtgattacaaacatatgaaaccaacctaaatgctcatcaaccaacaagtggattaaaaaatgtggtatgtatacaccatagaatactacagagccataaaacagaatgtaataatggcctttgcagcaacttggagctggaggacattattctaagtgaagtaactcaggaatggaaaaccaaacattgtgtgttctcacttataagtgggagctaagccatgaggatgtacaggctttcagtacttgtggggaagagtgggaaaggggtcagggataagactacgcattggatacggtgtacattgcttgggtgacgggtgcaccaaaaactcagaaatcactactacagaacttatccatgtaaccaaaaaccacctgyaccccaaaagctattgaaataaaataaagataaaaaactt

SEQ ID NO: 571322 - DNA, 390 bp, Homo sapiens
ccaatatacctctttctttcgtaaattgcccagtgtcgggtatgtcttakcagcttgaaaatggactaatacagtggtcctggcattctggggagtatcttatcttttgaggctgtggccctctgttggctttctggaactggagcctctgcagtataccttgctagtcttttgtatttgaaatattactctgaatacatctgtgcttcctgaaggaaataggagaatttgcatgtattcattaagccattcacacatttattaaacaatatattgaatacctatgaggagtcaggccctattcctagacaccgatgagccaaacaaagttgtccttatgcagcatacgttctagggaagaaagacaataaaccaaaaaaagtaaatata

SEQ ID NO: 571323 - DNA, 390 bp, Homo sapiens
ccaatatacctctttctttcgtaaattgcccagtgtcgggtatgtcttagcagcttgaaaatggactaatacagtggtcctggcattctggggagtatcttatcttttgaggctgtggccctctgttggctttctggaactggagcctctgcagtataccttgctagtcttttgtatttgaaatattactctgaatacatctgtgcttcctraaggaaataggagaatttgcatgtattcattaagccattcacacatttattaaacaatatattgaatacctatgaggagtcaggccctattcctagacaccgatgagccaaacaaagttgtccttatgcagcatacgttctagggaagaaagacaataaaccaaaaaaagtaaatata

SEQ ID NO: 571324 - DNA, 608 bp, Homo sapiens
tgagttcatgtcttgactttctttgttaattttctgcctcaatgatcygtctaatactgtcagtggggtgttgaagtctcccactattattgtgtgggagtctaagtctctttgtaggtttccaagaacttgatctataaatctagatgctcctgtgttgggtgcatatatattagagatagtttggtcttcttgttgaattgaatgttttaccattgtgtaatctccttctatgtctcttttggtctttgatgatttaaggtttttttgtttgtttgctttgctttgttttggaaattaggattgcacctcctgcttttttctgttttccatttgcttggtagattcttctgcattccttatgagtctatgggtttcactgcatgtgagatgggtctcttgaagacagaaaaccattggttcttggttctctgtctggtttgctactctgctttttaactgggggcatttagcccatgtacattcaaggttagtattgatatgtgtgaatttgatcctgtcatcatgatgttagcttactgttgtgcagacttgtttgtgtggttgctttatagtgtcactggtctgcgtacttaagtgtgtttttg

SEQ ID NO: 571325 - DNA, 608 bp, Homo sapiens
tgagttcatgtcttgactttctttgttaattttctgcctcaatgatctgtctaatactgtcagtggggtgttgaagtctcccactattattgtgtgggagtctaagtctctttgtaggtttccaagaacttgatctataaatctagaygctcctgtgttgggtgcatatatattagagatagtttggtcttcttgttgaattgaatgttttaccattgtgtaatctccttctatgtctcttttggtctttgatgatttaaggtttttttgtttgtttgctttgctttgttttggaaattaggattgcacctcctgcttttttctgttttccatttgcttggtagattcttctgcattccttatgagtctatgggtttcactgcatgtgagatgggtctcttgaagacagaaaaccattggttcttggttctctgtctggtttgctactctgctttttaactgggggcatttagcccatgtacattcaaggttagtattgatatgtgtgaatttgatcctgtcatcatgatgttagcttactgttgtgcagacttgtttgtgtggttgctttatagtgtcactggtctgcgtacttaagtgtgtttttg

SEQ ID NO: 571326 - DNA, 555 bp, Homo sapiens
catatgataaaatgggatgaagcttctattgagaagcttgacttgtcttcttgagtctcagtatctccagtatcctccgggatattaagatatgtctgtgattgttgttaaataaaaattacaggaggccattgctttggactagactcctgcactaagcctcaacaggccagacaaaataaaaatggagtcacccatgctaaagttccatgtcatcaaactgaaactaagttgttstctaacattccaaggaatcagaagaaaaagataacagccaatttcccaaacaggccagtttcagctttcaattgtcatgtgaagttccctgtgttttcatctttaacttgaagtgacctgatgttaaccagtcagttatttttctattgttctgtctctctgtccccatcgtataagtaaagtaactttgaaatgaccaatccattttgttttgttttgttttgtttctgctttcctcagtcctttttctgcctataaagcaaacctcctctgctccactcatcgagacacttatcctattttatggaatgaagtgtt

SEQ ID NO: 571327 - DNA, 481 bp, Homo sapiens
ttttgttttgttgtttacgttgtgttctatgtgtgttatatcatcctactgtcttatgagagcaatatttcatctctttagcaatttgatagtttatgtgaagacttcttctccctgaatcatcttaggmccccctaaattgctgttttatgttgttttttaacctctatatttaattttagaaatcttcaaatatctgttcgttgttaactttctggtatattttgaaatgtccataaaaaagttgattgaaacacaaataggcttgttgatcatgtacttaatgtaggtcgatatttctgggatgttttgttatagaacccgcaatgaagtgctattagtgtttcctcttgggctagtcattttcaccagtgaagattctacttaaagaatataatcctgaatcctggctaccaattttgagatttaagtggaaaaaaaagcttgaaattctcaacattttaagtgtagccttggaatt

SEQ ID NO: 571328 - DNA, 619 bp, Homo sapiens
  misc_feature 1, 2, 3, 4, 5, 6, 7, 8, 9, 10, 11, 12, 13, 14, 15, 16, 17,18, 19, 20, 21, 22, 23, 24, 25, 26, 27, 28, 29, 30, 31,32, 33, 34, 35, 36, 37, 38, 39: n = A,T,C or G
nnnnnnnnnnnnnnnnnnnnnnnnnnnnnnnnnnnnnnnagtcttcatttcacttactgatttatccctagagcctcaataatcgccacttaataaatatatattgaaggaawgaatgagtggactgattagtagtaagactctagaaagaaatggttgagtggacagatagaaagatggatatcctgaagaataattcacaaaagatgacatagaaacacaaaaagttaagagtctaaagaggccatattacacagggctataaatatctctggcagcttaaagaaggccacagattatttgtcactcctcccatggacattaagaattagtctcctccccttgaatctgaatgtaatgagcagtctttatgatggccttcctatgctcacctcttggcattcacacccctgggtaacacctttcctttgagagtaagacggatcagtgatgttcttccaaccattagaacacagcaaaaatgattccattatgtaggattgcaacactggacttgctagcagacaccttcctttgctatctttgatgaagtaagcagccatgttggggaggctcacaggacagacaactgaggatgacttctggtcaacagacagca

SEQ ID NO: 571329 - DNA, 619 bp, Homo sapiens
  misc_feature 1, 2, 3, 4, 5, 6, 7, 8, 9, 10, 11, 12, 13, 14, 15, 16, 17,18, 19, 20, 21, 22, 23, 24, 25, 26, 27, 28, 29, 30, 31,32, 33, 34, 35, 36, 37, 38, 39: n = A,T,C or G
nnnnnnnnnnnnnnnnnnnnnnnnnnnnnnnnnnnnnnnagtcttcatttcacttactgatttatccctagagcctcaataatcgccacttaataaatatatattgaaggaatgaatgagtggactgattagtagtaagactctagaaagaaatggttgagtggacagatagaaagatggatatcctgaagaataattcacaaaagatgacatagaaacacaaaaagttaagagtctaaagaggccatattacacagggctataaatatctctggcagcttaaagaaggccacagattatttgtcactcctcccatggacattaagaattagtctcctccccttgaatctgaatgtaatgagcagtctttatgatggccttcctatgctcacctcttggcattcacacccctgggtaacacctttcctttgagagtaagacggatcagtgatgttcttccaaccattagaacacagcaaaaatgattccattatgtaggattgcaacactggacttgctagcagacaccttcctttgctatctttgatgaagtaagcagccatgttggggaggctyacaggacagacaactgaggatgacttctggtcaacagacagca

SEQ ID NO: 571330 - DNA, 596 bp, Homo sapiens
tccacctactgaaatggcattttttttttttttaacttggaaagacttcaacggattgcactgccggggaccaaaaataagattttaattgaaatacagataagataggagcctttaatttaccttctccctaagcaacaggacttttctggctgcatctgatagatggcttttcccccttctttctttttcagcctaagctagagcaaaattatcttaccttcagatkaaatattttagggatttggggattttgtgtgcctcaggacaaaggacagtgtttgtgaaaagatcactgtcctcttttggaggcaaatttcatccttattgaaattctgatgttagaaaaagtctgccatctcattaccatcctgcataccacacattttatgtgctcttatagatgggcgcaagaatattaggggcaagggagagaaagaacacaaggagagttcccctgcaatcatgtcagatgagacgtttttcttcaccaacaaaatagtttgtataaaatgtgatgctataaaagtgaattatgttattcttactgggggctccaagggacaatgcattctggaccacgagatcattgtcat

SEQ ID NO: 571331 - DNA, 228 bp, Homo sapiens
ttagaatggctattatcaaaaagacaaaaattaacaaatgccagcaaagatgcagagaaaaggtaactcataaactgttgatgggaatgtaaatcagtrtagccattattgaaaacagaatagaggtttctcaaaaatcgaacaataaaactaccatatgatccagcaatcccactactaagtgtttatctaaagaaaatgaaatcagtatgtcaaagagacacaagc

SEQ ID NO: 571332 - DNA, 631 bp, Homo sapiens
gtatctattgataaaaatagaagtcaaagaggatttttataaataggtcaattggtaggaaaaaaggcattgtggttttgtctaaacagagagactttgcttccaacaagtttgaaaatctaaaataatgctttgaattgttgctattctgtcctgatctcaaatgatatttggttattctatatcccagaggaagtaaattatcctactttctttcattgcattaattaaatattggaaatacaagttcaacatttccttttaggttggctgtccattggcaccaccagaaataggcgttgctaatggtaacrtaggattgagaaagtattttttccttctttgtcattattttaagagatattttagttgataatattacactgatctggctttattatcatttaaatactcacgtatcagatgttgtatgttagtgattacgtattgcaagaaagttcatttctcaaggaaattattagccaaaagtacaacatatttttatgtacacaattagtttagttacaccttgattgtgaatttatgctaatacaaaatgcctctcatgagtgagtctctggaattatagcttagagcatgaactctggagtcaaactggctgagtttaaac

SEQ ID NO: 571333 - DNA, 607 bp, Homo sapiens
aattattgcaaaggaagacaacaattagataaataattgttgctaaaataatgaaaaccacttctaaaaaataagatggtcacaaatgtttggctacctcaattattctattaaatatctaaacttttcatatgactttttataggtaaacataaacttatcctaaagctttcagcatcagctttctactgcagatgataaattaatgcagctttgattacagatttaataattcatttgcctgttagtgccaccataaagtcccagaagctctttacaaaatttgcagtgaaatagagttagcaggtgctattaagaaaatatgcaagtgtgcttgacaaaataccagaagttgattgtcaaccaacttgggaagacctgtgagatctttccagtatayacaaaagaaatgaatttataattaaattacagttaatcacagatggttattttacagcaggtgctcagctttgaaagtataattctagactacttttgttccaacatggtgcttaatccttgttgattatctggcaatattttacagttagaaaaatgttgattttgtggttaaaatattatttatttcataaatatagtaaatatt

SEQ ID NO: 571334 - DNA, 592 bp, Homo sapiens
agcaaagacttggaaccaacccaaatgtccatcaatgatagatttgtttaagaaaatgtggcacatatacaccatggaataccatacagccataaaaatggatgagttcatgtcctttgcagggacatgatgaagctggaaaccatcattctcagcaaactatcacaakaacagaaaaatcaaacatcgcatattctcactcatagatgggaactgaacaatgagatcacttggacaccgggccaggaacatcacacaccaggacctgtcagggggtggggggctggaggagggatagcaatgggagaaatatctaatgtaaatgacgagttgatgggtgcagcaaaccgacatggcacatgtatacctatgtatcaaacttgcatgttgtgaacttgtaccctagaacttaaagtataataataacaataataattcacaaaaaagaaaaaaaagatatgaagcttgaagaaattcaacagctcatagacactacaccagaggaagtaacataaattacttcatggaaataagtgcttctgaaccagtgccagaggatgaggaaaaaacttagaagtagtgtcagaaaaca

SEQ ID NO: 571335 - DNA, 592 bp, Homo sapiens
agcaaagacttggaaccaacccaaatgtccatcaatgatagatttgtttaagaaaatgtggcacatatacaccatggaataccatacagccataaaaatggatgagttcatgtcctttgcagggacatgatgaagctggaaaccatcattctcagcaaactatcacaataacagaaaaatcaaacatcgcatattctcactcatagatgggaactgaacaatgagatcacttggacaccgggccaggaacatcacacaccaggacctgtcagggggtggggggctggaggagggatagcaatgggrgaaatatctaatgtaaatgacgagttgatgggtgcagcaaaccgacatggcacatgtatacctatgtatcaaacttgcatgttgtgaacttgtaccctagaacttaaagtataataataacaataataattcacaaaaaagaaaaaaaagatatgaagcttgaagaaattcaacagctcatagacactacaccagaggaagtaacataaattacttcatggaaataagtgcttctgaaccagtgccagaggatgaggaaaaaacttagaagtagtgtcagaaaaca

SEQ ID NO: 571336 - DNA, 592 bp, Homo sapiens
agcaaagacttggaaccaacccaaatgtccatcaatgatagatttgtttaagaaaatgtggcacatatacaccatggaataccatacagccataaaaatggatgagttcatgtcctttgcagggacatgatgaagctggaaaccatcattctcagcaaactatcacaataacagaaaaatcaaacatcgcatattctcactcatagatgggaactgaacaatgagatcacttggacaccgggccaggaacatcacacaccaggacctgtcagggggtggggggctggaggagggatagcaatgggagaaatatctaatgtaaawgacgagttgatgggtgcagcaaaccgacatggcacatgtatacctatgtatcaaacttgcatgttgtgaacttgtaccctagaacttaaagtataataataacaataataattcacaaaaaagaaaaaaaagatatgaagcttgaagaaattcaacagctcatagacactacaccagaggaagtaacataaattacttcatggaaataagtgcttctgaaccagtgccagaggatgaggaaaaaacttagaagtagtgtcagaaaaca

SEQ ID NO: 571337 - DNA, 592 bp, Homo sapiens
agcaaagacttggaaccaacccaaatgtccatcaatgatagatttgtttaagaaaatgtggcacatatacaccatggaataccatacagccataaaaatggatgagttcatgtcctttgcagggacatgatgaagctggaaaccatcattctcagcaaactatcacaataacagaaaaatcaaacatcgcatattctcactcatagatgggaactgaacaatgagatcacttggacaccgggccaggaacatcacacaccaggacctgtcagggggtggggggctggaggagggatagcaatgggagaaatatctaatgtaaatgacgagttgatgggtgcagcaaaccgacatggcacrtgtatacctatgtatcaaacttgcatgttgtgaacttgtaccctagaacttaaagtataataataacaataataattcacaaaaaagaaaaaaaagatatgaagcttgaagaaattcaacagctcatagacactacaccagaggaagtaacataaattacttcatggaaataagtgcttctgaaccagtgccagaggatgaggaaaaaacttagaagtagtgtcagaaaaca

SEQ ID NO: 571338 - DNA, 424 bp, Homo sapiens
tttcaatttttgtcttttcaattatttttctttgatttagattttgcaattttttatataaagttgtttatagtatttccttatcatcttaaatttctgtgaggtcagtagtgacattactttttttgctgattttaataaattgtgtctttttatttttttcttggtcagtctagctaatttaacaatttcgttgatctttycaaaaatcaagtttggttttatggactttattgcactattggttctaattttgagatttagttcattttttctcactttttaaagtgaaagcttaggttttggattcaaggccttttaaatttttcactaaatgtgcttttacttttaaatattttatatgtactatgttagcttctcttgtgaatgttaatattttatttttattttcattcagtccata

SEQ ID NO: 571339 - DNA, 574 bp, Homo sapiens
gtttggtttttgtttgtaaatttgtttaaatttttaatttataagtataattaattataaattaaatttataaataaaaattaaatataaattaaatttataaatataaagttgcttataagttctggagattagacctttgttggatgcatagtttgcaaatattttctcccaaaatacaaaatagktgaactttttgaactttctgtaggttgcctgttttctctgttgatagtttattttgctgtgtagaagctctttattttaattagttcccatttgtcaacttttgttttgaggcagttgcatttggtgtcgtcattataaaatctataccaggacctgtgtccagaatagtattttctagactttctttaaaggtttttatagtataaggttttatatattaaggtcttacttcttcttgagttgatttttttatatggtgtgaggaagtcatccagtttctatcttctacatccagcactgtttgttgaatagagaattctttccctattacttgtttatgtcaactttgacaaagactagatggttacaagtgtgtagctttatt

SEQ ID NO: 571340 - DNA, 594 bp, Homo sapiens
caaactagcatttctgttctttcgaactacatgcacatgccatgcaatggaggattctttttataagctgggaaccagtgcagaatttcatcttttcatttgattcattcaaaagcattattctaagaaaggctggaagagtgcagcatccactgttgatcatttttacctaatttatcatatctctgamacagcacttactagacagcattatatcactatttgtttattcgcagaaatctgggcttttctaggtcaagggctttattttatgcagctgggtttatctacttctcgtcttagccaactctcacttgaggcttagttgagtgttctaatgtctctaagactagataaagtttatcccaaagcaaacattatattcccataggaaaagctgacatttcataaaaagaaaaatctttatgaatactatttgcctgctgtatatattggatcctaataatgaaaataattgaatgaccaaaaagtgtgtgcttttttagaggataaaaatgaacccggggctttactttgaagttaatatctgtaccggggttaatttttaagacctacttttcaaaatgatttgaa

SEQ ID NO: 571341 - DNA, 616 bp, Homo sapiens
aaccagtggcaaattgtcatcagtttaaaatcatgggttataagatattatttgcaaggttcttgataacctcaaccaaaaagatatacacggatacacaaaaaataaaaagcaagaaattaaaacatactaccagagaaaatcactttcactaaaaggaagacagaaatgaaggaaagaaggaagagcagaccacaaaacaatcagaaaacaaacaacaaaatggcaggagtaagtccttactaatagcatttaatgtaaatatactaaactctccaatcaaaagatgtagaatggctgaatggataaaaaagtaagacccactgatctgttgcctacagaaacacacttcatctataaagaacacatagcctgaaagtaaagggatggaaaaagatattccatgctaatgaatmcccaaaaaaaaaaaaaaaaaaaaaaaaaaaaagagaggaggagtggctacacttatgtcagacaaaatagacttcaggacagaaactataaaaagatacagttcattatataatgataaaggggtcagtgtggcaaggggatacaacaattataaatatgcacccaacactggagctccaggaatatataaaataaatat

SEQ ID NO: 571342 - DNA, 616 bp, Homo sapiens
aaccagtggcaaattgtcatcagtttaaaatcatgggttataagatattatttgcaaggttcttgataacctcaaccaaaaagatatacacggatacacaaaaaataaaaagcaagaaattaaaacatactaccagagaaaatcactttcactaaaaggaagacagaaatgaaggaaagaaggaagagcagaccacaaaacaatcagaaaacaaacaacaaaatggcaggagtaagtccttactaatagcatttaatgtaaatatactaaactctccaatcaaaagatgtagaatggctgaatggataaaaaagtaagacccactgatctgttgcctacagaaacacacttcatctataaagaacacatagcctgaaagtaaagggatggaaaaagatattccatgctaatgaatcccmaaaaaaaaaaaaaaaaaaaaaaaaaaaaagagaggaggagtggctacacttatgtcagacaaaatagacttcaggacagaaactataaaaagatacagttcattatataatgataaaggggtcagtgtggcaaggggatacaacaattataaatatgcacccaacactggagctccaggaatatataaaataaatat

SEQ ID NO: 571343 - DNA, 479 bp, Homo sapiens
tatgtcttattattggtgatactaattttgatgacttggttaaagtggtgtctgctaggtttctccactgcaacaatactagtttcacctttgtaattaataaatatcttacaraaaatactttgagactatacaaatatccttttcctcctcaaacattaaaactgacttgagcctgtatcagtagatcttgcatgcaaaaactcttaccattgtgctctaatggtgattttctatttccttcatttcttccatgtttattaattggaacctcctatgagggaatactttctcttctctctcatttgtttaattatttatgtcagtatggacatacggatcaaatttttatagctccaaggtgattctaatttattctcaagattgaaaaccactgctaagtggtctttgaacctagttcatgatgtggtgtctctactctgtctggtaacacaatggtcttgttttgttttgttttt

SEQ ID NO: 571344 - DNA, 479 bp, Homo sapiens
tatgtcttattattggtgatactaattttgatgacttggttaaagtggtgtctgctaggtttctccactgcaacaatactagtttcacctttgtaattaataaatatcttacaaaaaatactttgagactatacaaatatccttttcctcctcaaacattaaaactgacttgagcctgtatcagtagatcttgcatgcaaaaactcttaccattgtgctctaatggtgattttctatttccttcatttcttccatgtttattaattggaacctyctatgagggaatactttctcttctctctcatttgtttaattatttatgtcagtatggacatacggatcaaatttttatagctccaaggtgattctaatttattctcaagattgaaaaccactgctaagtggtctttgaacctagttcatgatgtggtgtctctactctgtctggtaacacaatggtcttgttttgttttgttttt

SEQ ID NO: 571345 - DNA, 364 bp, Homo sapiens
tcagtaaggtgaatacatggtcttttcagtgaaacttctaagtgtggggacattgctaaaatttacttccatcaagaagaaactccataccgcctttcctgccccacttatcctttatgtggttcaaatatgaaaatattgtaaactaattcatgtatttatctctctctcctactaaatcataaatttacatggtggcagaaattgagctttagttatcttttcatctctgatggctggaacatagaagatgctttaaaaacattggaatattttattatttatttttccttgtaaaagcagtgttctgaagtctttagaaagttatacatatacattcyttatttaaaagaatgctgactac

SEQ ID NO: 571346 - DNA, 379 bp, Homo sapiens
tgtaagttacatttttaaccaccatatatatattttcaacttcaggtttttctgaaattaccatggtatatacaatctctaagataaatggaccaacttgtaagtggatatgcattttgataattattttcaccccacttccctaaaataggaagtgatgagatatctgaaatagcaatattcaggggcctaayttcaccctttgagtggacagcagaagtgggaggagggtaagggagagggatggacaagccagtggtttctctatgtgaggaaaaatcaggagtgagtagaagaagggcactataagaaagagattatatgctataggagaaatagcactggatttagactgaaaacacaggggtctcagcctttg

SEQ ID NO: 571347 - DNA, 470 bp, Homo sapiens
gaactccagtgaaatagacttaaaagtatctgaccatatgtacccatttgctttctcatttcaaggaccacaatacaaactccagaacatacccaacatttaaataacagagctgtctggaataagatgaatccctaagaaaaacaaagatagtttcagccacacacatgcactactttactcacagaaagagaaggaaagaaaatttgaaaayatatgtccaatggatacagtttacaacttatagcaaaagaggagttatcccagaaatgctagaattgaaaaacaaaaactagtgattaggaagtggcttcagtggttagcagagtgaaacgattgataataaactgggaattttgggaacaagaaggaacttttagcttatcaaattgtattgcttattcagaaatctacaattggtaatatgcatgaatagatatgttggaatccaaaaacctgtcattaaaaat

SEQ ID NO: 571348 - DNA, 579 bp, Homo sapiens
aacctaacacccacaaaagtttttaaaagcgttacaaaaaaattaagagcaatatttctcatgaatatagctacaatgattgtgaataaaatattagcaaatcaaactgaataatgtataaaaagagttatacatcacaccaaatgagatttattccagttaagcatgtatgaatcaaagtttgcaatccagacaaacccaccatatcaaaaaatctaccagaagcaaaaccaaaacaaaacacgacacctcttagaactaatgaagaagtatagcaaggtagaaggatagacatttaatatgcaagtgttaattgctttctacttaccaacaataaacaatttaaatttgaagttagaaaaacaatactgtttacaataacaccaaataattgatgtacckgggtcaaaatttagcaatatatgtacagaattatatgtggaaaactacaaagctctgctgatagagcaaaggcaatctaaattaatagacgttccatgttcatggattcgaggactcaacattgcttagatgctgattttctcaaactgatcaatgaatttaatgaaattcccatca

SEQ ID NO: 571349 - DNA, 579 bp, Homo sapiens
aacctaacacccacaaaagtttttaaaagcgttacaaaaaaattaagagcaatatttctcatgaatatagctacaatgattgtgaataaaatattagcaaatcaaactgaataatgtataaaaagagttatacatcacaccaaatgagatttattccagttaagcatgtatgaatcaaagtttgcaatccagacaaacccaccatatcaaaaaatctaccagaagcaaaaccaaaacaaaacacgacacctcttagaactaatgaagaagtatagcaaggtagaaggatagacatttaatatgcaagtgttaattgctttctacttaccaacaataaacaatttaaatttgaagttagaaaaacaatactgtttacaataacaccaaataattgatgtacctgggtcaaaatttagcaatatatgtacagaattatatgtggaaaactacaaagctctgctgatagagcaaaggcaatctaaattaatagaygttccatgttcatggattcgaggactcaacattgcttagatgctgattttctcaaactgatcaatgaatttaatgaaattcccatca

SEQ ID NO: 571350 - DNA, 407 bp, Homo sapiens
atacctaatgtagatgatgggttgatgggtgcagcaaaccaccatggcacaagtacacaagtatacctatgtaacaaacctgcactttccacacatgtaccccagaacttaaagtaaaataaataaataaataaataaataaataaataaataartaagttctggatcacagcacagcatttgcagcatgggcggctccagcagcgctgggtgcccctctaagctcagcccgcgtccttccacggggtcgcccttgcctgctgcgcacgtactccgatgggcatgggagctaaggggctgctgaccgccagctccgcgatagtcaggaaggacattgctgttgtccggcggctggctcactcgctggggctttctgtcgtcttgtgtagtcttcggatggaatcact

SEQ ID NO: 571351 - DNA, 644 bp, Homo sapiens
tttttagccagtctaattgtgttayccttacataaagtctattattcttaatttgcagaaaaggaaattatggcataataatctattaagcatgttggatacagaacaggaattgattatttatgctctcttggtttttaattcacttatgaaaccatctaggttaaccagatgtcaaaatgtagctaaaataaaatacaaacagcagggtgtgtgatttgagcaggatggtattcactcagtcctctagggtcagtagatgctcactatctcgcaggccaatccatttaatcattattagcagagcttattcacccattccacaaatatccattagcactaagatgcagaaagccaaagctgatcatttgctccctgttaagagcctggtgtatattcttctacactttttctctttgcttatacaaatatatacaataattaacacacatataaaaaggttttgcttacttgtttgcttttactaaaatataatcataatgtcctattagtctgtaatatgcattgactcacttgttataatatacatccttttttgtgtaaattgagaaaacactgaactattattaataataaaacaatgctgttacaaaaataaatggaaataaaaaaacacaaatatt

SEQ ID NO: 571352 - DNA, 581 bp, Homo sapiens
cacacagaacacttttccatgtatttatttcctaattggatttgctctctaatgatttgtctattcatgaactttaccaattaggatgttttctatattatagacatcaactttttgacatgtgtgttgtttacattttatactttgtaattggccttttataaatcattttaaactactcttggtaacttattttttaaaatgcttgaacatttttcctagttagcaatgctaagaatgaagcagtgataatgagtcccmcctttatgaaatctggagagtcttgtactttaacatttttgctggtattatctagaatttgtctcattttgtcatcttagataattttcttttcttatatatcttcaacttaaattttatagttttgtacagtttctgttactttattttaccacagttaaatctaattaagttttatatttaaatggtttctattctttctgccaattcattcatatcctaatttgatctctagtcactggtatattactcagttaattgctaaacattttctggactttttttgtgattagtttaattcctaaattcttgcatacctg

SEQ ID NO: 571353 - DNA, 581 bp, Homo sapiens
cacacagaacacttttccatgtatttatttcctaattggatttgctctctaatgatttgtctattcatgaactttaccaattaggatgttttctatattatagacatcaactttttgacatgtgtgttgtttacattttatactttgtaattggccttttataaatcattttaaactactcttggtaacttattttttaaaatgcttgaacatttttcctagttagcaatgctaagaatgaagcagtgataatgagtcccccctttatgaaatctggagagtcttgtactttaacatttttgctggtattatctagaatttgtctcattttgtcatcttagataattttcttttcttatatatcttcwacttaaattttatagttttgtacagtttctgttactttattttaccacagttaaatctaattaagttttatatttaaatggtttctattctttctgccaattcattcatatcctaatttgatctctagtcactggtatattactcagttaattgctaaacattttctggactttttttgtgattagtttaattcctaaattcttgcatacctg

SEQ ID NO: 571354 - DNA, 401 bp, Homo sapiens
catggtggtgcacatctgtagtcccatctacttgggaggttgaggctgcagtgagctgagatttggccattgcactccagcctgggcaacagacctcgtctcacaaaaaataaaattagccaggcatggkggtgcacatctgtagtcccatctacgtgggaggttgaggctgcagtgagctgagatttggccattgcactccagcctgggcaacacagtgagaccctctctctcgaaaaaaaagaagaggggttttcaagtaagtgaacagggaatgaaattctttttgccaggaacaggtgtatggaattgtgaaaatacttaaaagatgggggtggcagcagctgaaaacccttttatgtgaagtctccaacgagtcaggcatagtacatctaggctct

SEQ ID NO: 571355 - DNA, 401 bp, Homo sapiens
catggtggtgcacatctgtagtcccatctacttgggaggttgaggctgcagtgagctgagatttggccattgcactccagcctgggcaacagacctcgtctcacaaaaaataaaattagccaggcatggtggkgcacatctgtagtcccatctacgtgggaggttgaggctgcagtgagctgagatttggccattgcactccagcctgggcaacacagtgagaccctctctctcgaaaaaaaagaagaggggttttcaagtaagtgaacagggaatgaaattctttttgccaggaacaggtgtatggaattgtgaaaatacttaaaagatgggggtggcagcagctgaaaacccttttatgtgaagtctccaacgagtcaggcatagtacatctaggctct

SEQ ID NO: 571356 - DNA, 546 bp, Homo sapiens
taacttggaactgattttttttttttttgagacagagtctcattctgtcactcaggttggagtgctgtggggcgatctggctcactgtagyctccacctcctgggctcaagtgattcttatcactcagcctccctagtagttgggactacaggtgcccgccaaaatacccggctgatttttgccttttttagaagagatggggtttcaccatattagccaggctggccttgaactcctgacttcaagtgatccacccgcctcagccccccaaagttctgggattacaggcattggaattgattttgagagaattaaataaattgttaatttcctggataaatcaattgtattcaactagttttttaaaaagtaccaaacggaggacacagtgaaatatagggtcctgcaatctgaatgccaccaatctggggaagaacatttgtacacaagcaaccaattaatttaattataaaaaaatgttttgtaagaagagttgcaaagtgtggcatgctgtgcattccaaaatttcctctaatatttgacca

SEQ ID NO: 571357 - DNA, 513 bp, Homo sapiens
ataagacgaggatgcccacctccaccacttatactcaacatagtactggaaatcctagccagagcaatcaggcaagagaaagaaataaagggcatccaaactggaaaagaggcagtcaactaccattgtttgccaatgatatgatctcatacctrgaaaaccctaagactcctccaagagactcctagatttgataaatgaattcagtaaaatctcattataaaatctacacaaatcagtagcaatgctgtccatcaacaatgatcaagctgagaatcaaatcaagaattaaattattttgcaatagctgcaaaaaataacataaaacacctaggaatatacttagccaaggaaggaaaatatctctaccaggagaactgcaaaacaccgctaaaagaaatcatagatgacacaaacaaatggaaatacatctcatgctcatgaattggaaaaatcaatatcatgaaaatcaccatacccccaaagcaatctacagattcaatgcaattccta

SEQ ID NO: 571358 - DNA, 513 bp, Homo sapiens
ataagacgaggatgcccacctccaccacttatactcaacatagtactggaaatcctagccagagcaatcaggcaagagaaagaaataaagggcatccaaactggaaaagaggcagtcaactaccattgtttgccaatgatatgatctcatacctggaaaaccctaagactcctccaagagactcctagatttgataaatgaattcagtaaaatctcattataaaatctacacaaatcagtagcaatgctgtccatcaacaatgatcaagctgagaatcaaatcaagaattaaattattttrcaatagctgcaaaaaataacataaaacacctaggaatatacttagccaaggaaggaaaatatctctaccaggagaactgcaaaacaccgctaaaagaaatcatagatgacacaaacaaatggaaatacatctcatgctcatgaattggaaaaatcaatatcatgaaaatcaccatacccccaaagcaatctacagattcaatgcaattccta

SEQ ID NO: 571359 - DNA, 518 bp, Homo sapiens
atggctgggctcctggctaaaccctacccttaagcccagaaccgtggctctaagtgaaaacagctggccttgtttttctgcccaaatgtcacctttttggcctgccrcacccctatcctgtgcccataaaaagacctcagctagcagagccacacaagcagctgatgcaagcggtcagggatacaagttgctgagcgttggggatacaagcagctgagtggcaagcagagaagcagcaactaaagtcaaagactatgggtaaacgtggctaacttcagacagtgcagcttcagggaaagaccacgttcttcccgcaccatcccctttccacctctggtaacacaggtctcctaaggtgagctcagggagttcagaaacctcccgtggagcataaaggcaaaagctcacttaatcttgattttcattactaatacagaccacgaaagtgaggcctcacaatccttctgacttttgggttttaagcaggaggtgcccccatcccactgagagccatcacc

SEQ ID NO: 571360 - DNA, 385 bp, Homo sapiens
catggtggttcatgcttgtaatcccagcactttgggagtccgagacaggtggatcacaaggtcaagagatcgagaccatcctggccaacatggtgaaactctgtctgtcctaaaaatacaaaaattagttgggtgtggtgccacactcctgtagtcccagctactcaggaggctgagacaggaggattgctttaacctgggaggtggaggttgcagtaagccgagatcacactactgcactccagcctggtgacagagcgagactccatctcaaaaaaacaaaacaaaayaaaacaaaaaaaaaccatcaggtttcataagatttattcactatcatgagaacagcatgggaaagacttgcccccatgattcaattacttcccac

SEQ ID NO: 571361 - DNA, 451 bp, Homo sapiens
gttttatccaggcaaatgtatatgcaagaccagaattcattagagaagcatgagctatggtggtaggtattagmgttcctgccatggatgttactgctcaaagtatggaactggatgtgatttaggaagaacagcttgagtttatgtagagaagatgaaagtatttaggtaattactcggaagcaggagggagacaaaataacaatctaaaattagaggacaggagaaagggccgggtgtggtggctcacacctgtaatctcagcactttgggaggctgaggtgggtggatcacctgaggtcaggagttcgagaccagcctgaccaacatggctaaaacccatctgtactaaaaatacaaaaaacaaaacaaaacaaaattagctgggcgtggtggagtgtgcctgtagtcccagctacttgggaggctgaggcaggagaatagcttgaat

SEQ ID NO: 571362 - DNA, 451 bp, Homo sapiens
gttttatccaggcaaatgtatatgcaagaccagaattcattagagaagcatgagctatggtggtaggtattagcgttcctgccatggatgttactgctcaaagtatggaactggatgtgatttaggaagaacagyttgagtttatgtagagaagatgaaagtatttaggtaattactcggaagcaggagggagacaaaataacaatctaaaattagaggacaggagaaagggccgggtgtggtggctcacacctgtaatctcagcactttgggaggctgaggtgggtggatcacctgaggtcaggagttcgagaccagcctgaccaacatggctaaaacccatctgtactaaaaatacaaaaaacaaaacaaaacaaaattagctgggcgtggtggagtgtgcctgtagtcccagctacttgggaggctgaggcaggagaatagcttgaat

SEQ ID NO: 571363 - DNA, 516 bp, Homo sapiens
cctgtagtcccagctacttgggaggctgaggcaggagaatagcttgaatctgggagggggaggttgcaatgagctgagatcgcgtcactgcactccagcctgagcaacaagggtgaaactctgtctcaaaaagaaaaaaaaaaaaaaaaaaaaaaaaaggaagacaggaggaagaagacaaacccaaggaagcaagtctttgcagtgttaaaaatagaaacagaaaagtagagaagtattccatagaagttaagaaagaaaaagattgacagaaaaagaggtaatgctatcaaatgcatcaaagagatcaaartgaagaagcaccaaggaaatattgatatacgaacctgtagagggtgagaatttttatacatgatacatataattccctgtcctttcactgttagttacatgcaaactcttaagttacatatatcaaaatatgttactcaaagtgtacaatccacacttcattcagaaatgaaagtggccatttgggtggaggatgtgatattt

SEQ ID NO: 571364 - DNA, 516 bp, Homo sapiens
cctgtagtcccagctacttgggaggctgaggcaggagaatagcttgaatctgggagggggaggttgcaatgagctgagatcgcgtcactgcactccagcctgagcaacaagggtgaaactctgtctcaaaaagaaaaaaaaaaaaaaaaaaaaaaaaaggaagacaggaggaagaagacaaacccaaggaagcaagtctttgcagtgttaaaaatagaaacagaaaagtagagaagtattccatagaagttaagaaagaaaaagattgacagaaaaagaggtaatgctatcaaatgcatcaaagagatcaaagtgaagaagcaccaaggaaatattgatatacgaacctgtagagggtgagaatttttatacatgatacatataattccctgtcctttcactgttagttacatgcaaactcttaagttacatatrtcaaaatatgttactcaaagtgtacaatccacacttcattcagaaatgaaagtggccatttgggtggaggatgtgatattt

SEQ ID NO: 571365 - DNA, 446 bp, Homo sapiens
gatgatatttgaagataggacctttgagagaaaatttgggttagattaggtcatgcggggtgaagctctcatgataaaattagtggctttattagaagaagaaggaaaagaaatctccttttaagagrtcacatgctgaggaaagatcatatgaagatatagcaagagtggcttctgcaagccaggaggagaaccctcaccaggaactgaagctgctggaaccttgatcttggacttccagccccagaactttgagaagtaaatatatattgttgaggccaccaatctatggtattttgttatggcagccaagcagaacaaatgccaaggtcagctggtcttgaaaataccatcaagcataccacctttctttcttcccttttggaaaacatgggcttcctcctcctcccatcccatgcccttggatatcctgtttccttttattt

SEQ ID NO: 571366 - DNA, 501 bp, Homo sapiens
atatatatataaaggggagtttattaagttttaactcacatgatcacacagtcccacaataggctgtctgcaggctgaggagcaaggagagccagtctgagttccgaaactgaagaacctggagtccaatgttagagggcaggaagcatccaacatgggwgaaagatgtaggctgagaagctaggcctgtctctcttttcacatttttttgcctgcttatattctagctgagctggcagctgattagattgtgcccacccagattaagggtgggtctgcatttcccaaccccctgactcaaatgttaatctcctttggcaatgccctcacagacacacccaggatcagtactttgtatccttcaatccagtcaagttgatactcagcattaaccatcacactgacaaaattaattgcaagtgaggatccatagaagaatgtatccatggaatcaaagtgcattttattaattatggttaaatattttaatgatgatatacc

SEQ ID NO: 571367 - DNA, 501 bp, Homo sapiens
atatatatataaaggggagtttattaagttttaactcacatgatcacacagtcccacaataggctgtctgcaggctgaggagcaaggagagccagtctgagttccgaaactgaagaacctggagtccaatgttagagggcaggaagcatccaacatgggtgaaagatgtaggctgagaagctaggcctgtctctcttttcacatttttttgcctgcttatattctagctgwgctggcagctgattagattgtgcccacccagattaagggtgggtctgcatttcccaaccccctgactcaaatgttaatctcctttggcaatgccctcacagacacacccaggatcagtactttgtatccttcaatccagtcaagttgatactcagcattaaccatcacactgacaaaattaattgcaagtgaggatccatagaagaatgtatccatggaatcaaagtgcattttattaattatggttaaatattttaatgatgatatacc

SEQ ID NO: 571368 - DNA, 592 bp, Homo sapiens
ctctgttgcacaggctggagtgcagtgacatgatcacagctcactgcagcctcaacctcctgggctcaagcaatcttcccactttaatctcccaagtacctgagactacaggcacatgccgccatgtctagctaatttctgtttttgtttttgttttctagtgatagggtttcgctgtgtttcccaagctggccttgaactcctgagctcaaacaatccayccatctcggcttcccaaagtgttagcactacagatgtgagctaccacatctggcctcgtattacaatttagagaaattaaagcctggatttcaatggaggtgactataagacaatctattgcaagataagattaaatataggataaaaattaggaagttaaatatgtgtagtttatgatatttgtaaatctgtattgactcgcttgttccctaaatgtagatagaataccagatttaacaagaaagaaaattgcaaacaactaacatttattgatctccaaatctgagcacttccacaaatattatctaacaatctccctcattacctttatgaggcagacaattgtccatgtcagagacgttaaaactga

SEQ ID NO: 571369 - DNA, 536 bp, Homo sapiens
catagaggtactctccaaagaacattataattaaacttgaaaagccaaagacaaagagataactttaaaagcagcaagtcacatatgaaggaatccacattagactgtcagcagattgctcagtagaaaccttgcaggctagaagagaataagatgatatgttcaaagtgccaaacaaacaaacaaaaaaacccgtcagtcaagaatactatatcagcaaagttttccgtctaaaatggataataaagtcttccccagacaaacaaaagctaaaggawtttaatgccaatagacctgccctacaagaaatacttaagggagttattcaggtagaaatgaaaggatggtaattactctcatgaacacatatgaaagtgtaaaactcactagcagagttaaatccatagtcaaatccagagtactccaatactataatggttgtgtataaatcatacgtatctctagcatgaaggttgaaagttaaaatggtcatacataattaaagctacaataagttgtgaaggaatgcacaatgt

SEQ ID NO: 571370 - DNA, 370 bp, Homo sapiens
aaatttaactgcttcaaccctccaattacattttcaccatctgtgcttccacattttcatgaaataccccagtgagatgacacagaaacattgctgtgtaactaacacacataacataactcatgtatgtgacacaacgaatccaaaaaaagctgatacattaaagagcagaggaattaaatttttaaaccctgttaaaggatgtggtagaaaaaacatctggaaaagaacaggttgattgaaataggcctgcctggcttcagaattggaaggtcatgctaaactaatctccagaagaactctgagggtgttactgccaaaaaagacaaaagtggctcaggcatgtcaygcatttggattttcaaggatc

SEQ ID NO: 571371 - DNA, 537 bp, Homo sapiens
actacaagtggaggtgttaaaaaaagccaagatgagtcgaatgctctgctctgagtgattgtgtataaaatagtatggagtctggagacaatcaaattatgttataattaagtacaatwgctaggaagattgaagccaatttgcagccattagtaagagcaaatcaacatacaatgtatttgtgtatacttataatcctgagttttcattttaaaatatttgttcatattttctttgtaaacattatatatatttcattgcatatgaataagattccctatattcatatattttatagtatgatgcaaaaatataaacaatattttcaattaaatttcagtgatggcttcaaaaatattgattaaaaggccaggcttcatttctcatgcctgtaataccagcactttgggaggccaaggcaggagaattacttgaacccaggagtttgagaccaacctgggcaacataatgagactttgaatctacaaaaaatattaaaaattagccaggcatggtggcgtgtgcctgtagtcccag

SEQ ID NO: 571372 - DNA, 652 bp, Homo sapiens
aaaagtgtgtggcatctcctagtctcctctcttgctcccactctccctatgtgatgtgcctgctccccttagcttccactataattggaatcttcctgaggcccccaccagaagcagatgcagtgccatgcttgtcagcctgcagagccatgaaccaatgggatattcctttctagcaattcaagaacagcctaatatagtggctctaccaaagaacytacatgtgtcctcttcagaatggtggattccaggtagtaagatttcctagatggtggcagatttcctccagggcaagcattccaaaaacaccagggggaaccatacagtctttctaacctagcctaaattattagccaattgttaaacattcatcaaaacaccactgacttagttcttccttctttgctttctatgtttgtgtacatgctgaaaagcatttagaaaactatgaagtatttcacaaaagttagaaaatcattagaaaatgattataaaaaatgggtcttatgtctatgacaggatagattgctgaaatatcaactaatgttttgatctcattatattttttaccttggattttcaagcaaggtcattagtcttcttgttcttttattcagggacatttataggaccaaagcaaaatttcataaca

SEQ ID NO: 571373 - DNA, 652 bp, Homo sapiens
aaaagtgtgtggcatctcctagtctcctctcttgctcccactctccctatgtgatgtgcctgctccccttagcttccactataattggaatcttcctgaggcccccaccagaagcagatgcagtgccatgcttgtcagcctgcagagccatgaaccaatgggatattcctttctagcaattcaagaacagcctaatatagtggctctaccaaagaacctacatgtgtcctcttcagaatggtggattccaggtagtaagatttcctagatggtggcagatttcctccagggcaagcattccaaaaacaccagggggaaccatacagtctttctaacctagcctaaattattagccaattgttaaacattsatcaaaacaccactgacttagttcttccttctttgctttctatgtttgtgtacatgctgaaaagcatttagaaaactatgaagtatttcacaaaagttagaaaatcattagaaaatgattataaaaaatgggtcttatgtctatgacaggatagattgctgaaatatcaactaatgttttgatctcattatattttttaccttggattttcaagcaaggtcattagtcttcttgttcttttattcagggacatttataggaccaaagcaaaatttcataaca

SEQ ID NO: 571374 - DNA, 652 bp, Homo sapiens
aaaagtgtgtggcatctcctagtctcctctcttgctcccactctccctatgtgatgtgcctgctccccttagcttccactataattggaatcttcctgaggcccccaccagaagcagatgcagtgccatgcttgtcagcctgcagagccatgaaccaatgggatattcctttctagcaattcaagaacagcctaatatagtggctctaccaaagaacctacatgtgtcctcttcagaatggtggattccaggtagtaagatttcctagatggtggcagatttcctccagggcaagcattccaaaaacaccagggggaaccatacagtctttctaacctagcctaaattattagccaattgttaaacattcatcaaaacaccactgacttagttcttccttctttgctttctatgtttgtgtacatgctgaaaagcatttagaaaactatgaagtrtttcacaaaagttagaaaatcattagaaaatgattataaaaaatgggtcttatgtctatgacaggatagattgctgaaatatcaactaatgttttgatctcattatattttttaccttggattttcaagcaaggtcattagtcttcttgttcttttattcagggacatttataggaccaaagcaaaatttcataaca

SEQ ID NO: 571375 - DNA, 560 bp, Homo sapiens
ccatacaattacatggaaattaaacaacttgttcctgaaagaacatctttgggtaaacaacaaaattaaggcaggaattttaaagttctttgaaataaatgaagacagagacacaacataycaaaatctctgggatatggcaaaagcagtgttatgaggaaagttgatagtactaaagttaggaacttctcaaattaatgaaataacaaaacacctagaaaaattagaaaaactaaaaaaaactaaccctaaagctagcagaaaaaaaaaaaaactaagagcagaactgagcaaaattgagaaccaagtatccatacattttagctcaacaaaaccaaatgttggctctttaaaatgatgaacaagatctatagactgctagctagattaataaagacaaaaagagaggtaattcagataagcacaatcagaaatgacaaaggttacatttctactgatcccacaaaaatgcaaaagatcctcagagactagtagaaacacctttatgcatacaaactaaaaaaactagaggaaatgagtaaattcctggaaacacacaa

SEQ ID NO: 571376 - DNA, 560 bp, Homo sapiens
ccatacaattacatggaaattaaacaacttgttcctgaaagaacatctttgggtaaacaacaaaattaaggcaggaattttaaagttctttgaaataaatgaagacagagacacaacataccaaaatctctgggatatggcaaaagcagtgttatgaggaaagttgatagtactaaagttaggaacttctcaaattaatgaaataacaaaacacctagaaaaattagaaaaactaaaamaaactaaccctaaagctagcagaaaaaaaaaaaaactaagagcagaactgagcaaaattgagaaccaagtatccatacattttagctcaacaaaaccaaatgttggctctttaaaatgatgaacaagatctatagactgctagctagattaataaagacaaaaagagaggtaattcagataagcacaatcagaaatgacaaaggttacatttctactgatcccacaaaaatgcaaaagatcctcagagactagtagaaacacctttatgcatacaaactaaaaaaactagaggaaatgagtaaattcctggaaacacacaa

SEQ ID NO: 571377 - DNA, 560 bp, Homo sapiens
ccatacaattacatggaaattaaacaacttgttcctgaaagaacatctttgggtaaacaacaaaattaaggcaggaattttaaagttctttgaaataaatgaagacagagacacaacataccaaaatctctgggatatggcaaaagcagtgttatgaggaaagttgatagtactaaagttaggaacttctcaaattaatgaaataacaaaacacctagaaaaattagaaaaactaaaaaaaactaaccctaaagctagcagaaaaaaaaaaaaactaagagcagaactgagcaaaattgagaaccaagtatccatacattttagctcaacaaaaccaaatgttggctctttaaaatgatgaacaagatctatagactgctagctagattaataaagacaaaaagagaggtaawtcagataagcacaatcagaaatgacaaaggttacatttctactgatcccacaaaaatgcaaaagatcctcagagactagtagaaacacctttatgcatacaaactaaaaaaactagaggaaatgagtaaattcctggaaacacacaa

SEQ ID NO: 571378 - DNA, 526 bp, Homo sapiens
tacatgtactttctgaatctaaaataaaacttgaaattatttttaaaattataaaccaaaaccaaataaaaaatttaaaaaaatatttttgcaacacagtcaatcctattcgttaagatattgtgtatggctgcttttgagctacagtagtagagtttactagttgtggcrtatttactatctacaaagttttacccatgctctatgtgaatggcaccatctagagctgagtactacaaaacttgcacaatcatgcagcatcccaaaaactacagatccctggcaaaaatcatcatccctactgtgtcaggaaagtgacttcaaataacatgtgaggttcaatgggggctatattagtgggactgtaacaggatacattttagaagaggataaaaatcacaactgcaaatacaaatttaacatgtcaagacttttatttaactaaataattgagagaatcaataatatataacaaccagttcaaatgaagatttgacttccagagatttacagtttctagctcatc

SEQ ID NO: 571379 - DNA, 550 bp, Homo sapiens
ccacctcttaataccatcacctcggaatttaggctacaacatatgaattttggggagaacacaaacattcagacaatagcatatacatataatagaatcactgtggagctcttataaaccatgttttggtataaatgtaataatagaatgagttcatgatataatataagtgaaaaagtaagatatataattataggtacagtatgattacactcttttatataatgtatacaatgtataatatgtgaaatatatatgtatgcataataaatacatgtacataaaatatttcctggtatgtacatgtgtatatatatttttccatgtatataatttatacacattaacaaaaaatgagaaaatatgacaaatatttaacaatagctatttctccagtggcaggattacagataatttttattttcatacatttctgtctgacttttccaaatgtgctattatgagcataaattttataattaaatacaagtcaataagcattttaawgtgcctataacagcccatcagcaagtgaagagatgagataaaa

SEQ ID NO: 571380 - DNA, 591 bp, Homo sapiens
aaatctcaagtttcttgactgcccacatggatctcttttttagacttcattatttttgttcctgtctctgccactcaatagctgtatgacattggtaaagttacctaacttccctttgcctcactttcttcatcttaagattattatgaggatttaatgtagtgtatgtaagatcctgttacacagtaagtgttcaataaacattatctactattatgttatcctctttttttcactgcccattaagaagacttttttttttttttttttttttttttttgayggagtctcgcactgtcgcccaggctggagtgcactggtgtgatctcggctcactgcaagctccacctcccgggttcatgccattctcctacctcagcctcctgagtagctgggactacaggcacccgccaccacgcccagctaatttttttttttgtacttttagtagatacggggtttcaccgtcttagccaggatagtctcgatctcctgaccttgtgatccacctgcctcggcctcccaaagtgccgggattacaggcgtgagccaccgcgcccggccaagaagacactgttttatattaaatgt

SEQ ID NO: 571381 - DNA, 629 bp, Homo sapiens
ctgcatgaaaacttggcatgtcctgaaatcacaaagctcatatatgagagaaacttgatktaagtttccacattttggcaacaatcctaaaaatttatatggcattatcaataataggctgtaataccaaaagaaactgttctaaacttttcaataataaaaatataatttcaaccagctatgctaaatactgaattatttttctgatatccctgcagaagatgacattataaaattcttgtaatatgaagaagcaatccaaaagtaagcctcctccccttttctactccctaaaaaagaaaaaaaagtattatagaagtgcattggtgtttaattaataagatttttctgaattttgttcatttatggcattttaactctttaaaattttataatttttaccattattttctcattccagtcaaattagtacctaagtttgtattaataatcctgtattatttttctttaaaaggacctccacattgactaagcttccaaccccacaatatctacctttgtctcactcttgaaatgctattttccactggcttctagaaaatcatactctccttattttcccccagcttactgactctttctctgcacttgtcataaaagcaggagtg

SEQ ID NO: 571382 - DNA, 594 bp, Homo sapiens
ggttcaatggagaattctaccaaatggttgaagaagaattaacatcaactctatacaatttcttccagaaaacagaagaagaaaaacttaccaattaatttacgaagctaaaattacactaatccccaaactagacaaagacaaagggagggaaggaagaagggagggtgatgaaagaaagagaaggaaaattacacatcaacattcctcataaatattcatgcaaaaaatcattaacaaaatattgcaaacaaaattcaaaaacatagcaataatataatgatataaaaagaatcatacaacatggcctaatggggtttatttcagggaagcmaggctagttcaactttcaagaatcaatcaatgtaagctaaaacattaacaggatttatttaaaatcacatatcaaatgatgcagaaaatacgtatcaaatgatgcagaaaaaatcatttgacagaattcaatattcatttgtaataaaaaatgctcagaaaaataggagtagaagggaacttcctcaacttgacaaaaagcatcttcaaaaaacctatagataacattatatttaagtggtaaaagactcaagactttca

SEQ ID NO: 571383 - DNA, 658 bp, Homo sapiens
caatttcttccagaaaacagaagaagaaaaacttaccaattaatttacgaagctaaaattacactaatccccaaactagacaaagacaaagggagggaaggaagaagggagggtgatgaaagaaagagaaggaaaattacacatcaacattcctcataaatattcatgcaaaaaatcattaacaaaatattgcaaacaaaattcaaaaacatagcaataatataatgatataaaaagaatcatacaacatggcctaatggggtttatttcagggaagcaaggctagttcaactttcaagaatcaatcaatgtaagctaaaacrttaacaggatttatttaaaatcacatatcaaatgatgcagaaaatacgtatcaaatgatgcagaaaaaatcatttgacagaattcaatattcatttgtaataaaaaatgctcagaaaaataggagtagaagggaacttcctcaacttgacaaaaagcatcttcaaaaaacctatagataacattatatttaagtggtaaaagactcaagactttcaccctgaaattgggagcaaagcagagatgtctactctcagcacttttactcaatatagattgaactcagctctgtaccaagcggacctaatagacatttacagaacactccaccccaaat

SEQ ID NO: 571384 - DNA, 586 bp, Homo sapiens
atccttctcagtaaactatcgcaaggacaaaaaaccaaacaccacatgttctcaatcatagatgggaattgaacaatgagaacacatggacacaggaaggggaacataacactctggggactgttgtggggtckggggacgggggagggatagcattaggagatatacctaatgctaaatgacgagttaatgggtgcagcacaccagcatggcacatgtatacatatgtaactaacctgcacattgtgcacatgtaccctaaaacttaaagtataataataataaaaaaataaaaaataaaaaaagagaaacaagaggaaataaaaggcatgtatactggaaaaaaaaaaaactacccctatttccagatgatatgatagtctacatagaaaatctcaaggaactcattaaaaagctcatagaaacaataagtgaatttagcaaggtagcatggtacaaaataaacctgcaaaaataaattgtattttaatatcaataatgaatatatgggaagaatttaaaatgcagtactatttacaaccatgaaaacatacttaaatataggtgaaactctaacaaaaacatg

SEQ ID NO: 571385 - DNA, 520 bp, Homo sapiens
gcccacagaatataacaattgttagctctgtaaatagagatgtattcagaataggcaaaataatacagtggaataacattatgaactttgtagtgtaaaggtctgagttcaaatgccagcattatacctgactttctgggaacatcaagttatttaatttctcaactgcaggttcatgtgaaaaatggagatgttatttcctaactaatggctckttgggaggcataaatgaaaaaatgtatataagaagtaccgcacggatcaagcacagagtacatatttagtgatggtcagttctccttccttccccttatactagactcactcacaccaggccttgagctagagatgaataagacatagcccaaagccctcaaaactcctttttgatctttatgatattctaggtcacctcttgttctttatttatgttccttggaatttaaagctaattttaacattctttcaccatcaaatttttttccacagaactttccactccttctgataattgtgtagt

SEQ ID NO: 571386 - DNA, 520 bp, Homo sapiens
gcccacagaatataacaattgttagctctgtaaatagagatgtattcagaataggcaaaataatacagtggaataacattatgaactttgtagtgtaaaggtctgagttcaaatgccagcattatacctgactttctgggaacatcaagttatttaatttctcaactgcaggttcatgtgaaaaatggagatgttatttcctaactaatggctctttgggaggcataaatgaaaaaatgtatataagaagtaccgcacggatcaagcacagagtacatatttagtgatggtcagttctccttccttccccttatactagactcactcacaccaggccttgagctagagatgaataagacatakcccaaagccctcaaaactcctttttgatctttatgatattctaggtcacctcttgttctttatttatgttccttggaatttaaagctaattttaacattctttcaccatcaaatttttttccacagaactttccactccttctgataattgtgtagt

SEQ ID NO: 571387 - DNA, 503 bp, Homo sapiens
ttgctgagatagccaatctcataggatgaatggggrtaggggatcagatcaagactaagtatttagtgagtgctaagctttatgtaagttacttcatttaacctcttgacagtcctaccatgagaaatgtgagcttcagagagagaggatgagtaatttacctgtgttcacactgacggagagtggtgagttatttaccaaaggtcacccagcaggtgagatttgcatccacattagtcagactccaaagcctatgctcattctgctacattagaaaccttcccaacatgccagttttttctttacaatgagataagtaccacttccagaaccagaattccctggttgtcagacagtcagagcattttcttcctaataatgatatatttttgaagtttgaattaggaatagttttctagtcaatgtgtaattaagggaaagttgacggtctcttgggatatttcactgataccatagggaagttcagacacacacaggccaga

SEQ ID NO: 571388 - DNA, 503 bp, Homo sapiens
ttgctgagatagccaatctcataggatgaatggggataggggatcagatcaagactaagtatttagtgagtgctaagctttatgtaagttacttcatttaacctcttgacagtcctaccatgagaaatgtgagcttcagagagagaggatgagtaatttacctgtgttcacactgacggagagtggtgagttatttaccaaaggtcacccagcaggtgagatttgcatccacattagtcagactccaaagcctatgctcattctgctacattagaaaccttcccaacatgccagttttttctttacaatgagataagtaccacttccagaaccagaattccctggttgtcagacagtcagagcattttcttcctaataatgayatatttttgaagtttgaattaggaatagttttctagtcaatgtgtaattaagggaaagttgacggtctcttgggatatttcactgataccatagggaagttcagacacacacaggccaga

SEQ ID NO: 571389 - DNA, 554 bp, Homo sapiens
tgtgcaacagtacactgatatcactctcttcagtggcttgagttgttcctggtattaatataggattgtttcacgaaaggttttaaagctgaacattaaaayctctgaggttttgttgtggttgtttttcctaaagataatttacttataagtgcagatattcattaaatcactattaatcaaatatttatgaagaaaagagccaagccccagaaaacaagaaaaatttcctatttgtaaaataagtaactgaaggaacaaggagagtctagcattctactgtgtagaataatcaagaacatcaagagtacacaggatatggcacccagatcctcaatgctcctgaacgctatactttacagggattcacaggctcagcacctggattcagaattaatataaattggcttgagctgttattatatcagaaacaaaatgtcactaatatttgaatgctcaatgcacaagaagagttttactgaacaataaaaaaaatggctggctcctccaagcatagtgtaggttacaggcttctaacatcattttctaaatca

SEQ ID NO: 571390 - DNA, 537 bp, Homo sapiens
tgcctcggcctcccaaagtgctgggattacaggcgtgagccaccgcacctggccagcactctattttttaatgatggtaacagtacatgtcatttcttcttcttcttctgagcattcttcttggcagaaaccagttttagcagctctcaatgtgaggattactaaagtagataatctgtagatgcccttctaastccaaaatatatacatctctaggaaggaagataaacaaaacattggttgttattttgaagtagagattttccccccatgtaaagttaaagacaaatgacttgaccaattctatattgatttgttgtagctcactcagatgagctgatgggacatgctgtgtacggaggagcatttgcagttacaacactttgtagccatgcaggatggggcaattaatccagaaccattatttaataaaaagatgattttttaaatgtggaaaattgagcagtctaatgcattgcctttatgcccctgggaaaaataacaacacaacattataaaataaatgcccctggaatt

SEQ ID NO: 571391 - DNA, 592 bp, Homo sapiens
  misc_feature 1, 2, 3, 4, 5, 6, 7, 8, 9, 10, 11, 12, 13, 14, 15, 16, 17,18, 19, 20, 21, 22, 23, 24, 25, 26, 27, 28, 29, 30, 31,32, 33, 34, 35, 36, 37, 38, 39, 40, 41, 42, 43, 44, 45,46, 47, 48: n = A,T,C or G
nnnnnnnnnnnnnnnnnnnnnnnnnnnnnnnnnnnnnnnnnnnnnnnngctctcaccccaaaagaactttcccgtttgcaaaagtaaactacttacaaggagacaatgtgatcatcctgaaggcttcaagtccttccattcccccaaaatcatgtctccaacaggtaggcagagaatgaggcttccagtttgattccccatatggttaaattcgagatgagaaaataccttgagcacrtggagccccttggatgcatcatccctgactcagccattccttcatgtagataaatgaacacactgatgcattctcctcatgctcccaaaaaaatttaaggagcgattttttttttttttttgccctgtgtctgatcaccactgagctgggatagagcaaacctctaggttagcagagcaaagactgctgtctaagaaggctctcaagagatccattatcccttaattgactgatgctgatttggccccaggttagtggtagggatcacagcgaggagaggaaagtgctaccgccaatgaacagctttgcacacactatatggtttcagtgcctacatgtgcacctctcacttat

SEQ ID NO: 571392 - DNA, 592 bp, Homo sapiens
  misc_feature 1, 2, 3, 4, 5, 6, 7, 8, 9, 10, 11, 12, 13, 14, 15, 16, 17,18, 19, 20, 21, 22, 23, 24, 25, 26, 27, 28, 29, 30, 31,32, 33, 34, 35, 36, 37, 38, 39, 40, 41, 42, 43, 44, 45,46, 47, 48: n = A,T,C or G
nnnnnnnnnnnnnnnnnnnnnnnnnnnnnnnnnnnnnnnnnnnnnnnngctctcaccccaaaagaactttcccgtttgcaaaagtaaactacttacaaggagacaatgtgatcatcctgaaggcttcaagtccttccattcccccaaaatcatgtctccaacaggtaggcagagaatgaggcttccagtttgattccccatatggttaaattcgagatgagaaaataccttgagcacatggagccccttggatgcatcatccctgactcagccattccttcatgtagataaatgaacacactgatgcattctcctcatgctcccaaaaaaatttaaggagcgattttttttttttttttgccctgtgtctgatcaccactgagctgggatagagcaaacctctaggttagcagagcaaagactgctgtctaagaaggctctcaagagatccattatcccttaattgactgatgctgatttggccccaggttagtggtagggatcayagcgaggagaggaaagtgctaccgccaatgaacagctttgcacacactatatggtttcagtgcctacatgtgcacctctcacttat

SEQ ID NO: 571393 - DNA, 601 bp, Homo sapiens
aaattttctctcaatgtaattctgaatatattaagtattggtagctatataacctttaaaaaatgaagytgtttgggattttcaaccattttcaaaagggtcctaaggctgaatgatctgagcacccttcctctgggctgggagaggaattagggagggggaatgagaattggcctctgggtcactcccagtatgcaggaaggacatttaccctgggctcaaccatgagaattcagggagtccatgaaattaaataggaaaagaaatgcatttttatttacactgccttctaagtgaaaattagtattttcttctgttatgagtgtaagcaaaaagccataagaataccagcagtactttgccatcagcagaaactgtaggtattttcttatcacattaacggtgatggcagatatcagaagctttactttaaaattcagactattgtcgctattagatctgccatggtaaagaagcacatgccccactatgtacaaattctttttaaaatatgttgatgactatttcaacgcaactagctttgtttggtatcctaatattttatacagctataaacgttattctgggaagaggcccatta

SEQ ID NO: 571394 - DNA, 601 bp, Homo sapiens
aaattttctctcaatgtaattctgaatatattaagtattggtagctatataacctttaaaaaatgaagctgtttgggattttcaaccattttcaaaagggtcctaaggctgaatgatctgagcacccttcctctgggctgggagargaattagggagggggaatgagaattggcctctgggtcactcccagtatgcaggaaggacatttaccctgggctcaaccatgagaattcagggagtccatgaaattaaataggaaaagaaatgcatttttatttacactgccttctaagtgaaaattagtattttcttctgttatgagtgtaagcaaaaagccataagaataccagcagtactttgccatcagcagaaactgtaggtattttcttatcacattaacggtgatggcagatatcagaagctttactttaaaattcagactattgtcgctattagatctgccatggtaaagaagcacatgccccactatgtacaaattctttttaaaatatgttgatgactatttcaacgcaactagctttgtttggtatcctaatattttatacagctataaacgttattctgggaagaggcccatta

SEQ ID NO: 571395 - DNA, 601 bp, Homo sapiens
aaattttctctcaatgtaattctgaatatattaagtattggtagctatataacctttaaaaaatgaagctgtttgggattttcaaccattttcaaaagggtcctaaggctgaatgatctgagcacccttcctctgggctgggagaggaattagggagggggaatgagaattggcctctgggtcactcccmgtatgcaggaaggacatttaccctgggctcaaccatgagaattcagggagtccatgaaattaaataggaaaagaaatgcatttttatttacactgccttctaagtgaaaattagtattttcttctgttatgagtgtaagcaaaaagccataagaataccagcagtactttgccatcagcagaaactgtaggtattttcttatcacattaacggtgatggcagatatcagaagctttactttaaaattcagactattgtcgctattagatctgccatggtaaagaagcacatgccccactatgtacaaattctttttaaaatatgttgatgactatttcaacgcaactagctttgtttggtatcctaatattttatacagctataaacgttattctgggaagaggcccatta

SEQ ID NO: 571396 - DNA, 601 bp, Homo sapiens
aaattttctctcaatgtaattctgaatatattaagtattggtagctatataacctttaaaaaatgaagctgtttgggattttcaaccattttcaaaagggtcctaaggctgaatgatctgagcacccttcctctgggctgggagaggaattagggagggggaatgagaattggcctctgggtcactcccagtatgcaggaaggacatttaccctgggctcaaccrtgagaattcagggagtccatgaaattaaataggaaaagaaatgcatttttatttacactgccttctaagtgaaaattagtattttcttctgttatgagtgtaagcaaaaagccataagaataccagcagtactttgccatcagcagaaactgtaggtattttcttatcacattaacggtgatggcagatatcagaagctttactttaaaattcagactattgtcgctattagatctgccatggtaaagaagcacatgccccactatgtacaaattctttttaaaatatgttgatgactatttcaacgcaactagctttgtttggtatcctaatattttatacagctataaacgttattctgggaagaggcccatta

SEQ ID NO: 571397 - DNA, 484 bp, Homo sapiens
ccattaaacctcgttcctttatmaattacccagtattgggtatgtctttatcagcagcatgaaaacagactaatacaacatctaaacgttgtgaagatggtaaattctgtgttaggtttatcgtaacagagtagcaaataataagtaaaataataaaacttagcacttttctttcaaaataaatataaacgtaggtttgcctatgttccaagagcctttcagtggtgtgactgacttgcacattaaccaaagaaaaagggcatctgtggtagagaccaccatcctggagcagtcgtgtggggagcacagatggaacagaaggagaaagtagaaagagtgctcttgtaatcttgcaaatgatgcaagttaaaatggtgggcatggtctgtcttaagttatggagctgaactattaatacatctcaaatgtcaaatatgaggtttattcagcacattgactgataatgcccccttaatatttctaa

SEQ ID NO: 571398 - DNA, 524 bp, Homo sapiens
gagaaattttgtgtagtgttaatttcccagttagaagtttagaaatccttattacttttcagttttgctagaagttatctgtctgcactatttgcactgaataattcaggttytaacaaacagttaatcttgaagtcaaaaaatgcatatcataaatggatagaaataaatgtgcctactaaaaactgtaaaacaaaaggaaatgggaagtacattttacttggtaaatatgtaaaattgctactccctctgtcatgatgtaggtacacaaaatgattaacttcagaagctggatgggataacctggccctatatgccatcctgtgatacattccccttcggtctcccctctcactgtcaaacttcttgaaagggaagctgcaaacctctttaaacatttagtctctgacctactaaactctaccgcatggagtcatacctcctctaccttcttcttctgtatgtttttttttttttttttttttttttttaaaaacggatttttgctttgttgcccgggctgg

SEQ ID NO: 571399 - DNA, 263 bp, Homo sapiens
aatcaaatggaatggaatggaatgcaatagaattgaatagaatggaatgcagtgaaatggaacggagtggaatcgagtggaatggaatcgaatggagtgaaatggaatggaatgcacttgaaaggaatagactggaacaaaatgraatcgaacggtaggaatcatacagaacagaaagaaatggaacggaatggaatgcactcgaatggaaaggactccaatggaagggaatcgaatggaatgaaatagaaagaatggaattg

SEQ ID NO: 571400 - DNA, 263 bp, Homo sapiens
aatcaaatggaatggaatggaatgcaatagaattgaatagaatggaatgcagtgaaatggaacggagtggaatcgagtggaatggaatcgaatggagtgaaatggaatggaatgcacttgaaaggaatagactggaacaaaatggaatcgaacggtaggaatcatacagaacagaaagaaatggaacggaatggaatgcactcgaatggaaaggastccaatggaagggaatcgaatggaatgaaatagaaagaatggaattg

SEQ ID NO: 571401 - DNA, 533 bp, Homo sapiens
gaattctttggtcagatggtggcatgacaatctctggggaagcacagagtgatttagggagttggacatgtgtcaggccatctatacccaacaatttgaaggatgagataaggctgtgcttaccatgagcatgaaaaataaattgttgcaaggtgcccactgggagtggcatggccccctcctattccacctgagccctctcctgagacaagatgtgtaggacatgggggaaactatagctgatcttgaagaaactaaaaagggaagagttaaagtcggtgggttactaaaggaaaaggaaaaaaaaaaagggagccatgtctgccagactaaraaagcaaggcctaaatatcccagataggactgccaggaaacgaatgtggtattatctgatctcagctggggtagacaaagaaataatagactggcaaccccatgctttattagtggggctttggaaaaacctgactcctgatcaaggattcagataccttcccagaaccctgccagaggagggaaaaggagaaaaaaaa

SEQ ID NO: 571402 - DNA, 425 bp, Homo sapiens
cactttgtattttcatataattcccatatttatggtttatttttgctctcatggcaatcctattaaatgattttcacttcctccttttaataaatgaagaaacaaaagctaagtgagcaagtgtacaagatcacttatataagctaagaaagaccagtcctgggacttcacctccaggcttcatatttcaaagtccatcgtctctccacagcatattatatcaatgatcaattcccatgggtctgtgttttatttttacctatttattaccaactaacacctagtagagtcctcagacttacagcrctcctcagggtaaactgtctatagagtgtatttgaaggtcagataaaacttatgaataatagatagtgatacaaacaaatataaagcaaagcacaaatgtttatcaagttttagcagca

SEQ ID NO: 571403 - DNA, 533 bp, Homo sapiens
gtaaattcaccaatcagtgctctgtgtctagctaaaggtttgtaaatgcaccaatcagtgctctgtgtctagctaatcsggtaggggacttggagaacttttctatctagctaaaggattgtaaatgcaccaatcagcgctctgtgtctagctaaaggtttgtaaatgcaccaatcagcactctgtaaaacagaccaatcagcactctgtaaaacggaccaatcagcactatgtaaaatggaccaatcagctctctgtaaaatggacaaatcagcaggatgtgggtggggccaaataagggaataaaagcaggccacctgagccagtagcggcaacccactgcgggtccccttccctgctgtgtaagctttgttctttcactcttcacagtaactcttgctgctgctcactgtttgggtccacactacctttatgagctgtaacactcaccgagaatgtctgcagcttcactcctgaagccagcgagaccacaaacccactgggaggaatgaacaactctggatgcactgcct

SEQ ID NO: 571404 - DNA, 533 bp, Homo sapiens
gtaaattcaccaatcagtgctctgtgtctagctaaaggtttgtaaatgcaccaatcagtgctctgtgtctagctaatccggtaggggacttggagaacttttctatctagctaaaggattgtaaatgcaccaatcagcgctctgtgtctagctaaaggtttgtaaatgcaccaatcagcactctgtaaaacagaccaatcagcactctgtaaaacggaccaatcagcactatgtaaaatggaccaatcagctctctgtaaaatggacaaatcagcaggatgtgggtggggccaaataagggaataaaagcaggccacctgagccagyagcggcaacccactgcgggtccccttccctgctgtgtaagctttgttctttcactcttcacagtaactcttgctgctgctcactgtttgggtccacactacctttatgagctgtaacactcaccgagaatgtctgcagcttcactcctgaagccagcgagaccacaaacccactgggaggaatgaacaactctggatgcactgcct

SEQ ID NO: 571405 - DNA, 533 bp, Homo sapiens
gtaaattcaccaatcagtgctctgtgtctagctaaaggtttgtaaatgcaccaatcagtgctctgtgtctagctaatccggtaggggacttggagaacttttctatctagctaaaggattgtaaatgcaccaatcagcgctctgtgtctagctaaaggtttgtaaatgcaccaatcagcactctgtaaaacagaccaatcagcactctgtaaaacggaccaatcagcactatgtaaaatggaccaatcagctctctgtaaaatggacaaatcagcaggatgtgggtggggccaaataagggaataaaagcaggccacctgagccagtagcggcaacccactgcgggtccccttccctgctgtgtaagctttgttctttcactcttcacartaactcttgctgctgctcactgtttgggtccacactacctttatgagctgtaacactcaccgagaatgtctgcagcttcactcctgaagccagcgagaccacaaacccactgggaggaatgaacaactctggatgcactgcct

SEQ ID NO: 571406 - DNA, 593 bp, Homo sapiens
actgaagtcaggccatggtagctgggtggtatgtgagattacaaaatagagctatcaccttggttagaaaaccaacataacaatgaacaaagtaataatctaaataaacagttattccaaactaaaacaaaaacagaactgagaaattaacctgtgcctttgtatcaatcttaagacaaaaaccttaatgatggctactgtaccacgccatagctagacagttctcagcatttgatgggcttgtagcttttgaattgttttccagaggaggaaactggtttcaacaactgtttgtatggttctttgttgcaaccagatgggccaagaacacaacagtatgacatggtgcaatcagagacgaaattcatgctcctgaaaaactcttctaagagtcaaaccatayacacatagatatttagatgtgtgacttcatttcaacaaagaatatataagcatgcgtataaacaaggatgtaaataaagaggatgccacataccacagagttgcaatgtatttgaaattacaataccttactatacatgttcagcaaacatgagagaatgaaatagtaggagagagctagagaaaaggaa

SEQ ID NO: 571407 - DNA, 487 bp, Homo sapiens
tgataccaaataattatgtttatgttttgaagaaaatgtccakatttttagatagtcatgctgagatagagaggtaacataggttctggaatttgttttaatatacttaccaatgaaagaaggagggagagaggaagcgagggaaggtaaggagggagggaaagagggagagaatggagggaaggagagagggagagagaaacaaacaggaattacagttttgaaatgcttcttttcggctccatccactgtaaacagccaatttatccaaaccctccttctctggaacatgacgccacatttaaaacccaaaccttcctaaaacgttctcacatatgaaccacacaagatgttggctcctggtgggggctacctataggtattacatattctcaaatcaatcatttgacatttttatagcatcacaaaatctacaccttcgctccagcctaaatcaacaacaaaagcatcagccaagactgcatat

SEQ ID NO: 571408 - DNA, 553 bp, Homo sapiens
atggcagcagacaagagaagagagcttgtgcggggaaaactctcctttttaaaactaacaaatctcgtgagacttatccactattatgaggacagcatgggaaaaacctgcccccatgattcaattatctcccaacaggtccctcccacaacatgtcggaattcaagatgagatttgggtggggacacaggcaaatcatatcacctcctgagtagctgggattataggcatgcaccaccaygcacagctaatttttgtattttttagtagagacagggtttcaccagcctgttggccaggctggtcttgaagtcctgggctcaagtgttcctgccacttcagcttcccaaagtgctggaattacaggcatgagccaccacacctggccttcaattttcattttttgacacctgagaaaaaaggattctcatacttttcaaaggttttgttcatttatgtgtcaatgtgagatctttttcttctaggctgttatgttcaccattttaatgagattatgtttgcttttgtaccatgggttaaagaaaaatttaga

SEQ ID NO: 571409 - DNA, 547 bp, Homo sapiens
ttttttaatcctttgtgtatttctaaggcatttctaaacyagtagcagaggaaaaagcgtattctaacttgagaggaccacgttatatcactatcaggccacaaatttcctttactgataaaaataattctcttctctgcaaaatattgcctaatttatgtactttccttctaaaaataatccattgtgagagtaagtgccagaattagaatatatatgtcttttcttgatgtttctgatgccagagctgtgatatttcagcacaaggatgttctatggtattctgataagcaaaagctttattctcccataagaatctattcacttctaattagcaaggaagaagagacaatagaagagtagctgcctggtttattgatttgcaatgctgtatgtggcatggtcttggctaggatttgaaatggtccatccactttttgcaataggttgggggtggggtcatggcctgcatttcactggtgtcctgattcacatgtttcttttccctgtggtatcttcgttcgttcatgtgtttttattatgcttg

SEQ ID NO: 571410 - DNA, 612 bp, Homo sapiens
attcttgggtgtttctcgcagagggggagttggcagggtcataggacaatagtggagggaaggtcagcagataaacaagtgaacaacggtctctggttttcctaggcagaggaccctgcggccttccgcagtgtttgtgtccctgggtacttaagattggggagtggtgatgactcttaaggagcatgctgccttcaagcatctgtttaacaaakcacatcttgcactgcccttaatccatttaaccctgagtggacacagcacatgtttcagagagcacagggttgggggtaaggtcacagatcaacaggatcccaaggcagaagaatttttcttagtacagaagaaaatgaaaagtctcccatgtctacttctttctacacagacacggcaaccatccgatttctcaatcttttccccacctttcccccgtttctattccacaaaacctccattgtcatcatggcccgttctcaatgagctgttggctacacctcccagacggggtggtggccgggcagaggggctcctcacttcccagtaggggcggccgggcagaggcgcccctcacctcccggaccgggcagctggccgggcggggggctgaccccc

SEQ ID NO: 571411 - DNA, 522 bp, Homo sapiens
tctgcccgcatggctgcccagtcccctcagcagatgctgggcacttcctcctttttctccttcctccttctctctcctttttcctctgtttcttcatccttctcccctttccctataatcagtaataattcctcatttacaaagccctttcacatatgttacatcatttcatcttcctgacaagcccatgaggtgtgttactactgtatccyagttttagagatgagtacattgaggtccagagaagttaggttatttaattcaaagtcatgtagttggtagtttatggaattgagatttcaatgaagggtcttcacctctaaatctcagggttttttgttttttgttttttttttaaagttttgtgacattgaaactgaatttggaacaatgtttacatttgtagtatcttctttgttactaaaagattgtgttttataaactctcttagagcatctgctgctctagagcaggggtccccaacccccaggctacagaccagtactagtccatggcctgtta

SEQ ID NO: 571412 - DNA, 607 bp, Homo sapiens
gtgtttaatttgattttatcatttaattataaatatctgaaacaaacatattgtatayttcattttaagaagaaaactaagtaatacaatatatacacatggcaataaattttatgcaattataatattccacatcaggatcctgttttaaattagaatatgacaactattttctataaaaatatcaccctgattaaaacttaaagaaataaaaattcttcttataaaaaaatctgctatttaaacaattaatttgtaactcagatactgcagtagcatgctttagagagttaaaacttgttcttagcaggaagattgtattataatgctttattgttaaacataaacaatattttaatgtattatttaggtagctctttaaatgatttactctttcctcctgcaggtcatttattattgagggattcctgaagctgaatagttagatgcaaaaacatgtgttcaaagttgagacagatatggcaaatggccacattcttaagatcatgtaattgagtgaaatagggaattcaatacctcagcagatgacaagtccaaggatgacgcctgttttagcaaaagctaagttggaacacatgaaaccatc

SEQ ID NO: 571413 - DNA, 583 bp, Homo sapiens
ctacttttgtatattgacctctttcttgttactaaggagaaattttcattaagcttcttcccataacactcagcatcaaaaattatgcatgagattttaaactcatttcagggtacaagataaaacaatgaatttgttttaattttttatcttcaattattatggatacataatagctgtatgacttatggggtacatgtgatatttttatacaagcatacaatgtgtaatgatcaaatcagggtgattggggtattcatcacctcaaacatttattgtttctttgtgttaggaacattccaattccatcattttagttattttgaaatatacaaaagattatttttaactatagtcaccctattgtgcaactgaacactagatcttactccttatctaactgtattgttatttgcattaaccatgccctctttatcctccctcctcactacctttcccagcctctggtaactgatattctactctctatatctgtgagctcacaktttttaattcctacatattggtgagaataatggattcaaaaaagtggtacatatacacaatggaatattattcagcc

SEQ ID NO: 571414 - DNA, 626 bp, Homo sapiens
cctatcctaagtagaaagaccaaacaatgaaccaatcaaaaataataacgacaaccacctttcaggacatacttgatatgatttggctgtgtccccacctaaatctcatcttgaattgtagctcccataatcaccacatgttgtaggagggacctggtgaaagataactgaatcatggtggctgtttcctccataatgttcttgtggtagtaaataagtctcrtaaggtctgatgattttctaagaggggagccccttttgcttggctctcatttcctctcttgtctgctgccgtaagatgtgcctttcaccttctgccatgattgtgaggcctccccagccacatggaactgtgaatccattaaacctctttttctttataaattaccaagtctcaggtatgtctttatcagcagcatgagaactgactaatatgatattcaatacaataagatacaaatagaaacaaaaaaagttaaaaagtggaggaatgaagttaaggcatagagtttttattagttttctttttgcttatttgtttaagcaaattgtgttaagttgttatcagatttaaataatgggttataagatagtatttgcaagtttcatggaaacctaaaaccaaa

SEQ ID NO: 571415 - DNA, 626 bp, Homo sapiens
cctatcctaagtagaaagaccaaacaatgaaccaatcaaaaataataacgacaaccacctttcaggacatacttgatatgatttggctgtgtccccacctaaatctcatcttgaattgtagctcccataatcaccacatgttgtaggagggacctggtgaaagataactgaatcatggtggctgtttcctccataatgttcttgtggtagtaaataagtctcgtaaggtctgatgattttctaagaggggagcccmttttgcttggctctcatttcctctcttgtctgctgccgtaagatgtgcctttcaccttctgccatgattgtgaggcctccccagccacatggaactgtgaatccattaaacctctttttctttataaattaccaagtctcaggtatgtctttatcagcagcatgagaactgactaatatgatattcaatacaataagatacaaatagaaacaaaaaaagttaaaaagtggaggaatgaagttaaggcatagagtttttattagttttctttttgcttatttgtttaagcaaattgtgttaagttgttatcagatttaaataatgggttataagatagtatttgcaagtttcatggaaacctaaaaccaaa

SEQ ID NO: 571416 - DNA, 626 bp, Homo sapiens
cctatcctaagtagaaagaccaaacaatgaaccaatcaaaaataataacgacaaccacctttcaggacatacttgatatgatttggctgtgtccccacctaaatctcatcttgaattgtagctcccataatcaccacatgttgtaggagggacctggtgaaagataactgaatcatggtggctgtttcctccataatgttcttgtggtagtaaataagtctcgtaaggtctgatgattttctaagaggggagccccttttgcttggctctcatttcctctcttgtctgctgycgtaagatgtgcctttcaccttctgccatgattgtgaggcctccccagccacatggaactgtgaatccattaaacctctttttctttataaattaccaagtctcaggtatgtctttatcagcagcatgagaactgactaatatgatattcaatacaataagatacaaatagaaacaaaaaaagttaaaaagtggaggaatgaagttaaggcatagagtttttattagttttctttttgcttatttgtttaagcaaattgtgttaagttgttatcagatttaaataatgggttataagatagtatttgcaagtttcatggaaacctaaaaccaaa

SEQ ID NO: 571417 - DNA, 473 bp, Homo sapiens
atagttatggagataggctaaataatggcaaaaaatgttcaccttctaatcactggaagctgtgaatattaccttacatggcaaaaggaattttgcagatgtgattaaattgaggattttaaytcggattgtgctgaattacccagctgggtccattgtaatcactggggtccctataagaaggaggcatgaaatcagagcagaaggtgatgaaatgggctgggtgcagtggctcaggcatgtaatcccagcactttgggaggaggaggcaggtggatcacatggtcaggagttcaagaccagcctaaccaataaggtgaaaccccgtctatactaaaaatacaaaaagtagctgggcgtggtggtgcgtgcctgtagtcccagctactcaggaggctgaggcaggagaatcacttgaacccgggaggcagagattgcagtgagctgagatcgcatcactgcactccaagctt

SEQ ID NO: 571418 - DNA, 473 bp, Homo sapiens
atagttatggagataggctaaataatggcaaaaaatgttcaccttctaatcactggaagctgtgaatattaccttacatggcaaaaggaattttgcagatgtgattaaattgaggattttaactcggattgtgctgaattacccagctgggtccattgtaatcactggggtccctataagaaggaggcatgaaatcagagcagaaggtgatgaaatgggctgggtgcagtggctcaggcatgtaatcccagcactttgggaggaggaggcaggtggatcacatggtcaggagttcaagaccagcctaaccaataaggtgaaaccccgtctmtactaaaaatacaaaaagtagctgggcgtggtggtgcgtgcctgtagtcccagctactcaggaggctgaggcaggagaatcacttgaacccgggaggcagagattgcagtgagctgagatcgcatcactgcactccaagctt

SEQ ID NO: 571419 - DNA, 473 bp, Homo sapiens
atagttatggagataggctaaataatggcaaaaaatgttcaccttctaatcactggaagctgtgaatattaccttacatggcaaaaggaattttgcagatgtgattaaattgaggattttaactcggattgtgctgaattacccagctgggtccattgtaatcactggggtccctataagaaggaggcatgaaatcagagcagaaggtgatgaaatgggctgggtgcagtggctcaggcatgtaatcccagcactttgggaggaggaggcaggtggatcacatggtcaggagttcaagaccagcctaaccaataaggtgaaaccccgtctatactaaaaatacaaaaagtagctgggcgtggtggtgcrtgcctgtagtcccagctactcaggaggctgaggcaggagaatcacttgaacccgggaggcagagattgcagtgagctgagatcgcatcactgcactccaagctt

SEQ ID NO: 571420 - DNA, 497 bp, Homo sapiens
cacctgtagtcccagccactcgggaggctgaggtgggaagatcgcctaggagacgaaggttgccgcaagccaagattgcaccactgcactctagcttgggcaacagagcgagaccccatctaagaaaaaaaagaaacaaacaaaaagaaaaaaaatacaaatggccaataagcacataaaaatatgctcaatatcactaattagggaaagcaaatcagaaccmccatgagacagataccacttcatacccattaggatggctactatcaaaaaaaaaaaaaaaaaaatatatatatatatatatatatatatatatatataacaaacattgaagatgtggacaaatcggaacctttgatcacttttgatgggaatataaaatggcatagctgctatagtaaacagtatggcaattcctcaaaaaattacaaacagaattaccatatgacccagcaattccacttgggagtatataccccaaagaattgaaagcaggg

SEQ ID NO: 571421 - DNA, 497 bp, Homo sapiens
cacctgtagtcccagccactcgggaggctgaggtgggaagatcgcctaggagacgaaggttgccgcaagccaagattgcaccactgcactctagcttgggcaacagagcgagaccccatctaagaaaaaaaagaaacaaacaaaaagaaaaaaaatacaaatggccaataagcacataaaaatatgctcaatatcactaattagggaaagcaaatcagaaccaccatgagacagataccacttcatacccattaggatggctactatcaaaaaaaaaaaaaaaaaaawatatatatatatatatatatatatatatatataacaaacattgaagatgtggacaaatcggaacctttgatcacttttgatgggaatataaaatggcatagctgctatagtaaacagtatggcaattcctcaaaaaattacaaacagaattaccatatgacccagcaattccacttgggagtatataccccaaagaattgaaagcaggg

SEQ ID NO: 571422 - DNA, 313 bp, Homo sapiens
aattctattatggcacttactgtagtggggttttaatttttaatttttcttccttttcttttttttggagacagggtctctctcactctgtcacccaggctggagtgcagtagtgcgatcatgactcactrcagcatcaatctcctgggctcaagggatcctcccatctcagcctcctgagtagctggaatcacaggcatgcaccaaccactacacctggctaactgttttttttttaaatttaattttgtagagatgggatctcactatgttgctcaggctggtctcaaatgatcctccctccttggccccc

SEQ ID NO: 571423 - DNA, 567 bp, Homo sapiens
catttttgtttaatgaaaaagcaaggtgcagaactgtgcatatatggtactttatatctaagagagaaaagaaatacaaatgaggacgagtgcagtggctcatgcttgtaaacccagcactttgggagaccaaggggggtggatcatttgaggtcaggagttcaagaccagcctggtcaacatggtgaaaccccgtttctactaaaaataccaaaacaaaattagcctggcgtggtggtgcacacctgtaatcctagctacttgggaggctgaagtgggaggattgcttgaacctgggagactgaggttgcagtgagctgagattgtgccactgcactccagcctgggcaacagagtgagactccatctgaaaaaaacaaaaaacaaaaacaaaaaacaaatacaagagaggagagacagaatttgttcctccaaactccagtacttgttgcaagttmaggctagggccttaattctttaggcacctaaggcagtttcttgacctgatattctagctcagtaattattgtctatattcactcttctcagtgccatatcggttgaatc

SEQ ID NO: 571424 - DNA, 567 bp, Homo sapiens
catttttgtttaatgaaaaagcaaggtgcagaactgtgcatatatggtactttatatctaagagagaaaagaaatacaaatgaggacgagtgcagtggctcatgcttgtaaacccagcactttgggagaccaaggggggtggatcatttgaggtcaggagttcaagaccagcctggtcaacatggtgaaaccccgtttctactaaaaataccaaaacaaaattagcctggcgtggtggtgcacacctgtaatcctagctacttgggaggctgaagtgggaggattgcttgaacctgggagactgaggttgcagtgagctgagattgtgccactgcactccagcctgggcaacagagtgagactccatctgaaaaaaacaaaaaacaaaaacaaaaaacaaatacaagagaggagagacagaatttgttcctccaaactccagtacttgttgcaagttcaggctagggccttaattctttaggcacctaaggcagtttcttgacctgatattctagctcagtaattaytgtctatattcactcttctcagtgccatatcggttgaatc

SEQ ID NO: 571425 - DNA, 330 bp, Homo sapiens
tggattatatcaaaagcttttcccacatctattaagatgatcatatgttttatgtttttaattctgtttatgtggtgaatcgcatttattgatttgcatatgttgaaccaaccttgcmtcccaggaataaagcctacttaagcagggtgaattaactttttgatgtgctgctgagtttggttgaggattttcctgaagatttttgcatccatattcattggagatattgacctatagtttttcctttttttcactgtattttttttttggccagtttttggtatcagggtgatgctggcttcatagaatcagttagaaaagagtccctca

SEQ ID NO: 571426 - DNA, 330 bp, Homo sapiens
tggattatatcaaaagcttttcccacatctattaagatgatcatatgttttatgtttttaattctgtttatgtggtgaatcgcatttattgatttgcatatgttgaaccaaccttgcatcccaggaataaagcctacttaagcagggtgaattaactttttgatgtgctgctgagtttggttgaggattttcctgaagatttttgcatccatattcattrgagatattgacctatagtttttcctttttttcactgtattttttttttggccagtttttggtatcagggtgatgctggcttcatagaatcagttagaaaagagtccctca

SEQ ID NO: 571427 - DNA, 493 bp, Homo sapiens
atgaaatcattctaccaaaaagacacatgcatttatatgtccactgcaccattattcacaatagcaaagacatacaatcaacctaggaacccatcaatggtagattggatagactggataaagaaaatgtggtacatatataccatggaatactacacagccacaaaaaatcatgtcctttgcagggacatggatggagcaggaggccattatcctaagaaaattagcatacacacagaaaaatcaaataccacatgttcttacttacaagtgggaggtacatgtggacataaaaaccgaacaaaatagatactggggactccaaaaatggggaargatggaggagggcaagggttgaaaagctacatatttagtactaggttcacaagaatataaacccaaacctcagcttcaagtgatatatccatgtaaaaaacctgtaaatgtactttcagaatatatttcttttaagatttaaaaaaaataggcttca

SEQ ID NO: 571428 - DNA, 528 bp, Homo sapiens
tgatgaaggagttaaataccatgaaggaatttaggcattgtcttacacgatgaagtgccactaacgggaaccaagctgagaaataacatgccttggttgtggtttatatcaagtattctgtgttttatgtaaagtattctgactgcagtgtatgagaataaatttaaggaagacagcccagtgaagaaacttttgctgtgctctacgtgggagatgacaaagactcaattttattttatttaaattttaattattttatttattttgaaacagaatctcactctrtcacccaggctagagtgcagctgcactgtctcgtctcactacaacctctgcctccaaggttcaagcaattctcatgcctcagcctcccaagtagctgggattacaggcatgcaccaccatacttggctattttttctatttttagtagagaaaagttttcactactgtgttggtcaggctggtctcgaactcctggcctcaagtgatctgcccacctaggcctcccaaagtgctgagattatt

SEQ ID NO: 571429 - DNA, 351 bp, Homo sapiens
tcctccactagagttgtgaacccctcaaagtcattcaygaggattaggatcaacttcttccaaactccaattaatatttataattcgacctcctcccatgaatcaaaaatattcttaatagcatctagaatgttgaatattttccagaaggctttcaatttattgtaacaagatccatcaaaggaatcactatctaaggtagctataacattacaaaatgtatttcttaaaaaataagacttaaggccaggagtgatggctgatgcctgtaatcctagcactttgggagtctgagtcaggtggatcacaaggtcaggagttcaagaccagcctggtcaatatgatgaaacc

SEQ ID NO: 571430 - DNA, 428 bp, Homo sapiens
taaaattgattcctaaaaatcaatatggttatgagcaggrtcagatgttatcaaaatcagaagtaaacaaatttgatatgattgggtaatgcaattttgtattactgttattatgttcagtttatgtttagatgaagtaaaatacatcataagtgaaagaagaggaaaaaatgaaagaaatggatctggataaagacactttggttcattttctgattcaattcctcacaatttttactttgaacactagattaaattggaacagacacaattagaaaagtgtatatatttttaaaatcgaaaaaaatagaggcccgtcgaaacaatggaagaataccaagatgtaaggaatttatttgctgagtgagagtacacaatgtagatgcagcattatggtagaatacattccatgccactgtgtagacagg

SEQ ID NO: 571431 - DNA, 582 bp, Homo sapiens
gtcactgccgtgtgattgtgttttaccacatgattcrtcttggtaactgtgcaaactagaaaatcaatatttattatatttgaaacattatcttctaagaaaattaacaatttgatgtatgagcaatagaggtatttcctttatttcaaattctaaatagagtctcctcttcccatcaggtcaaaaccacacaaagctacagtcacattcattaaaactgtggtaaagtataattaaaaggggcaagatattttgaagttgttgttttgatgtagctactatgacctactttttggacccagagtcattttaattatgtaaaaatagctaccacttttgtttctgcttaccacaattttcaggtaatttgtaaaacaaacatctatacattaaactttacatttttgctgatcattgaaagaagcaagacaagattttcaaaactatagatggagtaatgaatagggcagtaggaaatctctgatcattatatacatgtcaatacttctgtctataaattcaacttgtttaccaaaaacaaaattttatgccataatttgagaattttgttaataatatctt

SEQ ID NO: 571432 - DNA, 585 bp, Homo sapiens
tttttaatgaaaagcagccccaaataattttctaacaaagagcagcctgcaagctgggagcttacacgaatgaatgctggcaggaactaaggactagacatgttcaaatggcgcctccgttttcccttctctgccagccacgtgtactgcaaggagcaggcaagatggcactgatcaactggaaagtccatttgcataataagattagggtggagtgaccagccttccccgtgtgctatgaaaacatcatacctggtcgaaccaatctgtgagccctatgtaaatcagacaccrcctcctcaaactggactagaaaattcggcactttccgccaccagccagtcttttctgcttggagacccctttctctatataaagaagagacctctttttcttctcttctgcctgttaaatgtacgctcctaaactcctcgtgtgtgcccaggtcctaaatttttctggtgcacaacgatgaaccccagggtatacaccccagacaacatagcatcttcaaaaggacagaaggctaggacacttatccactgactgtcatctaccattgagtgagggttgttgccagggtta

SEQ ID NO: 571433 - DNA, 585 bp, Homo sapiens
tttttaatgaaaagcagccccaaataattttctaacaaagagcagcctgcaagctgggagcttacacgaatgaatgctggcaggaactaaggactagacatgttcaaatggcgcctccgttttcccttctctgccagccacgtgtactgcaaggagcaggcaagatggcactgatcaactggaaagtccatttgcataataagattagggtggagtgaccagccttccccgtgtgctatgaaaacatcatacctggtcgaaccaatctgtgagccctatgtaaatcagacaccacctcctcaaactggactagaaaattcggcactttccgccaccagccagtcttttctgcttggagacccctttctctatataaagaakagacctctttttcttctcttctgcctgttaaatgtacgctcctaaactcctcgtgtgtgcccaggtcctaaatttttctggtgcacaacgatgaaccccagggtatacaccccagacaacatagcatcttcaaaaggacagaaggctaggacacttatccactgactgtcatctaccattgagtgagggttgttgccagggtta

SEQ ID NO: 571434 - DNA, 631 bp, Homo sapiens
aatgtatttcttcaatcctatttggctgtaaagtaagtttttatcaggaagttgtacaataatggataatgtgaaatccatttctcttgggtgttttgctcgtaatagttttctggttgttgtttttgttattatatattatataatatatattatatgttattataacaaaataataagtattattattgttaagttgtttccaaatttgactctagacacacttaacacaaggcctgtatacactctaggttctctaacaacttgccagtggtgggttgagatttttctgcatgacgaatgtctcatggtctcaggataaaggggaaatccaaggttgtggcatacagggtctgtatgccctggctctaaaatactcatcctcacccgaggcttaactccataaatttatctttttaatgtacctgtgagtgcatttctctgcctgctaagtctactcagccttgaagctaattgctgcctgctgggaaaccttcacattcsctccctgcagagctaatccatctttctaatcagatccttgagcactcttgtacatgcctctgttacagctcacaattaattaactcattctacttatgtttccacctgggcctcaaagacaggatcc

SEQ ID NO: 571435 - DNA, 507 bp, Homo sapiens
aagtatggaaatcccaataatacctttattacatattaataaactgaatttccttcaatttcgtttcaggttatggatcaacacaccacctgtaaccactgcccatgtccctccctttcacaatgcattaacttcagatgtgggctctgcctctttctstcttcccaccaaatcaaaaaccactcacataagcaatagtagactccatgaaatacagtcatcagctttccaaattcgcaggctcaacataaacctttttcttgacatgatcatgttgttcgattgcagcaggagtaacggggaaggagaggctggcggtaatttacacaagggacccagtagttctgtctgagctaccaggtaccaagaaggtgaccttcattcaaaccatactggacaagagtggagataggtcataatggttattgccctatgtatcgtcttagttgagaatgcctcagaaactggagtggttctcaacctacaggtggaggaacgatggattca

SEQ ID NO: 571436 - DNA, 606 bp, Homo sapiens
gcttggtcccctaattttctttytcttcattctcatctttttctttggcttttcaaggagagttactcaaccttatcttccaagtgttctattgaatattttttatcttggctaattcattttttcactccgattatactttttaattgcatcttattcttgtttcatgaatgcaatactttctcaaaactttcagatgacaataatatctatagggttgtttgtttttgttatttatttttctgctccctctattgtctctatgtcttctcagccttccaaaaaaagtttatttgttaagttctcttttttcatagttgaggtcttctacaaatgtctggtgatccttaaatgtttatttatgattaagaagtggtacactaaaaagctaagaggagactttatgtgcatggggtggcttgcccctcagtaagcattatcaatagatgagtgggcttacttgattgatgaagaacgtttcagatgaagtctctgtggatcttgtcccaagggccagtcagtctttttggagaattatccttcattttcatgcctggaatgtatacatctgggcactcgtgttctggaagcagagacagaaagggc

SEQ ID NO: 571437 - DNA, 580 bp, Homo sapiens
tggtgctgcttcagatattttgggcgtctgcataactaaaacaactacaggaatctcctttctagcagtgcccacaaacacatatatacaacacactacctgtggacacacgtatgtacacacatgttgcccctccaggaaaaagtgaaaagcaacaaccaactaagagatggtgaaggctcatcttgctactctaccagcgccctttataacattgttgaagacaattctgagcaaaacartagacccactgatagcaacaaaagtagggaatggcgagatacgaaagcaatatcagaaccaaataatcaacataactgtgattttggatgaattttgagtgtcagtttggctgcagctaaggaaactctttaatttaaatgactgcatgtaagttgtcctactcttgccaatggtacaaacgattctcaacaatctcagaatgagagtctttggggataattggtggagagaaaatgtaatgaagaactaaaggctatttgaagaaattgttttgggtttagtgtgggtttaagaaaacacaggaagaggtttttaaaaataaaatgaggtcaggagt

SEQ ID NO: 571438 - DNA, 563 bp, Homo sapiens
ttttgctgaatacctattaatactatgtgcaaagctctgtagtgaacactgcaagatatgcaaagacatataagcagattctgctttcaggatacttttgttggttgaggagagaagacctagacacaggaaaacaagagctgagttcagggtttgaagaaaactcgtcaggctggagcaaaagtagagcttggcttcctggaagaggtgagacttgtgctgagcattgagattagcatgagtaggcagagtgaatgaaggaagaaaatgtggcaggcactcttcatggcatacagaaactccattcccaaccctcttctccctractccattagagtgactgaaaagctacacgctcatttccaagcatcccttggagctcagggggacatgggatttctgatcaataagacataactggaaggcaatgtggattttgctgtcctaataaagagacaggcatcactggagcgcttgcttctgacctgaacaagaatgtgatgcctaagactgcagtaatgttcttgccacagtgagagtctttgtatgagaaaagtgagctc

SEQ ID NO: 571439 - DNA, 563 bp, Homo sapiens
ttttgctgaatacctattaatactatgtgcaaagctctgtagtgaacactgcaagatatgcaaagacatataagcagattctgctttcaggatacttttgttggttgaggagagaagacctagacacaggaaaacaagagctgagttcagggtttgaagaaaactcgtcaggctggagcaaaagtagagcttggcttcctggaagaggtgagacttgtgctgagcattgagattagcatgagtaggcagagtgaatgaaggaagaaaatgtggcaggcactcttcatggcatacagaaactccattcccaaccctcttctccctaactccattagagtgactgaaaagctacacgctcatttccaagcatcccttggagctcagggggacatgggatttctgatcaataagacataactggaaggcaatgtggattttgctgtcctaataaagagacaggcatcactggagcgcttgcttctgacctgaacaagaatgtgatgcctaagacwgcagtaatgttcttgccacagtgagagtctttgtatgagaaaagtgagctc

SEQ ID NO: 571440 - DNA, 421 bp, Homo sapiens
gggcatgtcttatcttccattgtaacttgttctctgttctgggcagggctattatctaaggcctcctccattatctgcaagccctcakggaaatccactgaacattaaagcttgtggcagcagtcactacagaccttacggctcaacagtgaaagcatgaattgccttccagcattgtgcagtgcacaacttgcacactcatacttggggaccctaactggactataaatgaaaaaacctttcttcctcaaagtacgctagcacacgatgaccctcaagagggaggacacggaagactcaattgtgttattacctggattcaaaaggagtattatgcactaaaatgtgaatagtaattatctgtaggtgctctaataggtgaattttattttctttttagagctattatgcactcatctgt

SEQ ID NO: 571441 - DNA, 421 bp, Homo sapiens
gggcatgtcttatcttccattgtaacttgttctctgttctgggcagggctattatctaaggcctcctccattatctgcaagccctcatggaaatccactgaacattaaagcttgtggcagcagtcactacagaccttacggctcaacagtgaaagcatgaattgccttccagcattgtgcagtgcacaacttgcacactcatacttggkgaccctaactggactataaatgaaaaaacctttcttcctcaaagtacgctagcacacgatgaccctcaagagggaggacacggaagactcaattgtgttattacctggattcaaaaggagtattatgcactaaaatgtgaatagtaattatctgtaggtgctctaataggtgaattttattttctttttagagctattatgcactcatctgt

SEQ ID NO: 571442 - DNA, 421 bp, Homo sapiens
gggcatgtcttatcttccattgtaacttgttctctgttctgggcagggctattatctaaggcctcctccattatctgcaagccctcatggaaatccactgaacattaaagcttgtggcagcagtcactacagaccttacggctcaacagtgaaagcatgaattgccttccagcattgtgcagtgcacaacttgcacactcatacttggggaccctaactggactataaatgaaaaaacctttcttcctcaaagtacgctagcacacgatgaccctcaagagggaggacacggaagactcaattgtgttattacctggattcaaaaggagtattatgcamtaaaatgtgaatagtaattatctgtaggtgctctaataggtgaattttattttctttttagagctattatgcactcatctgt

SEQ ID NO: 571443 - DNA, 331 bp, Homo sapiens
tcataaataggtcagtgcaagatgtaactgctaaagttaaatgaagtcatattggagtagagtgtgcccttaatcaatatgactggtgtcyttataagcagatgcccgtgtaaagttggggcctgatgagttgtgattggcctctgattagagcacagcatagccgaagaagagagtgtacacaaaagaaaagaagtccagaatggtaggtgaaggcaattttctttggcttccaacttcccatcttctcctgctttcccctatttttagtagtctaccatctctaatcttctttcgccacgtcaagcatgcccttgaagcattagaattc

SEQ ID NO: 571444 - DNA, 508 bp, Homo sapiens
tgggagtaaatcagttttggcaacagaccaaaagcatgagaaactaaggaaacaacaaattagacttgatcgaaattttaaaacttttgtgcttcaaaggacactatcaacaaagtgataagataacccacaaaatgagacaaaatatttgcaaatcacatatatgatcttggacctgtatccagaatatatgaagaacccctacaactaagtaataaraagacaatccaactaaaaaatgagccaagcatctgaacagacatttctccaaagtagatatacaaatggccaataagcacatgaaaagatgcttgacattatcagccatcaggaaatacaaatagacaccacaatgagatatcactgcacactcactcagtgtgagtggctagaatcaaaaaggtcataataaacgttggcaaagatgtggagatatcagaaccctcattcactgttggtgggaacagaaaattgtgtagccactttggaaaacagtctggcagttcct

SEQ ID NO: 571445 - DNA, 585 bp, Homo sapiens
ttttattcaaaaccaattgagtacagtttggacaaataatggttgttattaaacacattattttcttctacagtggtcttactcttcgtatagataatcaaatagatatagatataaaaagtataaactaatactatatgagaggaaaacaaattctgagatttctaggatttaaaaactatgaaaattgatttgttttaatattagaaacttccagagttttatcatcttctagagtaataatagaacaatgtgatacatgcaagctgtcaggaatttaataaataacccttaaggtttagatgacatttgatgtggacagaatccaattagaaatgtgctttgcctctaacctaatgtaatttcattttctgacactgcactgtgaatttttaataaaccaaccctttttcacatatgtccacttatttgttaatctttttttttttttttgagacggagtctcactctgttgcccaggctggagtgcagtggtgccatctccactcactgcaagctccrcctcccagattcactccattctcctgcctctgcctcccaagtagctgggactacaggcacccg

SEQ ID NO: 571446 - DNA, 634 bp, Homo sapiens
gttaagtgacttgcacaaaaaaacactctagtacaattgtggatgttttaatttccactctagaatcttaatatgtttattgtatgaaccttaaaaaatggccacttgtaggaattttcctcccttctctatttaatgatgkaattacttatactactaacaaatatcactatcccactggtaaaaataatagcttgtttctcacataggagtgcaataccagtaatccattatctgcagactattgaagttaaaccaacattggattttaggttctgaaaatgtcagaagaactttcatttgattctagcttatcacagtgcctgaaacagggagacagcactgtaactgcaatttatttcaaacactagcagttgcacaaggtttttatgatgtgcgaaaaaagactcagtttacaattttaagaaaaggagaagaaatgcagagaggtcactgtaatttcaacttcatatgcaatgattaacaatagatacaatttaagattatcactaactcctacacttgccataatttacaactctacgcaattaattgaaataactaaaacctatttcacaaacatacataattagaaatttatatttcagaaggataaagacaagtttcagagcga

SEQ ID NO: 571447 - DNA, 634 bp, Homo sapiens
gttaagtgacttgcacaaaaaaacactctagtacaattgtggatgttttaatttccactctagaatcttaatatgtttattgtatgaaccttaaaaaatggccacttgtaggaattttcctcccttctctatttaatgatgtaattacttatactactaacaaatatcactatcccactggtaaaaataatagcttgtttctcamataggagtgcaataccagtaatccattatctgcagactattgaagttaaaccaacattggattttaggttctgaaaatgtcagaagaactttcatttgattctagcttatcacagtgcctgaaacagggagacagcactgtaactgcaatttatttcaaacactagcagttgcacaaggtttttatgatgtgcgaaaaaagactcagtttacaattttaagaaaaggagaagaaatgcagagaggtcactgtaatttcaacttcatatgcaatgattaacaatagatacaatttaagattatcactaactcctacacttgccataatttacaactctacgcaattaattgaaataactaaaacctatttcacaaacatacataattagaaatttatatttcagaaggataaagacaagtttcagagcga

SEQ ID NO: 571448 - DNA, 632 bp, Homo sapiens
ctttttaatttaagctataaaccaatcaagctagtgtgcagggctagctcattgtgattttaaaaaattgtttttactgatatataattaatataccatcaaagtcacctctctagagtgtatgatttagtgggttttaatatattcacaaggttgtacaagcataaccactaattccagaatatttttatcaatcccccaaaatactctggatccatgcagtcattctccmtttccccctaaacaaaggatggttttccatttacttaagtagtctttaatttctttcaatgatgttgtgtagctctcagtgcacaagtcttgatctccttttgttaaatttattcccatctacttcattcttttcaatgctattataagtggaattaagttcttaatttcattttgggtactgtgagtgccatatactaggattcattgctattatacagaaatacaactgatctttatatattgatattctcattgcagttctgatattcctaatgacacctacatttttatgtgcttctttcccatccacaagtcttaataaaatatctatacaatttttttttgcatttttataattgagatgtttattgagttttttgaaaaaatctagatgtagg

SEQ ID NO: 571449 - DNA, 476 bp, Homo sapiens
tctctgcctctctctttctctctctctctccttgactctctctttgtctctctgtctcttcctctcgctttccctctttttctctatctctttcctctctctcctttggctggtctttccttgcctctgycagcagcttatgctgctgttctcttaaccactgtggcgggggccagaggtggggtgtctaaaaccagctgtaaccaagtgtctatgtatgggaactggtctgggtgcctggcttacaggttaccttgtgccatacctttgaaacaagggacctttccaggcttccttctgatgggccaacccacctcaaatgctggccagtctatttcacacaaagttctaagtttcctggtgtcatagtaacaccgtaatttcccttaaatcctttcttgaaatttttcaacatagttcctagtggggtgggcttactttgtgcctgacccacgcttccttgagacaaaacacca

SEQ ID NO: 571450 - DNA, 637 bp, Homo sapiens
ggcatcccacagggcaattgcctacctgggagtgctgtcaggatccatgtcactcaggctggttggagtcccctgcaaggatgctccatggggcaggcctaagtcacctaaggggctgcctcgactgtctgccaatcacctcacttccaagtcagggaaccagggaaccaagaaatgtagcaggatgagccacagacaaaactcctcagacactaggttaaagaaggaaggagctttatttggccaggaactttggcagacttgcatctcaaaagccaagctccctgagtgagcaattcctgtcctttttaagggcttaygactctaagggggtctgcatgagagggtcatgattgactgagcaagcaggggatatgtgactgggggctgcatgcacgggtaatcagaatggagcaaaacaggacagggattttcacaatgtttttccatacaatgtctggaatctatagataacataaccggttaggtcaggggtcgatctttaactaccaggcccaggcatggagccaggctgtctgcctgtggatttcatttctgccttttagtttttacttcttctttctttggaggcagaaattgggcataagacaatataagggggtggtctcctccctta

SEQ ID NO: 571451 - DNA, 398 bp, Homo sapiens
acctatgtaacaaacctgcttgttgtgcacatgtaccctataacttaaagtgtgtgtgtgtgtatatatatatatakatatagatatatagatatatatgagttgtttcctcagtcatagcaaaaatacacttttacatatcagtaaaaatttcagtgtattcttgtgtgctctctcttccaacatgaatatgggtagacaaggcatttgttttagaatagtgtcttatcttataagtactatatatgtgttagcttaataaaatattgagatagtgagttatggtttaagaaaagacaatggtagttgcagtgtgtcaggaaatggaagaagagtaagaatatataaccctctttccaattcagttccttaggctcagtggtctaaatattagttgc

SEQ ID NO: 571452 - DNA, 550 bp, Homo sapiens
gtttgtgagaggaaggcaacagttatctaatgaacacctcaaatgtcacaacaacatttaagacacaataagaaaagtaagtaatctttttcctattttacaggtgggaaactgaggctcacagattttcagtaacacggccaggctctcataagtagaaagtgattgcaaaatttgggaaaaaaaaaaaagaggcaggggtatgttgcagtgcctcatgcctgtaatcccagtgcwttgagaggctgaggcaggaggattctttgaggccaagggtttaagactagcccgggcaacatagtgagacccccctgtctacaaaaaatttaaaaactagccaggcataatgatgcatgcctgtattcccagacacaaactgaggcaggaggattgcttgaacccaggaggtcaaggctgcagtgagctataattgcaccactgcactccagcctggatgacagagctagattcagacacacacacacacacacacacacacacacacacacacacacacacacacacacacaccaaaaaaaaaaaggaaaaa

SEQ ID NO: 571453 - DNA, 454 bp, Homo sapiens
gaaagccgcacaagctggacaacaggccactggatggctaatgtggtgggctgctctgctcctggactagggaaatgggcaaggaggcgagcttgaaattcttccattcctcacctaatctctgagggaatgcttcaggtcgatgtataagaattgtggagataagggaaacwttgtacatggttggtgggaatgtaaattcatacagccaccatggaaaacactatggcagtgactcaaaaattaaaaacagaactactatatgatctagcaaccctgcttctgggtgtttatacaaaatactttaaattgatatgtcaaaaaatatctgtgctcccatgttcattgcagcactattcataatatccaagttggaatattgaaacttggaacattggaacaatatatggaaccaacctaagtgtctgtcaacagatagagaaaatgtggtata

SEQ ID NO: 571454 - DNA, 553 bp, Homo sapiens
gaaaagcatttacaatgacacagattttgaacttgtgtcactagtatgataaaatttttaggagataaagaaatatgatgtaagaatctgagtgccattaaaattcctaaaggaagagctttctggaaaaaaggtatagccaagaacaaattccaagaggtaggaagtatcctggattgcttataaaacaacaaaaaggataggactggagtaaacagaggaaggaggaaaaagtcaaaatagtagaacagatcatgtgggatataaaactataaaaaccctagaagaaaacctaggtaatagcattcasgacataggcatgggcaaagacttcatgtctaaaacaccaaaagcaatggcaacaaaagccaaaattgacaaatggggtctaattaaactaaagagcttctgcacagcaaaagcaactatcatcaaagggaacaggcaaccttcagaatgggagaaaatttttgcaatctagccatctgacaaaaagctaatatccagaatttacaaagaacttaaacaaatttacaagaaaaaaaacccaaca

SEQ ID NO: 571455 - DNA, 346 bp, Homo sapiens
tgtctaaataaataaataaatcataaaaagtataactagctaggacattacattatttcatcatttaaattgaaagagatttaaaatctctggtcagaattaggtttcagcaatgatttagtaaatgggaaaataattttcctgccatgataaacaactctgaacctgaacaaaatggttttcaatgttagaaaaacatcaagcaagaaaatcccttgctctcggagattttacgatcaccaagcctattgaggtagttttgacatagtcaccttttgcctcttatttggcttaaaccctaatgttatctattgytaaagagtgtgatgctggcttttaaatattc

SEQ ID NO: 571456 - DNA, 647 bp, Homo sapiens
acatggtggacacaaagaagggaagagcagacactgggtcttacttgagggtggagagtagaagaagggtgaggagggaaaggtatcaatcaagcgctatacttattatctgggtgacaaaataatctgtacaccaaaccccagtgtcctgaaattgatctgtataacaaacctgcacatacgactctgaatctaaaataaaagttaaaaactataaaaataaagaataaatttatgtactaatgacaaaaagccccagaatatttgacatcaaaactgatagataagaaaggaaaaaacataatttaactttcaattttaatatcagtcttaataattgagagaggaaataaagaagaaaagagcaatattataaaagactggaaaagcactctcctcctgactaaaatcaatgaaacaatgattaatcaaatgatattaaacaacaattcttcaagtaggctttctcagaattggcactattaacattctggactgagtaagttttttgtgtgaggggctatcttgtgaattttagattattttgcagcttaagtaacatctatcctttagatagcaataacgtttgttcacaccacctcaacaccatgaaatgarcaatatttacagaacttgccaaatgtttt

SEQ ID NO: 571457 - DNA, 589 bp, Homo sapiens
gtttttccatttttctcttcttcctgaaacttctttcccacaaataactgcatgatggtttttcttatccttttcttaacaagagaactccttgccaccctattaaaactaatacatttcacaccctctttcaaaccttcatttgtgtttcatagcagttattctcatctgacattctatatatttttcttgtgtcttttattttgtgtttgttttcccctatgatcatgtaagctctatgagcagagaactttcccccatcacctagarcaggacagataaaactttaatcgtgaatataaatcctttcattctagaactttctgattttctcaaaagtacatatttggatttaagatttttttaaatttcgctgatttatttttacatgcctatacgatggcctcatctttctctcaccctttgccaaaagtcaaacagttcatctcccatttccttttggaagggtcttgtctctgcttggaattgagattatttagacgaatgcaaccttagctccaagatagactcacaaaaattatgatttttatagattaactggattgttttaaatagggtgggagcaagt

SEQ ID NO: 571458 - DNA, 589 bp, Homo sapiens
gtttttccatttttctcttcttcctgaaacttctttcccacaaataactgcatgatggtttttcttatccttttcttaacaagagaactccttgccaccctattaaaactaatacatttcacaccctctttcaaaccttcatttgtgtttcatagcagttattctcatctgacattctatatatttttcttgtgtcttttattttgtgtttgttttcccctatgatcatgtaagctctatgagcagagaactttcccccatcacctagagcaggacagataaaactttaatmgtgaatataaatcctttcattctagaactttctgattttctcaaaagtacatatttggatttaagatttttttaaatttcgctgatttatttttacatgcctatacgatggcctcatctttctctcaccctttgccaaaagtcaaacagttcatctcccatttccttttggaagggtcttgtctctgcttggaattgagattatttagacgaatgcaaccttagctccaagatagactcacaaaaattatgatttttatagattaactggattgttttaaatagggtgggagcaagt

SEQ ID NO: 571459 - DNA, 546 bp, Homo sapiens
aggagcttaaacaaatttacaagaaaaaaaaacccattaaaaagtggacaaaggacatgaacagatactttttaaaaaaagacatacatgcagccaataartatatgaataaaagctcaatatcaccaatcgctggaggtatgaaaatcaaaactacaatgagataccacctcacaccactgggaatggctattattattattttaacatttaagttcaggggtacatgtgcaggtttgttacataggtaaacttgtgtcatggggatttgtcgtacagattattttatcacccaggtattaagcctagtacccattagttatttttcctgatgctctcccttctcccactctccaccctcagacaggctccagtgtgtgttgttcccctctgtatgtccatgtgttcttctcattcagctccctttccttagcaaactgatccagaaacagaaaaacaaataccacatgttctcacttactggtgagaacagctattattaaaaaatccaaacaataacaggtgctggtgaggttatggagaaaa

SEQ ID NO: 571460 - DNA, 560 bp, Homo sapiens
acatgttaccttccaatatgttgttatcactgacctttgtatttatttgtttccccctgctgagaatctataatctacaaatactctaatagaaaagaccagacttgcatatcaacatttgaatytttctttcccacaatctatgtgtaatttatagtagtttattaaaagtaatttataaatttagaaagcctaacttaaagcagtcataaccacaatgcaatgcagtaaaaaatatacattggctggatgcaggggctcacacctgtaatcccagcactctgggaggctgaggcaggaagatcagttgaagtcaggagttcaagaccagcctggccaacatggtgaaacctcatctctactaaaaaaatacagaaattagtctggtgtggtgggtgtgcctgtagtcccagctattcgggaggctgaggcaggagtattgtttgaacttaggaggcagaggctgcagtgagtcaagattgtgtcactgtacttcagcctgggcaacagagcaaaactccaaataaataaataaatatttataagatataaataatttt

SEQ ID NO: 571461 - DNA, 560 bp, Homo sapiens
acatgttaccttccaatatgttgttatcactgacctttgtatttatttgtttccccctgctgagaatctataatctacaaatactctaatagaaaagaccagacttgcatatcaacatttgaatttttctttcccacaatctatgtgtaatttatagtagtttattaaaagtaatttataaatttagaaagcytaacttaaagcagtcataaccacaatgcaatgcagtaaaaaatatacattggctggatgcaggggctcacacctgtaatcccagcactctgggaggctgaggcaggaagatcagttgaagtcaggagttcaagaccagcctggccaacatggtgaaacctcatctctactaaaaaaatacagaaattagtctggtgtggtgggtgtgcctgtagtcccagctattcgggaggctgaggcaggagtattgtttgaacttaggaggcagaggctgcagtgagtcaagattgtgtcactgtacttcagcctgggcaacagagcaaaactccaaataaataaataaatatttataagatataaataatttt

SEQ ID NO: 571462 - DNA, 560 bp, Homo sapiens
acatgttaccttccaatatgttgttatcactgacctttgtatttatttgtttccccctgctgagaatctataatctacaaatactctaatagaaaagaccagacttgcatatcaacatttgaatttttctttcccacaatctatgtgtaatttatagtagtttattaaaagtaatttataaatttagaaagcctaacttaaagcagtcataaccacaatgcaatgcagtaaaaaatatacattggctggatgcaggggctcacacctgtaatcccagcactctgggaggctgaggcaggaagatcagttgaagtcaggagttcaagaccagcctggccaacwtggtgaaacctcatctctactaaaaaaatacagaaattagtctggtgtggtgggtgtgcctgtagtcccagctattcgggaggctgaggcaggagtattgtttgaacttaggaggcagaggctgcagtgagtcaagattgtgtcactgtacttcagcctgggcaacagagcaaaactccaaataaataaataaatatttataagatataaataatttt

SEQ ID NO: 571463 - DNA, 624 bp, Homo sapiens
atgtataataattattatattatataattattataatatatactgttttatataattattgtatataattatatcgcataatatattatataataaatagtataataatataatgtataataatgtaatataattgaattgcaatgcatgttaactacatgacaaggaaaagaacatcttccccattttatacatgacagtctttggaaatcacatagatgtaatgttcttttatgatatcaatataacattgtaagaactagtttatrttttctctgattatttttcactacatcttgtgtttaacaaaaccaggacatccacacagatactttattcccagagcccaggactttttttactataacaaattgttcattctttccactacaattttagagtgcctgcataaaatagacttcaaaaagaccattttttgatggtgtatttttacaattttgttattgctgtttgtcaaatttttatttattttgcatattttacttttggccatttttgtcttacaaacagtttttatacataaatcttcagtacatactgttttaaaagtataagtgcatgtatattcttaagaaagtatatcatgaatttacatatgtaata

SEQ ID NO: 571464 - DNA, 566 bp, Homo sapiens
atacattcttctactgaggtagtccatctaagcaattaaaagcctgggctctggagtcagactgtctgatttcaaattttggctcctgttctattcatacactgtgtaaccaaaggcattttatttacctttttaagtctcagcttcctcatctgtataatggagatgataaaaaaaaaaagcactaatctcataaggttgttttgaggattgaatgcatttacctataaaaagctttcaactcaaatattaataatttcactcaatgctggtgagtttttctgcactgatgaaatctggatgatttggctttttctttcaagttttctgaattaacttgattttttttccctaagcatatgtcaattttacaacacaaaaattagtttttgaaaaaaaggttagggctgggagcagtggctcatgcctgtaatctcagcacaattacagcaagcagattgcttgagtttgggagttagagacctgcmggggcaacatgccaaaccccacctctacaaaaaacacaaaaaggccgggtgtggtggctcacgcctgtaatcccagca

SEQ ID NO: 571465 - DNA, 397 bp, Homo sapiens
  misc_feature 1, 2, 3, 4, 5, 6, 7, 8, 9, 10, 11, 12, 13, 14, 15, 16, 17,18, 19, 20, 21, 22, 23, 24, 25, 26, 27, 28, 29, 30, 31,32, 33, 34, 35, 36: n = A,T,C or G
nnnnnnnnnnnnnnnnnnnnnnnnnnnnnnnnnnnnttgacccatctgatgcacttatactataccagttaccctacgctaaaagcattggctttggaataacagttctgtttgcagtttctgaaactgagtgagtcccagtttgcacatttatgcagttaggattgacagcaaggattgtttaaagatgaaatgggattgtgagagataaatacctggcatacytctagcaccaacaaatggtggttcccttcccttcaccatctgtgccaccctttcttattaagctccccagttatttctaccaactcagttttctgaactttcagtttgcttgccatgttatttatttgaaagtacgtttacaaatattattgcatttgatcttcaaatgtag

SEQ ID NO: 571466 - DNA, 470 bp, Homo sapiens
tttactctgctgattgtttcttttgctgtgcagaagctttttagtttaattaggtctcatttatttatttttgtttttattgcatttgctttttggggtttagaaattaattctttgcctaagccaatgtccagaaaagcttttctaattgttatmttctgggagttttatggtttcaggtcttagatttaagtcttttatccatcttgagttgatttttgtataaggcaagaaatgagaatccagtttcattttctacatgtggcttgccagttttcccagcaccatttattgaataaggtgctttttccccaaatttatgtttttgtatgctttgtcaaagatgagttggctgtacgtattttactttatttggactcaattctgttccattggtttatgtgcctatttttataccactaccatgctgtttttgtgactatagccttattgtatagtttgaagtaagg

SEQ ID NO: 571467 - DNA, 470 bp, Homo sapiens
tttactctgctgattgtttcttttgctgtgcagaagctttttagtttaattaggtctcatttatttatttttgtttttattgcatttgctttttggggtttagaaattaattctttgcctaagccaatgtccagaaaagcttttctaattgttatcttctgggagttttatggtttcaggtcttagatttaagtcttttatccatcttgagttgatttttgtataaggcaagaaatgagaatccagtttcattttctacatgtggcttgccagttttcccagcaccatttattgaataaggtgcyttttccccaaatttatgtttttgtatgctttgtcaaagatgagttggctgtacgtattttactttatttggactcaattctgttccattggtttatgtgcctatttttataccactaccatgctgtttttgtgactatagccttattgtatagtttgaagtaagg

SEQ ID NO: 571468 - DNA, 492 bp, Homo sapiens
tttcccctcttcatctgcctaatatatctgatagtaattcattgtccattcgtataaatagggtgattggtgataataagctgtaataaatgatcagtgcagcaaactaatgattttgtgctattagcacaaaatgctgttgctaataggaaacccctggttttgataagtggctatgatgtgcttcagcctgtgagctgtataaattttgaggggtaaagttatcaaaaataccaccttttctttctagctctaatatgctttgcgtatggcatacaaaaatcattcatttctgagtagaaagctgttcatatgagttttatttaacctaggaayaaagcacaaataaagctattgttttatgcagagcagaggattggttaagttacttacccattatgacaccataaagcacactctgcaagtttcctgggttaccttgttaaatcaatatacatttcttcagtagcccctataatagttctggttgtt

SEQ ID NO: 571469 - DNA, 535 bp, Homo sapiens
tgattacttaaaaataagctttattggccaggcgtggtggctcacacctgtaatcccagcactttgggaggctgaggcgggyggatcacgaggtcaggagatcgagaccatcctggccaacatggtaaaaccctgtctctactaaaaatacaaaaattagctggtcatggtgccacacgcttgtaatcccagctacttgggagactgaggcaggagaatcgcttgaactcaggaggcgaagtttgcagtaagccaagatcacgccactgcactccagtctggtgacagagcgagactctgtctcaaaacacaaacaaacaaacaaagctttattaaatcactcatataagatacactaattgattctaaagtcctatcatattagaattaaaattatattactttatctttctgctcttacatgtgtcaaaatacttttaagctgaaatgtttcagcttaatgttggtaaaatacgaatctcactttcataaaatgtcatttacattgtcaaattttaatttcaaattcagtggt

SEQ ID NO: 571470 - DNA, 535 bp, Homo sapiens
tgattacttaaaaataagctttattggccaggcgtggtggctcacacctgtaatcccagcactttgggaggctgaggcgggtggatcacgaggtcaggagatcgagaccatcctggccaacatggtaaaaccctgtctctactaaaaatacaaaaattagctggtcatggtgccacacgcttgtaatcccagctacttgggagactgaggcaggagaatcgcttgaactcaggaggcgragtttgcagtaagccaagatcacgccactgcactccagtctggtgacagagcgagactctgtctcaaaacacaaacaaacaaacaaagctttattaaatcactcatataagatacactaattgattctaaagtcctatcatattagaattaaaattatattactttatctttctgctcttacatgtgtcaaaatacttttaagctgaaatgtttcagcttaatgttggtaaaatacgaatctcactttcataaaatgtcatttacattgtcaaattttaatttcaaattcagtggt

SEQ ID NO: 571471 - DNA, 535 bp, Homo sapiens
tgattacttaaaaataagctttattggccaggcgtggtggctcacacctgtaatcccagcactttgggaggctgaggcgggtggatcacgaggtcaggagatcgagaccatcctggccaacatggtaaaaccctgtctctactaaaaatacaaaaattagctggtcatggtgccacacgcttgtaatcccagctacttgggagactgaggcaggagaatcgcttgaactcaggaggcgaagtttgcagtaagccaagatcacgccactgcactccagtctggtgacagagcgagactctgtctcaaaacacaaacaaacaaacaaagctttattaaatcactcatataagayacactaattgattctaaagtcctatcatattagaattaaaattatattactttatctttctgctcttacatgtgtcaaaatacttttaagctgaaatgtttcagcttaatgttggtaaaatacgaatctcactttcataaaatgtcatttacattgtcaaattttaatttcaaattcagtggt

SEQ ID NO: 571472 - DNA, 535 bp, Homo sapiens
tgattacttaaaaataagctttattggccaggcgtggtggctcacacctgtaatcccagcactttgggaggctgaggcgggtggatcacgaggtcaggagatcgagaccatcctggccaacatggtaaaaccctgtctctactaaaaatacaaaaattagctggtcatggtgccacacgcttgtaatcccagctacttgggagactgaggcaggagaatcgcttgaactcaggaggcgaagtttgcagtaagccaagatcacgccactgcactccagtctggtgacagagcgagactctgtctcaaaacacaaacaaacaaacaaagctttattaaatcactcatataagatacactaattgattctaaagtcctatcatattagaattaaaattatattactttatctttctgctcttacatgtgtcaaaatacttttaagctgaaatgtttcagcttaatgttggtaaaataygaatctcactttcataaaatgtcatttacattgtcaaattttaatttcaaattcagtggt

SEQ ID NO: 571473 - DNA, 575 bp, Homo sapiens
caaatgggaaaaggggttaaattattcctttgctgcaccaaagttttaaagttttatgtaaacccattagtctatttttgcttttactgctgtgcttttggtgtcatatccaataaatcactgacaaatcctatgtcataaagcttttctccattgaaataaactcaatgtcataaagctttacttcttccttttatatctagatgccttttatttatttttcttgaccaattgctttggctaagacttctagaactatgccgagtaggagtggtaggactgggcattcttaccttgtccctgaccttggagaaaaggcttttaattttcaccattaagtatgattttattgtgggcatttcacatatgggctttattatgttgaggtaaattmcttctattcctagtgttgagcgtttttgtcatgaaagggtactgatttttgtcaaatgcttttgctctatcagttgagatgatttatgtgtatttgtccttcattctgttaaggtggtatattacattgatcaaggatattggcctgtagtttagttatagtatctttgatgttgaataca

SEQ ID NO: 571474 - DNA, 648 bp, Homo sapiens
agttgacaagcagggtcttccatgatgccatttgtgggtattatgatgatttgtccaaaccttacagtagcttcacttacatatctggaatgtatagtaaaattctgaattctcttttatcatgtgtatgctaataaccataggcctatcctccttagaaaagcactattggtagagtatagattatttttaatgtccttccaaaattatacctcagacactyagccagaaggaccaggcttagccaaacattattgaactgaaccaggaaagcctgcactccaagtctgtgtttttgagactttgaaaaatgaagctgggaaactgcttgtctcctagtaattatgatctgttctctacacaccattcaccctaataatattactccacaggaaagagagggaggaatgaagggagagagccagtacctatttaggaggtccgcctggtgagtgtgacttctgacctctctgcaaggtcccagtctcttgtgcccactgggaaccagattggcccttggcaaaactgtgaaatggccgacatttatctttcaggcctcctatatctatattttagagagttttttctttttttcttttctttctttcttttttttttttttttttgaaagagtcttgctctgtctcc

SEQ ID NO: 571475 - DNA, 606 bp, Homo sapiens
caacttcattcttttgtatgtgacaatccagtttctttatgcattctgcagtctctgcctttggattggcagggttaatacatttatgtttaatgtaattgctgataaggtaaggtttacatttgtgattttggtatttgttttctatacgttgtatatctttttgtttgtttctctattccactattactgctctctttgtagttaaatagttattttctacwgcaccattttcatgcccttgttgtttattttactatgtattttgaaatttttttcttatcagttgctctggggatttaaattaacaccttaactgaaacaacctactttggattcatacaaacttaattttgctagcatacaaaaccttagttccagtatagctctgttcctttcctcctcttttgtgatgttattgtcatacaagctacatctttatacattatatgcccatcaacatcattttgtagttattgctttatgcaattgtcttctaaattcaatagtagaagaagatgacttaaaaatacatttgtatgctgtcctttatatttacctatgtagttattgttttcagtgctctttatttcttcatatggtata

SEQ ID NO: 571476 - DNA, 490 bp, Homo sapiens
actgttgattttgtttttgttgtttattcttaatttaatttwattttattttatattaagttccaggatacatgtgcaggatgtgcaggtttgttgcaaaggtaaacatgtgccatggtggattcctgcacctatcagcccatcacctaagtatgaagccccacatgaattttctatttatcctgatgctaccccacccccattcccctgacaggccccagtgtgtgttgttctccttcctgtgtccatgtgttctcattgttcagctcccacttataagtgataacagcagttttggttttctttaactttgttaatatgctgaggataattgcttccatgcccatctatgtccctgcaaaaacatgctctcattcctttttatggctgcatagtattccatggtgtgtatgtgccacattttatttacccatcctaccattgatggacatctgggttgattcccatgtctttgctattttaaataggg

SEQ ID NO: 571477 - DNA, 526 bp, Homo sapiens
gtcgtcccgcacatcctcatagacaacgccctggggctccttcttttctccagggcgccacatcttcctcgggctgcgcttcattgaccccaccccggacgccatctggtgcatctgctccccacgagcgcgggcacctggggcgagagagcgctgtcagccggccaggcgctggggtccgcgcgagcccgagctctccckcgctgcagctcacaggcagcgaaaatctcgctccgcgagagccctggagaacttctggaaggagttctcaggcccgcgctacttacagtgcaggaagcaagcggggcgtgaagaggaggtagaaacacagacctccctagcaaagagggaggcggcgcagcgtctgccgaggactcgccccttcaggaacaaagtgactcccccgtcccgctgtcctgcagctgcagcagcgcactcccagagtcaagcgtgtcaggtcggtgtggatgcagcgaatttgttgtaatctacacattaagagcccccttgcctcgccctgccccct

SEQ ID NO: 571478 - DNA, 513 bp, Homo sapiens
atataaagcaatggttttcaacaccctggaaatcaggcaacaaaggatagtggtccctggggtggggtggggaagagtaagctccatgattaccccagtgttatggactgaagctctaattctagtacctcagaaagtgactatatttgcagataaggcctttaaagaggtaattaaggtaaaataaggtcatgtgggtgagccctaatccaatatgactggtgtccttataagaagaggaaatctggccacagagaggaaaccagaaatgtgagcaaggaggaaaaatcatctgaggacacagcaggaaggtgggcatctgcaagccaaggagaggggccttagaagaaagcagcctgctgacaycttgatcttagacttctagcctctagaattgtgaggaaacaaatttctgttgtttaagccacctagtctttggaattttgttatggcatctgtattgggctgttcttgcattgctataaagaaatacctgagactgggtaatttata

SEQ ID NO: 571479 - DNA, 559 bp, Homo sapiens
ccacaggggaaggacttgagacctcctgctaacattctgcactatgtgaattaactctcttggaaaagattctcctgccccagttgagccttcagatgactgtagccccagccaacttcttgatttaaccttcatgagaaaacctgagatagaacctacctatctgagatggtcttgaattcctgacccacagacatgacaagataataaatgtttgttttaagccactaagttttagggtaattgacacacaggacaagataactaatccacagtcacactcttattgctgttatttctctyccttagtaactgacacttttctctgctcttatcccaacttccaaacatctttgttttatggatcccatcgaatagataaagaaattgatgagggagttcttaacggttttgtgaaaactgaaatttgtcctgtctgtgtctttttatcaccctcaatttcaaccattgattgggcatttgctatataccagacatctcactgtgagcttttgaatacataatttcacttagtcttttcaccatccccgtgaaattg

SEQ ID NO: 571480 - DNA, 559 bp, Homo sapiens
ccacaggggaaggacttgagacctcctgctaacattctgcactatgtgaattaactctcttggaaaagattctcctgccccagttgagccttcagatgactgtagccccagccaacttcttgatttaaccttcatgagaaaacctgagatagaacctacctatctgagatggtcttgaattcctgacccacagacatgacaagataataaatgtttgttttaagccactaagttttagggtaattgacacacaggacaagataactaatccacagtcacactcttattgctgttatttctcttccttagtaactgacacttttctctgctcttatcccaacttccaaacatctttgttttatggatcccatcgaatagataaagaaattgatragggagttcttaacggttttgtgaaaactgaaatttgtcctgtctgtgtctttttatcaccctcaatttcaaccattgattgggcatttgctatataccagacatctcactgtgagcttttgaatacataatttcacttagtcttttcaccatccccgtgaaattg

SEQ ID NO: 571481 - DNA, 583 bp, Homo sapiens
atccaaaacaattttctaccttccagagaagccaaagcatacaagtggaatgagaagctccctcttatgttattcagagcaagactctggcccaaccagttcatctcacacataactccgaggtccccaaatccagaggcatttgaaatttattaaatgaactggcccttcctgacagaaatcatgaaccaattttaattcaaaaggaagcctccaaaaaaatacatcattgtgtgatttgagaaaagaagggcatttaccatgggtggcacaacatactcatgatcttacttagtccttataatatcscaggaggcaagtattgttctctcttgcagatgaggagtgtgagatatgaagcgacttctgcaagatcacagggagacaccggcagaatgaagaaagaaaccaaactctgtttgatgtaatagcctacagcagagctgtgcagtaaacatctaatatgacccacatatgtgatttaaacattttagtagccacattaaaaaaagaagcaagtgaaattaaagctagcactctttctgattttgacccactagattcaaaacattatcattgcaac

SEQ ID NO: 571482 - DNA, 583 bp, Homo sapiens
atccaaaacaattttctaccttccagagaagccaaagcatacaagtggaatgagaagctccctcttatgttattcagagcaagactctggcccaaccagttcatctcacacataactccgaggtccccaaatccagaggcatttgaaatttattaaatgaactggcccttcctgacagaaatcatgaaccaattttaattcaaaaggaagcctccaaaaaaatacatcattgtgtgatttgagaaaagaagggcatttaccatgggtggcacaacatactcatgatcttacttagtccttataatatcccaggaggcaagtattgttctctcttgcagatgaggagtgtgagatatgaagcgacttctgcaagatcacagggagacaccggcagaatgaagaaagaaaccaaactctgtttgatgtaatagcctacagcagagctgtgcagtaaacatctaatatgacycacatatgtgatttaaacattttagtagccacattaaaaaaagaagcaagtgaaattaaagctagcactctttctgattttgacccactagattcaaaacattatcattgcaac

SEQ ID NO: 571483 - DNA, 492 bp, Homo sapiens
tctttctgctattcttattctgtttgttgtgttatcatattgagatatttacttatttatttatttagagatggagtctcgctctgtcacccagactggagtgcagtggcgcgatttgggctcactgcaacctccgccttcctggttcaaatgattctcctgcctcacctgggactacaggtgcgcgccaccaggcctggctaatttttgtatttttagtagagacggggtttcgccattttggccaggctggtcttgctcctgacctcagatgatctgacttcctcggcctcccaaagtgctgggattacaggcgtgasccactgcgcctggccaaattgagattttttttttttaggctttagatctcaatccctaaactcttttcccaggcactctttcataacacgtaagatttgaatgtttttaggttccagttcctcctgtgctggttaatttcaaactgatcctatccttggctattacttttcc

SEQ ID NO: 571484 - DNA, 608 bp, Homo sapiens
tttctcaattttatttttgcattgttattgctattgtgtagaaatataattcatttatgcctgttaatttcatattctgcaatctagctgaactcattttattagttctaatatgtattcttcttggtgtatctcttaggattacctacacaaaatgcaggccatttgcaagaggaggtaattttaatccttactttgcaatctgaatgccttttatttctttttcttccctaatttcccgggtagaatctctagtgttatgcagaatgctgtcttcttcatcattttaggggggaagcatccagtctttcactattaagtataatgctagctgtaggtttttaataaatgccctttatcagattaagaaagttctgttctattcatagtttatagagtgtttttaatcatgaaagagtgttggatcttgttaaatgctttttgttgcatctattgagatgatgartggttctgctctttattctattaatatagcatattacatattacaaaattgattttcagatgttaaatcaaccttgaattccttggttaaatctcacttggccatagtatataatcattttaatatgtttctggattcagtt

SEQ ID NO: 571485 - DNA, 608 bp, Homo sapiens
tttctcaattttatttttgcattgttattgctattgtgtagaaatataattcatttatgcctgttaatttcatattctgcaatctagctgaactcattttattagttctaatatgtattcttcttggtgtatctcttaggattacctacacaaaatgcaggccatttgcaagaggaggtaattttaatccttactttgcaatctgaatgccttttatttctttttcttccctaatttcccgggtagaatctctagtgttatgcagaatgctgtcttcttcatcattttaggggggaagcatccagtctttcactattaagtataatgctagctgtaggtttttaataaatgccctttatcagattaagaaagttctgttctattcatagtttatagagtgtttttaatcatgaaagagtgttggatcttgttaaatgctttttgttgcatctattgagatgatgaatggttctgctctttattctattaatatagcatattacatattacaaaattgattttcagatgttaaatcaaccttgaattccttggttaaatctcactwggccatagtatataatcattttaatatgtttctggattcagtt

SEQ ID NO: 571486 - DNA, 572 bp, Homo sapiens
gtgggagttccagttttagttctttgagaaacttccatactgttttccatagaggcttactcatttacattgctaccaatagtatttgctttctgcacatccttgccaacatttgttattgtttgacattttaataatagccatgctgactggtgtgaggtggcatctcaytgtggttctaatgtgtatttctttgatgattagtgatgctgggcattttttcatgtgtgtattcactgcctgccgttttattgctgttaaataatgagtggtcactgtaattttcactgcccattgggatgctctgtgaatctggattctaaatacaacgtgaggcgtctgtaacatggaagtaaataggaactggaagaatcaatcagtaaatggtgatgaaattctacaaaagaccctttaccctaagccattgtgttacagaaggataaatgaaattgctttctctagctcgatagggtcaaatcaaggagatatatagccaaaaaagttctcctgaaaggctgctagtgataattaggttccactaatttatgtcaaaaagtaccctgagagaaatt

SEQ ID NO: 571487 - DNA, 535 bp, Homo sapiens
tactttgggaggccaaggtggggggatcatgaggtcaggagatcgagaccatcttggcaaacatgatgaaatccccatctctactaaaaatacaaaaaattagctgggtttggtggcatattcctgtagtcccagctacttgggaggctgaggcaggagaatctcttgaaccagggagwcggagcttgtggtgagtcaagatcctgccaccgcactccagcctggtgacagagtgagactccaaaaaaaaagaaaaaaaaaaatcctgatactgtcaccatacattgttctcctcacagtactgagcaattgtcaaaagttttgaataatactgcaaaatgattaacattataaaacaaaaaaaaattactcatcaatgggtaaagattgtataaacagctggacaaatcttcaatcaatgtaggaattactgaagataaaaggagctgcagaaatcagcctgcacagttgtgtttcatgacatgaactttttgaacaggattctgcagctccctgaagaacatcatttacttcc

SEQ ID NO: 571488 - DNA, 593 bp, Homo sapiens
tgtggaaactaattctgattaaggttagcaaaaaacacaagcactgagtgaatccctgacacagatggggagagagcagcaatcctaagagattagcagccccagaagctaggtttccccctcaccacatctgcaaaccttgatcacctggaacttctacttcgatggatacactgagggcaaaggatacagcagatacagcctacagccactcaaaatggaaactggaaactcacacaaatagacaaagatatgatacacaaatatataatatttatacataatatataatatatagaagatgatgtatataaaaatatgtattaaatggtgaaacccccaagaagtcacatacactcttaaggacttgactaatagtaaattcactgtgaaaaagagatcagaaagagtgaaaagaacttgctctttcccaccttggtgctgtggggagaaagaagaaatcaccgcaaagaatttataaccttaagtccactttcccatgagtttataacctaaatttatgatacctatatggctctaaagacctctaaaattcaagagatattccyaagtagtgacccaagcaaacacaa

SEQ ID NO: 571489 - DNA, 554 bp, Homo sapiens
gtaaactagattggcaagtgcaaaatgaaaatttgtttctttgtaacaataactacacaatttgtcaagaaggtgatcatctctgcaatttgrtagtctttgttatcatgttctcataggaataaatatacacaatttcacctccctgggcttcccttgccttgccgtagaatacaattttgcttcgtagaaatgattccatgaatctgcaacaagttacattttattttaaggatttatgtgctatctatgtaaattgttctgaaataattagattaccatttcggaaattagaactaatttcaagtagatgcaatggcgccgtgttaattaaatgacactgctctgaggacctagaagtattttagaagaacacactacaaatattaggtcattcctagcatatgaaagttatattttaaatatgcattatttggtaggtcaagaatggaattattaattgaaatggcaaaacagaaggcattcgaaacatcccctggaattaggagaaaaccttcaatgttattaaccataattcaaacaaaattgttgga

SEQ ID NO: 571490 - DNA, 533 bp, Homo sapiens
attaacataattccatatgactattagaagacaggaagagagaaatgatggaaaatacatctttatttaaactgtaactaaaataaaaatagaaaacaaaaacttccaaaatatttagtggccaaaaatagaatacataccatttatccacaaaaattatctcatgttaagccctttatatgcagtcatccagtctagactttttttaaattactatttcacaatatggacagttttaaactatgaaaattataagcaaacaaagaatttgtaaaaagaaaaaaataataataagagttttctttaaatgcaacatctaagaatcttaaaagaagaaagcagttttttaactgtactttcaagtcattaacacatacttaaagttcagtccacattttaaaatacattcggtcccaaaattatgtcagttccaaatgttgacacattttgctttatcttaacacaaacagtacatgtsattatacaatggggaaaaaatagtttttctttaattattataaaaaactgtgtgt

SEQ ID NO: 571491 - DNA, 440 bp, Homo sapiens
atttgtacactcatgttcatggcagygttaatcacaagagctaggacatggatgcagcccaagttcccattgaaaaatgaatggataagcaaaatgtggtacatatatagaattgaatatgatttatccttaaaaagaaaagtaattctgacacattacaacatatatgagcacggagaacattacactaagtaaaataaatgaatcacaaaataaggtacttacagtttaatcgcagagaaataaaacagaatggtggtttccagaggatggtgggagttgaaaatgggcagttgttatttaattggtacagagttttagtcttgcaagttgaaaggactctggagaggaatggtgatgatgttggcatgaaaatatgaatgtacttaataccactgtacacttactaaaggttcaaaatagcaaatgttattttatgt

SEQ ID NO: 571492 - DNA, 581 bp, Homo sapiens
aattatgtgaatgagagagggttgttttccaaagatggtgaccagaaaacaaaaccttatgttaataaacaatgtgaaaaagttagtttgaaaaagacgtatgacataaaatattttgttcctaggctgggcacagtggctcaagcatataatcccagcactttgggaggccaaggtgggcagatcactagaggccaggagttggagaccaagttggtcaacatggtaaaaccccatctatactaaaaatacaaaaaattatacaggtatggtygtgtgcacctataatcccagttactcaggaggctgaggcatgagaataacttgaacccagaggcagatgtggcagcgagccgagatagtaccactgcactccagcttgggccacagagcaagactctgtctcaaaaaaacaattatatatatcatatatttatatataaatatatataaataatataaacataaatataaatataaatatatatataaatatatataaatatatataaatatatatatatatgttatagttcctttggaatctaccctttgctctcagttataaatctgagcagacg

SEQ ID NO: 571493 - DNA, 608 bp, Homo sapiens
gggggctcccatctcacagaatgattgcaggtcaccaaataggaactgaagagaccaggcttctcctggcaaaggcgagaacttcccatggctccacccagttctcccacttcccaggccagtgggagattctccagggacactcctcctaatctgcctcctgcatctatcattatcaaacagaaaatttaatataactattatatatcttaatatgttaagatctttaatggaaaagaaaaagtcatgcaagaaaatatgggtaatgaaagcagaggtggaagtcctaagaatcaaaataaaataataaaaataaaaaactctgtagcagaaatgaaaaacacttttgatgagatcttcactagacttaacacagctgtggaaacaataagtgaacttaaagatagataaaaaggcctgtaatcgcagcactttgggaggctaaggcagacagatcacaagatcaggagatcaagaccatcctggctaagatggtgaaaccccatctctactaaacatacaaaaaattagccaggcatggtggcaggcacctgtagtaccagctactgaggaggytgagggaggagaatcacttgaacctgggaggt

SEQ ID NO: 571494 - DNA, 602 bp, Homo sapiens
tgggctgagacaatggggttttctagatatacaatcatgtcgtctgcaaacagggacaatttgacttcctcttttcctaattgaatgttcttccatttgtttgtatcctcttttatttccttgagcwgtggtttgtagttctccttgaagaggtccttcacatcccttgtaagaaagatccaaaactgacaccctaacatcacaattaaaagaactagaaaagatgtattcttgtaaagagaaaattaaacccaagaggaatttgttagagcaaaagcaaaactcagaagaggtttaattcccatatgtgaaggaataaagaagttggcaaatcctatcacacacaaaaaattgggggtggggaaggagagaaaaacatacacataaaagaaaacaaaagtgtaaaatggaacagaatttctgataacaaaaatttcaagtttctagaaattaatgaaaggcatacaataaacgtagaagtattttaaaataaactgataattctttgggtaagagaaaatgggaatctgctcattcattgctggggcctgttactattcttgatcctcacaccaaattgtgaagaactacagttttaccaa

SEQ ID NO: 571495 - DNA, 281 bp, Homo sapiens
tactctagcctgggctacagagcaagactctgtctctcaaaaaaaaaaaaaaaaaaaaaaaaagtaaacccatgcaacaaaaactttgcaggccaggagaaaatgaaatgctacattcaatgttctataaaaccaagaacacaaaaaacaaaacwgtcaggcaaaagcattatacccagcaaagctgtttttcagaaatgaaggagaaaaaatattccaaggcaaacaaaagatgaggcaattcatcactaccagatctaccttacaagaaataatgaaga

SEQ ID NO: 571496 - DNA, 559 bp, Homo sapiens
agtggaatttggggacttgggaggggaggctggaaggtggatgagaaatgaaagacaacatattgggtacagtgtacactgctcgggtgatgggtgcactaaaatctcagaattggaaaaggtggagcaagggtaaaaaataaattaataataatataataataataataaaatctcagaattcaccactaaaaaactcatccatgtaaccaaaagccacctataacccaaaaactattgaaataaacaaataatttttgaaacaaaagaaccattttaatttctggctctgccagtagctcacattaggataccatgcaaaattactcaatccctctgagcttcagtattcccatctgtaaaatgagaataataatccacctacatggtatgtgaaggttagatgagataaattatggaataggctgagcccagsacatggctcttacttaagcactcaaaaagcgtagatggttttagttattaaatatatattatgtatattccattacaattattatgtattattataattcctcttgaacctgagtttcaacca

SEQ ID NO: 571497 - DNA, 610 bp, Homo sapiens
tggccaacaaatgtatgaaaaaaaaatactcaacaaataagtaaatactgaacaagtaaataaattataaataataggacccagtttagacaaactagtaactaataagcaagatgataaagctagaatgaacactgtggtgctggattagaactggcaatttcggtaagaattcatattcatattcatatttacatgtatttgtatacgtgtgtgtgtgcacgtgctcatctcagacacactyagtaacttaaaacaacaaagattcattcttacagtctggaagtcagaagtccaaaataggtctcactgggcaaaatcaaggtgtcagcaggaatgtgctccttctggaaactccagggagaatctgcttcttagccttgtccagcttctaaaagctgcctacatcccttggcatgtgtctccttcctccatcttcaaagccagcgacataacatccttaaatctttctctgactctgaccttctctgtctccatcttccactttggttatattaagcccacctgggtaaaccaattaaacccacatgggcaaaccaggttaaacttgttttaaggttaattgattaacaaccttaattagatcagc

SEQ ID NO: 571498 - DNA, 600 bp, Homo sapiens
gttttcaaaacttttgcaagaaacaatacatatggtcatttttaaaagactgtggaagtttcrtggtgttttctataattattaaccaggttcaattttgctatgtaattagaatgactcttcttgggttatttgaaattccaaaagaatatttttaaaactgacaaggcaacttttaaatctaagaaacttcacacatccaatccacaaatgttaaaagaatgggatcaagataagaactataccaaaagcactgttaatgaaagaaaaaatttaaaattaaaaactttccacctatgaaagacactaatataggatgaaaggacaaatcatagattgaaagaaaatgtttacagatcatgtatttttttttttttttttgatatggagtcttgctctgtcatccagactggatctcagctcactgcaacctccacctctcaggttcaagcaattctcctggctcagcctcctgagtagctgggattacaggtgtgtgccaccatgcctggataatttttgtacttttagtaaaaacggcatttcaccatgttggccaggctggtcttgaattccttacctcaagcaatctgcccacct

SEQ ID NO: 571499 - DNA, 600 bp, Homo sapiens
gttttcaaaacttttgcaagaaacaatacatatggtcatttttaaaagactgtggaagtttcgtggtgttttctataattattaaccaggttcaattttgctatgtaattagaatgactcttcttgggttatttgaaattccaaaagaatatttttaaaactgacaaggcaacttttaaatctaagaaacttcacacatccaatccacaaatgttaaaagaatgggatcaagataagaactataccaaaagcactgttaatgaaagaaaaaatttaaaattaaaaactttccacctatgaaagacactaatataggatgaaaggacaaatcatagattgaaagaaaatgtttacagatcatgtatttttttttttttttttgatatggagtcttgctctgtcatccagactggatctcagctcactgcaacctccacctctcaggttcaagcaattctcctggctcagcctcctgagtagctgggattacaggtgtgtgccaccatgcctggataatttttgtacttttagtaaaaacggcatttcaccatgttggccaggctggtcttgaaytccttacctcaagcaatctgcccacct

SEQ ID NO: 571500 - DNA, 611 bp, Homo sapiens
attttattttctgctatttttacattttcaatgatattcttgacatttgagattactaattattttctgaacacatgaagaattactgtaaatgaagcattactgtgtggcttttggtgagtttgatctacatgctatcatttatatttttactyttctggtgagatttttgactcaaaagaaaagaactacttcaacacaatcactgacccttatgtattattcaaagttcaacaagattctctttaaaaagggaaaatttgcaatttgctctctcactttgccccttattctataaagcttcacaaagatgtttttaacagcacgactagctttgttcccaggtatgctcagaaacaactagttttgtctgtgagatgtagaaacctttctatatttatgagttataatgaaatagttcacctcattgaggaattgtgatgaattatttctggttttacacataagtattgatagcattaaatttagaaggtagtatctttggaattgacttttacatcacaaagtgcccatttggttcacatatgagacttatttaaagacaagtctccacattgttactgaacattctttgaaaatatcacaggtct

SEQ ID NO: 571501 - DNA, 611 bp, Homo sapiens
attttattttctgctatttttacattttcaatgatattcttgacatttgagattactaattattttctgaacacatgaagaattactgtaaatgaagcattactgtgtggcttttggtgagtttgatctacatgctatcatttatatttttacttttctggygagatttttgactcaaaagaaaagaactacttcaacacaatcactgacccttatgtattattcaaagttcaacaagattctctttaaaaagggaaaatttgcaatttgctctctcactttgccccttattctataaagcttcacaaagatgtttttaacagcacgactagctttgttcccaggtatgctcagaaacaactagttttgtctgtgagatgtagaaacctttctatatttatgagttataatgaaatagttcacctcattgaggaattgtgatgaattatttctggttttacacataagtattgatagcattaaatttagaaggtagtatctttggaattgacttttacatcacaaagtgcccatttggttcacatatgagacttatttaaagacaagtctccacattgttactgaacattctttgaaaatatcacaggtct

SEQ ID NO: 571502 - DNA, 611 bp, Homo sapiens
attttattttctgctatttttacattttcaatgatattcttgacatttgagattactaattattttctgaacacatgaagaattactgtaaatgaagcattactgtgtggcttttggtgagtttgatctacatgctatcatttatatttttacttttctggtgagatttttgactcaaaagaaaagaactacttcaacacaatcactgacccttatgtattattcaaagttcaacaagattctctttaaaaagggaaaatttgcaatttgctctctcactttgccccttattctataaagcttcacaaagatgtttttaacagcacgactagctttgttcccaggtatgctcaraaacaactagttttgtctgtgagatgtagaaacctttctatatttatgagttataatgaaatagttcacctcattgaggaattgtgatgaattatttctggttttacacataagtattgatagcattaaatttagaaggtagtatctttggaattgacttttacatcacaaagtgcccatttggttcacatatgagacttatttaaagacaagtctccacattgttactgaacattctttgaaaatatcacaggtct

SEQ ID NO: 571503 - DNA, 585 bp, Homo sapiens
aagaactcacttcacttgtttccactatttcaggagttactgctctgcactgcatgatgttctgtgttggaaacaactgtttsatatgttttgtccagttttctagttgtttgtggtagaaagggtaaatataccttggctgaaagtagaaatactattttaaacacatctccagtatacaaaaagcttaacgataaatggatgaaaaacagattagtcccacattaacccacaccaaacaggaggacctatattgatattagatgaaatagatttcagaacagtgaacactacctgaaataaaaagggttattggatgatgatgaaagatcaattcagtaagatgagagaacaaaccaaatatttatgtatctagtgacagagcttcaacattcatgacaaaaactgaccaaacagaagaaatggacaaatgtgctgttatagttgaaaatgtgtatgcctttctattaataagttataaaacaagtagacaaaaagttagaaagcatattgaacagtgctatcaaccaatttgaactaattgacctatttgaaattactagaaaattctacccaacaaacagt

SEQ ID NO: 571504 - DNA, 585 bp, Homo sapiens
aagaactcacttcacttgtttccactatttcaggagttactgctctgcactgcatgatgttctgtgttggaaacaactgtttgatatgttttgtccagttttctagttgtttgtggtagaaagggtaaatataccttggctgaaagtagaaatactattttaaacacatctccagtatacaaaaagcttaacgataaatggatgaaaaacagattagtcccacattaacccacaccaaacaggaggacctatattgatattagatgaaatagatttcagaacagtgaacactacctgaaataaaaagggttrttggatgatgatgaaagatcaattcagtaagatgagagaacaaaccaaatatttatgtatctagtgacagagcttcaacattcatgacaaaaactgaccaaacagaagaaatggacaaatgtgctgttatagttgaaaatgtgtatgcctttctattaataagttataaaacaagtagacaaaaagttagaaagcatattgaacagtgctatcaaccaatttgaactaattgacctatttgaaattactagaaaattctacccaacaaacagt

SEQ ID NO: 571505 - DNA, 623 bp, Homo sapiens
tgataaaaaaaagtgagaaatttcatttaatccttgatcctatagataaccactgtagtggttgggtatatattttccggggttagggatgcatatgtgactatgtgaaagttagtgtattttctctagacttgttcttatatatattttctaagatttagatcatgatagaaaggctatttgaaataatatttttctttgtaacaatgcatcttgactctgcatgtagagactcagagggattttgcaactttatcctccactgaaaatataatataacatttagattattatgtatggcttctgagattttaaaaatgcattaccatatctgaactttcaacattataggaggtaagcacrtaagttttgcttatagttggatgtttctttcaaaatgggagttattttgaatcattgacatcctctcctaggaagatattagttgcagtgatggttgggaatcgtagttgccagtcagagctctattatctcacctcaagtttgttttatttaacttattgatgagggagccagcagggtgaaaaagcaggttgaaagaaaaaagtatctgagaaatacgctttccatagtctgtgggagaaacaaacaaaactactgaa

SEQ ID NO: 571506 - DNA, 623 bp, Homo sapiens
tgataaaaaaaagtgagaaatttcatttaatccttgatcctatagataaccactgtagtggttgggtatatattttccggggttagggatgcatatgtgactatgtgaaagttagtgtattttctctagacttgttcttatatatattttctaagatttagatcatgatagaaaggctatttgaaataatatttttctttgtaacaatgcatcttgactctgcatgtagagactcagagggattttgcaactttatcctccactgaaaatataatataacatttagattattatgtatggcttctgagattttaaaaatgcattaccatatctgaactttcaacattataggaggtaagcacataagttttgcttatagttggatgtttstttcaaaatgggagttattttgaatcattgacatcctctcctaggaagatattagttgcagtgatggttgggaatcgtagttgccagtcagagctctattatctcacctcaagtttgttttatttaacttattgatgagggagccagcagggtgaaaaagcaggttgaaagaaaaaagtatctgagaaatacgctttccatagtctgtgggagaaacaaacaaaactactgaa

SEQ ID NO: 571507 - DNA, 410 bp, Homo sapiens
gcgaatgccattaattcatttctttttatagctgagtagtattcaattatatatatatatatatatacttgcacacacgtttatagcagcacaattcacaattgtgaagtgtcaaaaacatacttgcacatgcatgtttatagcaccacaattcacaattacaaaattstggaaccaacacaaatgcccatcaatcaatgtgtgcataaagaaactgtgatatatataatatatatatatataattatctcttttcctctgggtggatacccagtagtgggattgctgcatcaaatggtagttctacttgtagttctttaagcaatctccacactgtttccatagtggttgtactagtttacattcccaccagcggtgtagaagtgtttcctgtttaccacatccacgtc

SEQ ID NO: 571508 - DNA, 526 bp, Homo sapiens
ggcctgggaggggcagcctgtgggggagctgtcagagacctgtccatccccycagccaaccaacagtcctgggaccccgccagagcctgccacctttctccctgctgcttgcggtgaggtcctgagaggcttgtgggtgggttgcatggctgggagggaagggaggcagctgctgctctttgagagctgccctggtgaccccctggccctccaccaaaccctatggtggtccagctgttctcactgatacctcatccctgcctgcaggagcctgtgggattagaggctgaaaaaaacatgtgtccccatcccgagtccagcctcagactatgcctgtctggaaagcggagggagcccctgcaggctcctgcgaggggccatgcctggtttcagagccgctgcagtcatgggttgccctgggcctgcttgctcatgttcagcttcagtccacttaatcatgttcagctttggtctcctggcagattcacccaactcctctattctgtcccgagagaagctggtcagt

SEQ ID NO: 571509 - DNA, 645 bp, Homo sapiens
ggttatttcttgattatatgctaaacaaggggtggattattcatgagttttctgggaaaggggtgggcaattcccagaactgagggttcctcccatttttggaccatatagggtractttctgaagttgccatggcatttgtaaactgtcgtggtgctggtgggagtatagccttaaggacgaccggaggtcactcttgttgccatcttggttttggtgggttttagctggtttctttactgcatcctcttttatcagcaaggtcgttatgacctgtatcttgtgctgaccttctatttcatcctgtgagttagaatgcctaattgtctgggaatgtagcccagtaggtctcagccttattttgctcaccctattcaagatggagttgctctggttcaaaggcctctgacaatatcacccctacttttctgttcttcagacttgttgaggaaatcagcaagcgttaatgctttaaaataaactatgcagactgagaaaaattttcagtagtacttatctctcactgtgctgttttgtggatatttgtgtgtccatcatgtctcacgaccgtatctcctcaaggaaagactgattagacatacatttttaaactgcttggcagggcagtgtcttggcacaaagggg

SEQ ID NO: 571510 - DNA, 589 bp, Homo sapiens
taactttttgatgtgctgctccctggattcagtttgctgtactacgttgataatttgtgtgtctgtgttcattaggtatattggcctgaagttttcttttcttgttgtgtctctgccaggttttggtatcagaatgatgctggcctyataaaataagttacggaggagtccttcctccttgatttttggaaataatttcagtaggattggtactagctctttgcgtatttggtagaatcaaatccatatggtccaaggctgttattggtttttaggtgttttattactgattcaattggtctgttattactctttattggtctgttcaggatttcaatttcttcctggtttaatcttgggaggctatgtgtttccaggaatttaatttcttgtaggttttctagtttgtatgcagagaggtgtttatagtagcctttgagttttttttttttttttttttttttttgagacagagccttgctctgtcacccaggctggattccagtggtgcaatcttggctcactgcaacctccgcctcccagattcaagtgattctcctgcctcagcctcctgagtagctgaaactac

SEQ ID NO: 571511 - DNA, 587 bp, Homo sapiens
cctaacatttcttctctatcactrgtaatgttctctatcatttggtggcatttaaggcacagacttcaaaggtattttaaagtcttttatgccttcccacccatcattaaaaattaataaattttgtcactcagccatttacaaaataatctgatattacagattattttatttccttctacaagaaaaccatatcctatttccttctacataaaaaccaaatcaaagagattcctctgtgaaatgtctcctacttaaggtgaatttaatccttttgaaacataaacattctctatataagtataaaaaatatacatctatgtgataattcctcctccttcattagtttattcttttattcactcaaagactattggtgagcacctactatgtatctgtcattacacataatcaattctaaacatacgatgttgatttacaagtattgatcttgttacatgcagtcaacacaactgattttcgagctaattttcaaatatttaacttgtctaagccccttaacaattcctctttcttagtctagataactctatcaattttacttttttccccatacattgagtgag

SEQ ID NO: 571512 - DNA, 587 bp, Homo sapiens
cctaacatttcttctctatcactagtaatgttctctatcayttggtggcatttaaggcacagacttcaaaggtattttaaagtcttttatgccttcccacccatcattaaaaattaataaattttgtcactcagccatttacaaaataatctgatattacagattattttatttccttctacaagaaaaccatatcctatttccttctacataaaaaccaaatcaaagagattcctctgtgaaatgtctcctacttaaggtgaatttaatccttttgaaacataaacattctctatataagtataaaaaatatacatctatgtgataattcctcctccttcattagtttattcttttattcactcaaagactattggtgagcacctactatgtatctgtcattacacataatcaattctaaacatacgatgttgatttacaagtattgatcttgttacatgcagtcaacacaactgattttcgagctaattttcaaatatttaacttgtctaagccccttaacaattcctctttcttagtctagataactctatcaattttacttttttccccatacattgagtgag

SEQ ID NO: 571513 - DNA, 587 bp, Homo sapiens
cctaacatttcttctctatcactagtaatgttctctatcatttggtrgcatttaaggcacagacttcaaaggtattttaaagtcttttatgccttcccacccatcattaaaaattaataaattttgtcactcagccatttacaaaataatctgatattacagattattttatttccttctacaagaaaaccatatcctatttccttctacataaaaaccaaatcaaagagattcctctgtgaaatgtctcctacttaaggtgaatttaatccttttgaaacataaacattctctatataagtataaaaaatatacatctatgtgataattcctcctccttcattagtttattcttttattcactcaaagactattggtgagcacctactatgtatctgtcattacacataatcaattctaaacatacgatgttgatttacaagtattgatcttgttacatgcagtcaacacaactgattttcgagctaattttcaaatatttaacttgtctaagccccttaacaattcctctttcttagtctagataactctatcaattttacttttttccccatacattgagtgag

SEQ ID NO: 571514 - DNA, 587 bp, Homo sapiens
cctaacatttcttctctatcactagtaatgttctctatcatttggtggcatttaaggcacagacttcaaaggtattttaaagtcttttatgccttcccacccatcattaaaaattaataaattttgtcactcagccatttacaaaataatctgataytacagattattttatttccttctacaagaaaaccatatcctatttccttctacataaaaaccaaatcaaagagattcctctgtgaaatgtctcctacttaaggtgaatttaatccttttgaaacataaacattctctatataagtataaaaaatatacatctatgtgataattcctcctccttcattagtttattcttttattcactcaaagactattggtgagcacctactatgtatctgtcattacacataatcaattctaaacatacgatgttgatttacaagtattgatcttgttacatgcagtcaacacaactgattttcgagctaattttcaaatatttaacttgtctaagccccttaacaattcctctttcttagtctagataactctatcaattttacttttttccccatacattgagtgag

SEQ ID NO: 571515 - DNA, 565 bp, Homo sapiens
tgtttattctaacattttcttcgtggaatctttargtttttccttaagaacatgttgtcaggaaacagcaacaactttagttttttctttcttattaggatgtcttttatttcttttccttaactgctcagacaaggacttctactactatgttgaatagaagtggtgagagtggacatccttgttttgggtctcagaaagtacttcaattttttactatgcttaccaacaagcatagtgttagctgcagcctcattatatatggccttaaatgtgttgaggtacaatccttctatccttaatttgttgaggattttatcatgaaagaatgttgaattttattaaatgctttttctgcacctgatgagatgatcatacgatttttgtccttcattctgttaatgtgatgtatcacatttattgatttgtgtatgttgaaccattcttgcatcccagggttaaatcctagttgactttggtaaataatccttttaatgtgttgttgaatttggtttgctagaatttggtttaagatacttacatccatgtttaaggatattggcat

SEQ ID NO: 571516 - DNA, 565 bp, Homo sapiens
tgtttattctaacattttcttcgtggaatctttaggtttttccttaagaacatgttgtcaggaaacagcaacaactttagttttttctttcttattargatgtcttttatttcttttccttaactgctcagacaaggacttctactactatgttgaatagaagtggtgagagtggacatccttgttttgggtctcagaaagtacttcaattttttactatgcttaccaacaagcatagtgttagctgcagcctcattatatatggccttaaatgtgttgaggtacaatccttctatccttaatttgttgaggattttatcatgaaagaatgttgaattttattaaatgctttttctgcacctgatgagatgatcatacgatttttgtccttcattctgttaatgtgatgtatcacatttattgatttgtgtatgttgaaccattcttgcatcccagggttaaatcctagttgactttggtaaataatccttttaatgtgttgttgaatttggtttgctagaatttggtttaagatacttacatccatgtttaaggatattggcat

SEQ ID NO: 571517 - DNA, 561 bp, Homo sapiens
agtgtgagtaaacagacaaccttcaaaatgggagaaagtatttgcaaactatgcatccaacaaaggtctaatatccagattctgtaaggaacttaaatcaacaagcaaaaatcaaacagccccagtaaaaaatgggcaaaggacatgaacacttttcaaaagaagacacacacagccaacaagaatatgaaaaaatgctcaacatcattaatcattaaagaaatgcagatcaaaaccatgatgagatagcatctcataccrgtcagaatggcagttattgaaaagtcaaaaacaaaaagcatacgaaaaacatgctggagaggctgtggagaaaaggaaacacatacagtgctggtggtggtaatgtaaattagttcaaccaccgtggaaagcattgtggtgatttctcaatgtaaaacagaactaccattcgatccagcagtccccttactgggtatatacccaaagaaatataattcgttctatcataaagacacatgcaaacatatgttcatcacagcactgttcacacagcaaagacatggaatcaacctagatgtt

SEQ ID NO: 571518 - DNA, 589 bp, Homo sapiens
tggctctgtgtctccacccaaatttcacgttgagttgtaawccccaggtgtcaaggaagggacctggtgagaggtgatcagatcatggaggcagttccctcaggctgttctcatgatagtgagtgagttctcacgagctctgacggtttaaaactgtgtgactttcttcactctctctcctgcggccatgtgagacgtgcctttcttccccttcaccttccactatgattctgaatttcctgaggccttcccagccatgcagaattgtgagtcaattaaacctcttgtctttataaattacccagtcttgagtagttatcacagtgtgaaaatagactaatacacatggccattgatattctgattctacagactatccatggaattgtcttgttaaactaaaatgtcccaacactaaagaatggctcctgtgccttcccctttgaggtgggaaaaaaaaaagggttttcttcaggaccttctggtaaccttctacaaagatcaggtaacctttaaagggcatagcaatttgtcgtatcttgaagaaaaaatgtctccaaatcatggttttatttacgaagcagactat

SEQ ID NO: 571519 - DNA, 652 bp, Homo sapiens
cccacccacatctcatctcataatgtaatcccctcatgttgagggagggacctgtaatccccacgtgtcaaaggagggaggtgattggatcataggggcagttcctcccatactgttctcatgaaagtgagttctgatgagatctgatggctttataagtgtttagaaattcctccttcatgcttctttttcctgccaccttgtgaagaggtgcttgcttccctttctgccatgatggtaagtttcctgaggcctcccaagccatgcagaatggtgagtcaattaaacctcctttgtttataaattacacagcctctggtagtatctttatagcaatgtgaaaacggactaatacaaatgtataccatggaacatttttatacctagaatacactgaaccacctttgggtaatgctgaagttgctttcacatttgattttcatgctaagagtcaataaatgtgagacagagatcctttggagcattcactactctcttcctgtgattttcttaaactgggaattcttttagaaaacttatcttcataggtgcaattagagaggtttaatctacaacttggcctgcaattaaagagtgtccttagtaaatgagagcaaggcctgtgtttgstttgtttaacactaaagccctt

SEQ ID NO: 571520 - DNA, 601 bp, Homo sapiens
gccttccttacaattagatgtggctatataactaagttttggtgaattggatgcaaccagaaacwgtatgttggattcttgtaaagttcttttgaaaaggaaaagagactggccctgtttgaactttggcctttttaagttttgctggtctgcagaatatagatgtgatggctggcatcccagcagctatgttggaccatgaggtaatcatgaggatggaatccatgcacctgactgctgaagtagaaggaaagatggggcctgggtctcagatgtcatggaacaccaaaccagccctagaccactaaccttaggaacttctttacatgaaagaagaaatctgtacttaactcataattagccagagggtaagttagggtgcctgggcagggagctctgttgctctcagccaaatgcaattcctaattggtacacatgtcaagggggtctccactgagatttttgtttctagctctaccattatacattcttagaacattacatagggctgggcacggtggctcacatctgtaatcccagtactttgggaggctaaggtgggtggatcacgaggtcaagagttcaagacaagcctggccaa

SEQ ID NO: 571521 - DNA, 426 bp, Homo sapiens
cattgccaacaggggaatgccaatttgaattacagcagattccgatctgaaatcacaggaagcagaaaaaagtggcacatcacttttcaagtgctgaaagaaaataactatgtatctatgtatrtatctgtcaagataaagatactgtattagtccattttcatactgctatgaagaactgcctgagactgtgcgatttataaaggaaagaagtttaattgactcacagttcagcatggctgaggaggcctcaggaaacttacaataatggtggaaggtgaaggggaagcaaggcaccttcttcacaaggtggcaggaaggagaagtgccgagcgaaagggaaagagtcccttttaaaaccatcagatctcgtgagaactcactatcatgagaatagcagcgggggagaccacccccatggttcaa

SEQ ID NO: 571522 - DNA, 561 bp, Homo sapiens
aagtttgttaagtttgttaactgaacttggttaagttctctttattttcactcctttccccttagataaaccttaatattatctaaagcagaaaagataacattgggtaaaataagaaactaaggcttatggggtttaaatgtattrccaaagttcaaaacctgtaagtggcagacatagacatcaaaacaaggtcaaatgatttgaagtgtggtggtgctgtatcttcatatttcaaccagcacaagtaaaattcaaggttgtccaagaaatcagatatgtcatatctagttctttatttaaatctaatttaaaagtagcaggaaatcagaaaaaaaatgtttatcttggagctagagtaatgttggatgtgttgggagaattgtctgatcccaatgtaggcatctgttaaaatgttttatcagtagtgcttggcattgatctctggtcatttgccaggcctgatgagagagtaaaaagcctatacaccaaaagtgttgcaagaattagtgagcaggcaccaacatgagccagtagagcactcctggaatttgattttga

SEQ ID NO: 571523 - DNA, 508 bp, Homo sapiens
gattcttgatcaccttcccctttcataacatgtctccctggttcattgcattgattatattgtgctgactggacctaatgaacaagaagtaacaactactctagacttattagtaagacactggcatgtaacagtgtaggaaataaatctaactaaaattcagaggacttctgactcagtgaaattttcaggactgcagttgtgtgtggcatattgaggtattgcatctatggtggaggataagttgttgcacctagcttcatctacaaccaagaaagagaagtaaggcatagtgagcctctttggatttgaagaggaacataattctcatttgggagtgttactccagcccatttaccaagtcacccaagaagctgctaaatttgagtggggtctagaacaagaaagatgtcttcaataggtttgcgtttctatgcaacctgctctgccactttagccatatgattcagtagakgcaatggtgcatgaagtgtcagttacagacagg

SEQ ID NO: 571524 - DNA, 452 bp, Homo sapiens
tggtttaattcacttgtgctcacacaaacaactatacattttgtgtttcagactttaggaattattgacaaaaggagtaagaatgtggagagaattacatagctgcaaagaatgtttgtcatagctgcaatgggagtaagaagacattgaaggacattgaatagaaagtagaaacactttacatcaaaaggaaagaaattcatactatacttttaacaattttatcaacccrcttattgattgtattagtttgctaggactgccatgataaaatacaatagtctaggtggcttaaataacagaaataaattttcttacagttgtggaggctatacatccaaaatcaaggtgtcatcaatgttggtttttggtgagacctttcttcttggcttatgtccagatgcctcattgtgtccttacatgacctttcctttgtgtactagtggagataa

SEQ ID NO: 571525 - DNA, 501 bp, Homo sapiens
agatctttcacctccttggttagatgtattcctaggtattttattttgcagctattgtaaatgggattgcattcttgatttggttcttaacatggcaatacaagttattggtgtatagaaatgctattgattttggtacattgattttgtatctagaaactttactgaagttgtttatcagttcccagagacttttggcagagtytttagggtttcctaactctaaaattatatcatcaacaaagagagagttgacttcttctttttctatttggatgccttttatttttttcttctccctgatttatccagcaagtacttccagcactatgttgtataggagtggtgagagtgggcatccttatcttgttccatttctcaagaaggatgcttctacattctgcacattcagtatgatgttagctgcaagtttatcatgtgttgctgttattattttgaggtatgttcctatgatgtctagtttcttcagagctttgatca

SEQ ID NO: 571526 - DNA, 410 bp, Homo sapiens
cagtctccggcatctttaatttcttcctcttcactgccttcttcccctcaagcaacaatatacacagttgtcatctttcttgaaacaatcattatttgaccctgttgcttttaatgctcctgatcctttttctcacctttttaccgaccaacttcctttctttcattatcatcgtttttttttctttctcaccctctactcaaaacatawccttggaaggtcactagcaaccttctagtttgtagatattaaaatgatgaagctagcaggtccttctacaccaggcaagccacctcttgggacagattctggcactgccatttattgactgtatcactttagactgtccttcacaggtctctgtgcttcagtttccttacctgtaaaatggggataatattggaattcta

SEQ ID NO: 571527 - DNA, 286 bp, Homo sapiens
tggtgatcttcttgctggtcttgccattcctggacccaaagcactccatgacctccacaatattcatgccttctttcactttgccacagatcacatgcwtgccatccaaccactcagtcttggcagtgcagatgaaaaactgggagccatttgtgttgggtccagcatttgccatggacaagatgccaggacctgtatgctttaggatgaagttctcatcttcaaatttctccccatagatggacttgccactagtgccattatggcgtgtgaagtcaccaccctg

SEQ ID NO: 571528 - DNA, 286 bp, Homo sapiens
tggtgatcttcttgctggtcttgccattcctggacccaaagcactccatgacctccacaatattcatgccttctttcactttgccacagatcacatgcatgccatccaaccactcagtcttggcagtgcagatgaaaaactgggarccatttgtgttgggtccagcatttgccatggacaagatgccaggacctgtatgctttaggatgaagttctcatcttcaaatttctccccatagatggacttgccactagtgccattatggcgtgtgaagtcaccaccctg

SEQ ID NO: 571529 - DNA, 272 bp, Homo sapiens
aaagtttacaaattagccaccagatgccaagcaggactttgccagaaagaggcaattgtttgttacagactgtcaatgatactcatcttacctaaggcatctccgcacacatggctgcccaatctscaaaccttagactcaacctcctcttatcccattcccgcactccccatagccaccctggggattccaggttttgacaattccactgcagtggctaattttatgcaccaacttgactgggtcgtggggttctcagatatttcgtcaaa

SEQ ID NO: 571530 - DNA, 413 bp, Homo sapiens
gaattcttatttttttaacttttattttaagttcagtcatatatgtttgttatataggtatataggagtttgttatatgggtaaacttgtgtcataggggtttgttgtacagattatttaatcacttaggtattagtctagtacctattggttctttttcctgatcctctccctcatctcaccctccaccctttgacaggccccagtgtgtgttgttcccctctatgtgcccatgtgttctcatcatttagctcccacttataattgagaacatgcastatttggttttctgttcttgggttagtttgctaaggataatgacctctagctccatccatgtgcctgcaaaggacatcatcttgttcttatttatggctgcatagtattccatggtatatatgtatcacattttc

SEQ ID NO: 571531 - DNA, 413 bp, Homo sapiens
gaattcttatttttttaacttttattttaagttcagtcatatatgtttgttatataggtatataggagtttgttatatgggtaaacttgtgtcataggggtttgttgtacagattatttaatcacttaggtattagtctagtacctattggttctttttcctgatcctctccctcatctcaccctccaccctttgacaggccccagtgtgtgttgttcccctctatgtgcccatgtgttctcatcatttagctcccacttataattgagaacatgcagtatttggttttctgttcttgggttagtttgctaaggataatgacctctakctccatccatgtgcctgcaaaggacatcatcttgttcttatttatggctgcatagtattccatggtatatatgtatcacattttc

SEQ ID NO: 571532 - DNA, 560 bp, Homo sapiens
gagggcatcctatccatttcatttcatgattccattatgtcatttcacttagatgaaatgataagatgacttgagatgagatgaaatgatgagatgaaatgacaaaatgataagatgagatgatgagatgaaattttgagatgaaatggtgagtagaaatgatgagatgaaatgatgagacraaatgacaaagttgaaaagaaattgaaaggagatgagatgaaatgagatgaaatgatgagatgatgaaatgatgagatgaaacgagatgaaatgatgagatgaaatgaaatgaaataatgaaatgatatgaaataatgaaattgaaatgagatgagatgagatgaaataatgagataaaatgagatgaaatgagatgaacgatgagatgacatgatgagatgaaatgagatgaaaaatgatgagatgaaaaatgagatgaaataatgaaatgaaataatgaaatgagatgaaatgaaatgaaataatgaaagcaaattatgaaatgtaatgaaattgaaatgaaattgaaatgagatgagttgaaatgatgagatgta

SEQ ID NO: 571533 - DNA, 560 bp, Homo sapiens
gagggcatcctatccatttcatttcatgattccattatgtcatttcacttagatgaaatgataagatgacttgagatgagatgaaatgatgagatgaaatgacaaaatgataagatgagatgatgagatgaaattttgagatgaaatggtgagtagaaatgatgagatgaaatgatgagacaaaatgacaaagttgaaaagaaattgaaaggagatgagatgaaatgagatgaaatgatgagatgatgaaatgatgagatgaaacgagatgaaatgatgagatgaaatgaaatgaaataatgaaatgatatgaaataatgaaattgaaatgagatgagatgagatgaaataatgagataaaatgagatgaaatgagatgaacgatgagatgacatgatgagatgaaatgagatgaaaaatgatgagatgaaaaatgagatgaaataatgaaatgaaataatgaaatgagatgaaatgaaatgaaataatgaaagsaaattatgaaatgtaatgaaattgaaatgaaattgaaatgagatgagttgaaatgatgagatgta

SEQ ID NO: 571534 - DNA, 594 bp, Homo sapiens
ctgcattacctgataacgcagtgaaatcagacgtgatgctgcctgctgaggagacctggaggcttcccatgaatgggctttcagaagagaggtctctgggtgcatttggtgacaccccaggcagtgggggagacgtccaggctggaaggccagccacagccagctctgcccaaggatgccacrtccatttgcttcagtaggatatgtaccctggaaacccagcttcctgcctctccaggaaaccccactgaggtcagcacatccccccaggtttagaaggggtctctgggtgcatctggtgacaccccaggcggggggggggagacatccaggctggaaggccagccacagccagctctgcccacggatgccacgtccatttgcttcagtaggatctgcaccctgtaaaccctggttcctgcctctccaggacaccccactgaggtcagcaccccccaccccccacccccaggtttgtgcagcttcactatctggggagagacacagaaagaccacattcggtggaattctggctataaccttttgtggccggcaagaaggatcaccaagctgtcctgttaccttgctggagcg

SEQ ID NO: 571535 - DNA, 545 bp, Homo sapiens
cttctgcctgcttatgggaaagtcccctcctctcctccattttcttctcttcctgccctatcacaccgtgcacttctccctttccttaaagaaccaccatcaactttaggaggagggaaaggggtggctctggcaggaaaagccagaatcccctctagccagcagagagagaggaatggctgcctgttttctcccccaatccaaggcactaggttttggctaggttgcaggttccaagctgctctcctgctgtgtcggtgagttctggtcaacctgcaacctcctgatgtggccactgcagttcatcgagtcttcagggactccccatgrcctggagtactttgccttgcttacacgggagaggagaatggatttatagggaacatcatctaaatccaacttgaccattgtgtggccacacttgctagattgctatagtctaaatctagcattgtagaaagacgggggagcttggagctgcacaaacccaggtctggaactggctccctaccttgaaaggtgaatgatcctggcaggactcagcc

SEQ ID NO: 571536 - DNA, 479 bp, Homo sapiens
cggcacccaggtcagggctccaggggaggccaggtgggcgaaggccaagaaggggctggggctggtcaggaagggctcctggtgaccagagcactttgcgtgagccagcgtgggaggaaggtgggctggatgagccagggaggcgccgggaggggccttggcagaggcgaccccctccgtcacccccaggccactgaaccctgggtagcgagaaccgacaggggaggctgcagacagaggagtggaggctccccggctttkggggctctgagtagaagcatctagggggtccctcaagaggcccccagacgcttccccatggtgagaaaagaaggcgcagagaggggcacggcgccggcgcagaggggcacacagcgagatttgctgtgagttcttttattgccccaagtgtacctcatcttggtagatttctattggctttaaaaatgtgtgtgttttgctgttggggagtggggtat

SEQ ID NO: 571537 - DNA, 479 bp, Homo sapiens
cggcacccaggtcagggctccaggggaggccaggtgggcgaaggccaagaaggggctggggctggtcaggaagggctcctggtgaccagagcactttgcgtgagccagcgtgggaggaaggtgggctggatgagccagggaggcgccgggaggggccttggcagaggcgaccccctccgtcacccccaggccactgaaccctgggtagcgagaaccgacaggggaggctgcagacagaggagtggaggctccccggcttttggggctctgagtagaagcatctagggggtccctcaagaggcccccaracgcttccccatggtgagaaaagaaggcgcagagaggggcacggcgccggcgcagaggggcacacagcgagatttgctgtgagttcttttattgccccaagtgtacctcatcttggtagatttctattggctttaaaaatgtgtgtgttttgctgttggggagtggggtat

SEQ ID NO: 571538 - DNA, 530 bp, Homo sapiens
gggcagtcgggacagtgagataaagaggaagaggcagaggggatggtatttaggaggtaaattctacaggatttggtgactgatgattgatgaattttgagtgaatctttgataagacaccccgccatgaaaaacaattttgtctccttagtgcttctagagacctgccatcatttctgtgatggcaaaattatctacctagttatttgtcagtcttcttcctctctccaaatgcctttggagttgtatctccagtaatttagtggatactaaatacatgttgctatgtgaatattacatgaaatgttttaacagctcaaaatatggaagataaacttttttttttttttcctgagatagggtcttgatctgtcgcccaggctgtagtgcagtggygcaatctcagctcacagctcactgcaatttccacctcccggggtcaagcgattctcctgcctcagcctcctgagtagctgggactataggcatgtgccaccatgcctggctaatttttatatttttagtagaga

SEQ ID NO: 571539 - DNA, 358 bp, Homo sapiens
tgcctataatcccagctacttgggaggctgaggcaggagaatggcgtgaacccaggagatggaggttgcagtgagccgagatcgcgccactgcactccagcctggcgacagagagagactttgtctcaaaaaaawaaaaaaaagttgtaatggtcaggcatggtggctcaagcctgcaatctcagcaccttgggaggctgaggcgggggggttgcttgaagccaggagtttgagaccatcctgtgcaataaagtgagaccccatttctaccaaaaaaaaaaaaaaagttttaggatgccttggtgttgaggctcttggttgcactgaatttgtttaattttattgaagagcaaaagtc

SEQ ID NO: 571540 - DNA, 468 bp, Homo sapiens
cctgccttttaggttttcctggaggcttccttatataaacatgagtgattctatcattggccattgatgatcagctcaacctttaactctttgccccctccactcctcagaggttggcggtgggactgaaagtcaccaaccctctcatcatgccttggtcttgcagtgaccaacctcatcctgaagctatgtaagagctccctaccaccagttacctcattagcatacaaaagacacccttatctttctggagattccaagggttttagaagctattcatcaagaaatggaagaagatcaaatatatatttcacaatattgcagccccaaatgatgatgcagtgaccagctgttaaygttatttgccctctaaaaattactggacatgctagaaatggtatcagtatcaatatcatttttacagtgtgacaaataataatttataaatttaaaaaatagtagtttggg

SEQ ID NO: 571541 - DNA, 502 bp, Homo sapiens
gctataattcactgtagggggcatcaaagcaacttaacccctatagcacaagggaacagcaaggccaacagagaagacaaagctgcagccttcagagtgcaatcccaacagatcctagcagtgctccctttctatggttccccaatagaacctgagtacaggaagaacagctaataaaggaaccaaggggataaaaccaaggatcctggtggtatatggagtcgaaaatacatctccctcagacagtccagtggaaagttagaaaagccctgcatgtctctttccatgtggggagggatgcaactctggccatgtaaataagctccttaycaggtctaacctagcttcagtggctaagcaggtctgccaagcctgctcactatgtgcacttaacccaggaaacaaaatacctcctctaatacaaccagtgcagaggagaggaacttatctaggggaagactggcaattagactttacacatatgccagcttacagaggacat

SEQ ID NO: 571542 - DNA, 552 bp, Homo sapiens
ctttctgaatctatctatgtatgatgctgacaatggatactttatctcaggtcttatgtacctgtataatattaagaaagtgattttaaaatttatcctcagtgtatggttgaaaataaatgtaaccactcattatatcgctttttaagtgatctttaaaacttttgtttacaaaaatctctcactaaattgtgtaaaatatattatttcccctttttaaaaacaattctgcccactgatcagtattacatgttacaaattaacattaactaaggtgatattgggataatgtgttgtggcagagagtataatgctcaacaaatacatttcttttcctacacttcccagcccccttgcatttttttttwcttcgagacaaggtctcactctgttgcccaggctggagtgcagtggcatgatcacagctcactgtgacctcgacctccctgggctcaggtgatcctcctgcctcaacctcccaagtagttgggactataggcacgcaccaccatgcctggctaatttgtgtctttttgtagagacagggtttca

SEQ ID NO: 571543 - DNA, 589 bp, Homo sapiens
gtgtgctcttcaatcctaagaatgctgcttagctaatttatagacttcttggcaawgtattttgaaaatattatggaagagagagcagtttgagatatttttatatagaatagttcttggcaggtaggctctggtaaatccaattccattgattgcgaagacactggcaattgactatgaagatgttgagattaaaaaaaagagataaggaagtatagaacagtggttagagcacagataacaaataaatccaagctggtttgagtacttgtactgttatttgctgtgtgatctaggccaatttatttaattttgctgagcctcagtcttctcatctgaaaaatggagacaatagtcagaatattgttgttgtgaagattcaatgagatatactacacataaagcacttatcctgagccctttaataaatgttatctaagaataattatgaaaggaaaaatcttcaagtccacattaattggtatttttggatggaattaaaataataaaacataaagggcttcaatagtgtctcatgtaatttcactgacactgcacaatccaaattttcttggaacctgttacatgc

SEQ ID NO: 571544 - DNA, 631 bp, Homo sapiens
aactttcaaaattacctaacagtctgccgagtaatctattaatgagaaaattgggaatggagatattagaaactttgcctgaagttcttttagaactttcctgaccttttttactttaagaatccatgagaagaaagtttgagtcagggattattttgtagatgctcctattttgtagatgagggactagagatacgaagtagtatgtaatggtgaagcctaactggtgcactagtctggtccagttacatatctgccctgtcctgagagccagctggctctgccttctgcttctcagcctcttgcaygactttctcacggcggcagaggctagttatgcttctcaaaggcatggtttctccactctacctgcccactgtgcaagaaagggatgcttagcatgccagatcttagtgccttcaggtcagcagctctttttgctttccctatagctacatgaagaaacttgtctaataaatctatcagttaaggagttctactttaggttaccctgtagtttccctcctccattgtattcttcagatttctttctttgccatttaagccttatcttgagaaaacttcgaatcaggggcgtatgcaagatttggaaatcatcattctcagtaaa

SEQ ID NO: 571545 - DNA, 623 bp, Homo sapiens
tagaagttgttactattgcacacttcgggagctgaaaattgttcattcctatctgaatcctggattactaggatccaccaaagccaaatatacctgaaacattatcatggagacaattctataagatgctcttcaaaaatatatccttcaaatagtctaccacttttaatataaaatkttatgctcaaaacatgtacaatgagttggaatgtagaagaattgttctgaaatatggacactgatctaagacccaactaccttgaggcagcccagaaccacaggaggatctagttagccactgggacaaaactccaaatgttgtacatattagtgaaataatacaccttctacagatgtttttccaactagaaaactaagagcacacactgtcacttaagtcatactcccacgaggtagaggaggcttgccaaacctaattaatctacggttcaaaaagaaatgtgtgcacacccagcctaaataacagctaaacaagataacagagctgacagcaatacttggacaagattaagagccactcagaagaaataccaagacctaaagtctacagaagagggctagtgtagcagaattagctaagaatgagttctaatgggggaagt

SEQ ID NO: 571546 - DNA, 600 bp, Homo sapiens
cagtattattctgtatcaaagaaagataaatacaacacaagggaaaaaacggagcaatatattctatgaatatagatgccaaaattctcaagaaaatactagtaaaccaaatgtagaaaccttttaaaataattacatattatgatcatatgtgatttattccaggaatgcaaaagttattttctgtataaaagtcaatgtagtacactgtattaacagawttaaagaaaataactattatctcaatagacgcaaaaaaggaatttaacaggatctgtattatttcatgttaaaaactccacaagtcaagaataaaaaataaattgttcacctggataaagacactgaataacccacagataaaataccatactttattgtgcaatgctgaaagcttttccccaaataactgaagcaagaaaaggatgtctgcttttaccatttccattcattgttgtattgaaagttttagtcaggtcaaaaaggttgaaaaagaaaataaaacgtattcaaattgtatagaaagaaagtcaaaaatggactccttccttacaccttatacaaatattaaatcaagatggattaaagacttaaatgtaa

SEQ ID NO: 571547 - DNA, 600 bp, Homo sapiens
cagtattattctgtatcaaagaaagataaatacaacacaagggaaaaaacggagcaatatattctatgaatatagatgccaaaattctcaagaaaatactagtaaaccaaatgtagaaaccttttaaaataattacatattatgatcatatgtgatttattccaggaatgcaaaagttattttctgtataaaagtcaatgtagtacactgtattaacagatttaaagaaaataactattatctcaatagacgcaaaaaaggaatttaacaggatctgtattatttcatgttaaaaactccacaagtcaagaataaaaaataaattgttcacctggataaagacactgaataacccacagataaaataccatactttattgtgcaatgctgaaagcttttccccaaataactgaagcaagaaaaggatgtctgcttttaccatttccattcattgttgtattkaaagttttagtcaggtcaaaaaggttgaaaaagaaaataaaacgtattcaaattgtatagaaagaaagtcaaaaatggactccttccttacaccttatacaaatattaaatcaagatggattaaagacttaaatgtaa

SEQ ID NO: 571548 - DNA, 600 bp, Homo sapiens
cagtattattctgtatcaaagaaagataaatacaacacaagggaaaaaacggagcaatatattctatgaatatagatgccaaaattctcaagaaaatactagtaaaccaaatgtagaaaccttttaaaataattacatattatgatcatatgtgatttattccaggaatgcaaaagttattttctgtataaaagtcaatgtagtacactgtattaacagatttaaagaaaataactattatctcaatagacgcaaaaaaggaatttaacaggatctgtattatttcatgttaaaaactccacaagtcaagaataaaaaataaattgttcacctggataaagacactgaataacccacagataaaataccatactttattgtgcaatgctgaaagcttttccccaaataactgaagcaagaaaaggatgtctgcttttaccatttccattcattgttgtattgaaagttttagtcaggtcaaaaaggttgaaaaagaaaataaaacrtattcaaattgtatagaaagaaagtcaaaaatggactccttccttacaccttatacaaatattaaatcaagatggattaaagacttaaatgtaa

SEQ ID NO: 571549 - DNA, 611 bp, Homo sapiens
cctcttgtattcccaagtgtccattgttcccatctttatgtccatgtgtacttaatgtttaactcttgcttataattgagaacatgtattatttctkttcctgcattaatttgcttaaaataatggccttctgctgcatctgtgttgctacaaacaacatgactttgttatttttttaatcactgcatagtattacatggtatacacgtactaaattttattgatctagtccaccattgatgagcaccttcattgattctatttttttgttgctgttatgaataatgccacgatgaacatacaagtgcatgtgtctttttggcagagctatttattctcctttcaatatatacccaataatgggattgctgagttgaatggtagttcagctcagtcctttgagaaatttccaaacttctttccacagtggttaaattaatttacgtttccatcaatagtgtatgtgttccctttctctccagcctcaccaacatctgttaatttttgactttttaagaaaagtcattgtgacagttgtgtatctcattgtggttttgatttacatttctttgatgattaatgatgataaacattttttcttatatttgttg

SEQ ID NO: 571550 - DNA, 311 bp, Homo sapiens
gaagctagaaaatttgtttaaactctacttataattataattaagaataaaatgctatagctgttttcctctctaagtcaatatttatttgggacaattttgttaytgagttcacagcatgccgaaatggtgtttcagagacttcatctggccaagaaaatttatattttgttttggaggctgatttttttttaatcaaatacattagttactccaatttggttttctctcagctttttttctaggtttactattagccatatttatatacaagttctttgttttattttaggatatttgttatttctaga

SEQ ID NO: 571551 - DNA, 486 bp, Homo sapiens
ttacacctggctcaccggcggtcagagtttaaagttatctctcttgttccctgaacaattcctgttatcctgttcttttttcaaggtgcccagatttcatattgctcaaacacacatgctgtacaatttgtgcagttaatgcaattattatagagtcctgaggcgacaaacatcctcctcagctgataggattaagagattaaagtaaagacaggcataggaaatcacaagggtattgattggggaagtgataagtgtccatgaaatcttcacaatttatgtttagagattgcagtaaagacaggcataagaaattacaaaagtattaatttggggaactaataaatgtccatgaaatcttcacaatctacgttcttctgccatggcttcagctggtccctccgtttggggtccctgacttccygcaacagtcgggctttggtatcaggatgatgttggcctcataaaatgagttagggagaattc

SEQ ID NO: 571552 - DNA, 584 bp, Homo sapiens
gtataaattatgtatccttccaagctttaactatagtatgaacagcagtagtttgtattaaatgtaatacaaaacacacatttagtgtagaaatatataatttagtgtagaaattatctagttgacagcggaaaatgtaagataaarttcaaaacttatcattttaactttaagatatgtaaggtagagaacacagcaagactcttttcaggccctaaattgtttaattctaggaaaaatatgtagataaagcaatttaatgctgttattttaaataaatcagtgatggtgtgatttattttgttttccactttattaattcttaaaaaaaacaaataaataccgtaacagagaatgctgtaatatattaaaatgagaaaattattttaaaaatgaatcatttttcttcttatcctccaatttccgtttctactactcaaccaagtaatccctgtttattccttaatatatatctttgaaaccatttttctctgctcaagcaaacacacacacacacacacacacacacacacgcctacatattatataaaaatagaaacactctatacatattacacttttct

SEQ ID NO: 571553 - DNA, 553 bp, Homo sapiens
aaatattagctcacttgatttcacaacagctttgggagaaagattgggtgggtgtcgttatgctcattttctgtgaattggatgaagactaataaaatggacatggtcttggagtcataggaaaacttgggttcttagtctgttctgctcttaatagctgtgtgatgttgggaaattacttgacctctctgagcctcagtttgtttccgcagaaaagtagggatattaccatcaaacagttatttttaggaataaacgagattatctatgcatgtctctagctcaatgttactaatcaggatcctgcacttaataaaagacaaaaatgagataagaggtcatgttggctgactttgggccagttgccctttgcattaagtcagatttaaggcagtaatttgctagtcattgtatcatgagccatggcccaaacacttgacagactttgaagatttgttattactttgccttatggaagcctaaaaagtcatgatcataaaacaattaacatttctgctgayctggaaaaaatgtcactcgaattgagatggat

SEQ ID NO: 571554 - DNA, 628 bp, Homo sapiens
cctttagtgtttaactcattgtactctgggtggctaacggcattgttcaaaatcaaaagaactttaaaaaacagttccttacatgtatggtacttcctgacttcagtgacaaagcattaatggaaccaattcagaacaagtgttctcattgtccaggctttcctgttgcacaaccgaaagactggcagctagtgttgatcttttcccttttagcctagtagcttagcagctgtataggtaagggagcttagcagctgtataggtaaggggagtcccgatcataaacacaactgcatttgcacaaacagtagcattagcttatccctttctgcctgaaatcctagtgcttgcttctattccttactaataagtgtcctttgtggcatttttttccagaatagggcacttatctgaattaaaaacctattcagkggctaatatccagaatctacaaagaacttaaacaaatttacaagaaaaaatcaaacaaccccatcaaaaagtggacgaaggatatgaacagacacttctcaaaagaagacatttatgcagccaacagacacatgaaaaaatgctcatcatcactggccatcagagaaatgcaaatcaaaaccataatgagatacca

SEQ ID NO: 571555 - DNA, 571 bp, Homo sapiens
gtatttttagtagagatggggtttcaccatgttggccaggctggtctcgaactcctgacctcaagcaatccacccgccttggcctcccaaagtgctgggattacaggtgtgagccatcacatccaacctaaactcaatttcttaaaaaaaaaaacaaacaaaacaaaacaaaaaaaacactaaaaatgtgtagtatctgtgagaccatgacagtaacaggacacaattcccattatcaatgacaatctttatctagttaggtaaattagtttccagacataagaaatgcaaagcagaactggcaaattctagaacctaaagtacaaacactttaacaaatttgtttatgtgaggagtaatgctgttaatgtttttagtgtccttctgatgcagaccagtttattttcatacatgaaggtctctggggctgatgagaataaatttattttaagcatttaatttagaccctaaattaattttctgtacagtagacttcttttaatccatgcatgcatgtgcagagtcggccatctggtccgaggsttaagtgaagggaaggagctttcaatgt

SEQ ID NO: 571556 - DNA, 596 bp, Homo sapiens
tcttggctcactgcaacctctgtctcctgggttcaaacaattctcctgcctcagcctcccaaagtagctgggactgcaggcatgcaccaccatgcccagttaatttttatattttcagtagaagtggggtttcgccatgttggccaggctggtctggaactcctggactcaagtgatcctcctgccttggccttcaaagtgctgagattagaggcatgagccactgcaccyggctcacaagtctttttgcgctactagaactggtcttaaaccagatgaacaagatgatacttttatgatctttccccttcacactgccatttcattcactcatttattcatatacccattcattcatgcatttaggccagacactgggtgagatgttgaatatactctcaaagacgcataggccagtggaagaaatggacagttaatctaatgattacagcacagtgaagcaagggctttgaagggtgtattgtgtggaggttacttgatggcagagaaggggtgtgcaacaggctgagaatttttggtaaggctcccaggggaggtgagatttgaagaacgaatagtctctggctcagaaatcc

SEQ ID NO: 571557 - DNA, 587 bp, Homo sapiens
aagggtgcccagccttagctcttgtccctctcgatgctgtcagagaactatctcctctgtactgagacctggtgggagagccatacctgtctgggacaatgatgctggctctctagcctccatctcacagcagatcccaaggggacccrgtcccagctctgatttttcctgctgcaatgaaagaatgatctcaactatccagggacttgctggaagatgcacatccctttaagtcaatgagaccaggctctttagcctgtatcccacagcagatccctagacggtctaacagacatctagagaatattttacccaactgctgcagaatatacatttttctcatcagcacatggaacattctccaagatacaccatatcataggccacaaaacaagtgtcgccaaattcaagagtcaaaattatatcatgtatcttctctgaccacaatagaatgaactagaagtcaacagaaagtagaaatttagaaactatacaaatacatggaaattaaaatgctcctgaatgaccaatgaagaaagtaaagaaggaaattctaaaaagtattaaaacaaatgaaatggaaatac

SEQ ID NO: 571558 - DNA, 529 bp, Homo sapiens
aagaaacaataaagatcagagcagaaatgaataaaattgaggctaaatacagaagatcaataaaatgaaaaggttgttttttgaaaagataaaaaaatgacaaatctttagctgggctaaaaaaagggaagattcaaataaaatcagagacaaaaaggaacacattacaactgatatcacataaattattagagactactaargatttttgagactgctatgaacaactattcactaataagctgggaaagctagaagaaattggtaaattcattgacacatacaacctacaaagactaaaccataaagaaatagaaaacctgaacagacccataatgagtaacaagatcaaagcactcaaagtctctcatcgaagaaaagcccaggacctgatggattcactgttgaattgtaccaaatatctaaaaaataacatcaactctactgaaactatttcaaataattgaagaggaggtaattgaagagggggggatgcttccagagtcattctatgaggccagcactatcc

SEQ ID NO: 571559 - DNA, 395 bp, Homo sapiens
tcaaaaaattacaaatagaactattatatgattcaacaattccacttctgagtgttcatccaaaagaattgacatcaggatccagaagaaatatttttactactatgtttattayagcattatgaagccgagatgtgaaaacaaccccaaatgtccatcaacagataaatggatacagaaaatgtggtatacacagataatggctattactcagccctaaaaagaaaatcctgccacatttgacaacatggatgaaacttgaggacattacgctaagcgaaataagccagttgcagaaggacaaatgctgcatgattccacttctatgaattatcagaaatattcacattcacagaagcagagagtagaatggtggttgccaggctaggggtagg

SEQ ID NO: 571560 - DNA, 665 bp, Homo sapiens
cacccaaagtgaagtttccatatatcaaagatgaaaatagtaattaccctgacccccagtagggccattgtgatgattaaatttaaacatatatgtaaaacacaggtgcacagtaaatagcaggattccttttggtaagagcagcagaacataaagatttactagtaaacagatgccatatcaaggacagatttcatatccattcatgtttctgatagttaatcaaattctaccaagatacaaattatgtcttggttacacaaatgtaaccaagaagctttgaaataaggatcatcagtttttcaaccaattttctcagaattatacaatataaaagaaaaaattagcctgtcttaattcttccattctcactctatctaaatttggaaactacgttaattctgtttacattgactgcttcactaatgagtttagcaactgatatacaacgttggctgtaartagttcatctgattcatttactaggtttattagttgaatttatcatgtgtttgtttactggttttatttgttcaatacttattatgtatctgaaaaggacacagagatatgagtgaaccaggctgtaagtcccataaggtcagaaaaaaaatctcataaagtccatggaatgtgaacaactataattgagccatgtaggaagc

SEQ ID NO: 571561 - DNA, 509 bp, Homo sapiens
ctgaggtcaggagttcgagaccagcctggccaacatggcgaaaccctgtctctactaaaaatacaaaaattagccaggcatggtggcacatgcctgtaatcccagctacttgggaggctgagttggacctgggaggcagaggttgcagtgagccgagattgcatcactgccstccagcctgggtgacagagagactctgcctcttcagggccccctcaggagctgcagagatgtgaatgaggtgaaggccatgctggtgggttctgcaccccctgcccacttcaagaagcagccccttttgtgtctttgcaatctgaaaaatctctcatgtggatgaagccttgtgggactaaaacaaccttaaacacactttttaaagacaatgtctcaagtttctgtaccattgtcgtagcttgttattttccatcagtggcctaaggccccaccttgctcagctacccctcctagtgtgttccaccgtctctagataaaacagagagaaccacacc

SEQ ID NO: 571562 - DNA, 509 bp, Homo sapiens
ctgaggtcaggagttcgagaccagcctggccaacatggcgaaaccctgtctctactaaaaatacaaaaattagccaggcatggtggcacatgcctgtaatcccagctacttgggaggctgagttggacctgggaggcagaggttgcagtgagccgagattgcatcactgccctccagcctgggtgacagagagactctgcctcttcagggccccctcaggagctgcagagatgtgaatgaggtgaaggccatgctggtgggttctgcaccccctgcccacttcaagaagcagccccttttgtgtctttgcaatctgaaaaatctctcatgtggatgaagccttgtgggactaaaacaaccttaaacacactttttaaagacaatgtctsaagtttctgtaccattgtcgtagcttgttattttccatcagtggcctaaggccccaccttgctcagctacccctcctagtgtgttccaccgtctctagataaaacagagagaaccacacc

SEQ ID NO: 571563 - DNA, 573 bp, Homo sapiens
taatatgagtacttactttttccttccctattgggagcactgaacccagggaaagagagcctgaaacataagtgctctgtcatttctgcctccaagaaagggggaaagggaataggttttcggttactaatgatctcagctctagttttaatggagcatgaaggtmtactctaaagaaaagataaaaggttttcagagacaaaataaagaagactttgggggagggtattagtgtgagcggaaggaagggagaatcctgggaagacagggaaataaggccaagcaaaggtgttgtcagacctgtgatggttaattttaggtgtcaacttgactgcatagaggcatgcttagatggctggtgaagtattgtttctttgtgtgtctgtgagggtgtttttagaggagactggtgtgtgagtcagtgaactgagtgaggaagatccaccttcaatgtgggtgaacaccattcaatgagctgggggccccaatagaacaaaaaggcagaaaagcaaattccctctctttctctttctctgtctatagctctctcttctttcttctggagtgagatgc

SEQ ID NO: 571564 - DNA, 573 bp, Homo sapiens
taatatgagtacttactttttccttccctattgggagcactgaacccagggaaagagagcctgaaacataagtgctctgtcatttctgcctccaagaaagggggaaagggaataggttttcggttactaatgatctcagctctagttttaatggagcatgaaggtctactctaaagaaaagataaaaggttttcagagacaaaataaagaagactttgggggagggtattagtgtgagcggaaggaagggagaatcctgggaagacagggaaataaggccaagcaaaggtgttgtcagacctgtgatggttaattttaggtgtcaacttgactgcatagaggcatgcttagatggctggtgaagtattgtttctttgtgtgtctgtgagggtgtttttagaggagactggtgtgtgagtcagtgaactgagtgaggaagatccaccttcaatgtgggtgaacwccattcaatgagctgggggccccaatagaacaaaaaggcagaaaagcaaattccctctctttctctttctctgtctatagctctctcttctttcttctggagtgagatgc

SEQ ID NO: 571565 - DNA, 497 bp, Homo sapiens
gtgccacagacttgacggcttaaacagcagaaatgtattgtctcacagttctagargctggatgtctgagattgacgtgtctgtagggttgactccttttgagagctgtgatggagaaaatgttccatgcctctggcgtaacttgtgatgttttgcatctctgggaaacagttattttatataatagtaatatgtaatatcccttctttaagctatcagattataattagattcgtgtattgacatgagtgaataatccagtagtaaggtttatcatattcactgtataaactttatttaaatttatgactattctcttcattcattgtatgctatttcacatagtaatattctaagatagctataagattattcaatcataataaagatttattttgaatcttacatttgtgaaaaacatactgagtagtttttaatcatgaaaaaaatgcataaattctattaaataataatactgtgatttggtacagaatgag

SEQ ID NO: 571566 - DNA, 573 bp, Homo sapiens
tcatagtttgaggtcttagctttaagtctttaatccattttgattttatttttgtatatggcaagcgatagggagctagttttattctcttctcttccttctttcctttcttcctgacttcctttcaggagatgcaattttctctgatggcatattttaatttcttgctttttatcttttgtatgttggttgtattttttttttkatttaaggttactgtgaacaatgaaaataacatcttatattattttaaactgacaagaactgaatacttattacataaacaaatagccaaactaacaaataagcacagagtaagctaataaaaaatctacactttaacttcatccccctgccctttttgttgtttctatttatatattataatgctgtctatgtcttgaaaagttgtaattatttttctcaagttcattgttcaattcaagatctgagtagtttacacacaattacagtgttatataattctgtatttttgtgtacattctaatactcaaagttttgtaccaccagattttttcttattgcccattaacatccttttctttcagattg

SEQ ID NO: 571567 - DNA, 567 bp, Homo sapiens
tttaggttaacaatgcatttcaaaacttcataaattataatacatactgtgatgaaccactgaaacatcagaagawaaaaaatcacacttaaacattttaatccccaaactacagtattacaaactcgagtatatccattaatcaaacattttgatatttttataattcagttttaacataaaggtgatcagtcattttcagatctaataacatatattaaaaggtagaaagcatatttaaaacaaaacataatttttatacttaagtggttaataccttattagtatttatttttaagaataaatgcataaacagaagtgtttctcttaatgcagatatagataaaatcagcagtgagttatactagcttttctcttatggaaggagtttagctatgcaacactgcaatgaatgctttggaattaatattcatatatctattgaaagtttgcttctgttcttacagattaaagatgtcttgctatctgcagacttaaatcatgtcttttataaagtatgaaaataaacatggacatagagaaatgcagttatgcattgtgatggtt

SEQ ID NO: 571568 - DNA, 609 bp, Homo sapiens
gttgttgcccagtctggagtgcaatggtgcagtcttggctcaccacagcctccatcttctgggttcaagccattctcctgcctcagcctcctgagtagctgggattacaggtgtgtgccaccatgccccggttaatttttgtatttttagtagagacggggtttcaccatgttgtccaggctggtcttgaactcctgacctcagatgatccgtctgtcttggcctcccaaaatgctgggattacrggcatgagccactgtgtctggcctatttttaactattaatacatctttgtggggaagagtcacttctgttggggtctgaagcataaatagattgtccccttacataacacctggatggatccctgtaataccattaactcattctccaggaggtaatggttttaatttgccaaatgaagattttatttaaaatatgaatattgacaatcctaaggaaggaggaccttgaaatctggtttgaatgaaagtattagtgcttcaaataaaatattacagaactggggactttgtttagcatgggaattaatccattaaaaagttggttttaatggaggaagtgccaagctgaagccatgttgggtaa

SEQ ID NO: 571569 - DNA, 558 bp, Homo sapiens
gttcgaatgtgtgctctgacacctgactcgttaatgtccttggccaagtaactttacctgtctgtgcctcccatgccgatccgtacrtgggggatgatgacagtagtatctgccccacgaggggttgttgagaggatgaaagtgggagtaggagaccagaaatgatgatcacagagatgctggttatcttggtcaggccccactcaagggtagctgataattttatgtcttacactggagatgacagtgacccatacacgcagcacagcactgcatgaaaagctggtgagtcgatacagagagtcatactgaaggtctaaggagggctagggtagcctgtagcagaatgagcgtgaaggctctgctgaaagggcattgctccctggacctgtggcgggatcctcggtagaaagctgacattgaaagattttgaagagctttagttaaaaagttaaaaacagcccagcgcagtggctgacgcctgtgatcccagcactttgagaggctgaggcgagtggatcatgaggtcaggagattgagaccatcctggctaacaca

SEQ ID NO: 571570 - DNA, 585 bp, Homo sapiens
tgcagtgagccatgatcacactgctgcacttcagcctgggtgacagartgagatcctatctcaaaacaatgaaaaaaattgaatttaaattaaaaaacaaagatggcctttgaaacctgcaaatataatggattacattgcagaagaatcctgagtgtaaagagcccaagacttttatgatggacagtcagcatgaactttgctctagaggaagacactggctctatcttccattggttctcagcaaacctgcacttcgtggtagcaggaaccactatctctatcttccaagtattaacatcctagaaaagacagtttggaacagaggcagtcaatgtctctgtttaccagacatgtagaaatgcaagaactcaactgatccttgttcctcccaatatatctatccctagtttatacactgctttggattctggtgaattttcccatgaaaaacaccactgtcagtcactctgattaacctgcctgaaacagctaaacccagatatgttcattgtgtcttagtaaaatgtattaaggttattatcaacacaatgccaagcagcagaatgaggctaaccaagggta

SEQ ID NO: 571571 - DNA, 497 bp, Homo sapiens
acagcttcagaagatttaatattagacatttttatctccaaaatgaaaggaccacttatttgcacttctgtcttttatttttcyttctttatattccctcagggtcatattttacttcctcctgattcatattggtattgattccattggccttattcagaatattttgtttcattttataccatttattctatcttgtatagaaagtccgtgttctttctcttatgatagaaaatagaaaaaaaaattgcaaagatggtttgtcaccttcagtccactcatgaaaattagtctgaatttgtacatgtagagctgtgcattaggaagttcttttcagaggagaaaaatgaaaaaaaaattgcggacctgagccatgaaggcactgtgagaataattgtttaaaagatgattaaagtgagtcatactgctgagggcagaaatgcaagcatgaaataacgctggttagtggagaaaaaaggtgggcagggagcaagggt

SEQ ID NO: 571572 - DNA, 551 bp, Homo sapiens
catcatagcttaatgcagccttgaactcctgggctcaagtgattctccttcctcagcccctggagtcgttaggactataggcacatgccaccatgcccagctaattaaaaaaacttttttttgtaaagatatgggtctcactatgttgcccaggctgttcgagttgtctcaaactcctgacctcaagcaatcagtcctgccttggcctcccaaagggctgagacgagaggcataagcaaccccacccagctgcctgtccttccttactgtgttgtcaaggattcataggagccctcacagactctgccttaccaaacatgtaaaaagtaaacgtggctggaagaacacacaccaaaagatcaacagcgattactccggggaggtaagcaggatggggcaggaagtggatggtttttaatttacatacctttatagtgttggaatttttttttcttttctttttgagacagagttttgctcttgttgcccaggctggagygcaatggcttgatcttggctcaccacagcctccgcctcccagattcaagtga

SEQ ID NO: 571573 - DNA, 375 bp, Homo sapiens
cttattgctaaaaaatgctaatgatcatctgagccttcagcaagtcataatctttttgctagtagagggtckttcctccatgtggatagctgctggctgatcagggtggtggttgctaaagattgtggtggttgtggcaattttaaaaataagacaacagtgaaatttgccatattaattgactcgtcttttcatgaaagatttctctgtggcatgcaatgctatttgatagccttttttttttttttttggagacagagtctcagtctattggccaggctggagtgcagtggcacaatctcagctcattgcaacctccgtctcccgggctcaagcaattctcctgcctcagcctcctgagtagctgggattaca

SEQ ID NO: 571574 - DNA, 570 bp, Homo sapiens
aaaaaaattatttctctctccttttttttcaccatcagtgagtctgagcactttttcacatatctgagccgcatacgtaaggttcttcttgttgttattgttttgatgatccgttcatatcctttgccagtttttttttctattgggttattgaattttttcttactgatttgtagaaatcctttatattttagggaatttagtcctttgcctattatgtgagtttcaagtattttccccagtcttttgttggtcttttgagctggcttatatggcctttgccataaatatattttttaaatgtcattaaatttagcattccaggaatgggctattttagctttggtggtcagtgaaggctcctctgaaaaggtagcatttgagtgaaaacctaaatttcatgccacaggcaggagacaagtgctgtagtcaggaggctctggggcaagaatgtgctcggtgtctttggggaactgaaagaagccctgragaacacaatatacaatggcacaccaggaagcagcgagtcacaccaggcccaggtagggaggtttggaagccagggacaga

SEQ ID NO: 571575 - DNA, 554 bp, Homo sapiens
tatgtagagttaaaatgttccaagatcactgcattttccagaaggatggtaaagttatcaatgaactttaaactttgatgcatgctgtaatttctaggataacatctaaaaggaatagaaaaagaatgtagaaaatctaaactagttggggaaaaattgaatgattaaatactgaaaaatgaaagaagaaagaaaattcagcaaaacaggataagtacaaagcacaaaataagatgttagatctaaaaatcaaccaatgatcacacttaatctaactgaaacatacaaaaaagaggaggatgtctataagctgttacaggtagttttcaggatatattttaaagtgaaaaaacaagatgtaaaaaattttstgtcatcttttgtgtaagaaagaagaaatgggaatatatataagtttatttttgcaaaataaaacagaaaggataaatgaaataaaatttgctacctacgggggtagaatggagagaaaatggtatcagagttctagagtatacctttttgtacagttttgacttttgaaccacattaatgtt

SEQ ID NO: 571576 - DNA, 572 bp, Homo sapiens
ctggataggtagtttttcagtcctcgccctcctcccaccctccaccctcaagtaggccccggtgtctgttgttcttatttttgtgtccatgcgttctcaattttagctcccacttacaagtgagaataagcagtattttgttttctgttcctgcattaatttgcttagggtagtggcctccagctgcatccatgttgctgcgaaagacataatctcgtccttttttttttttttttctcacaatggagtattgctctgttgcccaggctggatgcaatggcacaatctcagctcactgmaacctccacctcccgggttcaaatgattctcctccctcagcctcccgagtatctgggattacaggcatgtgccaccatgcctggctaccttttttgtatttttagtagaggcggggtttcaccttattggccaggctggtctccaactcctgaccttgtgatccacccgcctcagcctcccaaagtgctgggattacaggtgtgggccactgcgcctggcctaatctcattctttcttatggctgcatagtattccttggtgtatatgcacca

SEQ ID NO: 571577 - DNA, 572 bp, Homo sapiens
ctggataggtagtttttcagtcctcgccctcctcccaccctccaccctcaagtaggccccggtgtctgttgttcttatttttgtgtccatgcgttctcaattttagctcccacttacaagtgagaataagcagtattttgttttctgttcctgcattaatttgcttagggtagtggcctccagctgcatccatgttgctgcgaaagacataatctcgtccttttttttttttttttctcacaatggagtattgctctgttgcccaggctggatgcaatggcacaatctcagctcactgcaacctccacctcccgggttcaaatgattctcctccctcagcctcccgagtatctgggattacaggcatgtgccaccatgcctggctaccttttttgtatttttagtagaggcggggtttcaccttattggccaggctggtctccaactcctgaccttgtgatccacccgcctcagcctcccaaagtgctgggattacaggtgtgggccactgygcctggcctaatctcattctttcttatggctgcatagtattccttggtgtatatgcacca

SEQ ID NO: 571578 - DNA, 534 bp, Homo sapiens
aatcccatctctactaacaatacaaaaattaactgggcgtggtggcatatgcctgtagttccagctacttgggaggctgaggcaggagaattgcttgaacccaggaggtggaggttgcagtgagccaagatcgtgccactgcactccagcctggcgacagagtaagattctatcaaaaaaaaaaaaaaaraaagaaagaaaaaaagaaaaaaaatcatggggagatgtctctgctacaagcgtttgcaataaaggattaattttcttaagtactgtattttgcaagaatttatattattatctttaaagcaaaattaagaatgcttctattcttaaggtattgggatatcaggccactcccaagtctgggtctgtttagtaaatgtcatcaatctgttttcttaaccgtaaacatctagaggccaggactacctaactttctgggaatgcagcccagcaagttccaacctcatttttcctcgccctcactcaagatgcagttgctctggtttgaatgcctctgacacaatgaca

SEQ ID NO: 571579 - DNA, 561 bp, Homo sapiens
tgtcgtcttgcttcgtggtgaacagaatatragttatccctcaccagataaggcacatgtcccaaatcccacccatctattttctccactgggagaggggaattgatggcatgctctacctgagaatgtaaggcagcaaaatgctcctggaaaggtcacaacactctcttttaacgggcacaccgtcaaggagataccacctcatttccttactgtttgaattctgaaagggttgcccatgcttctgtcataggaccaactgctttgtttgcctgctgtgcagtaacataccaacacaccaagactgcagggtttacagcagaagaggagtttaatgatggcagggtactgagcaagaaaatgagaggagaccatcaaataaatctccccaaggagttctgggctgatatttctaaggggattgtggatttttaaggggatggaaaattgaggtcattgattagttggggttaggaggatgaaagcatcgggtcttgaaaactacattctttgctgagtcagcttcccctgtggcccttcagaccagtggatgtcagtagt

SEQ ID NO: 571580 - DNA, 408 bp, Homo sapiens
accaaaaatagacaaatgtgactctattaaaccaagcttytgcacagcacaggaaacaaccaacacagcagagacaagctgttgaatgggagaaaatatttccaagctatttattcaacaaaggaagcatacccagaatatacacagaactcaaacaactcaacagtaaaaaagcaaaattttttaatcattaaaaatttgtcaaaggacacaaaatagacgttcctcaaaagaagacatgcaaatggctcacaggtatatgaaaaatgctcaacatccccaatcatcagaaaaatgcaaattaaaaccacaatgagatattatcttaccttagatggagtgattatcatcaaaaggacaaaaaaaaaaaaaacagctgctgatgaaggtgcagagaagggggaattc

SEQ ID NO: 571581 - DNA, 507 bp, Homo sapiens
ctcctcagcacatggatcattctcaatgatacatcatatgttaggttataaaacaagcattaaaacattccaaaatattgaaataatatcagccatcttctctgaccacaatggaataaaactagaaatcaacaataagaggaattttggaaaccatacaaatacatggaaattaaacaatatgctcctgaatgaccagtgggtcaaggaaaacattaataaggaaattgaaacatttcttgaaacaaatgagaatggaaacacaacataccaaaagctgtgggacaaagcaaagcagtacaaagaggcatatttatagctataagtgcctacatcaaaaaagaagaaaaacttcataaaaaactacctwatgatgcatcttaaagaactagaaaagcaagatcaaaccaaacccacaattagaaaaaaagaaataataaagatcagagtagaaataaatgaaattaaagtgaagaaaacaatacaaaagatcaatgaaacaaaaag

SEQ ID NO: 571582 - DNA, 548 bp, Homo sapiens
gttagggtgggagtgacccgattttccaggtgccatctgtcacccctttccttggctaggaaagggaattcccttaccccttgccccaggtgaggcaatgcctcgccytgcctcggatcacactcggtgcactgcacccactgtcctgcacccactttccaacactccccagtagatgaacccagtacctcagctggaaatgcagaaatccttcatcttctgcgttgctcacgctgggagctgtagactggagctgttcctatttggccatcttggaaccgccctccaagtctcaactttaatgttatcttcctaaataggtgcttcttgaaaaccctaactaagttgcaacggaatgaatgtttgggacccctgcaacattcatatgttgaaatattaatccccaataggatggtattatgaggtggatcccctgggaggtaattagatcatgagggcagagcccttatgaatggaattggtgctgtgataagaatggacatgagagtttgcttccgctctctgctctccaccacttgagagcaaag

SEQ ID NO: 571583 - DNA, 571 bp, Homo sapiens
ggacacggtggctcacgcctgtagtctcagcactttgggaggccgagacgggcagatcacgaggccaggagatcgagaccatcctggctaacacggtgaaaccccgtctctactcaaaatacaaaaaaattagctgggcgtggtggcaggcccctgtagttccagctacgggaggctgaggcaggagaacggcgtgcatctgggaggcggagcttgtagtgaacagagatcctgccactgcactccagcctgggtgacagmgtgagactctgtctcaaaaaagaaaagaaaagaaaagaaaacaaaacaaaacagaccaccatgactttttttttttttttaaggatagaaacattgaattaaattatgctggtttagaaattgaatccagtgcagctcattcataatagtgatggtgcattaaatgtagtataatttgtcttgcaggcttctcatgagaaggaactattttaaactgattgtagacctggcacctggcccactttctgggtgatctcccaagtgtgaactttccctacccttagcccctcctttccttcctggaggtggc

SEQ ID NO: 571584 - DNA, 570 bp, Homo sapiens
caatatctatctattgagatctatctatctatctatctatctatctatctatctatctatctacctacctacctacctacctgtctatgtattgtgccaggtaatgtgttcctttactccaggagcaaaaatcacatctggtacaatagctgcaattgtagtcaccagataattaaatttattataatccactgtcatttcttgagattcatccgtcttttgcacaagagaaatagacaagttaagtaggcatatggtgggaattactacttctgcatcttcaagtacttgatagtattactaatctctacaatccctccaggaatgcagtattactttgggtttattatctttgcatgcaaagccagttctggtggtttccacatattrcagcctttcctatcataatagccaatatgaggattatgaaaattgctaagtttatctactccaactatataattcaaaaactggaggaaaaaattacaaagagcatttgaggacactcagaacccaaggcaatagtccatcaatcacctgaccttaataagcccctatttcaggtgttag

SEQ ID NO: 571585 - DNA, 644 bp, Homo sapiens
tttttaaatgttttattttccctgtatgtgcatgaagrcagacatacagaaaaacaaacaaacaaaaaaaactacttatgacttacacagaccatctataacatgtttgggccttcagttttgtcctgaattttctcttcattttactttaggataagaatttaccaagatcctttctcctacaaaattatcctcctttctttataaccttccttaccaaaaatacattatcatgtatcgataactttcttcatctctctcccctacttactggttcctagcttgtttcacaaataacctttcaaagtccattgtttaaattaacctttagtaacttctcaacgagacaaagttattctttcaataaggacacattttttttggcacatcttatttacaggattatgtgtaaactagaattctttgtctcaataaccttaaatttcagtgaagacctgggaagtgagaaatcctgaactgtcaatctggtattagcattttatagatgagaatattgcacaatttttaaaaaaggtttccccatgtcacaatcctttcttaattggaaatgacctaaacattcactaagcatccaaaaataactatgattttaaattataaaagttcacctacaaacatttgcc

SEQ ID NO: 571586 - DNA, 489 bp, Homo sapiens
aaggatattgcacttggtactcaaattaaagaccgaaaaaggattttttaaaaatttagcagagttcatatctataatgttggtaatgatgcaaaatttaccacaatacatttagataatctgttactagattaagacctcagtatttctcatgactctatatttttattygttcagaataattttcaaaagctcttcctagaggatctttgagtactttgcataaattaggtttatgtaaaagtgaaatagaagattaccaaataaattaaaaacaacaaagggtagcatagaagaccaatttttatctacttggccattactattcttacacagttttgttgaacgctccttttaataattattcatgtaaggtatgccactggatttacagaacaacttttttgctatctttcttaaagcttttgaacaattagataaaacagtaattactctttgatatggtttggatctgtgtctccacccaaa

SEQ ID NO: 571587 - DNA, 489 bp, Homo sapiens
aaggatattgcacttggtactcaaattaaagaccgaaaaaggattttttaaaaatttagcagagttcatatctataatgttggtaatgatgcaaaatttaccacaatacatttagataatctgttactagattaagacctcagtatttctcatgactctatatttttattcgttcagaataattttcaaaagctcttcctagaggatctttgagtactttgcataaattaggtttatgwaaaagtgaaatagaagattaccaaataaattaaaaacaacaaagggtagcatagaagaccaatttttatctacttggccattactattcttacacagttttgttgaacgctccttttaataattattcatgtaaggtatgccactggatttacagaacaacttttttgctatctttcttaaagcttttgaacaattagataaaacagtaattactctttgatatggtttggatctgtgtctccacccaaa

SEQ ID NO: 571588 - DNA, 618 bp, Homo sapiens
ttttgaacaattagataaaacagtaattactctttgatatggtttggatctgtgtctccacccaaatctcatgtcgaattgtaatccccaatgttggaagtggggcctggagagaggtgattggatcatggggtggatctttcatgaatggtgaagcaccatgctcttggtgctgtctcctgatagagttcttgtgagatctggttgttcagatgtgtgtagcacattccctctctcactcttggtcctgttcctgcctgccatttaagactactgctcctgctttgtcttctgtcatgattgtaagtttcctgagacctctccagaagcagaagccattatgcttcctgtatagcctggggaaccatgggccagttaaacctcttttctttatcaattacccagtctcaggtatatctttatagcaaygtgagaacagactaacacactcccttaaggtttacaagaaacagtgtatgtggtttaaaaaaatatttaattaaatactcagatcaatactggatcatatgccctgaaattttcatttactatatgttataataaaactttctataatttctaacctaatctcaaagcatgtgcttagaaaatgaaaga

SEQ ID NO: 571589 - DNA, 400 bp, Homo sapiens
tttcctcctaatgtttatcttttcttatctttttaaaaaagaataatcatttccacttcttcagtactactggaaaaccacaaaaaaaaataaaaacttttctaggcytttcaaagtgtttcacatttactgccacacatagagagcaggatttactgccacacatagagagcaggaggaatatttaatcaaagggtttaaagcatgtggtattggcaatcaatgtacaactcagatatagaaggctctcctgattgcaagtcgtaccatgaggtggggtagataaagttactagaattagcaaagagctattagttttctttaagcttcactgtttcaattagaaacagtagttgaattgtatacatggtaatattatacaagcccatcagaagtttca

SEQ ID NO: 571590 - DNA, 625 bp, Homo sapiens
caagctgcctgacaaacaccagaaaacaaagacctagataaggatagtgctcttattataaatcatcactctctgtattattataaaactgatgatggcacatgaagaagacgggtatgatatatgagcatcattcactctgtcatcattcacagaccaaatgccatttaacacacctaagatgtcatggcactcaygtgggtcctctccactggtcttttactgacactcttaagtattttccaaaaaaaggaaattattttcttacctaaaagaaaagtctaaagatgatttcaggggagacgcaaacaatgccatcaagcacccaagtcctgcctgtctctacaatctgattcctccagtgctgcctgtctcatagtgggcccttggcagctctgagctctctgttcatggatgtaaaatggctgcagcagtttgagcatcacttccgtgtactgcatcatgcagagaaggaagtgaagtcttctctgatagttcctgcaaaagagcttgccagaattgaggccgtcaatcccccaaaggcacattactaagaatgggtaatccatttccctcaaagcaaaattcatgtattttaatgtgaagaggaagcagaagacacaca

SEQ ID NO: 571591 - DNA, 625 bp, Homo sapiens
caagctgcctgacaaacaccagaaaacaaagacctagataaggatagtgctcttattataaatcatcactctctgtattattataaaactgatgatggcacatgaagaagacgggtatgatatatgagcatcattcactctgtcatcattcacagaccaaatgccatttaacacacctaagatgtcatggcactcacgtgggtcctctccactggtcttttactgacactcttaagtattttccaaaaaaaggaaattattttcttacctaaaagaaaagtctaaagatgatttcaggggagacgcaaacaatgccatcaagcacccaagtcctgcctgtctctacaatctgattcctccagtgctgcctgtctcatagtgggcccttggcagctctgagctctctgttcatggatgtaaaatggctgcagcagtttgagcatcacttccktgtactgcatcatgcagagaaggaagtgaagtcttctctgatagttcctgcaaaagagcttgccagaattgaggccgtcaatcccccaaaggcacattactaagaatgggtaatccatttccctcaaagcaaaattcatgtattttaatgtgaagaggaagcagaagacacaca

SEQ ID NO: 571592 - DNA, 625 bp, Homo sapiens
caagctgcctgacaaacaccagaaaacaaagacctagataaggatagtgctcttattataaatcatcactctctgtattattataaaactgatgatggcacatgaagaagacgggtatgatatatgagcatcattcactctgtcatcattcacagaccaaatgccatttaacacacctaagatgtcatggcactcacgtgggtcctctccactggtcttttactgacactcttaagtattttccaaaaaaaggaaattattttcttacctaaaagaaaagtctaaagatgatttcaggggagacgcaaacaatgccatcaagcacccaagtcctgcctgtctctacaatctgattcctccagtgctgcctgtctcatagtgggcccttggcagctctgagctctctgttcatggatgtaaaatggctgcagcagtttgagcatcacttccgtgtactgcatcatgcagagaaggaagtgaagtcttctctgatagttcctgcaaaagagcttgccagaattgaggccgtcaatyccccaaaggcacattactaagaatgggtaatccatttccctcaaagcaaaattcatgtattttaatgtgaagaggaagcagaagacacaca

SEQ ID NO: 571593 - DNA, 572 bp, Homo sapiens
aaggcatcaagacagccttcaaaatatgccctacccatattttctgtaacatactcaatgccattacagaaatatctcctgggtgaacaatgaggaaggcttaacttgtgcatcatattgaaaaaaaaaatctaagtataatacatatacaattaagtacatgataagtttttacacatgtatctrcccacataactatcacccaaatcaagatatagaacattgccagtaccccagaatataagagtaaactaagagtaaagagaagaaaattgactggtcagtctgaatttgtgaaatacactaaaatacagagaattatagcttaaagtatattttaatttccatctattaaataaggaatgtgattcaaatgccaacttgcatgccatgggaaacagtataacattacttgaaagtagattggttaattaaagatgtaacactagggcaaccactaaagattcttttaaagaggtataaaatttaggtaatacatgagtagctatatttattcatcacatttcttgttcttttacatgaagatgtatacaaaacttttaaaatatttt

SEQ ID NO: 571594 - DNA, 578 bp, Homo sapiens
aagccaagaaaacagccaatccaagccagaaatccattgtatactgccacatgttaggaccactacggtctcacagyaccgaaaatagcaaaatggtaccacaggcccagctcccaatccctggagaacttctactcatcaccctggaatgactcagtgaggaacattggtccaagctaacctttagaaaagcaacataaacaaaatattcttttggcaattaaggtagccatctctatctcttctactttctcttctatcattttatcctttgttctactattaaactgaaactgtcatttaaaagtttgtgtacaagtactcagatatctgtacttaagtaatatttttaacatttttaataaggaactgaatgatgtgatggaagtcgcactagaaaaaataaactttcattttttaaaattatactttaagttctagggtacaagtgcacaatgtgcaggtttgttacatatgaatacatgtgccatgttggtgtgctgcacccattaactcgtcatttacattaggtatatcttccaatgctatccctcccctcctcccccaccccatgacag

SEQ ID NO: 571595 - DNA, 578 bp, Homo sapiens
aagccaagaaaacagccaatccaagccagaaatccattgtatactgccacatgttaggaccactacggtctcacagcaccgaaaatagcaaaatggtaccacaggcccagctcccaatccctggagaacttctactcatcaccctggaatgactcagtgaggaacattggtccaagctaacctttagaaaagcaacataaacaaaatattcttttggcaattaaggtagccatctctatctcttctactttctcttctatcattttatcctttgttctactattaaactgaaactgtcatttaaaagtttgtgtacaagtactcagatatctgtacttaagtaatatttttaacatttttaatarggaactgaatgatgtgatggaagtcgcactagaaaaaataaactttcattttttaaaattatactttaagttctagggtacaagtgcacaatgtgcaggtttgttacatatgaatacatgtgccatgttggtgtgctgcacccattaactcgtcatttacattaggtatatcttccaatgctatccctcccctcctcccccaccccatgacag

SEQ ID NO: 571596 - DNA, 522 bp, Homo sapiens
gtaagacagaagtaagaaaacagatatattatttaacatgtaaaattcttccttttggataacatwaatgcaagaatagattttgcataccaagaatcttgttttaaggctacttaggagtcagctgtggatttataacagtcacataaggcagctaagggataatgtacaatattaaaaaattttcaatttatttagttctagataaaatgtgaatgaagcataataccaattatttgcacacttcaacagtaagcattagaattgtgagtagttttatttctacacacttaatgagatttaaaagaaatattaaatatttaataagaatttaaaaaaattaaataaaatatgtgttttatttagtgttgatttaaaatttgaatactccattaattattttaaattttgtcttttaattttagtagataatttaaaacattttagaagacaaaatgtgaaggcaatactttaagtaatattaaatagtttattaaataatgtataatagacataaaaatg

SEQ ID NO: 571597 - DNA, 531 bp, Homo sapiens
ttagaattcagaagtttcttatgaagcttattaagaaaaatgagaaaaaaattacccatactaaaaattacatagagaacatcactcaaaatctttcagaaaataaaataataatgagamaattataaaatattttaagccaatgcttttgcaacctgggtaaaacagaacatttttagaaagagattccttaaaggactgaaagtggatgtaacattcaatccagcaattccaccctggatatcaactcaagggaaaagaagtcactgtatgaaaaagacacttgaacatgtatatatgtttatagcagcacaattcacaattgcaaacatatagaaccaacctaagtgcccattgatcaatcactgcctatataaaatgtgtatacacacgatgaaatactactctgacataaaaaggaaaaaataatgtcattttcagcaatttcgatggaactggaggccattattctaagtgaagtaactcaggaatagaaaaccaaatatgatatgcttccatttataagtggga

SEQ ID NO: 571598 - DNA, 549 bp, Homo sapiens
tgccttttgcttgtaatttagactaaacctctatctgagtttatgttactaataaagcttattaatatagatgagtttagggtcaatgtttgattgtgagagcatatgcctgctcatgttgacctgctcttaaaactccaatttataaaataatcaacaccatttaatatggatatgccaaataaataatctgggaaacaataacaaaaaaatcaaattgtgttttacttttggatgatcaacagtagcagagattttgtatattctcatcttactgggtgggaaattagtaccattattctccatgcatctctgtgcttgttaaataccataggataaaatcaattgtcaataaaattatattcaaaagcttcaaagttctataaataatagaaacccataaaaaacagaatctttagtataggatataattaaaattttccttttgctgatgatagtggtagtagtgatttgaaagccattagtgattctaaygataacagttataatatactactcccatttcttaaaatgtgaattacacataga

SEQ ID NO: 571599 - DNA, 530 bp, Homo sapiens
tggggtgactgaggcaggagaatcgcttgaacccaggaggcgggggttgcagtgagccgagattgcaccactgcactccagcctgggtgacagagcgagaccctgtctcaaaaaacaaaaacaacaacaataacaacaaaactaacccactttttagatatgtttctattcttttccttttggtgatttctttgaatgttttgctatttagcaatccttcctgtcaccacaacctgtttagtgatggaatattacattaaaraaaattttttttgttagatttccaaagttcaaaaggttcccagcatgttttgacaggtgggaggaaagagacagagagaaagcagtatgtaacctgcttgctgtttgttaaaagctgacatgtcgtgcctctttctaccattattataaataataaagaagtaccagcttgaaaacacctcatttatcgggggtttacctcagtcatctgtaacataagtgagaatcaagaaagttacctgaagaatcatctgaactttcaactggaa

SEQ ID NO: 571600 - DNA, 489 bp, Homo sapiens
tctcaaaaaaaaaaaaaaaaaaaaaaaaaaactacctgaaataatgacaaactaaaattatgacatttgattggcaatgcgctaaattactacatggaatattttgtttattataataaatcaggttttagtgctcacataacagtcaagtttgtctttttgtatgtgtcgccccttgttttcctatctatccatgtaattcatattttcctttctttaattcattgttcaagatctacttcctctagggttttttcttgtcaccagttttgtccattttcttaactataagctcaactccaaaccctccttttgccttaatgtattacacagtctttatattgaattatataaagatatgttttctggttataatgatattagtagctaatattcatggtgcacttcctttgtatgtagcgggatcgctaaacmatttacaattgttttacttaatgtttataacatctcaatggggtaggtactgtt

SEQ ID NO: 571601 - DNA, 574 bp, Homo sapiens
caaataatatatatatatatatatatatatattcaaaaatttatgattgatctcataagaccatcagctaatatactgtgtggttaaaggcacaagctgattatatataacaaaatttatattatgtggtcttgttatgttacagaactatgtattaaaagaaatggcagtccaatttgatctggtataaaaagaaaaaatagttagaaagcacagaaactagttttaatttttccctatacaaaagaaatatcaaatcacgaatatgaacagcactagctcaaaggtttgctgaaggtaaatcagttgagatatattaatttttccacatattttatcgatggacattattatgtagtattgcttttctacaggaagatacattaggctgaaatttaaaatttggtaggtaactgattatttcccactatgttaaaaatgtttacactggaaatgtgtagacagaaatttttatttaaacayacatattattcttctcaaatgccagagacagcctttccaagtccttaactagggagatgctgacaaactgccacccacccttgtatagtag

SEQ ID NO: 571602 - DNA, 522 bp, Homo sapiens
ccagccaaaggcctattttcagtcgtctagtttgaggagtggtgtgagaagactccagaggccaaggacagtttttgtttgggaattggaagagatgggggaaaaaaatctttgaaatggaaatgaatgtccacaaaatttaacataactatttccttaattattgcattaagtatttgtaaacattaatatttgaaaacgatgtgtaggttagattttcacacttaattaaaatctcctagtaggcataattccttcattaattcaacaaatatgtattgagtccatattatgtgccacrcattcatctagtcacttgggatctatctgaacacaatgaaaacaactgcaaagttggcataggcaattataaatatgtaagcttaattattaaaatccattaaaaatttttacagccacagttttttgttttttgttttttgttttttgttttttttgcttggcagggcacagtgggtcatgcctgtaatcccagcactttgggtggtggaggcgggagga

SEQ ID NO: 571603 - DNA, 409 bp, Homo sapiens
gaattcatcttaaaaatcttttggcacttcaaggtaatggaagtatttcttccatatacttaaagcattcctttgaaattcatccacttgaatttaattttttgtatggygtaagtccatttttcaccaaatgcatggtcaattatattcacaccatgtattggaaagtgggttctatatttcataatctatagtcactacagtgcccagtttgtgtaagtctagtgtttattcatgcatgagtctgcttatgggctcttatcaattacattgctctggacctatactacactaaactgatttctgtagctttagaataggtcttcatagacagaacaagatctcccacattcttctattttttcatagttttggctattcttggtaatttgaaattctatgtatcaat

SEQ ID NO: 571604 - DNA, 573 bp, Homo sapiens
taatccattatctataaagtataaatatatakagagagtgtatataactccacacatcatttacggataatgaatctagcatctcatgaaaatccagtgagactttcatggaagttataactatactcatggggttttttttttttttggttattttttgtgtgtttgcttttttaaatgaaaatgtaatctttttgttagaccatgagttaacagtggcaaatctaggattaaaatctcgatcttttttgttattcatcattatttccactgtgttatgtggctattttgatgactgctactctaaatcattgaacttttatattttgtcaagagaatttcttgaaaataaatgtgtgctaaacaagcatctttacttaaatgatgaaagaacagtttgtttctgaattttcccattatagaacaataatattggctaaatgtttattcacataccaaagaaacacatggccatactatctgtcacatcactgacttgcattttgattttgaaaaaatcatttcagctttcacctgacctagacaaaaattgaaaatagcagtgctattttg

SEQ ID NO: 571605 - DNA, 552 bp, Homo sapiens
caatcatcatgctctcttgggcaactgattttaatttcaaaataaaagataacggctgagcacggtggtacacacctgtaatcctcctttgggaggccaaggtgggtggatcacaaggtcaggagatcaaggccatcctggccaacatggtgaaaccctgtctctactaaaatacaaaaaaattagccaggggtggtggcacgtgcctgtaatcccagctactctggaggctgaggcagggaatcgcttgaacccaggaggcagaggttgcagtcaaccaagatcacgccactgcactacagcctggtgacagagcgagactgcatctcwaaataaataaataaataaataaataaataaataaataaataaaaacaactgcatagaattctctttcatactgaccattttcaatgaagaagagatttcaattcaatgaagatataagatagtctaattgcctttttctccatggttgtggtcagcacaagagagaaaatgtctcaatttcctttatttcttactactctttccctttctctcccactccta

SEQ ID NO: 571606 - DNA, 504 bp, Homo sapiens
tgctgctgtgtggccaaagcccaggggtactcaccccagttcctgcaccttctgtctgcatactccttgtctcataaggggtttgagtatgcactccagctgaacagatgagccacactcctgtcacatatcctgcaagggggtcagggaactctcccatttcagcatgtgtgattttccagtggtggtgttcagaagtgtgtctcccaatggcctataatagtaaaatgtgcaaagggagaaataaattaaagatggaatttataaccaaaagagaaccagaacttaaagagttggaaaattatcagcctggtcatgtaaggaatgaaaaggcaaagcatgttggagagaaaaaatccaggatgtggccaagcaaccacttaaggagattggtatggattaaaaataaaaaaaggaagccagatgctattcatgaaaacaayggaagcatgaccccaaagatacttcagagatcttcagggctgacactcccatcaaaggccc

SEQ ID NO: 571607 - DNA, 430 bp, Homo sapiens
ttggactatcattgttccaggtggggtataagstaaaataagccagtatatataaagaacatagaacagggcagagagtaagaaaaatggtttctaaaaaatagctaggatagaaatcaattctaacacagatttctaggaatgtgaaataagtggtaacaaatgtaacttgagttgaaaaaaactgatagatcttggctcttcctaaacatattctttattgactcaactttcaaatagaattttcagttttgaccaataaagtaattggtgtagaataagaaattattgccagaagatttgtataaaatattagaaccctagaagaatgcactttttcagtaatctcctcttgaaacaacttaattgcttatcttccagaaaagacataaaaagcagaggcctaaaggtgaaggtttgattagacagg

SEQ ID NO: 571608 - DNA, 430 bp, Homo sapiens
ttggactatcattgttccaggtggggtataagctaaaataagccagtatatataaagaacatagaacagggcagagagtaagaaaaatggtttctaaaaaatagctaggatagaaatyaattctaacacagatttctaggaatgtgaaataagtggtaacaaatgtaacttgagttgaaaaaaactgatagatcttggctcttcctaaacatattctttattgactcaactttcaaatagaattttcagttttgaccaataaagtaattggtgtagaataagaaattattgccagaagatttgtataaaatattagaaccctagaagaatgcactttttcagtaatctcctcttgaaacaacttaattgcttatcttccagaaaagacataaaaagcagaggcctaaaggtgaaggtttgattagacagg

SEQ ID NO: 571609 - DNA, 464 bp, Homo sapiens
tgcaattgacaaataagtttggttatctctgtggtttayaataacttaacaacctgaattatgattcatagcatatactttagacattagaattttttgaagtatcttacaattttggaacatatactaatatcattcaccaaaatgtaacctaaagaagattgaacaccattttggcaatcccacgtacctaaacatgtcaaataatcttgtttacctctcttttgggtactccaggagcctctgtagcacccaaaagccaggcatcaggaaagacaattttgaaactgaagtttgattttggaaagcatgtcaaatgttagaggtttaaaacacttgatgttatgaaatagaattccagagtaccataagttatttattttgccaaaacaatgactcagaaattttaaaaaacaaaaccattttataaccctttacaaatttttctaaaaagaagattagtg

SEQ ID NO: 571610 - DNA, 538 bp, Homo sapiens
acaaactccagacccaccatctttaagagctgtaacacttgctgcgaacatctgcagcttcactcctgaagtctgagaaggaagaaactccggacacatctgaatatctgaaggaaaaactccagacacaccatctttaagaactgtaacactcaccacaaggatccacagcttcattcttgaagtcagcgagaccaagaacccactggaaggaaccaattccggacwcagtgggattgctggatcaaatggtagttctacttttagttctttaaggagtctacatactgtttcccatagtggttgtactagtttacattcccaccagcagtgtaaaagtgttcccttttcaccacacccatgccaacatcttttgttttttgattttttaattatggccagtcttgcaggagtgaggtggtattgcactgtgattttgatttgcatttccctggtaattagtgatgctgagcattttttcatgtttgctggtcatttgtatatcttcttttgagaattgtctaatcatgtccttagc

SEQ ID NO: 571611 - DNA, 625 bp, Homo sapiens
tggttttacaaaggaagaatgatatatgtggcagtcagaatagtaggatgacctcgaataacaaaagctattgaataatctcttccattgaatataatcaggaactctgagtatgatgagatatcattccaataatgaagttttgttgtatggcatagttgtctaagaaaagatcatttttggtggacctgcactaatcaagtaaaacattaaaaggctgtgatctctctgacaaagagattttaagttagaggatttaaagtgttagagagacttatttatttattttaacttttatttgaggttcagggatacatgtgcccatttgttatgtaggtaaattgcatgtcttgaggatttggtgtatggattatttcaccacttggataagcacagtactcartaggtagtttttttggtcttcactttcctctctccctccacaatcaagtagtccctggtgactcttgctccattcttcaagtccttatgtacttaatgtttagctcccactataagtgagaatatgtggtatttagttttctgttcctgcattatttacttaagataatggcctccaactctatccatgttgctacaaaaaaacatgatcttgttctttttt

SEQ ID NO: 571612 - DNA, 476 bp, Homo sapiens
tcgaatggaattgaatggaatcatcaattggactcgaatggaaacatcaaatggaatcgatttgaagtgtcgaatggactcgaatgaaatcatcatcgagtggaatcgaatggaatcatcgaaaggactcgaatcaaatcataaaatggactcraatggaatcatcgaatgcactccaatggaatcaacatcgaacggaccctaccagaatgatcaaatggactcgaatggaatcattgaatggaaatgaatggaatcattgattggactcaaatggaattatcgaacgggctcaaatggaatcatcgaatggactcggatgtaatcattatcgaatggaatccaatggaatcatcgaatggagttgatcgaaatcattaacgaatggaatcaaatgaaatcatcaaatggaatcgaatccaatcatcatcaaatggaatcgaatggaatcatcatcgaatagaatagaatggaat

SEQ ID NO: 571613 - DNA, 476 bp, Homo sapiens
tcgaatggaattgaatggaatcatcaattggactcgaatggaaacatcaaatggaatcgatttgaagtgtcgaatggactcgaatgaaatcatcatcgagtggaatcgaatggaatcatcgaaaggactcgaatcaaatcataaaatggactcgaatggaatcatcgaatgcactccaatggaatcaacatcgaacggaccctaccagaatgatcaaatggactcgaatggaatcattgaatggaaatgaatggaatcattgattggactcaaatggaattatcgaacgggctcaaatggaatcatcgaatggactcggatgtaatcattatcgaatggaatcmaatggaatcatcgaatggagttgatcgaaatcattaacgaatggaatcaaatgaaatcatcaaatggaatcgaatccaatcatcatcaaatggaatcgaatggaatcatcatcgaatagaatagaatggaat

SEQ ID NO: 571614 - DNA, 615 bp, Homo sapiens
aatgcaatcatcattgagtggaatcaaatggaaccactgaatggcatcaaatggaatcatcatcgaatgtagtctaataaaataaccgaatggactcaaatagaaacatcaaatcaagtcgaatggaatcatcatcgaatggaatccaatggaatcatcgaatagcatcaaatggaatcatcgtcgaatggattcaaatggaatcatcgaatggactcgaatggaatcgtcatggaatgtaatcgaatgaaatcttcgaatggactcgaatggaatcatcatagaatggaatctaatggaatcatcaaacggaatagaattgaatcatcattgaatggaatcgagtagaatcattgaaatcgaatggaatcatcatcgaatggaattgggtggaatcawcaatgaatggaatcgaatggaatcatagaatggaatccaatgtaatcatcttcgaattgaaaacaaagcaatcattaaatgtactctaatggaatcatcgaatggactcgaatggaatcatcgttgaatggaatataatggaatcatcgaatgcaatcgaatggaatcatcgaatggactcgaatggaatcatcatggaatggaattgaaaggaat

SEQ ID NO: 571615 - DNA, 476 bp, Homo sapiens
tcgaatgaaattgaatggaatcatcaattggactcgaatggaaacatcaaatggaatcgattggaagtgtcgaatggactcgaatgaaatcatcatcgcatcgagtggaatcgaatggaatcatcgaaaggactcgaatcaaatcctaaaatggactcgaatggaatcatcgaatgcactccaatggaatcaacatcgaacggaccctaccggaatgatcaaatggactcgaatggaatcattgaatggaaatgaatggaatcattgattggactcaaatggaattatcgaacgggctcaaatggaatcatcgaatggactcggatgtaatcattatcaaatggaatcgaatggaatcatcgaatggagttgatcgaaatcatyatcgaatggaatcaaatgaaatcatcaaatggaatcgaatccaatcatcatcgaatggaatcgaatggaatcatcatcgaatagaatagaat

SEQ ID NO: 571616 - DNA, 476 bp, Homo sapiens
tcgaatgaaattgaatggaatcatcaattggactcgaatggaaacatcaaatggaatcgattggaagtgtcgaatggactcgaatgaaatcatcatcgcatcgagtggaatcgaatggaatcatcgaaaggactcgaatcaaatcctaaaatggactcgaatggaatcatcgaatgcactccaatggaatcaacatcgaacggaccctaccggaatgatcaaatggactcgaatggaatcattgaatggaaatgaatggaatcattgattggactcaaatggaattatcgaacgggctcaaatggaatcatcgaatggactcggatgtaatcattatcaaatggaatcgaatggaatcatcgaatggagttgatcgaaatcatcawcgaatggaatcaaatgaaatcatcaaatggaatcgaatccaatcatcatcgaatggaatcgaatggaatcatcatcgaatagaatagaat

SEQ ID NO: 571617 - DNA, 281 bp, Homo sapiens
gaatggaatcattgattggactcaaatggaattatcgaacgggctcaaatggaatcatcgaatggactcggatgtaatcattatcaaatggaatcgaatggaatcatcgaatggaattgatcraaatcatcatcgaatggaatcaaatgaaatcatcaaatggaatcgaatccaatcatcatcgaatggaatcgaatggaatcatcatcgaatagaatagaatggaatcatcaaatggaatcgaatggaatcatcgtcgaatggaatcgaatggaatcatc

SEQ ID NO: 571618 - DNA, 281 bp, Homo sapiens
gaatggaatcattgattggactcaaatggaattatcgaacgggctcaaatggaatcatcgaatggactcggatgtaatcattatcaaatggaatcgaatggaatcatcgaatggaattgatcgaaatcatyatcgaatggaatcaaatgaaatcatcaaatggaatcgaatccaatcatcatcgaatggaatcgaatggaatcatcatcgaatagaatagaatggaatcatcaaatggaatcgaatggaatcatcgtcgaatggaatcgaatggaatcatc

SEQ ID NO: 571619 - DNA, 691 bp, Homo sapiens
ctgttgcccaggctggagtgcagtggcgcgatctyggctcactgcaagctccgtctcccaggttctcgccattctcctgcctcagcctcccgagtagctgggactacaggcgcccgccaccatgccctgctaattttttgtatttttagtagagacggggtttcaccgtgttatccaggatggtctcgatttcctgacctcgaggcccgcctcagcctcccaaagtgctgggattacaggcgtgagccactgcacccggcctttgctgtgatttttattatttctttcctcctactaatgctgtgcttggtttgttcacgcttttttatttccttgaggtgtatcattaggttgtttattttaaatatttctacttttttgatgtaggcatttattgctataaactttacacttagcattgtttgtgttgtatgtcataggttttggtacactgtgtttcaaattttcatttacttaaattttttcccctcttattcactgacccagtggttgttcgggagcatgttgtttactttgtatgcatttgtatagcttctgaagttcttcttgttattgatttccagctttagtccattatagtctcagaagatgcttgatataattttgatttttaaagaaggaaaacaaggaccaatggaaatttaatttctctagcctaaaatttatatta

SEQ ID NO: 571620 - DNA, 691 bp, Homo sapiens
ctgttgcccaggctggagtgcagtggcgcgatcttggctcactgcaagctccgtctcccaggttctcgccattctcctgcctcagcctcccgagtagctgggactacaggcgcccgccaccatgccctgctaattttttgtatttttagtagagacggggtttcaccgtgttatccaggatggtctcgatttcctgacctcgaggcccgcctcagcctcccaaagtgctgggattacargcgtgagccactgcacccggcctttgctgtgatttttattatttctttcctcctactaatgctgtgcttggtttgttcacgcttttttatttccttgaggtgtatcattaggttgtttattttaaatatttctacttttttgatgtaggcatttattgctataaactttacacttagcattgtttgtgttgtatgtcataggttttggtacactgtgtttcaaattttcatttacttaaattttttcccctcttattcactgacccagtggttgttcgggagcatgttgtttactttgtatgcatttgtatagcttctgaagttcttcttgttattgatttccagctttagtccattatagtctcagaagatgcttgatataattttgatttttaaagaaggaaaacaaggaccaatggaaatttaatttctctagcctaaaatttatatta

SEQ ID NO: 571621 - DNA, 691 bp, Homo sapiens
ctgttgcccaggctggagtgcagtggcgcgatcttggctcactgcaagctccgtctcccaggttctcgccattctcctgcctcagcctcccgagtagctgggactacaggcgcccgccaccatgccctgctaattttttgtatttttagtagagacggggtttcaccgtgttatccaggatggtctcgatttcctgacctcgaggcccgcctcagcctcccaaagtgctgggattacaggcgtgagccactgcacccggcctttgctgtgatttttattatttctttcctcctactaatgctgtgcttggtttgttcaygcttttttatttccttgaggtgtatcattaggttgtttattttaaatatttctacttttttgatgtaggcatttattgctataaactttacacttagcattgtttgtgttgtatgtcataggttttggtacactgtgtttcaaattttcatttacttaaattttttcccctcttattcactgacccagtggttgttcgggagcatgttgtttactttgtatgcatttgtatagcttctgaagttcttcttgttattgatttccagctttagtccattatagtctcagaagatgcttgatataattttgatttttaaagaaggaaaacaaggaccaatggaaatttaatttctctagcctaaaatttatatta

SEQ ID NO: 571622 - DNA, 691 bp, Homo sapiens
ctgttgcccaggctggagtgcagtggcgcgatcttggctcactgcaagctccgtctcccaggttctcgccattctcctgcctcagcctcccgagtagctgggactacaggcgcccgccaccatgccctgctaattttttgtatttttagtagagacggggtttcaccgtgttatccaggatggtctcgatttcctgacctcgaggcccgcctcagcctcccaaagtgctgggattacaggcgtgagccactgcacccggcctttgctgtgatttttattatttctttcctcctactaatgctgtgcttggtttgttcacgcttttttatttccttgaggtgtatcattaggttgtttattttaaatatttctacttttttgatgtaggcatttattgctataaactttacacttagcattgtttgtgttgtatgtcataggttttggtacactgtgtttcaaattttcatttacttaaattttttcccctcttattcactgacccagtggttgttcgggagcatgttgtttactttrtatgcatttgtatagcttctgaagttcttcttgttattgatttccagctttagtccattatagtctcagaagatgcttgatataattttgatttttaaagaaggaaaacaaggaccaatggaaatttaatttctctagcctaaaatttatatta

SEQ ID NO: 571623 - DNA, 600 bp, Homo sapiens
gtgttagccaggatggtctcagtctcctaaccttgtgatctgtccacctcagcctcccaaagtgctgggattacaggtgtgagacaccgtgcctggccctcttttctttccatatctgccttcaayaagccccggaaagggggctgttgctcttgcatagggacatcacagactatacctgtgccacgtctttatgaattggaacccctcgtacctttgttggaactaaagatacatatattggtgacatgtttctctcttaggagcagaaatcttgggaagagttcacaaacaggtcctaagcaagttcagggccatttagtcaaggtattagatgaactcagggatcctgagcatgatctaaagggtgccaagttgcccccttccctataccatacagtgtcctcattctgggtaaggatatagtcaaagtagagttgttatagaaccttctaaagcatgggaactagggccttatatgttagttatgagtttgaacaatttcctgccaatttacaagaactattgaagacttttatatggtagctgttttatacacagttttactttttcacatagctataaattatgaaagacaaa

SEQ ID NO: 571624 - DNA, 600 bp, Homo sapiens
gtgttagccaggatggtctcagtctcctaaccttgtgatctgtccacctcagcctcccaaagtgctgggattacaggtgtgagacaccgtgcctggccctcttttctttccatatctgccttcaacaagccccggaaagggggctgttgctcttgcatagggacatcacagactatacctgtgccacgtctttatgaaytggaacccctcgtacctttgttggaactaaagatacatatattggtgacatgtttctctcttaggagcagaaatcttgggaagagttcacaaacaggtcctaagcaagttcagggccatttagtcaaggtattagatgaactcagggatcctgagcatgatctaaagggtgccaagttgcccccttccctataccatacagtgtcctcattctgggtaaggatatagtcaaagtagagttgttatagaaccttctaaagcatgggaactagggccttatatgttagttatgagtttgaacaatttcctgccaatttacaagaactattgaagacttttatatggtagctgttttatacacagttttactttttcacatagctataaattatgaaagacaaa

SEQ ID NO: 571625 - DNA, 600 bp, Homo sapiens
gtgttagccaggatggtctcagtctcctaaccttgtgatctgtccacctcagcctcccaaagtgctgggattacaggtgtgagacaccgtgcctggccctcttttctttccatatctgccttcaacaagccccggaaagggggctgttgctcttgcatagggacatcacagactatacctgtgccacgtctttatgaattggaacccctcgtacctttgttggaactaaagatacatatattggtgacatgtttctctcttaggagcagaaatcttgggaagagttcacaaacaggtcctaagcaagttcagggccatttagtcaaggtattagatgaactcagggatcctgagcatgatctaaagggtgccaagttgcccccttccctataccatacagtgtcctcattctgggtaaggatatagtcaaagtagagttgttatagaaccttctaaagcatgggaactrgggccttatatgttagttatgagtttgaacaatttcctgccaatttacaagaactattgaagacttttatatggtagctgttttatacacagttttactttttcacatagctataaattatgaaagacaaa

SEQ ID NO: 571626 - DNA, 532 bp, Homo sapiens
ctgggtgctgtggctcacgcctgtaatcccaacactttgggaggccgaggtaggtggatcacctgaggtcagaagaagccacaccaatacggtaaagccccatctctactaaaaatacaaaaataagccagacatggtggcatatgcctgtagtcccagctacttgagaggctgagagaggagaattgcttgaacccgggaggcagatgttgcagtgaaccaagrtcacaccattgcactccagcttgggcaacagagcgagactccatccaaaaaaaaaaaaaaagacatttgtaaaaaaaaagctgtgaacagttatttggtgaataaaaaaaaatttggttcatttactaaaagaacagtcacctccaaattatctgattttctgaattatataattaagtatacaggaaatagtttaaaaaaactgagatgccttgattctttgttctttaaaatatatgtttttaaagtatatgtgttgtgtgtgtgtgtctttacttcaaaacaattaatatagtcattaaaatat

SEQ ID NO: 571627 - DNA, 613 bp, Homo sapiens
ggtttgcaattgctacatggggataagaaaaattttgggaaagacaatttccattttaccagtgtgtcttagactcttgtaaactctattcttttctttgatatttgtatgtaaaacaaaggcttctaaagactcagcataaggccgaacccaaaagacatttccagtgctatgcttgtttgtttgtttgtttgtttttagtaatggccatcactgagactggtgaggaaccttgagtcacaattcagcttatgacttctgatactcaaaagattgtgtagaatctacttctccctgtgtgtcatccctaagcaccactaaaaatcctgaaaacaatgtgagacagaagcaaaggagagctcwgaaggatgataagaaaaaggcaaactggatggagctccaggatttaagaacgcagtggaagagcatcttatgtccccacctccacaacacagaagcatctcaaagtgggtgtttttcaccacccaaatctggtaacagaaagaaaaaaaaaacaacttacgttttcttttctttccccaccagagcaaatgggaatctccaataatatggagccagggaaagcactcttcttctctactaggcctgagaa

SEQ ID NO: 571628 - DNA, 587 bp, Homo sapiens
gtgcagtgcaccagtgtggcacatgtatacatatgtwactaacctgcacaatgtgcacatgtaccctaaaacttaaagtataataataaaagaaaaaaaaaagaaaattaaacagaaattttaaagttctcctgaatttcctgttttggtcaaatgcacgtagcttgcctttttcttctttttatgaatagactccagctttaaaaatatatctacagccaaacacctatcagcacctacagggctaccaaccttgtacaagacaacatcatctttttttggtttgttgcattagctccctaaccgttctcttgtacccttgccatcctcagtccacagtcaacacacagtccaaagtgaccattataattttcagttggcttaaccagagatgttctcaaaacactgcaatatcttcccattaactcaatgtagatcctaagtccttgcaatagattacaaagcaccaagtgatctgggccacaattacctttctgacctttacctcctattaatctctttcatagcttccaatacatagcttttgtatcatcttactcctatcttctggaatattcttccaactt

SEQ ID NO: 571629 - DNA, 443 bp, Homo sapiens
gtagattcgataactactgtggttatgtaaaataatacccttattattaggaaatatatatagaattatttagtggtaaacagtcatgaggaatgtaattgacgaacagacatatctatgtatatgtgtgcatgtatatatacacacataatttagatatatgaataatagggaaatgtaggtaaataatgtatttgctttgtattatttttattttcagcaatactctttaaatttgaaatgatttccaagttaacatttattttaaaagttgataaatratgctagaaaatattccaaatttattcaggaaaaaaagctttagactttggcacataataaacacaaattgcatgtgtattaaagacttaatgtgaaataaaacatcataaaatttatatgacaatatgaatattgcaggatattcattggtatcgctgtaa

SEQ ID NO: 571630 - DNA, 599 bp, Homo sapiens
tacaatcatggtggaaggcaaggaggagcaagtcatgtcttacatagatggcagcaggcaaacagacagagcttgtgcaagggaactcttctttattaaaccatcagatcttgtgagacttactatcaagagaacagcacaggaaagacttgcccccatgattcaattacctcccacagggtccctctcacaacacatgggaattcaaggtgagatrtgggtggggacacagccaaaccatatcaaaggggatggaaataaataaatctaccattataattgaaatgtaaatacccctctttcaataattgatagaacaagtagaaaaacaattagtaaggatatactatcaactaacttgatttaactggcagttatagatccctccaccctttcaaagcagaatacacattatttttacacacaagtggacagttaccaagatggaatatattttctgccaaaacacaggtaaatagatttaaaacattcaagtcatagaaaatatgttctttgaatataatagagttaaaccagaaatcagttacagaaagacagctaggaaacccccaaatatttggaaatgaagcaacacatct

SEQ ID NO: 571631 - DNA, 604 bp, Homo sapiens
aatgatgctgaccaggcgtggcggctcaagcctgtaattccagcactttgggaggccgaggtgggtggattgcttgagcccaggagttcaagaccagcctgggcaacatagtgtaaaaccccgtctctattaaaaaaataaaatagataactaaaaatagcaggatgtggtgacagaggcctgtagtcccagctacttgggaggctgaggtgggaaaatcacctgagcccaggaggtcaaggctgcagtgagctgtgatcatggcactgcactccagcctgggcaacgggagtgagrtcctgtctcaaaacaacaacagcaagcaaatgatgctatatgcagccatggttgggaattgccatactcaatgccaataatgtcaagttactggtgataatctctgaagttaattaaatgttttaactgtaaaaataatctcaaaacccaagtttatgtgacactaaatccaggcacatttactagagtgcaaaagatgttattttgcacaaaggctgtgatcactccaggattggccagttccttaatgtcaggttcctgatcgatctaagacatctaaaaaaaaaaaagccattgcccattgcta

SEQ ID NO: 571632 - DNA, 506 bp, Homo sapiens
aaacaaacttgattttatggagaaaactgaatagcttttataaatttgtgatgaaaggcttaccaaaaaattatagaatttaatcaagttctactgtttctaagttttaacagaagaagataaaaaacgggttaaagacaatttggcatataatagaaccatttatactttcaccaataatatatattattatagaattacaactactaaatttctaaaatagaaattcatttatagtgaagatgactgagatggcttcctagtctcttttttattagaagtgtacatatgtagaatattaaactgcttggggtaggagtcatgttttccctgtgtaacakcaagcatctatctacataattgagctacgcattgagcattcaatacatatttaagaaattttaaccgaaatcccattataactaactctaagggactatcagtttttgcaaattgtgtttgagttaaatgagtcatagaaaagagtctttcagaccaggaacagt

SEQ ID NO: 571633 - DNA, 507 bp, Homo sapiens
ttgtactattactactgctatgctttatttatccagcagtttcacagaagcaggtgttctataaataaatcttccaaatagtacatgtggatttttcatcatgcattttgagaaaaataaggataaygatatatgttgatggcaatttttaaacagtcctcagcttccttaaatggatgatggtgccacacatttagggttattaccatgagaaaaattgtatgtgccagtgtttatttaaatatttggagttatttcaactttttgttttactttgcacgaatcattttttcatattgatagtggccttgtagggggcttggcaaaaatataaaaataattttaagataattgtccatttggaaaaaaatgcaatccaggctttaaaaagttaagaaataaaaaagtaacttaatcaaggtgcacctgggcttgaagcttcacctgtattctgacttatgtaaacatatacctcagtagaattagttttagaggagttgtacactc

SEQ ID NO: 571634 - DNA, 507 bp, Homo sapiens
ttgtactattactactgctatgctttatttatccagcagtttcacagaagcaggtgttctataaataaatcttccaaatagtacatgtggatttttcatcatgcattttgagaaaaataaggataacgatatatgttgatggcaatttttaaacagtcctcagcttccttaaatggatgatggtgccacacatttagggttattaccatgagaaaaattgtatgtgccagtgtttatttaaatatttggagttatttcaactttttgttttactttgcacgaatcattttttcatattgatagtggccttgtagggggcttggcaaaaatataaaaataattwtaagataattgtccatttggaaaaaaatgcaatccaggctttaaaaagttaagaaataaaaaagtaacttaatcaaggtgcacctgggcttgaagcttcacctgtattctgacttatgtaaacatatacctcagtagaattagttttagaggagttgtacactc

SEQ ID NO: 571635 - DNA, 507 bp, Homo sapiens
ttgtactattactactgctatgctttatttatccagcagtttcacagaagcaggtgttctataaataaatcttccaaatagtacatgtggatttttcatcatgcattttgagaaaaataaggataacgatatatgttgatggcaatttttaaacagtcctcagcttccttaaatggatgatggtgccacacatttagggttattaccatgagaaaaattgtatgtgccagtgtttatttaaatatttggagttatttcaactttttgttttactttgcacgaatcattttttcatattgatagtggccttgtagggggcttggcaaaaatataaaaataattttaagataattgtccatttggaaaaaaatgcaatccaggctttaaaaagttaagaaataaaaaagtaacttaatcaaggtgcacctgggcttgaagcttcacctgtattctgacttatgtaaacatawacctcagtagaattagttttagaggagttgtacactc

SEQ ID NO: 571636 - DNA, 157 bp, Homo sapiens
atgtatagattgtgaagattttctcccactctgtgggttgtctgtttactctgctgactgttccttttgccgtgcaaaagctctttagtttwattaggcccagctatttatttttgtttttattgcatttgcttttgggttcttggtcatgaaatcc

SEQ ID NO: 571637 - DNA, 157 bp, Homo sapiens
atgtatagattgtgaagattttctcccactctgtgggttgtctgtttactctgctgactgttccttttgccgtgcaaaagctctttagtttaattaggcccagctatttatytttgtttttattgcatttgcttttgggttcttggtcatgaaatcc

SEQ ID NO: 571638 - DNA, 157 bp, Homo sapiens
atgtatagattgtgaagattttctcccactctgtgggttgtctgtttactctgctgactgttccttttgccgtgcaaaagctctttagtttaattaggcccagctatttatttttgyttttattgcatttgcttttgggttcttggtcatgaaatcc

SEQ ID NO: 571639 - DNA, 597 bp, Homo sapiens
ggggattaatgttttcatgcctgcaagcacaacatccattctgcagcgcatgaatcaaggaacagttttgactttcaagtcttattatttaagaaatatatttcataagatgatagctgtcatagttattgattcctctgatggatctgggctaagtaaattcaaaaccttctgggaaggactcaccattctagatgccattcagaacattcctaattcatgggtagaggataaaatatcaataattacaaaagtttggaagaagttgattccagctctcatggatgactttgaaggtttaaaacttcagtggaggaagtggcagaaatagcaagagaactagaattaaaagtggagtctgaagatgtggctgaactgctgcaaacttgaacatataaaaagttacttcttatagatgagcaaagaaagccatttgttgaaatggaatctactcctgtgaagatgctgcaaaaaatattgaaattacaacaaaggatttggaatattatataaaattagttgataaagcagtgacagggtttgagaggattgactccaattttgrcagaagttctactgcgggtaaaatgctgtcaa

SEQ ID NO: 571640 - DNA, 520 bp, Homo sapiens
ctcctccagttcctcaggatggtcaatccaaatatctgccctaaacaaccacctcctggtgaccacctgcctatgggtcagctcactatacagctcgcttgactcacccccactcacccatacaccccacatagactgtgcagaaatgctgtggtgaccacctcttagtcacagcgtgactccatagaactcatgcctcctggttgtaaacccaccaaytagaactccccatagggaatccgcctgggtagcaacctggagcccatcaaagactttggccacacaagtcccttactatctcttgatccccacctgagtgtgtatgtccaggatggcttccccctttcccttggccctgtgaggcatgctgctctgttctctctgggacttgtaagtaatacactgctcctggtatttcgtgtattttattgagctgcctcctctgtgtctcaactgactaatacgccccaatctaacttctttcccagttagggctctcctggagtgtggctgtgttggt

SEQ ID NO: 571641 - DNA, 520 bp, Homo sapiens
ctcctccagttcctcaggatggtcaatccaaatatctgccctaaacaaccacctcctggtgaccacctgcctatgggtcagctcactatacagctcgcttgactcacccccactcacccatacaccccacatagactgtgcagaaatgctgtggtgaccacctcttagtcacagcgtgactccatagaactcatgcctcctggttgtaaacccaccaactagaactccccatagggaatccgcctgggtagcaacctggagcccatcaaagactttggccacacaagtcccttactatctcttgatccccacctgagtgtgtatgtccaggatggcttccccctttcccttggccctgtgaggcatgctgctctgttctctctgggactygtaagtaatacactgctcctggtatttcgtgtattttattgagctgcctcctctgtgtctcaactgactaatacgccccaatctaacttctttcccagttagggctctcctggagtgtggctgtgttggt

SEQ ID NO: 571642 - DNA, 558 bp, Homo sapiens
tcttctttgttaatattttcaatgacttggaatgcattaatttttaattggggaaaatataatctttaacttaagyaatatatcctggctaccaaattttgttttccaatggtacttgagttgcttgttgtttttttctcccaattaaaggtcacaatcatggggaaatggtaccatcagtcactgctgtggaagtttaaattaacacaaatttctggagcccaacttggcaataagtaaaaaaatgcaatatttgtatattccttgtccagaaattgcactttttggaattttttaagtgaaatagtgaaatcgaggagtaatcataaaacgtctacatatgggtgtttagagctgctgttttaatgatacctgggatttgttttaatcaggtatgaaaaacatgcagacatgaacatgcttgctatgaaggaagaagtttttattatggtcagagtgctctagaaacaggaggcatcataagttatgcaggccacttgaggaagcactgaggtagtgtgagctggtgggggtgagtgagcagtgctggtgggactc

SEQ ID NO: 571643 - DNA, 558 bp, Homo sapiens
tcttctttgttaatattttcaatgacttggaatgcattaatttttaattggggaaaatataatctttaacttaagcaatatatcctggytaccaaattttgttttccaatggtacttgagttgcttgttgtttttttctcccaattaaaggtcacaatcatggggaaatggtaccatcagtcactgctgtggaagtttaaattaacacaaatttctggagcccaacttggcaataagtaaaaaaatgcaatatttgtatattccttgtccagaaattgcactttttggaattttttaagtgaaatagtgaaatcgaggagtaatcataaaacgtctacatatgggtgtttagagctgctgttttaatgatacctgggatttgttttaatcaggtatgaaaaacatgcagacatgaacatgcttgctatgaaggaagaagtttttattatggtcagagtgctctagaaacaggaggcatcataagttatgcaggccacttgaggaagcactgaggtagtgtgagctggtgggggtgagtgagcagtgctggtgggactc

SEQ ID NO: 571644 - DNA, 558 bp, Homo sapiens
tcttctttgttaatattttcaatgacttggaatgcattaatttttaattggggaaaatataatctttaacttaagcaatatatcctggctaccaaattttgttttccaatggtacttgagttgcttgttgtttttttctcccaattaaaggtcacaatcatggggaaatggtaccatcagtcactgctgtggaagtttaaattaacacaaatttctkgagcccaacttggcaataagtaaaaaaatgcaatatttgtatattccttgtccagaaattgcactttttggaattttttaagtgaaatagtgaaatcgaggagtaatcataaaacgtctacatatgggtgtttagagctgctgttttaatgatacctgggatttgttttaatcaggtatgaaaaacatgcagacatgaacatgcttgctatgaaggaagaagtttttattatggtcagagtgctctagaaacaggaggcatcataagttatgcaggccacttgaggaagcactgaggtagtgtgagctggtgggggtgagtgagcagtgctggtgggactc

SEQ ID NO: 571645 - DNA, 558 bp, Homo sapiens
tcttctttgttaatattttcaatgacttggaatgcattaatttttaattggggaaaatataatctttaacttaagcaatatatcctggctaccaaattttgttttccaatggtacttgagttgcttgttgtttttttctcccaattaaaggtcacaatcatggggaaatggtaccatcagtcactgctgtggaagtttaaattaacacaaatttctggagcccaacttggcaataagtaaaaaaatgcaatatttgtatattccttgtccagaaattgcactttttggaattttttaagtgaaatagtgaaatcgaggagtaatmataaaacgtctacatatgggtgtttagagctgctgttttaatgatacctgggatttgttttaatcaggtatgaaaaacatgcagacatgaacatgcttgctatgaaggaagaagtttttattatggtcagagtgctctagaaacaggaggcatcataagttatgcaggccacttgaggaagcactgaggtagtgtgagctggtgggggtgagtgagcagtgctggtgggactc

SEQ ID NO: 571646 - DNA, 535 bp, Homo sapiens
aaatttgggctattaattttagcattcaggcttaatttatcagtctactttcaaataatattataccacttcacatatgatatgagattattataacattgtacttttgtgttctttcttttcaacctttacactagtgttgctatacatttttattttacatatgttataaactctataattctgcacagttattttttgctttaatcaattatgtttaaataaattaggaaatgagaaaatagtctataattgctcacttgtgatactcttaattctttcatgtacattcaagtttctatctgtatcatttctcttcagcttaaaaaaacttttaatttgtatttatttatttctcatagttttyttttttaatactttaagttctgggatacatgtgcagaacgtgcaggtttgttacataggtatacacgggccatggtggtttgctgcatccatcaacccgtcacctacattaggtatttctcctaatgctgtcccttccctagctccccagtccctgacaagctccagt

SEQ ID NO: 571647 - DNA, 548 bp, Homo sapiens
ctcccccttgaatctgggctgactttgtggaatgtgaccttctgggacttctgagcccaggctttaagaggtctggtagcttcggttatcttggagctctgagctaccccttgtaagtcaggctactctgctagagacaaaggtcctaccagctctcagctgttgctgctgtgagggccaggcatattgatttattcagcctcagtccagcctccagcctgtagaatcatgagcaaataaatggttcttgttttaagccactaggttttggggtggctttgttatgcagcaatagataattgatacaccatctgtagcaggttgattactctggcagcttgcatatgattaactcgaaacttactggggaaaygtgagcaaatttgcataaggaactcaggagtcttctgggagaaaccagaattctctcctccgagattccatattgtgaacattagtcaggataaatccaaagcccaggctatcatctagggacatgagcgtacaataaatctcctgaaataaaaccagtggagtggcagtgatca

SEQ ID NO: 571648 - DNA, 499 bp, Homo sapiens
atggcctcccagggcttacacgatctgtactgatcccagcccagcaactccctggctcctcccctacttctctccctctatctgtttgctccactggcctccttccagagcctcagacacaccagggagtttcctcccaatgcctttatcctgttgattcagcctrcagtgctcttccctcagcaccttggccagctccatcacctgcttcaaacttttgctcaattttcacttatgaggccaaccctgaccactctacttaacattgccatctgtccccatttccatcatgctcatttctttctttctttttgaaacagggtctttctctattgcccaggataaagtacagtggtgcagtcacagctcacagcaacctcaacctctcaggcttaaacaatcctcctgccttggcctccctaggagctgacacgcctggctaatttttttcaacttttttttttttttttttttgagacagagtctcactgtcacccag

SEQ ID NO: 571649 - DNA, 360 bp, Homo sapiens
catgcagcaaaggacgtatccctggaatataaaagggagaagacaatagctatacatccagattgatgggaatgtatgagcagaggagataatacatatgagaggcccaaaggtcaaagaggaaaccagagttcaaaatgtggttttgcaagctctgcttcaacggaattgtttttttgacaagcctatatttattttttttacyatcacagagggcaatttcctgcactatggttattatgcttttaaattctctaagaattctcctgtccatcagtgatctaccagtgcattcacagtgagagctgaactcttccctttatgctgtgggggacctgtgtgatctgactgctcttccat

SEQ ID NO: 571650 - DNA, 360 bp, Homo sapiens
catgcagcaaaggacgtatccctggaatataaaagggagaagacaatagctatacatccagattgatgggaatgtatgagcagaggagataatacatatgagaggcccaaaggtcaaagaggaaaccagagttcaaaatgtggttttgcaagctctgcttcaacggaattgtttttttgacaagcctatatttattttttttaccrtcacagagggcaatttcctgcactatggttattatgcttttaaattctctaagaattctcctgtccatcagtgatctaccagtgcattcacagtgagagctgaactcttccctttatgctgtgggggacctgtgtgatctgactgctcttccat

SEQ ID NO: 571651 - DNA, 360 bp, Homo sapiens
catgcagcaaaggacgtatccctggaatataaaagggagaagacaatagctatacatccagattgatgggaatgtatgagcagaggagataatacatatgagaggcccaaaggtcaaagaggaaaccagagttcaaaatgtggttttgcaagctctgcttcaacggaattgtttttttgacaagcctatatttattttttttaccatcacagagggcaatttcctgcactatgsttattatgcttttaaattctctaagaattctcctgtccatcagtgatctaccagtgcattcacagtgagagctgaactcttccctttatgctgtgggggacctgtgtgatctgactgctcttccat

SEQ ID NO: 571652 - DNA, 360 bp, Homo sapiens
catgcagcaaaggacgtatccctggaatataaaagggagaagacaatagctatacatccagattgatgggaatgtatgagcagaggagataatacatatgagaggcccaaaggtcaaagaggaaaccagagttcaaaatgtggttttgcaagctctgcttcaacggaattgtttttttgacaagcctatatttattttttttaccatcacagagggcaatttcctgcactatggttattatgcttttaaattctctaagamttctcctgtccatcagtgatctaccagtgcattcacagtgagagctgaactcttccctttatgctgtgggggacctgtgtgatctgactgctcttccat

SEQ ID NO: 571653 - DNA, 581 bp, Homo sapiens
tggacaggagcatgcttaagagcrtattgtttaattttcatattttgtgaatttttttggttttccttcttttagtgatttttagtttcattcaattttggccaaaaataacagtgtgtaagattcaaggttcaaaaatggattaagacttgttttatgagatagcaggtgttgtatccaggagaattttcttatgagctattgaaaagattgtgtattctgctgttgtgtggcatattctgtatatgtcttttaggtgtaattgttttacattgctttcaagtcctttgttcccttattaatgttctgtcatgctttattatttattactgaaaatattaaagtattctcccagtattacattacttcatttctgtcaatgcttgctttatatatttgggaaccctgataagagatataagtaggttcccagtgaatgaaacattttattataatttaatgtccttgtgtgtctattgtgagttttgacttaaactatattttataaaatatgtcagcttttgacttaatatcattagttctccagctctcatttggttaacatttgcatggaatagctt

SEQ ID NO: 571654 - DNA, 629 bp, Homo sapiens
ctgctgttaaagtgaggacattgattgggaaagtagaggatactgtaaattggatagagacatgtgagaagaccctgatgaagctgggggacactgagcatctaaactctgaggagtcttctttgccagtggaagtggactcccaatccctagtagaagcagcctccccatctccagtggtagcagccttttcacctcagtctgagaagattgactctgaattgcctgaggaaactgtattggccttccttgaggcagctgccgtgcacaacaatgctgattctcttcaggagccaccaccattgttcctctgcttctagacctataacwagactcaagtcccagcagcccctaaaggtgaggtgcaaagtgtgacccatgaagtacattatattccaaaataattacttgaacttcctaaaaatccaggaaacatgggaatggatactaagggagtgaaataatggtgaaaggaacataaagttagatcaggttgaatttattgatattaactaattaagcagaaattctgcatttactgttgcagctcaggcagttataaagtgttctaacagtcaggttagtgggttgaaacatggaccaaaaagtggcccagggtgagcaaattg

SEQ ID NO: 571655 - DNA, 668 bp, Homo sapiens
ataaagttagatcaggttgaatttattgatattaactaattaagcagaaattctgcatttactgttgcagctcaggcagttataaagtgttctaacagtcaggttagtgggttgaaacatggaccaaaaagtggcccagggtgagcaaattggaaatactggacttgccttggtttaatgtggaagagattcaaaggcttagggagattggaatgtcagagtggatttgtcatttaagaactactcacccacactggagggtctagaagacatacttttagcagtaccgtgaggaataggaataaatctgtgaggggaaccccagcatctttgaagagttctgtgattgctcttctctgcagacagtgagaactgcagtcattgaattgggaaacctaaatgcagcgggaataattggatcctaggatggtagggctaagtggtggtactcaactgccaaagacaaggtgggcatagttactgttgtggaaaaaaaatagaatcatggcaccccaaattcactmtgccacagggaaatttaagcttgagaactgagtcatgcaaaaagctgtcttctttcgttcccaaacagatagctgtattttcacatgctgactttatcatatgtagagttactgggcatgagagaaatgtgtaattgctttttc

SEQ ID NO: 571656 - DNA, 552 bp, Homo sapiens
ggatacaggacagtcatctctctgagttaagcatgtgaacacccaaaatcaaggactatagmctgtttcctgaacccttatctctctagggtacagaactttttttaagtcactggcagtttggagacaatgcttaagtgggtgggtggttctggttggtttataggtacacacgggcatccgggctggaggtggctcacacaagctcatgagagccagttgtgtaatctcttccctgcccctagttaagtgatgtcatgttggtagcttgatgttggccatggtgggagtatttatgctacaaaaatggccatttactgcaaatcaggactacccctctccctgcagcaccccagaaagctggttgttaaatacaatgagtacaccaatggccccagggcaggtttaagagtcagagaaggtataaattgctggtcaggcctggtggctcatgcctataatcccaacagtttgggagagtgaggtgggaggatcacttgagcccaggagtttgagaccagtctgggcaacatagtgggaccccatctctac

SEQ ID NO: 571657 - DNA, 588 bp, Homo sapiens
aggtataggtgtagacataggtgaaggtataggtgtagatgtaggtgaaggtgtaggtgtagatgtacatatagatgtagatgtagttatagatttatgtgtaggtgaaggtgtaggtgtagatgtagatgcaggtgtagacgtaggtgtaggtgtagatgcaggtgtaggtgaaggtgtaggtgtagatgtaggtatagatgtagatgtaggtgtaggtatagacataggtgtaggtctaggtatagacataagtaaaggtgcaggtgtggatggaggtgtagatataggtgtaggtgtaaatatagctgaaggtgtgggtgtagatgtgggtgttgatgtagatgtaggtgcagatatgggtgtaggtgcagttgtaggtgtaggtgaagttggtgtagatgaagatgtaggtgtaagtgtaggtgtagatgtaggtgtagacgtaggtgtaggtgtaagtatagacataagtgaaagtctaggtgtagatgtaggtgtagatataggtgtaagtgtagatgtaggtgaaggtatagatgtagatggggtaggtataaatgtaggtgtagatrtagatgtaggtgt

SEQ ID NO: 571658 - DNA, 552 bp, Homo sapiens
ggcagagattgcagtgagccaagattgtgcctctgcactccagcctgggccacagtttgagactccagctcaaaaaacaaaaacaaaaacaaacaacaaaaaaaaactaagtgaaagaagtcaagcattgatatgaaatgtccagaataggcaaattcatagaaacagraagtaaattagaggttgccaagggctgggggagggggaagggggtgtgcctgctaatgagtatgggattttttttggagtgatgaaaatattctggaattagataatggtgatggttgcacaaatgtgtgaatattctgaaaacgactgaattgcacactttaaaagggtaaattttgtggtatgcgaattatatttcaattaaaaaatcattgagctttactgttaaggtttatatgctgttctgcagaaggaggtaaaaggaaatacatttatataatctaaaagaggatcaagaatgtatatcttactttttaataaaatagtcaatagacaaaacaaacaactgtaatgcatcattattgattggccctagtgtttaca

SEQ ID NO: 571659 - DNA, 552 bp, Homo sapiens
ggcagagattgcagtgagccaagattgtgcctctgcactccagcctgggccacagtttgagactccagctcaaaaaacaaaaacaaaaacaaacaacaaaaaaaaactaagtgaaagaagtcaagcattgatatgaaatgtccagaataggcaaattcatagaaacagaaagtaaattagaggttgccaagggctgggggagggggaagggggtgtgcctgctaatgagtatgggattttttttggagtgatgaaaatattctggaattagataatggtgatggttgcacaaatgtgtgaatattctgaaaacgactgaattgcacactttaaaagggtaaattttgtggtatgygaattatatttcaattaaaaaatcattgagctttactgttaaggtttatatgctgttctgcagaaggaggtaaaaggaaatacatttatataatctaaaagaggatcaagaatgtatatcttactttttaataaaatagtcaatagacaaaacaaacaactgtaatgcatcattattgattggccctagtgtttaca

SEQ ID NO: 571660 - DNA, 316 bp, Homo sapiens
ttgtgtgcattcaactcacagagttgaacgttcccttagacagagcagatttgaaacactctatttgtgcaatttgcaagtgtagatttcaagcrctttaaggtcaatggcagaaaaggaaatatcttcgtttcaaaactagacagaatcattcccacaaactgcgttgtgatgtgtttgttcaactcacagagtttaacctttctgttcatagagcagttaggaaacgctctgtttgtaaagtctgtaagtggatattctgacatcttgtggccttcgttggaaacgggatttcttcctattctgctagacagat

SEQ ID NO: 571661 - DNA, 431 bp, Homo sapiens
aatcattcccacaaactgcgttgtgatgtgtttgttcaactcacagagtttaacctttctgttcatagagcagttaggaaamgctctgtttgtaaagtctgtaagtggatattctgacatcttgtggccttcgttggaaacgggatttcttcctattctgctagacagatgaattctcagtaacttccttgtgttgtgtgtattcaactcacagagttgaacgatcctttacacagagcagacttgaaacactctttttgtggaatttgcaagtggagatttcagccgctttgaggtcaatggtagaaaaggaaatatcttcgtatagaaacaagacagaatgattctcagaaactcctttgtgatgtgtgcgttcaactcacagagtttaacctttcttttcatagagcagttaggaaacactctgtttg

SEQ ID NO: 571662 - DNA, 545 bp, Homo sapiens
tttgttcaactcacagagtttaacctttctgttcatagagcagttaggaaacgctctgtttgtaaagtctgyaagtggatattctgacatcttgtggccttcgttggaaacgggatttcttcctattctgctagacagatgaattctcagtaacttccttgtgttgtgtgtattcaactcacagagttgaacgatcctttacacagagcagacttgaaacactctttttgtggaatttgcaagtggagatttcagccgctttgaggtcaatggtagaaaaggaaatatcttcgtatagaaacaagacagaatgattctcagaaactcctttgtgatgtgtgcgttcaactcacagagtttaacctttcttttcatagagcagttaggaaacactctgtttgtaaagtctgcaagtggatattcagacctccttgaggccttcgttggaaacgggatttcttcatattctgctagacagaagaattctcagtcacttccttgtgttgtgtgtattcaactcacagtgttgaacgatcctttacaca

SEQ ID NO: 571663 - DNA, 422 bp, Homo sapiens
gtgttgtgtgcattcaactcacagagttgaacgttcccttagacagagcagatttgaaacactctatttgtgcaatttgcaagtgtagatttcaagcgctttaaggtcaatggcagaaaaggaaatatcttcgtttcaaaactagacagaatcattcccacaaactgcgttgtgatgtgtttgttcaactcacagagtttaacctttctgttcatagagcagttaggaaacgctctgtttgtaaagtctgtaagtggatattctgacatyttgtggccttcgttggaaacgggatttcttcctattctgctagacagatgaattctcagtaacttccttgtgttgtgtgtattcaactcacagagttgaacgatcctttacacagagcagacttgaaacactctttttgtggaatttgcaag

SEQ ID NO: 571664 - DNA, 422 bp, Homo sapiens
gtgttgtgtgcattcaactcacagagttgaacgttcccttagacagagcagatttgaaacactctatttgtgcaatttgcaagtgtagatttcaagcgctttaaggtcaatggcagaaaaggaaatatcttcgtttcaaaactagacagaatcattcccacaaactgcgttgtgatgtgtttgttcaactcacagagtttaacctttctgttcatagagcagttaggaaacgctctgtttgtaaagtctgtaagtggatattctgacatcttgtggccttcgttggaaaygggatttcttcctattctgctagacagatgaattctcagtaacttccttgtgttgtgtgtattcaactcacagagttgaacgatcctttacacagagcagacttgaaacactctttttgtggaatttgcaag

SEQ ID NO: 571665 - DNA, 297 bp, Homo sapiens
gaattctcagtaacttccttgtgttgtgtgyattcaactcacagagttgaacgatcctttacacagagcagacttgaaacactctttttgtggaatttgcaagtggagatttcagccgctttgaggtcaatggtagaaaaggaaatatcttcgtatagaaacaagacagaatgattctcagaaactcctttgtgatgtgtgcgttcaactcacagagtttaacctttcttttcatagagcagttaggaaacactctgtttgtaaagtctgcaagtggatattcagacctccttgagg

SEQ ID NO: 571666 - DNA, 431 bp, Homo sapiens
aatcattcccacaaactgcgttgtgatgtgtttgttcaactcacagagtttaacctttctgttcatagagcagttaggaaacgctctgtttgtaaagtctgtaagtggatattctgacatcttgtggccttcgttggaaacgggatttcttcctattctgctagacagatgaattctcagtaacttccttgtgttgtgtgtattsaactcacagagttgaacgatcctttacacagagcagacttgaaacactctttttgtggaatttgcaagtggagatttcagccgctttgaggtcaatggtagaaaaggaaatatcttcgtatagaaacaagacagaatgattctcagaaactcctttgtgatgtgtgcgttcaactcacagagtttaacctttcttttcatagagcagttaggaaacactctgtttg

SEQ ID NO: 571667 - DNA, 424 bp, Homo sapiens
ctcagtaacttccttgtgttgtgtgtattcaactcacagagttraacgatcctttacacagagcagacttgaaacactctttttgtggaatttgcaagtggagatttcagccgctttgaggtcaatggtagaaaaggaaatatcttcgtatagaaacaagacagaatgattctcagaaactcctttgtgatgtgtgcgttcaactcacagagtttaacctttcttttcatagagcagttaggaaacactctgtttgtaaagtctgcaagtggatattcagacctccttgaggccttcgttggaaacgggatttcttcatattctgctagacagaagaattctcagtcacttccttgtgttgtgtgtattcaactcacagtgttgaacgatcctttacacagagcagacttgaaacactcttttt

SEQ ID NO: 571668 - DNA, 424 bp, Homo sapiens
ctcagtaacttccttgtgttgtgtgtattcaactcacagagttgaacgatcctttacacagagcwgacttgaaacactctttttgtggaatttgcaagtggagatttcagccgctttgaggtcaatggtagaaaaggaaatatcttcgtatagaaacaagacagaatgattctcagaaactcctttgtgatgtgtgcgttcaactcacagagtttaacctttcttttcatagagcagttaggaaacactctgtttgtaaagtctgcaagtggatattcagacctccttgaggccttcgttggaaacgggatttcttcatattctgctagacagaagaattctcagtcacttccttgtgttgtgtgtattcaactcacagtgttgaacgatcctttacacagagcagacttgaaacactcttttt

SEQ ID NO: 571669 - DNA, 308 bp, Homo sapiens
gaacgatcctttacacagagcagacttgaaacactctttttgtsgaatttgcaagtggagatttcagccgctttgaggtcaatggtagaaaaggaaatatcttcgtatagaaacaagacagaatgattctcagaaactcctttgtgatgtgtgcgttcaactcacagagtttaacctttcttttcatagagcagttaggaaacactctgtttgtaaagtctgcaagtggatattcagacctccttgaggccttcgttggaaacgggatttcttcatattctgctagacagaagaattctcagtcactt

SEQ ID NO: 571670 - DNA, 522 bp, Homo sapiens
cctttctgttcatagagcagttaggaaacgctctgtttgtaaagtctgtaagtggatattctgacatcttgtggccttcgttggaaacgggatttcttcctattctgctagacagatgaattctcagtaacttccttgtgttgtgtgtattcaactcacagagttgaacgatcctttacacagagcagacttgaaacactctttttgtggaawttgcaagtggagatttcagccgctttgaggtcaatggtagaaaaggaaatatcttcgtatagaaacaagacagaatgattctcagaaactcctttgtgatgtgtgcgttcaactcacagagtttaacctttcttttcatagagcagttaggaaacactctgtttgtaaagtctgcaagtggatattcagacctccttgaggccttcgttggaaacgggatttcttcatattctgctagacagaagaattctcagtcacttccttgtgttgtgtgtattcaactcacagtgttgaacgatcctttacaca

SEQ ID NO: 571671 - DNA, 530 bp, Homo sapiens
gtgatgtgtttgttcaactcacagagtttaacctttctgttcatagagcagttaggaaacgctctgtttgtaaagtctgtaagtggatattctgacatcttgtggccttcgttggaaacgggatttcttcctattctgctagacagatgaattctcagtaacttccttgtgttgtgtgtattcaactcacagagttgaacgatcctttacacagagcagacttgaaacactctttttgtggaatttgcaagtggagatttcagccgctttsaggtcaatggtagaaaaggaaatatcttcgtatagaaacaagacagaatgattctcagaaactcctttgtgatgtgtgcgttcaactcacagagtttaacctttcttttcatagagcagttaggaaacactctgtttgtaaagtctgcaagtggatattcagacctccttgaggccttcgttggaaacgggatttcttcatattctgctagacagaagaattctcagtcacttccttgtgttgtgtgtattcaactcac

SEQ ID NO: 571672 - DNA, 338 bp, Homo sapiens
ttcgttggaaacgggatttcttcctattctgctagacagatgaattctcagtaacttccttgtgttgtgtgtattcaactcacagagttgaacgatcctttacacagagcagacttgaaacactctttttgtggaatttgcaagtggagatttcagccgctttgagktcaatggtagaaaaggaaatatcttcgtatagaaacaagacagaatgattctcagaaactcctttgtgatgtgtgcgttcaactcacagagtttaacctttcttttcatagagcagttaggaaacactctgtttgtaaagtctgcaagtggatattcagacctccttgagg

SEQ ID NO: 571673 - DNA, 202 bp, Homo sapiens
gatttcagccgctttgaggtcaayggtagaaaaggaaatatcttcgtatagaaacaagacagaatgattctcagaaactcctttgtgatgtgtgcgttcaactcacagagtttaacctttcttttcatagagcagttaggaaacactctgtttgtaaagtctgcaagtggatattcagacctccttgaggccttcgttggaa

SEQ ID NO: 571674 - DNA, 430 bp, Homo sapiens
tgtgttgtgtgtattcaactcacagagttgaacgatcctttacacagagcagacttgaaacactctttttgtggaatttgcaagtggagatttcagccgctttgaggtcaatggtagaaaaggaaatatcttcgtatagaaasaagacagaatgattctcagaaactcctttgtgatgtgtgcgttcaactcacagagtttaacctttcttttcatagagcagttaggaaacactctgtttgtaaagtctgcaagtggatattcagacctccttgaggccttcgttggaaacgggatttcttcatattctgctagacagaagaattctcagtcacttccttgtgttgtgtgtattcaactcacagtgttgaacgatcctttacacagagcagacttgaaacactctttttgtggaatttgcaagtggaga

SEQ ID NO: 571675 - DNA, 197 bp, Homo sapiens
cgctttgaggtcaatggtagaaaaggaaatatcttcgtatagaaacaagacagaatgattctmagaaactcctttgtgatgtgtgcgttcaactcacagagtttaacctttcttttcatagagcagttaggaaacactctgtttgtaaagtctgcaagtggatattcagacctccttgaggccttcgttggaaacgg

SEQ ID NO: 571676 - DNA, 522 bp, Homo sapiens
cctttctgttcatagagcagttaggaaacgctctgtttgtaaagtctgtaagtggatattctgacatcttgtggccttcgttggaaacgggatttcttcctattctgctagacagatgaattctcagtaacttccttgtgttgtgtgtattcaactcacagagttgaacgatcctttacacagagcagacttgaaacactctttttgtggaatttgcaagtggagatttcagccgctttgaggtcaatggtagaaaaggaaatatcttcgtatagaaacaagacagaatgattctcaraaactcctttgtgatgtgtgcgttcaactcacagagtttaacctttcttttcatagagcagttaggaaacactctgtttgtaaagtctgcaagtggatattcagacctccttgaggccttcgttggaaacgggatttcttcatattctgctagacagaagaattctcagtcacttccttgtgttgtgtgtattcaactcacagtgttgaacgatcctttacaca

SEQ ID NO: 571677 - DNA, 197 bp, Homo sapiens
cgctttgaggtcaatggtagaaaaggaaatatcttcgtatagaaacaagacagaatgattctcagaaamtcctttgtgatgtgtgcgttcaactcacagagtttaacctttcttttcatagagcagttaggaaacactctgtttgtaaagtctgcaagtggatattcagacctccttgaggccttcgttggaaacgg

SEQ ID NO: 571678 - DNA, 463 bp, Homo sapiens
caaactgcgttgtgatgtgtttgttcaactcacagagtttaacctttctgttcatagagcagttaggaaacgctctgtttgtaaagtctgtaagtggatattctgacatcttgtggccttcgttggaaacgggatttcttcctattctgctagacagatgaattctcagtaacttccttgtgttgtgtgtattcaactcacagagttgaacgatcctttacacagagcagacttgaaacactctttttgtggaatttgcaagtggagatttcagccgctttgaggtcaatggtagaaaaggaaatatcttcgtatagaaacaagacagaatgattctcagaaactcytttgtgatgtgtgcgttcaactcacagagtttaacctttcttttcatagagcagttaggaaacactctgtttgtaaagtctgcaagtggatattcagacctccttgaggccttcgt

SEQ ID NO: 571679 - DNA, 237 bp, Homo sapiens
cttgaaacactctttttgtggaatttgcaagtggagatttcagccgctttgaggtcaatggtagaaaaggaaatatcttcgtatagaaacaagacagaatgattctcagaaactcctttgtgatgkgtgcgttcaactcacagagtttaacctttcttttcatagagcagttaggaaacactctgtttgtaaagtctgcaagtggatattcagacctccttgaggccttcgttggaa

SEQ ID NO: 571680 - DNA, 315 bp, Homo sapiens
attcaactcacagagttgaacgatcctttacacagagcagacttgaaacactctttttgtggaatttgcaagtggagatttcagccgctttgaggtcaatggtagaaaaggaaatatcttcgtatagaaacaagacagaatgattctcagaaactcctttgtgatgtgtgcgtwcaactcacagagtttaacctttcttttcatagagcagttaggaaacactctgtttgtaaagtctgcaagtggatattcagacctccttgaggccttcgttggaaacgggatttcttcatattctgctagacagaagaattc

SEQ ID NO: 571681 - DNA, 262 bp, Homo sapiens
agaatgattctcagaaactcctttgtgatgtgtgcgttcaactcayagagtttaacctttcttttcatagagcagttaggaaacactctgtttgtaaagtctgcaagtggatattcagacctccttgaggccttcgttggaaacgggatttcttcatattctgctagacagaagaattctcagtcacttccttgtgttgtgtgtattcaactcacagtgttgaacgatcctttacacagagcagacttgaaacactcttttt

SEQ ID NO: 571682 - DNA, 233 bp, Homo sapiens
cctttacacagagcagacttgaaacactctttttgtggaatttgcaagtggagatttcagccgctttgaggtcaatggtagaaaaggaaatatcttcgtatagaaacaagacagaatgattctcagaaactcctttgtgatgtgtgcgttcaactcacasagtttaacctttcttttcatagagcagttaggaaacactctgtttgtaaagtctgcaagtggatattcagacc

SEQ ID NO: 571683 - DNA, 197 bp, Homo sapiens
cgctttgaggtcaatggtagaaaaggaaatatcttcgtatagaaacaagacagaatgattctcagaaactcctttgtgatgtgtgcgttcaactcacagagtttaacytttcttttcatagagcagttaggaaacactctgtttgtaaagtctgcaagtggatattcagacctccttgaggccttcgttggaaacgg

SEQ ID NO: 571684 - DNA, 218 bp, Homo sapiens
aatggtagaaaaggaaatatcttcgtatagaaacaagacagaatgattctcagaaactcctttgtgatgtgtgcgttcaactcacagagtttaacctttcttttcakagagcagttaggaaacactctgtttgtaaagtctgcaagtggatattcagacctccttgaggccttcgttggaaacgggatttcttcatattctgctagacagaagaattc

SEQ ID NO: 571685 - DNA, 170 bp, Homo sapiens
ctcagaaactcctttgtgatgtgtgcgttcaactcacagagtttaacctttcttttcatagagcasttaggaaacactctgtttgtaaagtctgcaagtggatattcagacctccttgaggccttcgttggaaacgggatttcttcatattctgctagacagaagaattc

SEQ ID NO: 571686 - DNA, 265 bp, Homo sapiens
ctttacacagagcagacttgaaacactctttttgtggaatttgcaagtggagatttcagccgctttgaggtcaatggtagaaaaggaaatatcttcgtatagaaacaagacagaatgattctcagaaactcctttgtgatgtgtgcgttcaactcacagagtttaacctttcttttcatagagcagttrggaaacactctgtttgtaaagtctgcaagtggatattcagacctccttgaggccttcgttggaaacgggatttctt

SEQ ID NO: 571687 - DNA, 309 bp, Homo sapiens
gaattctcagtaacttccttgtgttgtgtgtattcaactcacagagttgaacgatcctttacacagagcagacttgaaacactctttttgtggaatttgcaagtggagatttcagccgctttgaggtcaatggtagaaaaggaaatatcttcgtatagaaacaagacagaatgattctcagaaactcctttgtgatgtgtgcgttcaactcacagagtttaacctttcttttcatagagcagttagkaaacactctgtttgtaaagtctgcaagtggatattcagacctccttgaggccttcgttggaa

SEQ ID NO: 571688 - DNA, 309 bp, Homo sapiens
gaattctcagtaacttccttgtgttgtgtgtattcaactcacagagttgaacgatcctttacacagagcagacttgaaacactctttttgtggaatttgcaagtggagatttcagccgctttgaggtcaatggtagaaaaggaaatatcttcgtatagaaacaagacagaatgattctcagaaactcctttgtgatgtgtgcgttcaactcacagagtttaacctttcttttcatagagcagttaggaaacactctgtttrtaaagtctgcaagtggatattcagacctccttgaggccttcgttggaa

SEQ ID NO: 571689 - DNA, 365 bp, Homo sapiens
gaatttgcaagtggagatttcagccgctttgaggtcaatggtagaaaaggaaatatcttcgtatagaaacaagacagaatgattctcagaaactcctttgtgatgtgtgcgttcaactcacagagtttaacctttcttttcatagagcagttaggaaacactctgtttgtaaagtctgcaagtgsatattcagacctccttgaggccttcgttggaaacgggatttcttcatattctgctagacagaagaattctcagtcacttccttgtgttgtgtgtattcaactcacagtgttgaacgatcctttacacagagcagacttgaaacactctttttgtggaatttgcaagtggagatttcagcc

SEQ ID NO: 571690 - DNA, 197 bp, Homo sapiens
cgctttgaggtcaatggtagaaaaggaaatatcttcgtatagaaacaagacagaatgattctcagaaactcctttgtgatgtgtgcgttcaactcacagagtttaacctttcttttcatagagcagttaggaaacactctgtttgtaaagtctgcaagtggatattcagwcctccttgaggccttcgttggaaacgg

SEQ ID NO: 571691 - DNA, 179 bp, Homo sapiens
cagagtttaacctttcttttcatagagcagttaggaaacactctgtttgtaaagtctgcaagtggatattcagacmtccttgaggccttcgttggaaacgggatttcttcatattctgctagacagaagaattctcagtcacttccttgtgttgtgtgtattcaactcacagtgttgaa

SEQ ID NO: 571692 - DNA, 288 bp, Homo sapiens
ctctttttgtggaatttgcaagtggagatttcagccgctttgaggtcaatggtagaaaaggaaatatcttcgtatagaaacaagacagaatgattctcagaaactcctttgtgatgtgtgcgttcaactcacagagtttaacctttcttttcatagagcagttaggaaacactctgtttgtaaagtctgcaagtggatattcagaccwccttgaggccttcgttggaaacgggatttcttcatattctgctagacagaagaattctcagtcacttccttgtgttgtgt

SEQ ID NO: 571693 - DNA, 181 bp, Homo sapiens
tttgtgatgtgtgcgttcaactcacagagtttaacctttcttttcatagagcagttaggaaacactctgtttgtaaagtctgcaagtggatattcagacctccttgaggmcttcgttggaaacgggatttcttcatattctgctagacagaagaattctcagtcacttccttgtgttgtgt

SEQ ID NO: 571694 - DNA, 367 bp, Homo sapiens
aactcctttgtgatgtgtgcgttcaactcacagagtttaacctttcttttcatagagcagttaggaaacactctgtttgtaaagtctgcaagtggatattcagacctccttgaggcyttcgttggaaacgggatttcttcatattctgctagacagaagaattctcagtcacttccttgtgttgtgtgtattcaactcacagtgttgaacgatcctttacacagagcagacttgaaacactctttttgtggaatttgcaagtggagatttcagccgctttgtggtcaatggtagaaaaggaaatatcttcgtatagaaactagacagaatgattctcagaaactcctttgtgatgtgggcgttgaac

SEQ ID NO: 571695 - DNA, 511 bp, Homo sapiens
attctcagtaacttccttgtgttgtgtgtattcaactcacagagttgaacgatcctttacacagagcagacttgaaacactctttttgtggaatttgcaagtggagatttcagccgctttgaggtcaatggtagaaaaggaaatatcttcgtatagaaacaagacagaatgattctcagaaactcctttgtgatgtgtgcgttcaactcacagagtttaacctttcttttcatagagcagttaggaaacactctgtttgtaaagtctgcaagtggatattcagacctccttgaggccktcgttggaaacgggatttcttcatattctgctagacagaagaattctcagtcacttccttgtgttgtgtgtattcaactcacagtgttgaacgatcctttacacagagcagacttgaaacactctttttgtggaatttgcaagtggagatttcagccgctttgtggtcaatggtagaaaaggaaatatcttcgtatagaaactagacagaatg

SEQ ID NO: 571696 - DNA, 258 bp, Homo sapiens
tttcttttcatagagcagttaggaaacactctgtttgtaaagtctgcaagtggatattcagacctccttgaggccttcgttggaaacgggatttcttcatattmtgctagacagaagaattctcagtcacttccttgtgttgtgtgtattcaactcacagtgttgaacgatcctttacacagagcagacttgaaacactctttttgtggaatttgcaagtggagatttcagccgctttgtggtcaatggtagaaaagg

SEQ ID NO: 571697 - DNA, 179 bp, Homo sapiens
cagagtttaacctttcttttcatagagcagttaggaaacactctgtttgtaaagtctgcaagtggatattcagacctccttgaggccttcgttggaaacgggatttcttcatattctgctagamagaagaattctcagtcacttccttgtgttgtgtgtattcaactcacagtgttgaa

SEQ ID NO: 571698 - DNA, 262 bp, Homo sapiens
agaatgattctcagaaactcctttgtgatgtgtgcgttcaactcacagagtttaacctttcttttcatagagcagttaggaaacactctgtttgtaaagtctgcaagtggatattcagacctccttgaggccttcgttggaaacgggatttcttcatattctgctagacagaakaattctcagtcacttccttgtgttgtgtgtattcaactcacagtgttgaacgatcctttacacagagcagacttgaaacactcttttt

SEQ ID NO: 571699 - DNA, 511 bp, Homo sapiens
attctcagtaacttccttgtgttgtgtgtattcaactcacagagttgaacgatcctttacacagagcagacttgaaacactctttttgtggaatttgcaagtggagatttcagccgctttgaggtcaatggtagaaaaggaaatatcttcgtatagaaacaagacagaatgattctcagaaactcctttgtgatgtgtgcgttcaactcacagagtttaacctttcttttcatagagcagttaggaaacactctgtttgtaaagtctgcaagtggatattcagacctccttgaggccttcgttggaaacgggatttcttcatattctgctagacagaagaattctcagtcactkccttgtgttgtgtgtattcaactcacagtgttgaacgatcctttacacagagcagacttgaaacactctttttgtggaatttgcaagtggagatttcagccgctttgtggtcaatggtagaaaaggaaatatcttcgtatagaaactagacagaatg

SEQ ID NO: 571700 - DNA, 367 bp, Homo sapiens
aactcctttgtgatgtgtgcgttcaactcacagagtttaacctttcttttcatagagcagttaggaaacactctgtttgtaaagtctgcaagtggatattcagacctccttgaggccttcgttggaaacgggatttcttcatattctgctagacagaagaattctcagtcacttccttgtgttgtgtgtwttcaactcacagtgttgaacgatcctttacacagagcagacttgaaacactctttttgtggaatttgcaagtggagatttcagccgctttgtggtcaatggtagaaaaggaaatatcttcgtatagaaactagacagaatgattctcagaaactcctttgtgatgtgggcgttgaac

SEQ ID NO: 571701 - DNA, 175 bp, Homo sapiens
aacactctgtttgtaaagtctgcaagtggatattcagacctccttgaggccttcgttggaaacgggatttcttcatattctgctagacagaagaattctcagtcacttccttgtgttgtgtgtattcaactcacagwgttgaacgatcctttacacagagcagacttgaaacact

SEQ ID NO: 571702 - DNA, 365 bp, Homo sapiens
gaatttgcaagtggagatttcagccgctttgaggtcaatggtagaaaaggaaatatcttcgtatagaaacaagacagaatgattctcagaaactcctttgtgatgtgtgcgttcaactcacagagtttaacctttcttttcatagagcagttaggaaacactctgtttgtaaagtctgcaagtggatattcagacctccttgaggccttcgttggaaacgggatttcttcatattctgctagacagaagaattctcagtcacttccttgtgttgtgtgtattcaactcacagtgttsaacgatcctttacacagagcagacttgaaacactctttttgtggaatttgcaagtggagatttcagcc

SEQ ID NO: 571703 - DNA, 347 bp, Homo sapiens
gaatttgcaagtggagatttcagccgctttgaggtcaatggtagaaaaggaaatatcttcgtatagaaacaagacagaatgattctcagaaactcctttgtgatgtgtgcgttcaactcacagagtttaacctttcttttcatagagcagttaggaaacactctgtttgtaaagtctgcaagtggatattcagacctccttgaggccttcgttggaaacgggatttcttcatattctgctagacagaagaattctcagtcacttccttgtgttgtgtgtattcaactcacagtgttgaaygatcctttacacagagcagacttgaaacactctttttgtggaatttg

SEQ ID NO: 571704 - DNA, 258 bp, Homo sapiens
tttcttttcatagagcagttaggaaacactctgtttgtaaagtctgcaagtggatattcagacctccttgaggccttcgttggaaacgggatttcttcatattctgctagacagaagaattctcagtcacttccttgtgttgtgtgtattcaactcacagtgttgaacgatsctttacacagagcagacttgaaacactctttttgtggaatttgcaagtggagatttcagccgctttgtggtcaatggtagaaaagg

SEQ ID NO: 571705 - DNA, 258 bp, Homo sapiens
tttcttttcatagagcagttaggaaacactctgtttgtaaagtctgcaagtggatattcagacctccttgaggccttcgttggaaacgggatttcttcatattctgctagacagaagaattctcagtcacttccttgtgttgtgtgtattcaactcacagtgttgaacgatcctttacacagagcagacttgaaacactctttttgtggaatttgcargtggagatttcagccgctttgtggtcaatggtagaaaagg

SEQ ID NO: 571706 - DNA, 367 bp, Homo sapiens
aactcctttgtgatgtgtgcgttcaactcacagagtttaacctttcttttcatagagcagttaggaaacactctgtttgtaaagtctgcaagtggatattcagacctccttgaggccttcgttggaaacgggatttcttcatattctgctagacagaagaattctcagtcacttccttgtgttgtgtgtattcaactcacagtgttgaacgatcctttacacagagcagacttgaaacactctttttgtggaatttgcaagtggagatttcagccgctttgwggtcaatggtagaaaaggaaatatcttcgtatagaaactagacagaatgattctcagaaactcctttgtgatgtgggcgttgaac

SEQ ID NO: 571707 - DNA, 424 bp, Homo sapiens
gaatttgcaagtggagatttcagccgctttgaggtcaatggtagaaaaggaaatatcttcgtatagaaacaagacagaatgattctcagaaactcctttgtgatgtgtgcgttcaactcacagagtttaacctttcttttcatagagcagttaggaaacactctgtttgtaaagtctgcaagtggatattcagacctccttgaggccttcgttggaaacgggatttcttcatattctgctagacagaagaattctcagtcacttccttgtgttgtgtgtattcaactcacagtgttgaacgatcctttacacagagcagacttgaaacactctttttgtggaatttgcaagtggagatttcagccgctttgtggtcaatggtagaawaggaaatatcttcgtatagaaactagacagaatgatt

SEQ ID NO: 571708 - DNA, 367 bp, Homo sapiens
aactcctttgtgatgtgtgcgttcaactcacagagtttaacctttcttttcatagagcagttaggaaacactctgtttgtaaagtctgcaagtggatattcagacctccttgaggccttcgttggaaacgggatttcttcatattctgctagacagaagaattctcagtcacttccttgtgttgtgtgtattcaactcacagtgttgaacgatcctttacacagagcagacttgaaacactctttttgtggaatttgcaagtggagatttcagccgctttgtggtcaatggtagaaaaggaaatatcttcstatagaaactagacagaatgattctcagaaactcctttgtgatgtgggcgttgaac

SEQ ID NO: 571709 - DNA, 348 bp, Homo sapiens
ctttcttttcatagagcagttaggaaacactctgtttgtaaagtctgcaagtggatattcagacctccttgaggccttcgttggaaacgggatttcttcatattctgctagacagaagaattctcagtcacttccttgtgttgtgtgtattcaactcacagtgttgaacgatcctttacacagagcagacttgaaacactctttttgtggaatttgcaagtggagatttcagccgctttgtggtcaatggtagaaaaggaaatatcttcgtatagaaactagacagaatgattctcagaaactcctttgtgatgtgkgcgttgaactcacagagtttaacctttcttt

SEQ ID NO: 571710 - DNA, 561 bp, Homo sapiens
tctttttgtggaatttgcaagtggagatttcagccgctttgaggtcaacggtagaataggaaatatcttcctatagaaactagacagaatgattctcagaaactcctttgtgatgtgtgcgttcaactcacagagtttaacctttcttttcatagagcagttaggaaacacactgtttgtaaagtctgcaagtggatattcagacctctttgaggctttcgttggaaacgggatttcttcatattctgctagacagaagaattctcagaaacttccttgtgttgtgtgtattcaactcacagagttgaatgatcctttacacagagcagacttgaaacactctttttgtggaatttgcaagtggagatttcagccgctttgaggtcaattgtagaaaaagaaatatcttcgtataaaaattagacagaatgattctcagaaactcctttgtgatgtgtgcgttcaactcacagagtttaacctttcttttcatagagcagttaggwaacactctgtttgtaaagtctgcaagtggatattcagacctctttgagaccttcg

SEQ ID NO: 571711 - DNA, 445 bp, Homo sapiens
cttcgttggaaaagggatttcttcatattctgctagacagaagaattctcaraaacttccttgtgttgtgtgtattgaactcacagagttgaacgatcctttacatagagcagactggaaacactctttttgtggaatttgcaagtggagatttcagccgctttgaggtcaacggtagaataggaaatatcttcctatagaaactagacagaatgattctcagaaactcctttgtgatgtgtgcgttcaactcacagagtttaacctgtcttttcatagagcagttaggaaacactctgtttgtaaagtctgcaagtggatattcagacctctttgaggctttcgttggaaacgggatttcttcatattctgctagacagaagaattctcagaaacttacttgtgttgtgtgtattcaactcacagagttgaatgatcctttaca

SEQ ID NO: 571712 - DNA, 445 bp, Homo sapiens
cttcgttggaaaagggatttcttcatattctgctagacagaagaattctcaaaaacttccttgtgttgtgtgtattsaactcacagagttgaacgatcctttacatagagcagactggaaacactctttttgtggaatttgcaagtggagatttcagccgctttgaggtcaacggtagaataggaaatatcttcctatagaaactagacagaatgattctcagaaactcctttgtgatgtgtgcgttcaactcacagagtttaacctgtcttttcatagagcagttaggaaacactctgtttgtaaagtctgcaagtggatattcagacctctttgaggctttcgttggaaacgggatttcttcatattctgctagacagaagaattctcagaaacttacttgtgttgtgtgtattcaactcacagagttgaatgatcctttaca

SEQ ID NO: 571713 - DNA, 258 bp, Homo sapiens
tattgaactcacagagttgaacgatcctttacayagagcagactggaaacactctttttgtggaatttgcaagtggagatttcagccgctttgaggtcaacggtagaataggaaatatcttcctatagaaactagacagaatgattctcagaaactcctttgtgatgtgtgcgttcaactcacagagtttaacctgtcttttcatagagcagttaggaaacactctgtttgtaaagtctgcaagtggatattcagacc

SEQ ID NO: 571714 - DNA, 258 bp, Homo sapiens
tattgaactcacagagttgaacgatcctttacatagagcagactkgaaacactctttttgtggaatttgcaagtggagatttcagccgctttgaggtcaacggtagaataggaaatatcttcctatagaaactagacagaatgattctcagaaactcctttgtgatgtgtgcgttcaactcacagagtttaacctgtcttttcatagagcagttaggaaacactctgtttgtaaagtctgcaagtggatattcagacc

SEQ ID NO: 571715 - DNA, 319 bp, Homo sapiens
gaattctcaaaaacttccttgtgttgtgtgtattgaactcacagagttgaacgatcctttacatagagcagactggaaacactcttkttgtggaatttgcaagtggagatttcagccgctttgaggtcaacggtagaataggaaatatcttcctatagaaactagacagaatgattctcagaaactcctttgtgatgtgtgcgttcaactcacagagtttaacctgtcttttcatagagcagttaggaaacactctgtttgtaaagtctgcaagtggatattcagacctctttgaggctttcgttggaaacgggatttc

SEQ ID NO: 571716 - DNA, 334 bp, Homo sapiens
aacgatcctttacacagagcagacttgaaacactctttttgtgraatttgcaagtggagatttcagccgctttgtggtcaatggtagaaaaggaaatatcttcgaataaagactagacagaatgattctcagaaactcctttgtgatgtgtgcgttcaactcacagagtttgacctttcttttcacagagcagttaggaaacactctgtttgtaaagtctgcaagtggatattcagacctctttgaggccatcgttggaaacgggatttcttcatattctgctagacagaagaattctcagaaacttccttgtgttgtgtgtattcaactcaca

SEQ ID NO: 571717 - DNA, 312 bp, Homo sapiens
ttacacagagcagacttgaaacactctttttgtggaatttgcaagtggagatttcagccgctttgwggtcaatggtagaaaaggaaatatcttcgaataaagactagacagaatgattctcagaaactcctttgtgatgtgtgcgttcaactcacagagtttgacctttcttttcacagagcagttaggaaacactctgtttgtaaagtctgcaagtggatattcagacctctttgaggccatcgttggaaacgggatttcttcatattctgctagacagaagaattctcagaaacttccttgtgttgtgtg

SEQ ID NO: 571718 - DNA, 416 bp, Homo sapiens
tccttctgttgtgtgtattcaactcacagagttgaacgatcctttacacagagcagacttgaaacactctttttgtggaatttgcaagtggagatttcagccgctttgtgktcaatggtagaaaaggaaatatcttcgaataaagactagacagaatgattctcagaaactcctttgtgatgtgtgcgttcaactcacagagtttgacctttcttttcacagagcagttaggaaacactctgtttgtaaagtctgcaagtggatattcagacctctttgaggccatcgttggaaacgggatttcttcatattctgctagacagaagaattctcagaaacttccttgtgttgtgtgtattcaactcacagagttgaacgatcctttacacagagcagacttgaaacactctctttgt

SEQ ID NO: 571719 - DNA, 312 bp, Homo sapiens
ttacacagagcagacttgaaacactctttttgtggaatttgcaagtggagatttcagccgctttgtggtcaatggtagaaaaggaaatatcttcgwataaagactagacagaatgattctcagaaactcctttgtgatgtgtgcgttcaactcacagagtttgacctttcttttcacagagcagttaggaaacactctgtttgtaaagtctgcaagtggatattcagacctctttgaggccatcgttggaaacgggatttcttcatattctgctagacagaagaattctcagaaacttccttgtgttgtgtg

SEQ ID NO: 571720 - DNA, 389 bp, Homo sapiens
ttacacagagcagacttgaaacactctttttgtggaatttgcaagtggagatttcagccgctttgtggtcaatggtagaaaaggaaatatcttcgaataaaractagacagaatgattctcagaaactcctttgtgatgtgtgcgttcaactcacagagtttgacctttcttttcacagagcagttaggaaacactctgtttgtaaagtctgcaagtggatattcagacctctttgaggccatcgttggaaacgggatttcttcatattctgctagacagaagaattctcagaaacttccttgtgttgtgtgtattcaactcacagagttgaacgatcctttacacagagcagacttgaaacactctctttgtggaatttgcaagtgga

SEQ ID NO: 571721 - DNA, 368 bp, Homo sapiens
gaaacactctttttgtggaatttgcaagtggagatttcagccgctttgtggtcaatggtagaaaaggaaatatcttcgaataaagactagacagaatgattctcagaaactcctttgtgatgtgtgcgttsaactcacagagtttgacctttcttttcacagagcagttaggaaacactctgtttgtaaagtctgcaagtggatattcagacctctttgaggccatcgttggaaacgggatttcttcatattctgctagacagaagaattctcagaaacttccttgtgttgtgtgtattcaactcacagagttgaacgatcctttacacagagcagacttgaaacactctctttgtggaatttgcaag

SEQ ID NO: 571722 - DNA, 362 bp, Homo sapiens
agacttgaaacactctttttgtggaatttgcaagtggagatttcagccgctttgtggtcaatggtagaaaaggaaatatcttcgaataaagactagacagaatgattctcagaaactcctttgtgatgtgtgcgttcaactcacagagtttgamctttcttttcacagagcagttaggaaacactctgtttgtaaagtctgcaagtggatattcagacctctttgaggccatcgttggaaacgggatttcttcatattctgctagacagaagaattctcagaaacttccttgtgttgtgtgtattcaactcacagagttgaacgatcctttacacagagcagacttgaaacactctctttgt

SEQ ID NO: 571723 - DNA, 270 bp, Homo sapiens
gagtttgacctttcttttcacagagcagttrggaaacactctgtttgtaaagtctgcaagtggatattcagacctctttgaggccatcgttggaaacgggatttcttcatattctgctagacagaagaattctcagaaacttccttgtgttgtgtgtattcaactcacagagttgaacgatcctttacacagagcagacttgaaacactctctttgtggaatttgcaagtggagatttcagccgctttgtggtcaatggtagaaaaggaa

SEQ ID NO: 571724 - DNA, 362 bp, Homo sapiens
agacttgaaacactctttttgtggaatttgcaagtggagatttcagccgctttgtggtcaatggtagaaaaggaaatatcttcgaataaagactagacagaatgattctcagaaactcctttgtgatgtgtgcgttcaactcacagagtttgacctttcttttcacagagcagttaggaaacactctgtttstaaagtctgcaagtggatattcagacctctttgaggccatcgttggaaacgggatttcttcatattctgctagacagaagaattctcagaaacttccttgtgttgtgtgtattcaactcacagagttgaacgatcctttacacagagcagacttgaaacactctctttgt

SEQ ID NO: 571725 - DNA, 334 bp, Homo sapiens
aacgatcctttacacagagcagacttgaaacactctttttgtggaatttgcaagtggagatttcagccgctttgtggtcaatggtagaaaaggaaatatcttcgaataaagactagacagaatgattctcagaaactcctttgtgatgtgtgcgttcaactcacagagtttgacctttcttttcacagagcagttaggaaacactctgtttgtaaagtctgcaaktggatattcagacctctttgaggccatcgttggaaacgggatttcttcatattctgctagacagaagaattctcagaaacttccttgtgttgtgtgtattcaactcaca

SEQ ID NO: 571726 - DNA, 213 bp, Homo sapiens
atgtgtgcgttcaactcacagagtttgacctttcttttcacagagcagttaggaaacactctgtttgtaaagtctgcaagtkgatattcagacctctttgaggccatcgttggaaacgggatttcttcatattctgctagacagaagaattctcagaaacttccttgtgttgtgtgtattcaactcacagagttgaacgatcctttacacaga

SEQ ID NO: 571727 - DNA, 333 bp, Homo sapiens
ctttgtggtcaatggtagaaaaggaaatatcttcgaataaagactagacagaatgattctcagaaactcctttgtgatgtgtgcgttcaactcacagagtttgacctttcttttcacagagcagttaggaaacactctgtttgtaaagtctgcaagtggatattcagacmtctttgaggccatcgttggaaacgggatttcttcatattctgctagacagaagaattctcagaaacttccttgtgttgtgtgtattcaactcacagagttgaacgatcctttacacagagcagacttgaaacactctctttgtggaatttgcaagtggagatt

SEQ ID NO: 571728 - DNA, 416 bp, Homo sapiens
tccttctgttgtgtgtattcaactcacagagttgaacgatcctttacacagagcagacttgaaacactctttttgtggaatttgcaagtggagatttcagccgctttgtggtcaatggtagaaaaggaaatatcttcgaataaagactagacagaatgattctcagaaactcctttgtgatgtgtgcgttcaactcacagagtttgacctttcttttcacagagcagttaggaaacactctgtttgtaaagtctgcaagtggatattcagacctctttgaggccatcgttggaarcgggatttcttcatattctgctagacagaagaattctcagaaacttccttgtgttgtgtgtattcaactcacagagttgaacgatcctttacacagagcagacttgaaacactctctttgt

SEQ ID NO: 571729 - DNA, 577 bp, Homo sapiens
gttgtgtgtattcaactcacagagttgaacgatcctttacacagagcagacttgaaacactctttttgtggaatttgcaagtggagatttcagccgctttgtggtcaatggtagaaaaggaaatatcttcgaataaagactagacagaatgattctcagaaactcctttgtgatgtgtgcgttcaactcacagagtttgacctttcttttcacagagcagttaggaaacactctgtttgtaaagtctgcaagtggatattcagacctctttgaggccatcgttggaaacgggatttcttcatrttctgctagacagaagaattctcagaaacttccttgtgttgtgtgtattcaactcacagagttgaacgatcctttacacagagcagacttgaaacactctctttgtggaatttgcaagtggagatttcagccgctttgtggtcaatggtagaaaaggaaatatcttcgtatagaaactagacagaatgattctcagaaactcctttgtgatgtgggcgttgaactcacagagtttaacctttcttttcatagaacagttaggaaacactctgtt

SEQ ID NO: 571730 - DNA, 389 bp, Homo sapiens
ttacacagagcagacttgaaacactctttttgtggaatttgcaagtggagatttcagccgctttgtggtcaatggtagaaaaggaaatatcttcgaataaagactagacagaatgattctcagaaactcctttgtgatgtgtgcgttcaactcacagagtttgacctttcttttcacagagcagttaggaaacactctgtttgtaaagtctgcaagtggatattcagacctctttgaggccatcgttggaaacgggatttcttcatattmtgctagacagaagaattctcagaaacttccttgtgttgtgtgtattcaactcacagagttgaacgatcctttacacagagcagacttgaaacactctctttgtggaatttgcaagtgga

SEQ ID NO: 571731 - DNA, 213 bp, Homo sapiens
atgtgtgcgttcaactcacagagtttgacctttcttttcacagagcagttaggaaacactctgtttgtaaagtctgcaagtggatattcagacctctttgaggccatcgttggaaacgggatttcttcatattctgctagacagaagaattctcakaaacttccttgtgttgtgtgtattcaactcacagagttgaacgatcctttacacaga

SEQ ID NO: 571732 - DNA, 333 bp, Homo sapiens
ctttgtggtcaatggtagaaaaggaaatatcttcgaataaagactagacagaatgattctcagaaactcctttgtgatgtgtgcgttcaactcacagagtttgacctttcttttcacagagcagttaggaaacactctgtttgtaaagtctgcaagtggatattcagacctctttgaggccatcgttggaaacgggatttcttcatattctgctagacagaagaattctcagaaacttccttgtgttgtgtgtwttcaactcacagagttgaacgatcctttacacagagcagacttgaaacactctctttgtggaatttgcaagtggagatt

SEQ ID NO: 571733 - DNA, 285 bp, Homo sapiens
acagaatgattctcagaaactcctttgtgatgtgtgcgttcaactcacagagtttgacctttcttttcacagagcagttaggaaacactctgtttgtaaagtctgcaagtggatattcagacctctttgaggccatcgttggaaacgggatttcttcatattctgctagacagaagaattctcagaaacttccttgtgttgtgtgtattcaactcacagagttgaaygatcctttacacagagcagacttgaaacactctctttgtggaatttgcaagtggagat

SEQ ID NO: 571734 - DNA, 285 bp, Homo sapiens
acagaatgattctcagaaactcctttgtgatgtgtgcgttcaactcacagagtttgacctttcttttcacagagcagttaggaaacactctgtttgtaaagtctgcaagtggatattcagacctctttgaggccatcgttggaaacgggatttcttcatattctgctagacagaagaattctcagaaacttccttgtgttgtgtgtattcaactcacagagttgaacgatsctttacacagagcagacttgaaacactctctttgtggaatttgcaagtggagat

SEQ ID NO: 571735 - DNA, 368 bp, Homo sapiens
tgacctttcttttcacagagcagttaggaaacactctgtttgtaaagtctgcaagtggatattcagacctctttgaggccatcgttggaaacgggatttcttcatattctgctagacagaagaattctcagaaacttccttgtgttgtgtgtattcaactcacagagttgaacgatcctttacacagagcagacttgaaacactctytttgtggaatttgcaagtggagatttcagccgctttgtggtcaatggtagaaaaggaaatatcttcgtatagaaactagacagaatgattctcagaaactcctttgtgatgtgggcgttgaactcacagagtttaacctttcttttcatagaacagttagg

SEQ ID NO: 571736 - DNA, 440 bp, Homo sapiens
gacttgaaacactctttttgtggaatttgcaagtggagatttcagccgctttgtggtcaatggtagaaaaggaaatatcttcgaataaagactagacagaatgattctcagaaactcctttgtgatgtgtgcgttcaactcacagagtttgacctttcttttcacagagcagttaggaaacactctgtttgtaaagtctgcaagtggatattcagacctctttgaggccatcgttggaaacgggatttcttcatattctgctagacagaagaattctcagaaacttccttgtgttgtgtgtattcaactcacagagttgaacgatcctttacacagagcagacttgaaacactctctttgtggaatttgcaagtggagatttcagccgctttgwggtcaatggtagaaaaggaaatatcttcgtatagaaactagacaga

SEQ ID NO: 571737 - DNA, 440 bp, Homo sapiens
gacttgaaacactctttttgtggaatttgcaagtggagatttcagccgctttgtggtcaatggtagaaaaggaaatatcttcgaataaagactagacagaatgattctcagaaactcctttgtgatgtgtgcgttcaactcacagagtttgacctttcttttcacagagcagttaggaaacactctgtttgtaaagtctgcaagtggatattcagacctctttgaggccatcgttggaaacgggatttcttcatattctgctagacagaagaattctcagaaacttccttgtgttgtgtgtattcaactcacagagttgaacgatcctttacacagagcagacttgaaacactctctttgtggaatttgcaagtggagatttcagccgctttgtggtcaatggtagaawaggaaatatcttcgtatagaaactagacaga

SEQ ID NO: 571738 - DNA, 577 bp, Homo sapiens
gttgtgtgtattcaactcacagagttgaacgatcctttacacagagcagacttgaaacactctttttgtggaatttgcaagtggagatttcagccgctttgtggtcaatggtagaaaaggaaatatcttcgaataaagactagacagaatgattctcagaaactcctttgtgatgtgtgcgttcaactcacagagtttgacctttcttttcacagagcagttaggaaacactctgtttgtaaagtctgcaagtggatattcagacctctttgaggccatcgttggaaacgggatttcttcatattctgctagacagaagaattctcagaaacttccttgtgttgtgtgtattcaactcacagagttgaacgatcctttacacagagcagacttgaaacactctctttgtggaatttgcaagtggagatttcagccgctttgtggtcaatggtagaaaaggaaatatcttcstatagaaactagacagaatgattctcagaaactcctttgtgatgtgggcgttgaactcacagagtttaacctttcttttcatagaacagttaggaaacactctgtt

SEQ ID NO: 571739 - DNA, 276 bp, Homo sapiens
cactctgtttgtaaagtctgcaagtggatattcagacctctttgaggccatcgttggaaacgggatttcttcatattctgctagacagaagaattctcagaaacttccttgtgttgtgtgtattcaactcacagagttgaacgatcctttacacagagcagacttgaaacactctctttgtggaatttgcaagtggagatttcagccgctttgtggtcaatggtagaaaaggaaatatcttcgtataraaactagacagaatgattctcagaaact

SEQ ID NO: 571740 - DNA, 276 bp, Homo sapiens
cactctgtttgtaaagtctgcaagtggatattcagacctctttgaggccatcgttggaaacgggatttcttcatattctgctagacagaagaattctcagaaacttccttgtgttgtgtgtattcaactcacagagttgaacgatcctttacacagagcagacttgaaacactctctttgtggaatttgcaagtggagatttcagccgctttgtggtcaatggtagaaaaggaaatatcttcgtatagaractagacagaatgattctcagaaact

SEQ ID NO: 571741 - DNA, 368 bp, Homo sapiens
tgacctttcttttcacagagcagttaggaaacactctgtttgtaaagtctgcaagtggatattcagacctctttgaggccatcgttggaaacgggatttcttcatattctgctagacagaagaattctcagaaacttccttgtgttgtgtgtattcaactcacagagttgaacgatcctttacacagagcagacttgaaacactctctttgtggaatttgcaagtggagatttcagccgctttgtggtcaatggtagaaaaggaaatatcttcgtatagaaactagacagaatgattctcagaaactcctttgtgatgtgkgcgttgaactcacagagtttaacctttcttttcatagaacagttagg

SEQ ID NO: 571742 - DNA, 380 bp, Homo sapiens
tctcagtcacttccttgtgttgtgtgtattcaactgacagagttgaactttcatttagagagagcagatttgaaacactgtttttgtggaatttgcaartggagatttcaagcgctttggggccaaaggcagaaaaggatatatcttcgtataacaactggacagaatcattctcagaaactgctgcgtgatgtgtgcgttcaactctcagagtttaacttttcttttcattcagcggtttggaaacactctgtttgtaaagtctgcacgtggatattttgaccacttagaggccttcgttggaaacgggtttttttcatgtaaggctagacagaagaattcccagtaacttccttgtgttgtgtgcattcaactcacag

SEQ ID NO: 571743 - DNA, 568 bp, Homo sapiens
agaagaattctcagtcacttccttgtgttgtgtgtattcaactgacagagttgaactttcatttagagagagcagatttgaaacactgtttttgtggaatttgcaagtggagatttcaagcgctttggggccaaaggcagaaaaggatatatcttcgtataacaactggacagaatcattctcagaaactgctgcgtgatgtgtgygttcaactctcagagtttaacttttcttttcattcagcggtttggaaacactctgtttgtaaagtctgcacgtggatattttgaccacttagaggccttcgttggaaacgggtttttttcatgtaaggctagacagaagaattcccagtaacttccttgtgttgtgtgcattcaactcacagagttgaacgttcccttagacagagcagatttgaaacactctatttgtgcaatttgcaagtgtagatttcaagcgctttaaggtcaatggcagaaaaggaaatatcttcgtttcaaaactacacagaatcattcccacaaactgcgttgtgatgtgttcgttcaactcacagagtttaacc

SEQ ID NO: 571744 - DNA, 478 bp, Homo sapiens
actttcatttagagagagcagatttgaaacactgtttttgtggaatttgcaagtggagatttcaagcgctttggggccaaaggcagaaaaggatatatcttcgtataacaactggacagaatcattctcagaaactgctgcgtgatgtgtgcgttcaactctcagagtttaacttttcttttcattcagcggtttggaaacactctgtttgtaaagtctgcacgtggatattttgaccacttagaggccttcgttggaaacgggtttttttcatgtaaggctagacagaagaattcccagtaacttccttgtgttgtgtgcattcaactcacagagttgaacgttcccttagacagagcagatttgaaacactctatttgtgcaatttgcaagtgtagatttcaagcgctttaaggtcaatggcagaaaaggaaatatcttcgtttyaaaactacacagaatcattcccacaaactgc

SEQ ID NO: 571745 - DNA, 187 bp, Homo sapiens
tttaacctttctgttcatagagcagttaggaaacactgtgtttgtaaagtctgyaagtggatattctgacatcttgtggccttcgttggaaacgggatttcttcattttctgctagacagaagaattctcagtaacttccttgtgttgtgtgtattcaactcacagagttgaacgatgctttacaca

SEQ ID NO: 571746 - DNA, 457 bp, Homo sapiens
gggtttttttcatgtaaggctagacagaagaattcccagtaacttccttgtgttgtgtgcattcaactcacagagttgaacgttcccttagacagagcagatttgaaacactctatttgtgcaatttgcaagtgtagatttcaagcgctttaaggtcaatggcagaaaaggaaatatcttcgtttcaaaactacacagaatcattcccacaaactgcgttgtgatgtgttcgttcaactcacagagtttaacctttctgttcatagagcagttaggaaacactgtgtttgtaaagtctgtaagtggatattctgacatcttgtggccttcgttggaaacgggatttcttcattttctgctagacagaagaattctcagtaacttccttgtgttgtgtgtattcaactsacagagttgaacgatgctttacacagagcagacttgaaacactcttttt

SEQ ID NO: 571747 - DNA, 479 bp, Homo sapiens
ccagtaacttccttgtgttgtgtgcattcaactcacagagttgaacgttcccttagacagagcagatttgaaacactctatttgtgcaatttgcaagtgtagatttcaagcgctttaaggtcaatggcagaaaaggaaatatcttcgtttcaaaactacacagaatcattcccacaaactgcgttgtgatgtgttcgttcaactcacagagtttaacctttctgttcatagagcagttaggaaacactgtgtttgtaaagtctgtaagtggatattctgacatcttgtggccttcgttggaaacgggatttcttcattttctgctagacagaagaattctcagtaacttccttgtgttgtgtgtattcaactcacagagttgaacgatgctttacacagagcagacttraaacactctttttgtggaatttgcaagtggagatttcagccgctttgaggtcaatggtagaaaaggaaat

SEQ ID NO: 571748 - DNA, 367 bp, Homo sapiens
cctttctgttcatagagcagttaggaaacactgtgtttgtaaagtctgtaagtggatattctgacatcttgtggccttcgttggaaacgggatttcttcattttctgctagacagaagaattctcagtaacttccttgtgttgtgtgtattcaactcacagagttgaacgatgctttacacagagcagacttgwaacactctttttgtggaatttgcaagtggagatttcagccgctttgaggtcaatggtagaaaaggaaatatgttcgtaaagaaacaagacagaatgattctcagaaactcctttgtgatgtgtgcgttcaactcacagagtttaacctttcttttcatagagcagttaggaaa

SEQ ID NO: 571749 - DNA, 367 bp, Homo sapiens
cctttctgttcatagagcagttaggaaacactgtgtttgtaaagtctgtaagtggatattctgacatcttgtggccttcgttggaaacgggatttcttcattttctgctagacagaagaattctcagtaacttccttgtgttgtgtgtattcaactcacagagttgaacgatgctttacacagagcagacttgaaacactctttttgtggaatttgcaagtggagatttcagccgctttgaggtcaawggtagaaaaggaaatatgttcgtaaagaaacaagacagaatgattctcagaaactcctttgtgatgtgtgcgttcaactcacagagtttaacctttcttttcatagagcagttaggaaa

SEQ ID NO: 571750 - DNA, 280 bp, Homo sapiens
aacgggatttcttcattttctgctagacagaagaattctcagtaacttccttgtgttgtgtgtattcaactcacagagttgaacgatgctttacacagagcagacttgaaacactctttttgtggaatttgcaagtggagatttcagccgctttgaggtcaatggtagaawaggaaatatgttcgtaaagaaacaagacagaatgattctcagaaactcctttgtgatgtgtgcgttcaactcacagagtttaacctttcttttcatagagcagttagga

SEQ ID NO: 571751 - DNA, 280 bp, Homo sapiens
aacgggatttcttcattttctgctagacagaagaattctcagtaacttccttgtgttgtgtgtattcaactcacagagttgaacgatgctttacacagagcagacttgaaacactctttttgtggaatttgcaagtggagatttcagccgctttgaggtcaatggtagaaaaggaaatatsttcgtaaagaaacaagacagaatgattctcagaaactcctttgtgatgtgtgcgttcaactcacagagtttaacctttcttttcatagagcagttagga

SEQ ID NO: 571752 - DNA, 280 bp, Homo sapiens
aacgggatttcttcattttctgctagacagaagaattctcagtaacttccttgtgttgtgtgtattcaactcacagagttgaacgatgctttacacagagcagacttgaaacactctttttgtggaatttgcaagtggagatttcagccgctttgaggtcaatggtagaaaaggaaatatgttcgtawagaaacaagacagaatgattctcagaaactcctttgtgatgtgtgcgttcaactcacagagtttaacctttcttttcatagagcagttagga

SEQ ID NO: 571753 - DNA, 367 bp, Homo sapiens
cctttctgttcatagagcagttaggaaacactgtgtttgtaaagtctgtaagtggatattctgacatcttgtggccttcgttggaaacgggatttcttcattttctgctagacagaagaattctcagtaacttccttgtgttgtgtgtattcaactcacagagttgaacgatgctttacacagagcagacttgaaacactctttttgtggaatttgcaagtggagatttcagccgctttgaggtcaatggtagaaaaggaaatatgttcgtaaagaaacwagacagaatgattctcagaaactcctttgtgatgtgtgcgttcaactcacagagtttaacctttcttttcatagagcagttaggaaa

SEQ ID NO: 571754 - DNA, 209 bp, Homo sapiens
gaattctcagtaacttccttgtgttgtgtgtattcaactcacagagttgaacgatgctttacacagagcagacttgaaacactctttttgtggaatttgcaagtggagatttcagccgctttgaggtcaatggtagaaaaggaaatatgttcgtaaagaaacaagacagaatgattctcakaaactcctttgtgatgtgtgcgttcaac

SEQ ID NO: 571755 - DNA, 571 bp, Homo sapiens
gaggtcaggagttcaagaccagcctggccaacatggtgaaaccctgtctctacaaaaaacacaaaaattagccagatgtggtggtgggctcctgtaatcccagctactcaggaggctgaggcaggagaactgcttgaaccagggaggtggaggttgcagtgagccgagatcgtgccattgcattccagcctggcaacagaccaagaatccatctcaaaacaaacaaacaaacaaattccacrtcttgcaaattcatcttccaaaatgaaagaaaaactgacactcccccagaaacaaaacttgcggatatttataaccagtagacttgccctacaaaaaatggaaaataggatcattcaagtttaaaacaaaatgcaatatggtaatttgaatccatttcaataaagatcaccagtaaaaagacatgagcaaaactaaaagtcaatattgtaattttagtttgtaaccacacttttattttttacatgattttaacaacaaatacataagaagattaacaagctatataatcaggcacatagtgtgtgaagatgcaatttgtgatgtcaat

SEQ ID NO: 571756 - DNA, 491 bp, Homo sapiens
aatggaatctaccagaatggaatggaatggaatggaatggaatggactgtacccgagtggaatggaatggaatggaatcgtaaggcgtggaatggaatgaaacggaatagaatggaatggaatcaaatcgcgtggaatggaatggaatggaactgaatcaaacagagtgaaacggaatggaatggaatggaatggaatggaatggaatggaatggaatcaccccgaatggaatggagtggaatggaatggaatggaatggaatggaatgaaatggaatggaatggaatggaatggaatggaacgaaatggaatggaatggaatggaatcaacccgagtgcaattgaaaggaatcgaatggaatagaaaggattggaatggattcaacmcgaatggagtggaaaggaatggaatcaacccgagtggaatggcatggaatggaatggaatgcaatggaatggaatggaatgcaatggaatggaatggaatggt

SEQ ID NO: 571757 - DNA, 504 bp, Homo sapiens
atagaacaaaaaacaatataaaaaatttatcactaaaaaattttaatataaccacctatgcaactctaaaaggaaattaaaactaattttcacaatatatagaaaagaacaataatgaaaactttgcatttgattgaataagacaaagctgttgtcagaggaaaattcatgattgtaaatgttttgctaataaacaagcaaaatttatataaaatatattacttaagtatctaattcaagaaattagtaaaggaatttaaaaaaaaagctaaagaaatcataacaaagggaagatataggcacctgaagaaaaatacctaaagaagccatttgtaattttccacaaktaaatttgagaatctctacagtgatttcttaataaaatataaatgattaaaatgtaccctaagagagaaattataagaagatcaattgtaaatgaagaaatagaacagtttcctaaaaactatccaccttcaaaagtacacatattttcacagaaga

SEQ ID NO: 571758 - DNA, 503 bp, Homo sapiens
aatctgaaaagcacagaaaactacaaaggtaaaaataaacaactatattcctatggtaccttcttttagcattttkctctatatccttccagccatttttctatataggtatagggcaagttggaagtcttgatctgcagcaaaggaccttattttagaggcaaaaaatatattagtgttagtgaatagatgtagaagaaattgaaatctgtgaactctgagaattcaggggacgatgtaccgatcactgacaccttggggagaaacagacaatggggagataaactgtgaaatgtgcccattgctggaacttgaagagtggatgaggagtttgatggaatggtatggaggggccaaatgccactgaatcactcaggcaccctcctcccccagtcaccttaatcatgccctgtttatacaaacaatagcacaatgagaaaaatgtagatacaactggaggaacccacccaggaaaagtgtttggtagagttttgcagaagata

SEQ ID NO: 571759 - DNA, 503 bp, Homo sapiens
aatctgaaaagcacagaaaactacaaaggtaaaaataaacaactatattcctatggtaccttcttttagcatttttctstatatccttccagccatttttctatataggtatagggcaagttggaagtcttgatctgcagcaaaggaccttattttagaggcaaaaaatatattagtgttagtgaatagatgtagaagaaattgaaatctgtgaactctgagaattcaggggacgatgtaccgatcactgacaccttggggagaaacagacaatggggagataaactgtgaaatgtgcccattgctggaacttgaagagtggatgaggagtttgatggaatggtatggaggggccaaatgccactgaatcactcaggcaccctcctcccccagtcaccttaatcatgccctgtttatacaaacaatagcacaatgagaaaaatgtagatacaactggaggaacccacccaggaaaagtgtttggtagagttttgcagaagata

SEQ ID NO: 571760 - DNA, 466 bp, Homo sapiens
actactggaatcttggtattctgcacatataaaacccatattaaggatcctgtgtcattttgacagaactagaaccyaataaaattagtggcagatatgaacctaaatgatgcctctctttatgtcatcttttacctagtacttattgatatcccttataagtatacttaaaaattagtgggtgcattttgctttcaactacataaattacatgaaaataaacataagaaaatgtaataaaatgtttactgtggaaggtgagacatgggagatttgctattttccctttatgattttcaattccccccctcaattttttaccctacactaacacatattacagtgaattcatattatatttgctattttccctttatgatttgctattttccctttatgattttcaattccaccccccccaattttttaccctacactaacacatattacagcgaattcatattat

SEQ ID NO: 571761 - DNA, 466 bp, Homo sapiens
actactggaatcttggtattctgcacatataaaacccatattaaggatcctgtgtcattttgacagaactagaacctaataaaattagtggcagatatgaacctaaatsatgcctctctttatgtcatcttttacctagtacttattgatatcccttataagtatacttaaaaattagtgggtgcattttgctttcaactacataaattacatgaaaataaacataagaaaatgtaataaaatgtttactgtggaaggtgagacatgggagatttgctattttccctttatgattttcaattccccccctcaattttttaccctacactaacacatattacagtgaattcatattatatttgctattttccctttatgatttgctattttccctttatgattttcaattccaccccccccaattttttaccctacactaacacatattacagcgaattcatattat

SEQ ID NO: 571762 - DNA, 568 bp, Homo sapiens
gagctccattgtttgtcatttgtttcttttctcttgttgcctttaggatcctttatccttgacttttgggagtttaattattaaatgccttgtggtagtcttctttggtttaagtctgcttggtgttttatacccttcttgtacttcaatcttgttatctttctctaggtttgggaagttgtctgatattatccttttgaatagactttctacccctatctctttctctacctcctctttaaagccaaaaactcttagatttgccctttcgragctatttttagatcctataaacatggatcattttttttattcttttttcttttgtctcttctgattgtgtattttcaactagcctgtcttcaagctcactaattctttcttctgcttgattaattctgctattaaaggaatactgcactcttaagaatgatgcattctgaaatatgcccattgtagttgtcagttccagaatttctttttgattcttttaaattatttcaatctctttgttgaatttttctgatagaattcagaattcctcctctgtgttatcttgaatttcttt

SEQ ID NO: 571763 - DNA, 602 bp, Homo sapiens
ttaaaaaataatctttatttcttgcaaattgtatgttaagtgctatgtcaagggctttatttcatttcattcataatttaatattgrcccaatttaaaacatgagatatccaagattcacagaagtcaaacttggacaagtttataaaactagtgcatatcatcatttaaacccagttttgtctgactccaaagcccttcttccaatcatggcatgatatcagtttcacaggaaggagtagttagttgccttgaagtggtacagtcccctaatcttcaataggagatactgaaaactttgaattttcacaaacaagacaaagaagggaaggaatttcagtgatatggtttggctgtgtccccacccaaatcatatcgtgaattgtaactcccacaattcccacgtgtcataacaggaactcagtgggaggtaattgaattatggagacaggtctttcctgtgctgttcttgtaatagtgaatgagtctcatgagatctgatgattttaaaaacgggagtttccatgcacaagctctctctttgcctgctgccatccatgtaagacatgacttgctcctccttgccttctgtcatgattgtga

SEQ ID NO: 571764 - DNA, 602 bp, Homo sapiens
ttaaaaaataatctttatttcttgcaaattgtatgttaagtgctatgtcaagggctttatttcatttcattcataatttaatattggcccaatttaaaacatgagatatccaagattcacagaagtcaaacttggacaagtttataaaactagtgcatatcatcatttaaacccagttttgtctgactccaaagcccttcttccaatcatggcatgatatcagtttcacaggaaggagtagttagttgccttgaagtggtacagtcccctaatcttcaataggagatactgaaaactttgaattttcacaaacaagacaaagaagggaaggaatttcagtgatatggtttggctgtgtccccacccaaatcatatcgtgaattgtaactcccacaattcccacgtgtcataacaggaactcagtgggaggtaattgaattatggagacaggtctttcctgtgctgttcttgtaatagtgaatgagtctcatgagatctgatgattttaaaaacgggagwttccatgcacaagctctctctttgcctgctgccatccatgtaagacatgacttgctcctccttgccttctgtcatgattgtga

SEQ ID NO: 571765 - DNA, 592 bp, Homo sapiens
gtggtgatggatatgtcctatctgtactgcctgatacagaagccacatgtggctgttgagcacttgcaatgtggcaggtgcagttgaagaactgaatttcagtttacatttaaatacccacacaaggctagtagccaccatattggacagcagcagccctagagcttttattaaaattaaatattcccaaggaaatgaagaagtagtatcagaaacaaaaatgttcgctttgttgtattaaaagtgttcattcctaagggatgtcccctcagaatatctagaagattctttcagaccagatttgagatataaaaaaggcagtcagctgggcgtggtggctcacacctgtaatcccagcactttgggaggctgaggcaggtggatcacgaggtcaggagttcaagaccagtctgggcaacatggtgaaaccccgtctctactaaaatacaaaaaattagctgggcgtggctgcatgcgcctgtagtcccagctactcaggaggctgaggcaggagaattgcttgagcycaggaggcagaggttgcaatgagctgagattgcgccactgcaccccagcctgggcgacggagcaa

SEQ ID NO: 571766 - DNA, 515 bp, Homo sapiens
tctctttttgtagaatgtgcaagtggacacttggagcggtttgaggtctatggtggaaaaggaaatatcttcacataaaaactagacagaagaattctgagaaacttcattgtgatgtgtgcattcatctcacagaattgaacctttcttttgattgagcagtttggaaacactcttttttgtagaatctgcaagtggacatttggaacgctttgcttcctctggtaaaaaaggaaatatcttcacctaaattgtagacagaagcaatctgagaaacttctttgtgatgtgtgcatgcatctcccaaaattaaacctttatttgattgagcagttttgaatctctctttttgtcgagtctgcaagtggacatttggaacgctttgaagcctatggtggaaaacaaaatatgtttatataaaaaccagacagaagaattttgtggatctacattgtgatgtgtgcgttcttctcacrgagctgaacctttcttttgattgagcagttttgaaacac

SEQ ID NO: 571767 - DNA, 540 bp, Homo sapiens
ttctgggacagtgtgaatcgctcagtgcgtcagcagcagcgtgccctcctaggcccgtggctttcaggcccccaggggacagacagggaccaaycccggctggacacagctgggctcgctgagctgcccctctgcccctgcagggaccctcgcagcggctccaaagccagctccatcgacacaggcacccccaagagcgagcagcccgaatccgtgtccacaagtgacgagggctactatgattccttctcgccaggacttgaggaggacaagaaggaagctgagagcccaggcactcctgccgccaccttcccacgggacagctacagtggggacgccctctacgagctcttccacgaccccagcgagggtcctcttggccccagcccagatgatgacctgtgcgtgtctgagagtctgtcagggccggccctggggacgccactgtccatatgcagcttccgagtgggggccgaggagaacttggccccagcaccaggccctgacctgctcagccagggcttcctacagagctcctgg

SEQ ID NO: 571768 - DNA, 487 bp, Homo sapiens
gtggtggcgggtgcctgtagtcccagctacttgggaggctgaggcagaagaatggcatgaacccgggaggcgaagcttgcggtgagccgagatcgcgtcactgcactccagcctgggcgacagagcgagactccatctcaaaaaaataaaaaaataaaaaagttaacataataaactctataaatatgtacttgcctctccactccttaaaaaagacataagattatatgaagcagtgtattgatctgtttgtaacatatggaaacmcaatatgtgcaacattagtaatgcacacatacacacaaagaagagagtagcgctatgtaagagtaaagtttctatatctgactagaattaagtagtataaatctgaagtagattttacaagctaagatgaatattgtaagccctagagcaagcactaagaaaagaacttacatagtaaaaaaaaaaaaaaaaaaaaaagcattaaaaagattaaactgtc

SEQ ID NO: 571769 - DNA, 524 bp, Homo sapiens
aagttaaattgtttttttagattttatttataagtgagatcatgcagtatttgtctttctgtgcctggcttatttcacttagcataaygtcctctgggttcatgcatgttgtcacaaatgacagaaatttccttcttttttaaagctgaatagtgttccactgggtatatacaatacattatgtttatccgttcatctactgaagaacactgaggttgcttccacatcttggcttttgtgagcaatgctgcaatgaacatggtagtgcagacatctctttgacacactgatttcatttcctttggatacatactcagtagtgggattgctggatcatatagttctatttttcattttttgaggaacttccacactgttttccataatggctgtgttaatttacattcccaccaacagtgtacaagggtccccttctctcacatccttgccaacatttgttgtcttttgtctttttgataacagccatcctaagtgtgaagtaatatctcattgtttaatttgcg

SEQ ID NO: 571770 - DNA, 524 bp, Homo sapiens
aagttaaattgtttttttagattttatttataagtgagatcatgcagtatttgtctttctgtgcctggcttatttcacttagcataacgtcctctgggttcatgcatgttgtcacaaatgacagaaatttccttcttttttaaagctgaatagtgttccactgggtatatacaatacattatgtttatccgttcatctactgaagaacactgaggttgcttccacatcttggcttttgtgagcratgctgcaatgaacatggtagtgcagacatctctttgacacactgatttcatttcctttggatacatactcagtagtgggattgctggatcatatagttctatttttcattttttgaggaacttccacactgttttccataatggctgtgttaatttacattcccaccaacagtgtacaagggtccccttctctcacatccttgccaacatttgttgtcttttgtctttttgataacagccatcctaagtgtgaagtaatatctcattgtttaatttgcg

SEQ ID NO: 571771 - DNA, 602 bp, Homo sapiens
gtacactactcaggtgatgggtgcactaaaagcccagacttcactatacagttaatcatgcatccaaaaccacttacattcccaacactattgaaattttaaaaactaaaaacaagtccagagtctggttgtttaaatacacatctcgtatgtaatgaaaaaatatataataaaaaatataaaaaattaagccttsttggaaggctatagtaactattgaggatgatgtgatattagcaaaaaattagaaattaaactattggaattggatagcaagtacaaattcatattcacgcccaattttgtaaagatagcaccacagaacagacaagaagagataatcttcaataaatgaacaaaactgatagggcacattaaaagttaaaactttgctttattaaatgacaacattgataaggtaaaaatgcaagctacaatgtgggaaaatatacctgcagtacatacatttaacaaagcatgtgtatccataacatataaattattaatgtatacattaataatgagaaaaaaaattcttataaaaaatacatttataatgagaaaatacttattttgtgaataataaaaagactgtcaactca

SEQ ID NO: 571772 - DNA, 550 bp, Homo sapiens
aagcagccagcttggtttcatgctgcaaatttttggcagacattcaactccttctgctgttttcctagccagcacatttatctatgtaatgtcaccagatccagagagggagtgaggttggaaggagggggaagaggagaaaaactgttttacaggctgccagcccttccacacatgctgttactatacaaaggatgtctagaaagccaatgtgctgcacatattcaaatgctgcaagcaaatacacacacacacacacacacacacacacacacwcactcactctctttctccccatccatccatccatccaaagaacaactgcagaaaagggaactgcctttgaaaaaaagcccataattaaagtcttgatccagaagcaatgactcccttctgaaaatgatttcagttcttgggggaagaaggtggggatactaaccctatggggaaataacctgtattctgcaaaaaagcctgagctgatctggtccctgacaactacaagcatatgctaccacagaaataaacaaagtttctgtgaagcaaaagt

SEQ ID NO: 571773 - DNA, 560 bp, Homo sapiens
tgattagttgttttatgttaaagcaacctgtagacctattagtttgttatagtcttaaattctacacctttaaatttaagttcacaggtgtcagtatggattctaacaaatctttagtttaaataacagaagacaaaaacttctccatgtattaagtgaagatgtttttagtagtttgtaattcgctgctactcaaagaagttcagaaaattgcagtggatttccaagtcaggagttacatgctttatactaaaaaaaaaaaaaaaaaaaaaaaaaaaatttctccagttgaatgttgtttctatgtttatcctgkgggttgggggggagtcatcctgtttataacccttactgctaatgccatattattaacctcttaagtggcagtggaaattggataataagtttactctcctccatgaggtttcagagaagggccaaaggatgaaatgagaacaccacattgctttgcctctttgcctctcctgtcaaagctagtcaggattgtaaaagtgcttatactttaaaatacttgagcctctgtattgggaagagggaag

SEQ ID NO: 571774 - DNA, 207 bp, Homo sapiens
ctttcagttataacatgaaagtacaaactttcagttgtaagttctgagggtctaccgtacagcatggtgactgtagttaataatattatattctatacttgaaatttgttaaggtaaaagagtagatcttcagtgttttcaccaaaggaaacaaaacataactatgagaagtgatggatgcrtggtcatcatttcacaatgtatagg

SEQ ID NO: 571775 - DNA, 618 bp, Homo sapiens
gttgctttggtatcacggtaattctggcatcataaaataagttgggaagtgttccctcatcttcaattttttggaagatttgagaattgctgttaattccttaaatgtttggtagaattcatgagtgaagctatctagtcccggacttttctttgttgttgttgtcgttttttcaactgattaaatctccttgttgttataggttagttctgactttctagtccttcatgatttggtctcaggagattatatcattataagaattttgtttcatgtttaagaaaagttatttagttgtgggaatataattgtttacagtagtcattaataattattttatttctgtggcatcagttgcaatatttcctcttttttgattttatttatttgagttttattcgttattttttaggtagtctaagggtttgtcaattttattattatttttaaacttagttttgttcattttttaaaattttatttatttatttatttttgacacagagtcctgctctgtcacccaggctggagtgcagtggtgcgatctcagctcactgcaacctccacctcccgrgttcacgtcattctcctgcctcagcctcccaagtagctgggacc

SEQ ID NO: 571776 - DNA, 583 bp, Homo sapiens
aaaatcactttcacaaaaaaggaagacaggaagcaaggaaggaacaagcaaaacatgaaacaacgagaaaacaaataacaaagtggcatgagtaagtatttacttatcaataataacattgactgtaaatgggctaagatcttcaatgaaaaggcatagartggctgaatggatttaaaaaaaaattaagacccaatgaactgctgcctacaagaaacacacttcacctataaaacaagcatagactaaacataaagtaatggaaacaaatatcgcatgtaagtagaaaccagaaaaaagcaggagtagctatacttacattagataaaatagatttcaaagagaaggaggtggctggcaagatatggccaaataggaacagctccggtctatagctcccagtgatatcagtgcagaaggcggatgatttctgcatttccatctgaggtacctagctcatctaattgggactggttagacagtgggtgcagccaacagagggtgagctgaagaagggtggggcaacacctcacctgggaagcacaaggcattggggaactcccttccctagccaagggaagcc

SEQ ID NO: 571777 - DNA, 647 bp, Homo sapiens
ctcatgccatggttttcagctccattaggtcatttaaggtcttctctacmctgtttattctagttagccattcgtctaatcttttttcaaggtttttagcttccttgcaatgggttcgaacatcctcctttagcttggagaagtctgttattaccaaccttctgaagcctgcttctgtcaactcatcaaagtcattatctgtccagctttgttccgttgttggcaaggagctgcaatccttcggaggagaagaggcactctgatttttagaactttcagcttttctgctctggtttctccccatctttgtggttttatttacctttggtctttgatgttggtgacctacagatggggttttggtgtagatgacctttttgttgatgttgatgctattcctttctgtttgttagttttccttctgacagtcaggtctcccagctgcacgtctgttggagtttgctgaagttccactccagaccgtttgcctggttatcaccagcagaggctgtagaacagcaaatattgccgaacagcaaatactactacctgatccttcctctggaagcttcatcccagagggtcagccacctatatgaggtgtctgtcggcccctactgggaagtgtctcctagttaggctacaca

SEQ ID NO: 571778 - DNA, 499 bp, Homo sapiens
aatcttcttcctcccccaccctccaagtgatgtctgatcaccctgttgcctgcagcaagaatcttgttaggccagtttagccagaatcccccttactcctgacatgtcctctgtattagttagggttctctagagggacataayaaataggatatacatatatatataaaggggagtttattaagtagtattaactcacatgatcacaaggtcccacaataggccatctgcaggctgacgagcgaggaagccagtgtgagtcccaaagctgaagaacttggagtctgatgttcaaggacaggaagcatccagcatgggagaaaaatgtaggctgggaggctaagccactctagccttttcacatttttctgcctgctttatatcctggccatgctggcagttgattagatggtgccaacccagattaagggtgggtcaaactttaccagcccactgattcaaatgttactctccttcggcaacaccctcacaggcacac

SEQ ID NO: 571779 - DNA, 523 bp, Homo sapiens
aacaagtgttggcaaggatatggagaaattgtaaccttcttatattgctgttgggaatacaaaatggttcagccacaaaatgcaaaatagttcaggaaaacagtttggcagttcctcaaaaaagttaaatgtagaattaccaattccactcctaggtatagactcaaaggaattgaaaataggtactaaaataagtacatgtgtgtgcactgttcatagtagtcgaaaggtagaaagaattcaatgtccatcaacagatgaatgtgtaaacaaattgtggtatatacatttctgggatatatattttggggtttttttggttttattgttatttttaattggcacataatatgtgrtacagtgtgatattttgatacatgtatacaatgtgtgtaatgattaaattagggtaattggcatatccatctcaaatatttatcatttctttgtattaggaacattcaaaatccacttttgtagcaatttaatccacttttgaaaatccacttttctagcgtttgcc

SEQ ID NO: 571780 - DNA, 480 bp, Homo sapiens
aatctaccataggctaacttatcagtgtgatactacatatccagaataattaatcagtagaacttgccatgctcaaataagatgtcctgtttcatgactcctattattattatcccctataattaaatgcaattcttaaacagagatgtttgagctaaattctgatgcttagaggagaaaagctctccctgatgttttagaacatgaagattgctggtgtgacatatactttactgccaagcaagtctgccaaaggtgatcacatagtctagggttggcttttacatcagagaagggagggcaggattagaatggagaatgttccaaatgtgctggtaacacttcctcccagaggagaacaatatggagcatagtgaggtagaaatgaggatgcagggatgggcctggaaaacatagggccaaaggggaaaayaaaaatcaagtgggattagaaaaaccagatgtttttaggcttattga

SEQ ID NO: 571781 - DNA, 649 bp, Homo sapiens
actatataaactgccctggtcacttttttcttcccagtcatcatggcggttgcacactgaacagttgagcaattcaacaaaagatgatatgaacaaacaatttggctgttaagacaaatggaataattggagcaaccatctgcagttgttacttgggttattttcatcagaccaatggcctctatttgaaaatatgcctagaaaagatcaactgcagtgaaaatcagatggggtcttagtcaccatgatctggcaggaaggtctattgcaaagaattcatcaccaacctgtgcctcttcctgttgcttcttaagttgctccaacattgctttaaattcagcctctttttgttctgcctcctccagtgttgcctgattctgttcttcataagccatggcmaccacagccaagatcaagttcaccagatagaaagaacccacaaagatgaccaagacgaagaagatcatgtatgttttcccggctgctcgtaaagtctgcaaagacaaaggccattttctgagtcacttgtaccaaatgaaccgggctgaaaacagctaatgggccaagttcctctgtaagggcactatttgcattttgtacaggactgtttccttgtgcagtactccttcctattgtgggcacttggtac

SEQ ID NO: 571782 - DNA, 613 bp, Homo sapiens
taatgattttcttatatatatttacaaattaaaagtgctatcccaaagttcttgatgcaatatagttttcacagacacccaacttccattcatacttcaaatctatatgccagattctggtacttgaatcaaagggacctaaaagtaagttttctgagttgtacacccctttataccactctattcttctatccttacaacgtgtctttatcaaagatattttagagctcattggtcactagatactaggtcctaytttaaattacaaggcatgttttcctttccagcatatgtccccgaaatctcctttgcaacactttcttatggttactaaactgactttattttctcaggaatgactaatagtgacatctctaacttttttcatgagtctaaagaagtatcactacatcaaattttcctttggttcctcaaataaaatgattaaaactactcaactgtaataggattgaatagtgccttaaagatcacctgattccctagactagatcgactgcaatagtcttagtagtattaagaaaatttgagttccatagatacattctggactaaatgtgtaaatatcccaagtaactcagctagggaaaaaaat

SEQ ID NO: 571783 - DNA, 536 bp, Homo sapiens
gtgagccttccatggagactgtggccacaaagggattatgaagcgcttgcttgggctccaggaaacaaagcatttataatctgattatttttctcctcacagggctgtgcagaaagagcatcagacagggaatcagaaagctggtattctggccctggctcaatcactacttatgacctattgtgtttctttttcwtttttttttttttttgagtcggattctcgctctgtcgtccaggctggagtgcaatggcacgatcttggctcactgcaacctccgtcttctgggttcaagcgattctcctgcctcagcctctagagtaactgggattacaggtgcccgccaccatgccctggctaaattttgtattttttttttttagcagagatggggtttcactatattggccaggctggtctcgaacccctgacctcaggtcgtccgcccaccttggcctcccaaagtgctgggattacaggtgtgagccactgcacccggcctgacctattgtgtttcaaatcaaatttaaggttac

SEQ ID NO: 571784 - DNA, 537 bp, Homo sapiens
tctacgttgtttttctttgtatagtctgcagatgcagattctgactcctgcaagaagtagctcactgtgacaaagccgcccttgcttttatctctttgcaaatcaaagaagggagacacgttgggagcaagccccccaaaatctggccataaactggccccaaaactggccataaacaaaatctctgcagcactgtaacatgttcatgatggccctcacacccaagctggaaggttgtgggtttacaggaatgacggcaaggaacacctggcccgcccagggtggaaaaccgcttaaaggcattcttaagccacaaacaatagcatgagcgatctgtgtcttaagggcatgttcctgctgcagttaactagcccaacctattcctttaatttggcccttcccttcttttcccataagggatacttttagttaattcaatatctatagaagyaatgctaatgactggtttgctactaataaatatgtgggtaaatctctgtttggggctctcagctctgaaggctgtgagacccctga

SEQ ID NO: 571785 - DNA, 557 bp, Homo sapiens
tttttgttgagaagttttgcattatctgtgttcactaggatattggtctgtagttttgtttttttcttgtcctgtctttgtttagttttggtatcaggataatactgaccttataagataagttgggatatgttccctttaacattaaaaaaatattttcggaaaaagattttgtagaattctccrgggaaaccatctgagcctagggttttctttgtgtgaaggttttaaactataggttagatttctctaatagatatagaacaattcaggttgtcatttcttttggggtgagttttaatactttgtggctttcaaggaattggtccatttaatttttgttgtcaaatttatgtgtatagatttgtctgtagtatttccttattcttttaacatctatggaggtctatggtgatatactttcttttattcctgatattgatagtttgtatattcattcttttttttccctttggctagaggcttattaatgttattcatcttttcaaagaaccagcttttcctatattaattttcctctatttttctgttttcaa

SEQ ID NO: 571786 - DNA, 581 bp, Homo sapiens
actcatgtgagaataacccacataattattagtaaataatacagctttttgatgtcctcagaaatcaagaaagggaatgtgtgtaggtaacaaatcttttggcaaattgagttttcagttctttgctttcaataaaattggaaaaagacttaattgccagccgatagattattacaataaattttgctgatagtttgctatatatttttggtatwtaacttggaaggagtccaaagaattgagtgacattactataacaaagttcttccattccaagataatatttatgtgaataaggttttagcacataaaattgattattagaaaggtggggaggattgatgttgagccatgtctcattctaataataagtaatactaccaacaaatatttaaacaccaattgaaaagaaaatctcatccatcttattaagaaatgcattttaatacaattttctttcttaagtctattacctataaaatgtgtaatatatttctatagcttgatcaattgtattcataagaatattaataaaaactcaatccaggagaattatttaaatgtcttaaagactcatgctc

SEQ ID NO: 571787 - DNA, 581 bp, Homo sapiens
actcatgtgagaataacccacataattattagtaaataatacagctttttgatgtcctcagaaatcaagaaagggaatgtgtgtaggtaacaaatcttttggcaaattgagttttcagttctttgctttcaataaaattggaaaaagacttaattgccagccgatagattattacaataaattttgctgatagtttgctatatatttttggtatataacttggaaggagtccaaagaattgagtgacattactataacaaagttcttccattccaagataatatttatgtgaataaggttttagcacataaaattgattattagaaaggtggggaggattgatgttgagccatgtctcattctaataataagtaatactaccaacaaatatttaaacaccaattgaaaagaaaatctcatccatcttattaagaaatgcattttaatacaattttctttcttaagtctattacctrtaaaatgtgtaatatatttctatagcttgatcaattgtattcataagaatattaataaaaactcaatccaggagaattatttaaatgtcttaaagactcatgctc

SEQ ID NO: 571788 - DNA, 566 bp, Homo sapiens
tctagaccaagaatgtacttgtaaaacaatttcaaagaagcacttaaaaataagattaaatacaaaccaacagataaaagtcacaggtgctatggttgtttgatggagaatggggaaggaaatctgtcctaaaagacattataaacacagtgacctaagtggaactaaattggatcgaggaaatgataggaataggcctcatttttctgttgaatggttcaggaacctttttttttttttttttttttttttttttkggctgctctagccactttctagctctgtagtttaggctggagtgctgtggcatgatcttggctcactgcaggttctgcctcccgcgttcaagcgattctcctgcctcagcctcctgaggagctgggactacagacacctgccaccacacctggctaattttttgtatttttagtagagacggggtttcaccatgttgggccaggatggtctccatctcctgacctcgtgatctgcccgcctcggcctcccaaagtgctgggattacaggcgtgagccaccgtgcccagccctgccacatcttttttgtt

SEQ ID NO: 571789 - DNA, 637 bp, Homo sapiens
tgaggtggtatcttgtagttttgatttgcatttcactaataattagtgatgttgggcaccttttcatgtgcttattgccatttgcatatcttctttggagaagtgtttattaagtattttgcccattttaaattgttttttgttgaattgtaagatttctctacatattctggatattaatcgcttatcaggtatatggttggtgaatattttctcccattttgtgggttatcattttcctctgttgatagtgtcttttgatgcacaaaatttttaaatcattatgcaatccaatttattgacttttgtgccctgttcctttggtgtcatatccaagaaatcattgccaactctaatatcttcaagacttgacctatgttttcttctaagaattgtatcattttaggtcttaaaaagtctttggtccattttgagttaatttttgtatackgtgttaggtaagggtccaacttgattcttctgcatgtagatattcagttttcctagtactatttgcttaaaatactacccttttccattgaaaagtcttgtcacccttgtcaagaatcatttgagttgcctttgaatttaaaatttcattggcttgttgtctaaaaggattatagtataaaaacaa

SEQ ID NO: 571790 - DNA, 477 bp, Homo sapiens
gaattctcatccaaaagttattttatcttcctgttccawggagattattttacaagaatgggcacaatctctgggctatatcttcacatgcttagtatacagaaatagaactaaaatcctttaagtctctttcttttgaatcctgagtaatacatcatttttttcaattttttttttttatttttctcctaaatatttggaaggagaagcccaagtttgataccagtgtaaggatggaagccgttctaatcttacatgaatcaaagagccctggccgggcgtgctggcttacacctgtaatcccagcactttgggaggccaaggcaggtggatcacctgtggtcgggagttcaagaccagcctgaccaacatggagaaaccctgtctctactaaaaatacaatattagctaggcgtgatagtggatacctgtaatcctagctacttgggaggctgagacaggagaattgcttgaacc

SEQ ID NO: 571791 - DNA, 647 bp, Homo sapiens
tttcagctcactataatctatgataactgagatatattctttaagttaataaagaaatgtgtatccaaaacttagcaaaaaagcaactggccatgctggaaacacaggttagtttacagagtcactaatgattgtttatgattatgctttttctagttagtgagtgtattttcagaaagctactacttaagtgaaatttgattgtgttatttgaatgtattacttataattatcatcacttcagtttttttgtcttttaaaaatactggcagccatctgactgaaacagaaggcaagggacactgtggcccaagcccaagcatggacccaggagatcatgtttcagtacctcagagagcttatttkcaacaggaattaatatgcatcttgttgctgttcagctgtagaattatagggttaaaatatattatgatttttggtattctatgctttgcaataatgattttcattctaaaattgtttattgttacgttattaaaactacaatacaatgaagcaaataagttcaattaaaatttagtaaacagttcttttttgtttttatggttaacctgaaaggcatggaaaagattacaaaagtttttacattactgggccttttctttttaaagttgaattaataccat

SEQ ID NO: 571792 - DNA, 539 bp, Homo sapiens
tgaattagccatttatttttatatcgtacaatgcaattttaaaggcaaatataaaatacttaacttgtatgcaaaattacccaaaatatacaattcatatttctttctttttttccctttttagtcagggccttgctctgtctcccaagcctgagtatagtggtgtgatcataggtcactgcagcctcacctcacctctgactcctgggctccagcaatctttctgcctcagcctccagagtagctgggaccacagacgtgtgccaccacacccagttaattttatttattcatttatttatttatttttgtagagacaggttctcactatgttgcctaggctgctcaaattcctgggctcargtgatcctcccacctcggccttccaaaatgttgtgattacaggcatgagctactacacccagcccataattagtatttcacagctcaaacacaactatctgctttattgttaacaaaacagcagaaatgctgcacaacactggctgaattgtgcttcttgtaattatgatacgtgc

SEQ ID NO: 571793 - DNA, 653 bp, Homo sapiens
gaaggatgttgatcccagatggaaacatggaaattgaggaatgaatgaagagcaacaaaaagtataaatacatccacacacatacatgtgtgcatatatgtatgggtaaaaatctgactatgtcttctakggttaaaaatatacaattaaaatacacaacaatgtacaaatggcagtgggtttgggacaaatgaaattaaaaatttaaatttgtccaagaagtagtacaaaatactaatttactttaggctttaacaagtcaagaatgcactcaatatagggtatgcactataagatttgtaaaacgatgtataactaactagctaagagtgaagaaaaatgagatagtgaaaatacttgatccaaaagaggtaagaaaaagaaacataaaacagacaggacaactggaaattaaacagtaagattataaactcaaatatatcagtaattacattgaatgtaaatagactaattacaggatgaagattgttagactagataaaaacaaaactcaactattgttttcttagagacatatttttatattgtgataattcaacaaagattgaaagtaaaaggagaaaaagtaacttttactgtgtatttactatgcaaatattaatcggaggcacaatgtatagaggcaagaatca

SEQ ID NO: 571794 - DNA, 429 bp, Homo sapiens
ttaagagggttattaagagtgcagtttcagacatgttgagctaaagcttacattagacattccaagtgaagacaaggaggagggtcttgagtctacgacccaggatacagctcagaggaaaggtctgggcctgtgatagaaacaaggaagccatgggcacctatgtgacatttacaactgcagatctggatgggctccccaggggtgtgagggtagatggggaatggcagagttctggaaacctgaggctttagggccttcccatatttagaggctgagcagggaaagagaacagcaaaggtgaaggtaaacttgattaaaagtacagaarccaaaccagaaaaagtctaaaactccttagccctgtgtggtgtcaggcatgaactgtcagtttttggccttttgctgatttgtgtttgaggaattctc

SEQ ID NO: 571795 - DNA, 483 bp, Homo sapiens
ctaacataaaaccatgtccaggaaacaaatatatgagaagagttcatttgtccacaatgataaaatctggcatttttwaaaaaaacttccctgtacagacctccctctgagaatcacagctcccttcatccctctcaccctgagtttgctcctctgggagcgagatggctgaagtagctgaatttcaaggattataacattccaaacctctagaacccatcttctggaaactcaaaatgtatgatttaaaattttatttttacttatttttggcctgaggggaagaaacctcagaaggagaaaatcacctgagaaaaagcaaatatgctgagcagtagggtctgggatgggcccgtgctcagagatgagcggagggccacataggattggaatgagccaagttgcacttgctttggctcagctataggtgttgctggactcttgtgtgaaggaagagcctgtgggccagtgttgtccttgcac

SEQ ID NO: 571796 - DNA, 483 bp, Homo sapiens
ctaacataaaaccatgtccaggaaacaaatatatgagaagagttcatttgtccacaatgataaaatctggcatttttaaaaaaaacttccctgtacagacctccctctgagaatcacagctcccttcatccctctcaccctgagtttgctcctctgggagcgagatggctgaagtagctgaatttcaaggattataacattccaaacctctagaacccatcttctggaaactcaaaatgtatgatttaaaattttatttttacttatttttggcctgaggggaagaaacctcagaaggagaaaatcacctgagaaaaagcaaatatgctgagcagtagggtctgggatgggcccgtgctcasagatgagcggagggccacataggattggaatgagccaagttgcacttgctttggctcagctataggtgttgctggactcttgtgtgaaggaagagcctgtgggccagtgttgtccttgcac

SEQ ID NO: 571797 - DNA, 512 bp, Homo sapiens
gtgaacatgaggcagggcatttattatctggcttgctgtggcctcccctgagcttgcagggcgcaggcgcatttgctcactctgcaccaccccactatccccttgccggcctgagtttgcagacggattgcttcctgcttcaatcggagcatttgtccccatagccagcctgtacattcagcttcacggccaaataaagctcacctggggccaggaagctctgcaggggacaggatgtgtgcagaaactctccatctgtcccatccccaatcacctgcagctgcttaggccccggsctgttctgactgccttgttttgcatataatgatgaaatattgaaagaaattcttctggttttgaaaacctttttgtcaaggcaccaggagcagcctggacatgtgacagaaaaccccccaggcttagagggaggagttgaagggccagtgggaaagaggaatcacttcagaggtggagcttccttgagaggtccaggaatggctcaagggtggctg

SEQ ID NO: 571798 - DNA, 513 bp, Homo sapiens
tggtaagtggttttgttctggacacagaagatttcttaacatctgaatgtgggatgtgagagacagcggggaatcaaagatgacttcacagttttagcctcagcagtcaggattaggaaggctgtgggtagaacaggttggagtggatcaggagctgttttacacgtgatgatcctgagatgcctgttgacatctgtgtggagatgttgagggggcagctggcttcgttcatctggagtcctggagagaggtcagggctagagatggaaatgtaggagccattgattggcctttrgatggtgttaaaaccgtaagaggggctgtgatcaccagtgggttgttgagagagcataatgacactcagagctaacattttatttggttttaaatgccaagcactctgctaggcacttcccagcattccctcttttcatctctaccacaaaccaatgaagtaagagctgttattttccccatgttgtagatgagaaacctgaggctctgaggggttaa

SEQ ID NO: 571799 - DNA, 585 bp, Homo sapiens
tcccatagatatgacatgtctaggtcttatctgtagaatagatacatacrctgagacaaaacacagattgtctttggtgaccagaggcagaggggaagggagaaggagggaaactggttaatgggtatgaggtttccttttgagatgcaaatgttttgaactggatagagttgtgggtgcacacattgtgaatggaccaaatgctactgaattgtgcacttaatttaattaatttatttttgagacagaatctcactctgttgcccaggcgggagtgcagtggcatgatctcggctcactgcagcctccacctcctgggttcaagtgattctcgtgccttagccttccaagtagctgggattacaggcatgtgccaccacacccagctaaattttgtatttttagtagagacagagtttgaccatgttgcccaggctggtctcaaactcctgacctcaggtgatccacccagctcagcctcccaaagtgttgggattataggtgtgagccatcgcgcccggctttgagctgtgcactttaaaacggtttatgtttcacctcaacaaaaaagaaaagtataatatt

SEQ ID NO: 571800 - DNA, 585 bp, Homo sapiens
tcccatagatatgacatgtctaggtcttatctgtagaatagatacatacaytgagacaaaacacagattgtctttggtgaccagaggcagaggggaagggagaaggagggaaactggttaatgggtatgaggtttccttttgagatgcaaatgttttgaactggatagagttgtgggtgcacacattgtgaatggaccaaatgctactgaattgtgcacttaatttaattaatttatttttgagacagaatctcactctgttgcccaggcgggagtgcagtggcatgatctcggctcactgcagcctccacctcctgggttcaagtgattctcgtgccttagccttccaagtagctgggattacaggcatgtgccaccacacccagctaaattttgtatttttagtagagacagagtttgaccatgttgcccaggctggtctcaaactcctgacctcaggtgatccacccagctcagcctcccaaagtgttgggattataggtgtgagccatcgcgcccggctttgagctgtgcactttaaaacggtttatgtttcacctcaacaaaaaagaaaagtataatatt

SEQ ID NO: 571801 - DNA, 585 bp, Homo sapiens
tcccatagatatgacatgtctaggtcttatctgtagaatagatacatacactgagacaaaacacagattgtctttggtgaccagaggcagaggggaagggagaaggagggaaaytggttaatgggtatgaggtttccttttgagatgcaaatgttttgaactggatagagttgtgggtgcacacattgtgaatggaccaaatgctactgaattgtgcacttaatttaattaatttatttttgagacagaatctcactctgttgcccaggcgggagtgcagtggcatgatctcggctcactgcagcctccacctcctgggttcaagtgattctcgtgccttagccttccaagtagctgggattacaggcatgtgccaccacacccagctaaattttgtatttttagtagagacagagtttgaccatgttgcccaggctggtctcaaactcctgacctcaggtgatccacccagctcagcctcccaaagtgttgggattataggtgtgagccatcgcgcccggctttgagctgtgcactttaaaacggtttatgtttcacctcaacaaaaaagaaaagtataatatt

SEQ ID NO: 571802 - DNA, 553 bp, Homo sapiens
aaggcctctctgtgagaagttgccatctgaccaagacctgaatggttaagaaggcactaaccttgcaaagacaggtcagaaaagcatcccaggcaagaagagctgcttgtgcaaaggccctgtggcaggaatcacattgccccatgcaagaaactgagagaagccagcatggctggagcttggagggcrcaaggacaagaatggaacaagtcacagtcagagagagagtccagggcatgctcacggagagctctgaaggccaaaagaaggagcctgaagcacattctaagcatgataggaagcggctgcagggtttgaagccagagtgacatggtgagatttgcttgtaaagaccactctggctgccacatggagggcagaatgtcaatgggccagggtggaagtggggaggccaggtagaggctccacagcctctgagtgaggccagccctcagcctgcacaccagacaccccacactctttcaacaagacccccaccctgtgcagccagcctcatggccatctctggggtaaaacataaaatacccagagg

SEQ ID NO: 571803 - DNA, 585 bp, Homo sapiens
ccatgaattccttgaggctaagacagtgtcttgttcaacctgcacaacgtccagcacacagagaactctagtgcatatttactggctgcatagccagcacccatactatcctcctcccgtccacagtgcccatatttttcttcggagaattcatctctacccctttctcagagcratcctacaccaattccagggctgggccctgattagtttaagccaattaccatctcctagcctgtcaccaccacgactggtttaagaatgggcatctattccagcaggcggcaatgtgattcatgaagacttctgctgagacctctgggaaagaggagtttcccctctcttctgaaaaagaccctgtggtcatcttcagtaagaggagaggctggagctgttgggggtgggaaagggtgtctccatgtgaaatctgaggataacccggaaggcagagagaagacataggaagactcaatccttcatgtccttgtttgagttactgattgaacattttctgaaacaagtcttattgtgggtttttaattacatatacatttacattaacaattctctttaatttgcaagcca

SEQ ID NO: 571804 - DNA, 585 bp, Homo sapiens
ccatgaattccttgaggctaagacagtgtcttgttcaacctgcacaacgtccagcacacagagaactctagtgcatatttactggctgcatagccagcacccatactatcctcctcccgtccacagtgcccatatttttcttcggagaattcatctctacccctttctcagagcaatcctacaccaattccagggctgggccctgattagtttaagccaattaccatctcctagcctgtcaccaccacgactggtttargaatgggcatctattccagcaggcggcaatgtgattcatgaagacttctgctgagacctctgggaaagaggagtttcccctctcttctgaaaaagaccctgtggtcatcttcagtaagaggagaggctggagctgttgggggtgggaaagggtgtctccatgtgaaatctgaggataacccggaaggcagagagaagacataggaagactcaatccttcatgtccttgtttgagttactgattgaacattttctgaaacaagtcttattgtgggtttttaattacatatacatttacattaacaattctctttaatttgcaagcca

SEQ ID NO: 571805 - DNA, 567 bp, Homo sapiens
tgaaagagacagagagaacagaaccaagttggaaaacgtacttcaggatatcatccagaacttccccaacctaaaaagacaggtcaacattcaaattcaggaaacacagagagccccagtaagatattccacaagaagatcaaccccaagacacataatcatcagattctccaacgtggaaatgaaggaaaaaatgttaaggtcagccagaaagaaaggccaggtcacttacaaatggaaacccatcagactaagggcagacctttcagcagaaaccctacaagccagaagagactgggggtcaatattcaacctttttttttttttttttttttttgagagagagtctctctctcgtcgcccaggctggagtgcaatagtgtgatcttggctcactgccacctccacctcctgggttccattgattctcctgcctcagcctccttagtagctgggattacaggcacctgacacgatgcccagctaattttgtatttatagcagagacggggtttcaccatgttgascaggctggtcttgaactcctgacctcaagtgatcagcaca

SEQ ID NO: 571806 - DNA, 400 bp, Homo sapiens
ttttctttgaaggttctttaattttttaagcttataaaaacataattgatatttaattttttaaatataaaaaggtagctaaagacaaagtactgatcagcaaaccctaatttaatatggattattttggaaatttaaaaatttttaacaaggtggccttctatctcatactaaagtgtaaatcaaggctctttcccagatttacacttcatacttagtaacaatctaaaaccttttcaaatcaatgaaaaaaaaaccaaaaaacaaaaaacctaccatgaccaatttaaacgacctgggaaagggtaggagaggtgaccaataatcagagccagttgcaygcagatggaaaaatgcttgctgtcactcccaaatatatccctacattacatgtaaatca

SEQ ID NO: 571807 - DNA, 585 bp, Homo sapiens
gtgctgaaaactagcaatctatcccaatcagagtattcccatactcctcgatgggaattgtgtgggaatgggcttgcagcacacctgcaagccaaggagatagagatgtgacagagtttctcctgccacttccagaagagtttcctgcaaacgtctgtctatcccaagaaaagaattagcaatattgtagcctaattgcttctgacaatcatcttaaggccacacagaaaattactctcaggatgaagctgatcatttggacatcacagcagaaagggagaagctgggtccttgaggacatggttgagctcctgtatcagaatgacgcccacaagcccctcctttctttgactgacagttacatgcrccaagatatgtcctcactgagcttgcttttctgaggtttgcagctgaaagcctcccagctcctcactatcttgtgttttactctgtgtcatggaattactctctaattactccactaataataaaggaggattaatatcatgactacaaaacacatttcattctatttgaaaatatgttttgctttccattttaaaaagattttatcccacaccatag

SEQ ID NO: 571808 - DNA, 572 bp, Homo sapiens
atatatgtatatatatagtggaaatgtaggtggcatttctcttctatttaaaatttttccatagttttcaaattttccatggtgaaattatattgrtttgaggtaataaaaaatacttaaggccagacatgatggcttacacctataatcccaacactctgggaggccgaggcgggcgaatcacctgaggtcaggagttcgagaccagcttggccaacatggtgaaaccttgtctctactaaaaatacaaaaattaaccgagcatagtgaggggcacctataagcccagctacttgggaggctgaggcaagagaatcgcttgaacctgagaggtggaggttgcagtgagctaagactgtgccattgcactctagcctgagtgacaagagcaaaactctatctaaaaaaaaaaaaaaaaaaaaacacttaaccatggcatcttttctttcactagaattctttctaaagcccagtatggtggctcacacctgtagtcctacctgagtcaggaggatcacttgagctcaagagtttgaggctgcagtgagctatgattgtgccactgcactgca

SEQ ID NO: 571809 - DNA, 572 bp, Homo sapiens
atatatgtatatatatagtggaaatgtaggtggcatttctcttctatttaaaatttttccatagttttcaaattttccatggtgaaattatattgatttgaggtaataaaaaatacttaaggccagacatgatggcttacacctataatcccaacactctgggaggccgaggcgggcgaatcacctgaggtcaggagttcgagaccagcttggccaacatggtgaaaccttgtctctactaaaaatacaaaaattaaccgagcatagtgaggggcrcctataagcccagctacttgggaggctgaggcaagagaatcgcttgaacctgagaggtggaggttgcagtgagctaagactgtgccattgcactctagcctgagtgacaagagcaaaactctatctaaaaaaaaaaaaaaaaaaaaacacttaaccatggcatcttttctttcactagaattctttctaaagcccagtatggtggctcacacctgtagtcctacctgagtcaggaggatcacttgagctcaagagtttgaggctgcagtgagctatgattgtgccactgcactgca

SEQ ID NO: 571810 - DNA, 579 bp, Homo sapiens
atgttattttcatgacttctaacagaacatcttatctattctgcagcccatggatcaaggaataattttgactttcaagtcttatttaacaaatacattttgtaaggttatagctgycttgatgatgcctctgaaacatctgggcaaaataaattgaaaacctctggaaaggattcaccattctagatgccattaagaacacttatgattcatgggaggaagtcaaaatatcaacattaacaggagtttggaacaagttgatttcagccctgatgcatgattttgaagggttcaaggccagtggaggaaataactgcagatgtggtggaaataacaagagaactagaagtggaaccagaatctctgactgagttattgtaatcttatgataaaacttgaacagatgaggagttgcttcttatgaatgagcaagaaaaggagtttcttgagatacaatatagtcctggtgaagatgctgtgaacactgttgaaatgacaatgtaagatttagaatattacataagcttaattgatacagcatcaagatttgaaataatttactccaattttgaaataagt

SEQ ID NO: 571811 - DNA, 579 bp, Homo sapiens
atgttattttcatgacttctaacagaacatcttatctattctgcagcccatggatcaaggaataattttgactttcaagtcttatttaacaaatacattttgtaaggttatagctgtcktgatgatgcctctgaaacatctgggcaaaataaattgaaaacctctggaaaggattcaccattctagatgccattaagaacacttatgattcatgggaggaagtcaaaatatcaacattaacaggagtttggaacaagttgatttcagccctgatgcatgattttgaagggttcaaggccagtggaggaaataactgcagatgtggtggaaataacaagagaactagaagtggaaccagaatctctgactgagttattgtaatcttatgataaaacttgaacagatgaggagttgcttcttatgaatgagcaagaaaaggagtttcttgagatacaatatagtcctggtgaagatgctgtgaacactgttgaaatgacaatgtaagatttagaatattacataagcttaattgatacagcatcaagatttgaaataatttactccaattttgaaataagt

SEQ ID NO: 571812 - DNA, 582 bp, Homo sapiens
gactttcaagtcttatttaacaaatacattttgtaaggttatagctgtcttgatgatgcctctgaaacatctgggcaaaataaattgaaaacctctggaaaggattcaccattctagatgccattaagaacacttatgattcatgggaggaagtcaaaatatcaacattaacaggagtttggaacaagttgatttcagccctgatgmatgattttgaagggttcaaggccagtggaggaaataactgcagatgtggtggaaataacaagagaactagaagtggaaccagaatctctgactgagttattgtaatcttatgataaaacttgaacagatgaggagttgcttcttatgaatgagcaagaaaaggagtttcttgagatacaatatagtcctggtgaagatgctgtgaacactgttgaaatgacaatgtaagatttagaatattacataagcttaattgatacagcatcaagatttgaaataatttactccaattttgaaataagttccactatgggtaaaatgttatctagtagcatcacatactacagagaaatctttcatgaaacaaagactcaa

SEQ ID NO: 571813 - DNA, 285 bp, Homo sapiens
gttgcttcttatgaatgagcaagaaaaggagtttcwtgagatacaatatagtcctggtgaagatgctgtgaacactgttgaaatgacaatgtaagatttagaatattacataagcttaattgatacagcatcaagatttgaaataatttactccaattttgaaataagttccactatgggtaaaatgttatctagtagcatcacatactacagagaaatctttcatgaaacaaagactcaatcaatgaggcaacttcattgtaggtttaagaaattggcacatcc

SEQ ID NO: 571814 - DNA, 581 bp, Homo sapiens
atgcagaatctgatataatattgataggttggtcaaaatcttgtaacactgtaatgactgcaaccaactctgctctttgagccgattgatatggagttttgattactcgttctttcggccctgtgtaagctgcttttccattgctggaaccatcagtaaatactgttagagcattttctaaaggttcacgtctggtaattttaggtagaatccaagtagtcaattttaagaactggaagatctttgtttttgggtaatgattatcaataattcccacaaaattagcaagaccaatctkccatgcaccagaattgataaaggcttgtctaacttgttccttggttaaagggacaactattttgtctgggtcatttccacataattttattattcgtaatcttgtctgaccgattaatgtagctatttgatccaagtacagtgtaaaagtcttaactgtactgtgaggaaggaatgaccactccacaagatcagtattttgaataatgatgcctgttggagaatgtgcagtggcaaaaatcaaaagttggagtggggctaagggatctattctatttatttgc

SEQ ID NO: 571815 - DNA, 581 bp, Homo sapiens
atgcagaatctgatataatattgataggttggtcaaaatcttgtaacactgtaatgactgcaaccaactctgctctttgagccgattgatatggagttttgattactcgttctttcggccctgtgtaagctgcttttccattgctggaaccatcagtaaatactgttagagcattttctaaaggttcacgtctggtaattttaggtagaatccaagtagtcaattttaagaactggaagatctttgtttttgggtaatgattatcaataattcccacaaaattagcaagaccaatcttccatgcaccagaattgataaaggcttgtctaacttgttccttggttaaagggacaactattttgtctgggtcatttccacataattttattattcgtaatcttgtctgaccgattaatgtagctatttgatccaagtacartgtaaaagtcttaactgtactgtgaggaaggaatgaccactccacaagatcagtattttgaataatgatgcctgttggagaatgtgcagtggcaaaaatcaaaagttggagtggggctaagggatctattctatttatttgc

SEQ ID NO: 571816 - DNA, 507 bp, Homo sapiens
atttacccacaccggtttttctgttttccaagttaatggtatgggtttaggaggctctatagtggccgcccctaaaaaggataccctattccttctcttttttgatttattttagcctcaaatggaattttaatgccatcttcatttttccctagtccctttcctggtatatatcccmtcttggtcatgattttttgactcgtggggctatataatggagcgggcatggtgatttccgcaccccattgttgtaataaatctcgaccccacagattaagaggaattgaagtaatcattggctgaacagtactttcttgattatctggccctaagcaatgtaaaatctccatactttgatacacttctgaggctgtgcctatgccgacaagtcctgtaacagccttttgtttaggccaattttttggccactgatttaaagcaatgatagagacatctgctccagtgtctaccaacccttcaaactgttttccttgaataatggcctta

SEQ ID NO: 571817 - DNA, 507 bp, Homo sapiens
atttacccacaccggtttttctgttttccaagttaatggtatgggtttaggaggctctatagtggccgcccctaaaaaggataccctattccttctcttttttgatttattttagcctcaaatggaattttaatgccatcttcatttttccctagtccctttcctggtatatatcccctcttggtcatgattttttgactcgtggggctatataatggagcgggcatggtgatttccgcaccccattgttgtaataaatctcgaccccacagattaagaggaattgaagtaatcattggctgaacagtactttcttgattatctggccctaagcaatgtaaaatctccrtactttgatacacttctgaggctgtgcctatgccgacaagtcctgtaacagccttttgtttaggccaattttttggccactgatttaaagcaatgatagagacatctgctccagtgtctaccaacccttcaaactgttttccttgaataatggcctta

SEQ ID NO: 571818 - DNA, 572 bp, Homo sapiens
acagtgtatagggggcactgaattgggtgtattgctgacttcagtaattttattgtttttaccagttcctcatggtagcattcacacattgatgaatggaaattatgcaggtggattcactgttacactttgtagcagattgtatcaccatgactttgaccttattctatagggctgtgtgtgatattgacatcacaatataagtgttcgccttctctcatcctgacacttcctgtttgttaggaaayggaattaggactatgttttcactatactgcaagtttttgacccttaaataatggaatccaaagagagatggtttcctcttatcagctcccagtttttccctactaactcttttctttcagagcaattattttgctcatttattcagtcccttttaattcagtattttttttagtcttatatattatttatttatttatttacttttatttattattattataccttaagttttagggtacacgtgcacaatgtgcaagttagttacatatgtatacatgtgccatgctggtgcgctgcacccactaactcgtcatctagcatta

SEQ ID NO: 571819 - DNA, 572 bp, Homo sapiens
acagtgtatagggggcactgaattgggtgtattgctgacttcagtaattttattgtttttaccagttcctcatggtagcattcacacattgatgaatggaaattatgcaggtggattcactgttacactttgtagcagattgtatcaccatgactttgaccttattctatagggctgtgtgtgatattgacatcacaatataagtgttcgccttctctcatcctgacacttcctgtttgttaggaaacggaattaggactatgttttcactatactgcaagtttttgacccttaaataatggaatccaaagagagatggtttcctcttatcagctcccagtttttccctactaactcttttctttcagagcaattattttgctcatttattcagtcccttttaattcagtattttttttagtcttatatattatttatttatttatttacttttatttattattattataccttaagttttagggtacaygtgcacaatgtgcaagttagttacatatgtatacatgtgccatgctggtgcgctgcacccactaactcgtcatctagcatta

SEQ ID NO: 571820 - DNA, 646 bp, Homo sapiens
actgttgtggggtggggggaggggggagggatagctttaggagatatacctaatgctaaatgatgagttaatgggtgcagcacactagcatggcacatgtatacatatgtaactaaccttcacaatgtgcacatgtaccctaaaacttaaagtataataataataaaagaaaaaataaataaataaataaagtgcctcatctataaatagcatatagttggaacctatttttttaccaatttgacaatctcttttaattagaatgtctcctccttcatatttattttaattrttaatattaatacattgtatttattaaacaaatatttgataagtatttaattgtttgaataataatcaatacgttaggatttagacctgccgttttgctttttcattttttctcatttattttttattccactcttccttctttactaccttttttgcatcaaatgtatacattttatatttacctgttgattttttagttatatttataagttagattttaatggttgcattattatatgaatcttaaactgaaaataatagccttcaagtaagtactgacttattgtcagtaaaataaagcaaacttattctagtttagttttatttcctatcttttactattattatttat

SEQ ID NO: 571821 - DNA, 646 bp, Homo sapiens
actgttgtggggtggggggaggggggagggatagctttaggagatatacctaatgctaaatgatgagttaatgggtgcagcacactagcatggcacatgtatacatatgtaactaaccttcacaatgtgcacatgtaccctaaaacttaaagtataataataataaaagaaaaaataaataaataaataaagtgcctcatctataaatagcatatagttggaacctatttttttaccaatttgacaatctcttttaattagaatgtctcctccttcatatttattttaattattaatattaatacattgtatttattaaacaaatatttgataagtatttaattgtttgaataataatcaatacgttaggatttagacctgccrttttgctttttcattttttctcatttattttttattccactcttccttctttactaccttttttgcatcaaatgtatacattttatatttacctgttgattttttagttatatttataagttagattttaatggttgcattattatatgaatcttaaactgaaaataatagccttcaagtaagtactgacttattgtcagtaaaataaagcaaacttattctagtttagttttatttcctatcttttactattattatttat

SEQ ID NO: 571822 - DNA, 574 bp, Homo sapiens
ctaaggttcttcattttttaaatggagtagaaattgatattagactacattaaaactgtaggtcatttttctcccagaattggctaagaaaagaaacccaatatatttaagaagagcaaacaaaataaatgagactgatttatcttttaaaacattctagagaaagggtagaacataaagtaaaaagagaagatctggttaaactgcagagagaaaaaaatagattaacttacaatatatatcaattagtctgatagcagacttctcaatagcaataacagaagccaaaatagagtcagataatatcttgaaaattctcagagaacatagcttttactttagaattcaatctgactaaactgtcattcaaaatgacagtgaaataaaggtacrtttcacaaagttcgactgagtgaatatgactaaaatccttattaaaataacttattaagaataaacttcaaaaaaagaaaaactagaataagatattaagaacagtgatgaattttaaaaactcattacatgtaccagtaaatttaataaaaacaaaaaacaaaacagacttctagtttca

SEQ ID NO: 571823 - DNA, 574 bp, Homo sapiens
ctaaggttcttcattttttaaatggagtagaaattgatattagactacattaaaactgtaggtcatttttctcccagaattggctaagaaaagaaacccaatatatttaagaagagcaaacaaaataaatgagactgatttatcttttaaaacattctagagaaagggtagaacataaagtaaaaagagaagatctggttaaactgcagagagaaaaaaatagattaacttacaatatatatcaattagtctgatagcagacttctcaatagcaataacagaagccaaaatagagtcagataatatcttgaaaattctcagagaacatagcttttactttagaattcaatctgactaaactgtcattcaaaatgacagtgaaataaaggtacgtttcacaaagttcgactgagtgaatatgactaaaatcyttattaaaataacttattaagaataaacttcaaaaaaagaaaaactagaataagatattaagaacagtgatgaattttaaaaactcattacatgtaccagtaaatttaataaaaacaaaaaacaaaacagacttctagtttca

SEQ ID NO: 571824 - DNA, 541 bp, Homo sapiens
tgacagtgaaataaaggtacgtttcacaaagttcgactgagtgaatatgactaaaatccttattaaaataacttattaagaataaacttcaaaaaaagaaaaactagaataagatattaagaacagtgatgaattttaaaaactcattacatgtaccagtaaatttaataaaaamaaaaaacaaaacagacttctagtttcagttttgacatgtagagcttggaagacatcactcctgtcctaaaatcaagcaaaagctgagcaaaccaaaattcaaccatggatttatccatgcagaactgagactgcagagcaaactaccacccaaacctggaaagagagactaatgctcaaaataatagccaagatttgcttatcgggaacagaaaccactattgacataaatggttaggaattaccatttaaataactgtgattaattgctagaggaagattgtgaactagcataaggatgaggtaactccccatgattttggtcttggaagaatccagttacttttgtgggtttcaccttcaggaa

SEQ ID NO: 571825 - DNA, 600 bp, Homo sapiens
aagaaagagatataaaaattgctggaattgattagtaaagcctgtattcatgaggaaaaacaaaaaccaacgaaaacatcaagtgttaaaatgatttaaaacacacaatcctagaggcagaaagcaacaatttacaagctgtttcacataagaaagttggggtgaaggcaactcagcatctgtacttcagatgtttgtcccccactgctgtgattaaaagaaaataataattcttggtaagaattttatgatagtatgatttattaaatttttgacagttggctgggtgcggtggctcacgcctgtaatcccagcactttgtgaggccaaggtgggtggatcacgaggtcaggagatcaagaccatcctggctaacacagtgaaaccccatctatagtaaaaatacaaaaaaattagctgggtgtggtggcgggtgcctgtagtcccagctacttgggaggctgaggcaggaaaatggcgtgaacccaggaggcagagcttgcagtgagctgaggtcgccgccactgcactccagcctgggcgacagagcaagactctgtctcaaaaaaamagagaaaatttttgacagttaatatttac

SEQ ID NO: 571826 - DNA, 590 bp, Homo sapiens
aatgatttttgtacacatctacaagcttattcaaaatgtatatagaaaggtatgaccctaaagtagctaaaacaatcttaacaagaatacagtgggatgaataacgctaccattagtaagtcttactagatagctacagtagtcaagaccatgtgatattagaagacacagaacaatgaaacagaataaagaacccaaaaatagtcccacacaaatatgytcaactgtattttaatgaagatacaaaagctacttaatggagaaaagatggcatttgaacaaatgattttggaacaattggacatccataggcaaaaaaaaaaagtaaaataatctttagcttaaatctcatgccttatagaaaattactaaaacgttatcacatctttgacgggaaatgtaagacataaaatccaatgtacacaaatcagttgcactgctgtacgccaccaacgaccaaactgagaatcaaatcacggactcaactccttttataacaactgcaaaaatagtgaaatgcttaggaatatacctaataaaggaagtaaaagatctctacaggaaaaactataaaacactgctgaaagaaa

SEQ ID NO: 571827 - DNA, 590 bp, Homo sapiens
aatgatttttgtacacatctacaagcttattcaaaatgtatatagaaaggtatgaccctaaagtagctaaaacaatcttaacaagaatacagtgggatgaataacgctaccattagtaagtcttactagatagctacagtagtcaagaccatgtgatattagaagacacagaacaatgaaacagaataaagaacccaaaaatagtcccacacaaatatgttcaactgtattttaatgaagatacaaaagctacttaatggagaaaagatggcatttgaacaaatgattttggarcaattggacatccataggcaaaaaaaaaaagtaaaataatctttagcttaaatctcatgccttatagaaaattactaaaacgttatcacatctttgacgggaaatgtaagacataaaatccaatgtacacaaatcagttgcactgctgtacgccaccaacgaccaaactgagaatcaaatcacggactcaactccttttataacaactgcaaaaatagtgaaatgcttaggaatatacctaataaaggaagtaaaagatctctacaggaaaaactataaaacactgctgaaagaaa

SEQ ID NO: 571828 - DNA, 590 bp, Homo sapiens
aatgatttttgtacacatctacaagcttattcaaaatgtatatagaaaggtatgaccctaaagtagctaaaacaatcttaacaagaatacagtgggatgaataacgctaccattagtaagtcttactagatagctacagtagtcaagaccatgtgatattagaagacacagaacaatgaaacagaataaagaacccaaaaatagtcccacacaaatatgttcaactgtattttaatgaagatacaaaagctacttaatggagaaaagatggcatttgaacaaatgattttggaacaattggacatccataggcaaaaaaaaaaagtaaaataatctttagcttaaatctcatgccttatagaaaattactaaaacrttatcacatctttgacgggaaatgtaagacataaaatccaatgtacacaaatcagttgcactgctgtacgccaccaacgaccaaactgagaatcaaatcacggactcaactccttttataacaactgcaaaaatagtgaaatgcttaggaatatacctaataaaggaagtaaaagatctctacaggaaaaactataaaacactgctgaaagaaa

SEQ ID NO: 571829 - DNA, 503 bp, Homo sapiens
aattgaaattatatcaagtatcttctctgaccacaatggaataaaactagaaatgaataacaagaggaattttgaaactatatgaacacctggaaattaaacaatatgctcctgaatgaccagtggctcaatgaagaaattaagaaggaaattttaaaatgtcttgaaacaaatgaaaatggaaacytgatgtacctaaacctgtgggatacagcaaaagcagtacagggaagtttattgcaataggcacctacatcaacaaaagcagaaaaacttcaaattagcaacctattgatacatcttaaagaactagaaaaacaagggcaaaccaaaccccaaattagtagaaggaataaagatcagagcagaaataaatgaaataaaaaaaatacaaaaatcaatgaaatgaaaagttatttttaaaaaagataaacaaaatcaacaaacctttagccagactaagaaaaaaagaagataaaataaatgaaaataaaatcagataa

SEQ ID NO: 571830 - DNA, 573 bp, Homo sapiens
cccacctccctgtaatcaattgttgttgtggacctttaaatgtccactgtgagcctaggttcaatgtcaagcaatgtgagagtgtattgtggggctttataaatgaagaaaaaggtatatcagaatgtcatccaaggctcaccatggcctgaccacaattgacttttttctttcatatatttttaaatcacagtggttattgcattcatatgtatactttcattccaacaacagagaagtgcataaaaagtgaaagtctcccgagtctctttctcgaaaagccactacttgctacactttccattcttatttgatgatgattattagctgtgaatagtcagcttatatttgtgttttgcatttattagtattatcaagtggatcaacttayttttcttataagatgtaagtagcacacatagaatatctttctctacttcatgatatttgttgtttatttttatttagtataaatattaaaattttctagtcttatttcatatgacttcccttcatttaagttattttaattagaaactatttcagatattcagaaaacttcttcaatatatt

SEQ ID NO: 571831 - DNA, 337 bp, Homo sapiens
aacattgaagatgtagaagggagaggcaataatgctataaaatgtttctggggaggcaaaaggggaaactgcacaaatggaaagggtggtttcaaacaggaatttgcagagcccatttcctggcatgagagaaaatgcagagaggtgtgctcagaggcacatggggaggtaggttccctctggggagattgagtaattctcagaagagcatcacctgacagtgattaaaaaaataaataaagagtaggyggtttcaggagagagaaaatgtcgtgaagattttcctttggagagtgagaggcaattatggaaatgttacgtgagtgttcaggagata

SEQ ID NO: 571832 - DNA, 337 bp, Homo sapiens
aacattgaagatgtagaagggagaggcaataatgctataaaatgtttctggggaggcaaaaggggaaactgcacaaatggaaagggtggtttcaaacaggaatttgcagagcccatttcctggcatgagagaaaatgcagagaggtgtgctcagaggcacatggggaggtaggttccctctggggagattgagtaattctcagaagagcatcacctgacagtgattaaaaaaataaataaagagtaggcggtttcaggagagagaaaatgtcgtgaagattttcctttggagagtgagaggcaattatggaaatgtyacgtgagtgttcaggagata

SEQ ID NO: 571833 - DNA, 559 bp, Homo sapiens
ctaacaaactagttcttatattaatggagatggaagtttgcagaatttcttcttcttgktctttttttttctaaaatagcagtgataaaatacaagataatatctagtttaaacattccaggcatggggcaagtaattgcagtatcaagggaaaactgcctcccctccagttaatggctgatatgatgatgctctaagcccccattaactatccaccccatctcttcagattagcagagctcagccatgaaaccaggactggttgccagtttcacctggggaagatggccagtaaaaactttatcatagagtattgtggaaagcatctattatctagccccctgctttctgctttccactttccaatctgttggttggtgctgctattagatttactttctagaaaccagatctataacacacatggaccacagaataaaggcttaacatcttagcctagcatttaaggttttacagcagtgtttttcaaacctcaatatgtatataaaatcacctggagatttcactaatacagattctgatccagtagacacagggg

SEQ ID NO: 571834 - DNA, 426 bp, Homo sapiens
aacagcacatcaaaaataaaatgccctacaatcaagtgagttttactacagagatgcaagaatggttaaacatatgcaaatcaataaatgtgattcaccatatcatatgaattaaaaataaaaatcatgtgatgatctcaataaatgcagaaaaggaatttcataaaattcagcatctcttcctgataaaaactctcaaaaaaactaggcatcaaaggaacaaaactcaaaataataaaaattatattcarcaaacccacagccaacagtatactggacaggatactgtttaaagcattcccctttaagaactggaacaagacaaggatgcccactttcaacactcctactcaatatagttagtactagaagttgtagctagagaactcaggagagacaaataaaacatatccaaattggaaaata

SEQ ID NO: 571835 - DNA, 426 bp, Homo sapiens
aacagcacatcaaaaataaaatgccctacaatcaagtgagttttactacagagatgcaagaatggttaaacatatgcaaatcaataaatgtgattcaccatatcatatgaattaaaaataaaaatcatgtgatgatctcaataaatgcagaaaaggaatttcataaaattcagcatctcttcctgataaaaactctcaaaaaaactaggcatcaaaggaacaaaactcaaaataataaaaattatattcagcaaacccacagccaacagtatactggacaggatactgtttaaagcattcccctttaagaactggaacaagacaaggatgcccactttcaacactcctactcaatayagttagtactagaagttgtagctagagaactcaggagagacaaataaaacatatccaaattggaaaata

SEQ ID NO: 571836 - DNA, 313 bp, Homo sapiens
tgtgaggtaatgcatatgttaattagcttgatttaaccattctgatgcaggcaaaccccaaaattggggctttgaccagttgtgtcatggctggggttgtgactcgtgcttggaacacaagtcctgctgatstacctcattttcccctcagagattatatactcctccttaatttttaagagttgcagaagggtggaagtccttgagcttgcagttcaactaactctgaattgttaacataagaacaacaggtgtggtttattactgcacatacttttccttgtcatgctacttatctgtgtgtttgtcaaac

SEQ ID NO: 571837 - DNA, 313 bp, Homo sapiens
tgtgaggtaatgcatatgttaattagcttgatttaaccattctgatgcaggcaaaccccaaaattggggctttgaccagttgtgtcatggctggggttgtgactcgtgcttggaacacaagtcctgctgatctacctcattttcccctcagagattatatactcctccttaattttwaagagttgcagaagggtggaagtccttgagcttgcagttcaactaactctgaattgttaacataagaacaacaggtgtggtttattactgcacatacttttccttgtcatgctacttatctgtgtgtttgtcaaac

SEQ ID NO: 571838 - DNA, 313 bp, Homo sapiens
tgtgaggtaatgcatatgttaattagcttgatttaaccattctgatgcaggcaaaccccaaaattggggctttgaccagttgtgtcatggctggggttgtgactcgtgcttggaacacaagtcctgctgatctacctcattttcccctcagagattatatactcctccttaatttttaagagttgcagragggtggaagtccttgagcttgcagttcaactaactctgaattgttaacataagaacaacaggtgtggtttattactgcacatacttttccttgtcatgctacttatctgtgtgtttgtcaaac

SEQ ID NO: 571839 - DNA, 313 bp, Homo sapiens
tgtgaggtaatgcatatgttaattagcttgatttaaccattctgatgcaggcaaaccccaaaattggggctttgaccagttgtgtcatggctggggttgtgactcgtgcttggaacacaagtcctgctgatctacctcattttcccctcagagattatatactcctccttaatttttaagagttgcagaagggtggaagtccttgagcttgcagttcaactaactctgaattgttarcataagaacaacaggtgtggtttattactgcacatacttttccttgtcatgctacttatctgtgtgtttgtcaaac

SEQ ID NO: 571840 - DNA, 603 bp, Homo sapiens
caagaaagaagggacattgtgtgagttccacagctgaggctctaagaagtctcgaaacttctcctctcaccttcttggaaccctgagaccaccatggtctgagaagccagtggaggatgagacatgtctaaaactcatacatcaaaatgcagcaatataaagggaagttcttaaagcagctgaatactaatctctatttgactgtcttttcctttagaattgtttatatatttagggtgtgagatttttgtyatattttgcaaatattttcattatagctcctcttttaactttgtggcattttttaaataatacacaagttttttttattttttggaggtgtttttatgcttttgaggttttgtttcttgattaagaaggacttctctcatgcaacggtttaatcttattttttttaaaaaagcaaaacaaaggaaaaaaaaagctaacagtataagcaactggttggtgcaatatggtggtagctatcaaagagagagccaggagtctaaagtagttgtctgtaaggagtggtctggagaggagagccaggcagggacttgctgcttttctgttatacctcttttttcctagcattccaac

SEQ ID NO: 571841 - DNA, 456 bp, Homo sapiens
aacaattacatcttgtttgtatttataactaagaagtcctcccggaaaactcagtactgaagggtaaatgtactgacagagtagctgagtgaccagtcaatgagcttcatctactagtaactttcagaatacctgtagtaggaacattaaaatggagttgtctcttagagaggaagagtagtgaaaaacacaattaaatcttcttaatttgatatttttccctcttgtgataattatgtcragtccataaatctatgggaactgtatgcaatattttctttttataaaatcacctaaaaataattctaaggaaatatgtgaataaaatgagaaaaaaataagattgacccagatttcatgtagtctatattcctgaacaaaatggaatcataggatatctgagctgaaggtccttagagattcgaaccaatctccttaattgtatacatcaggaaa

SEQ ID NO: 571842 - DNA, 565 bp, Homo sapiens
tgaccccaaagaaatggaggtatgtaaacaggctgaaaaataattcaacataattgcttttaaagcttcaygaagtaaaggaaaatacagagaaatcatttttaaaaaatcaggaacatagtaaaaaaccaaaatgagaaatttaacacagatattgaaaatacattaaaaatcaaataaaaaagagagaagacttataaataaaatgagaaatgaaagaagagacattacaactcataccacagaaatatgaagaatcacaaaagactactatgaacaattatagacttacaaattgaataacccaaaagaaacagataaattcctggccacatacaatctaacaagactgaattatgaagaaatagaatatatgaccaaaccaataatgaacaaagagaatgaacaaataataaaagttttccatcaaagaaaatcccaggaacggattactactaaactctaccaaacatttaaagaactaatgccaatccttctcaaactcttccaaaacaaaatgaagaggagggaatatttccaaactcattttatgaggacaacatta

SEQ ID NO: 571843 - DNA, 546 bp, Homo sapiens
tacattgtcaaaagcactgtggttacatgtatttttaatgctttagaagcacctgtcagcaagaacatctgcatcctaatagtctattttaagaaaatttaaatcatccttatgctgacgaatacagccatattccaaatatgtgcatctcataaaagctaatacatattcaatgactcattaaaatcaaacattttaaaacatcgtgattcaggacccaatacatacttttaaaataacatttcgtaatgaaaggattgtatactgtaccacatgcaaatatttatttcatttaataatgatgatcactataaaaatgcctcttaatcaaaggaaagaaatcattataccatgtgtttggcataattatttatacctctctatgaaattctatgtttgtttgagatacttgaaaattaccatgtattatatataatggttataatgttcttgaagattgtaaaycaaattttattttatttatttttttattatactttaagttttagggtacatgtgcacattgtgcaggttagttacatatgt

SEQ ID NO: 571844 - DNA, 580 bp, Homo sapiens
aagcaatggcaacaaaagctaaaatagacaaatgggatctaattaaactaaagagcttctgcacagcaaaagaaactaccatcagagtgaacatgcaacctacaaaatgccagaaagttttcgcaaccttctcatctgacaaagggctaatatccagaatctacaatgaactyaaacaaatttacaggtaaaaaacaaacaaccccatcaaaaagtgggcaaaggacatgaacagacacttctcaaaagaagacatttatgcagccaaaaaacacatggcaaaataaactttctaaattaactaagaccagtctgagattttctgggttcacaatttgaaagccttgtcttcaagctctgaagttcttttttctagttgttatagtttattgttgaaacttagcactgcattttgtatctccctaaatgtgtctttcgttcccagaagttgtgatttttttctttatgatatctctttctctagagaatttttcatccttaacttgtatttttaaaaaatttctttgagttggttttcacctttctctggtatctccttgagtagcttgataatcaagat

SEQ ID NO: 571845 - DNA, 527 bp, Homo sapiens
gagtttgagtttaaatgtcttgaggtagtctcctttaagttaaatctgctagatgttctataaccttcttgtgtttggatattgatatctttctctaggtttgggaagttctctgttattatccttttgaataaacttttacctctatatctttctctacctcctctttaaggccagtaaattaaatttgtccatttgaggctgttttctaaatattttagaaatgctctattcttttttattcttgtctcttctatttgtgttttcaaatagcctgtctccaatgtcacaacttctttttttgcattatcaattctgctattagagattctaatgcattcttcagtatgtcagttgtatttttcaaccccaggatttctccatgamtctttttaattatttcagtatttttgttaaatgttctgatagaattctgaattccttctctgtattatcttgaatttctttgagtttcctctaatctgccaggactgtgtcattcccctcaaggcaatatgttcccccct

SEQ ID NO: 571846 - DNA, 528 bp, Homo sapiens
tgcacaatgctggggaataaaataagagacttccccctgctcatctttgcaggaagcagtgatccttctcacatgcccaattcactgccgctacaacttacaaaaaatagtatttgagaaaaccattacactaaggccatctatcatcaaaaaattcatagatttggccccctgaaagtacccggaagcaaagtcaaaggaccctacacaatatatcctatagtcacaccctcaagaggggaataaatttctatccaaacaaaagtaaatccaaaaaggaaccagcataagaattctgggaccatagaaaaaaagagtattgcgacacacccaaaagatcacactacctctctagcaatggacactgctccccacatcccaggctgctccagcttcagccacagctcaaagggatcctggcacagctcaggttgtcactctagagggcacaagccataagctttggcagcttcgatgtggtattaagtctgctggtacacagagygcaagagtgaaggtggcttggca

SEQ ID NO: 571847 - DNA, 625 bp, Homo sapiens
atggagaaaccttgtctctactaaaaatacaaaattagccgggcatggtggtgcatgactgtaatcccagctactcaggaagctgatgcaggagaatcacttgaacccaggaggcagaggttgcagtgagccaagatcacaccattgcactccagcctggacaacaaggatgaaactccatctcaaaaaataaataaattttaaaaaataaataactagctgggcatggtggcacatayctgtagtctcagctacttgggaggctgaggcaagagggttgcttgagcctgggaggccaaggttgcagtgagccatgatcacacatcactgccctccagccaggataacagaataagactgtatctcagaaaacaaaggaagaaagaaagaaaaataaaattgccacagctaccccaatcttcagcaaccaccactctgatcagtcagcagccatcaacattgaggcaagatcctccaccagcaaaaacagttatggctcactgaaggatcagatgattgttaatattttttagcaataaagtatttttaaattaaggtatgtacattatctgtgttcatagacataatgctactgccacttaatagactgcagtataggataaac

SEQ ID NO: 571848 - DNA, 512 bp, Homo sapiens
aaactggttcacctagattgtgacctttaggtaccactttccactaaaatggaagctaaagtccacaatctagagactaaaggtgcttattagtactggatctgtcatyacctctagttttttcagcaaataaagctaggaactttgtattttaaaactgataaaacacatcagaatttgtaccaatatttccaattcaggaccacaggtgttaacgccatcattctcacatctgtatctcctttcatctctaccaaaaattctagttctcaacaccaaaaaagaactcattcatttcacaatacatacacttagaatctcagaagaacactatcaatatcattaacaacattattgaaaatagtacaggttgagtatacctaatctgaaaatcccaaatttgatatgctccaaaatcccaaactttttgagcaccaacgtgataactgaaatgctcattggaacattttggactttcagatttggaatgctcaagcagaataatgcaaata

SEQ ID NO: 571849 - DNA, 512 bp, Homo sapiens
aaactggttcacctagattgtgacctttaggtaccactttccactaaaatggaagctaaagtccacaatctagagactaaaggtgcttattagtactggatctgtcattacctctagttttttcagcaaataaagctaggaactttgtattttaaaactgataaaacacatcagaatttgtaccaatatttccaattcaggaccacaggtgttaacrccatcattctcacatctgtatctcctttcatctctaccaaaaattctagttctcaacaccaaaaaagaactcattcatttcacaatacatacacttagaatctcagaagaacactatcaatatcattaacaacattattgaaaatagtacaggttgagtatacctaatctgaaaatcccaaatttgatatgctccaaaatcccaaactttttgagcaccaacgtgataactgaaatgctcattggaacattttggactttcagatttggaatgctcaagcagaataatgcaaata

SEQ ID NO: 571850 - DNA, 551 bp, Homo sapiens
ttctttgaaatcactggtattgccctttattaaaatcyacttgccttattcttatttaggaattactatgttaccaaagtttcagaatcttccagactgaaagagccatgaatgaactttttgtctgactccaaatgcaccagtttctttattctccttctacactggcctcgttgttgcagcccaaaatggcagctgtatggttcaagtgggtatcctctctctgaaaatcaaagagaaaatacattctgtttcagcataacacaactattatacacttatattttacttattcttcccctattgtcgggctttcataccagaggaaatgtaaggctactgtctggtcctcaaaggagcttttgagtcaacacgatcatccagtgtaaaaaggccaagcatattccactgctgatcctatttctttccttaggatgccctatagatgaggctactggcaagaaagaacgctttttttcctactcagtctgaatttctgttttccttacagccaacacattgagtacaggtctacatatatacgcatatat

SEQ ID NO: 571851 - DNA, 574 bp, Homo sapiens
attgtggtccacagacctgcagcacctgcatcactgtgcttgttaggaatgcaaattcttgagtccctcccaaattactgaatcagaatctttagrggtaagaccaaagactctgtggtgtatcaagttcttcaggtgatgttaatgcacagaagagcttcgttcttgggaactgcgtaacctaatagcaccatctgttggtagtgactgtcccagaatgaagacataaagtcccaaaggggaagatgcccagacgttcaacttccactagctgtgatgcactctatgaaggactggaaatggacagaatgcctgatgtagagatatacacatacagatgcacacattttctctgctaaaggaaatatatgtaaacaaataaacaaacaccactacaaatttcttcttaagtacaaacaaggagctggtgaggcacagaaactgtagcaatcagattgatcagaggaagtcatgaaatgctcagaaggagtggtgacattgaaaccaagtactgtcaaattacttagccacaattatatgtgtaactaagtaaataaaaataaaacaattttta

SEQ ID NO: 571852 - DNA, 582 bp, Homo sapiens
gatcctcccacctcagcctcccaaatagctgaaaccacaggctatggggatgacagcagatgctgcttggtgaaataccaaggctgcatggcaacgtgcactcttggagaggttgtctgctatgggactgagagcaggtgccccagattgaggcagcttgggtcagaccccactctgtcccttccagctgtgtctccttgggcaattcagcgatgaactccggctcagtttactcatcatacacggcctgcaggatggatccgtgcaccttccattctcaacccagcaaccgggcaatctctaaagcccagattcagcctccttctccctattggagggtgtccttgtttccacagtaagctccaggacccgcagtaggtagacaatgctctatctgctctggtctcagtttttgttccagttaaagaccaatttcttggttccaaaggcagccaagagctattctttgtctcttaaataagtggggcttcccmtggggaatacagtgccaggtacaaggaaataagagaggagggattctagccatctttagttgagtactggccagcacatgtatgtgag

SEQ ID NO: 571853 - DNA, 582 bp, Homo sapiens
gatcctcccacctcagcctcccaaatagctgaaaccacaggctatggggatgacagcagatgctgcttggtgaaataccaaggctgcatggcaacgtgcactcttggagaggttgtctgctatgggactgagagcaggtgccccagattgaggcagcttgggtcagaccccactctgtcccttccagctgtgtctccttgggcaattcagcgatgaactccggctcagtttactcatcatacacggcctgcaggatggatccgtgcaccttccattctcaacccagcaaccgggcaatctctaaagcccagattcagcctccttctccctattggagggtgtccttgtttccacagtaagctccaggacccgcagtaggtagacaatgctctatctgctctggtctcagtttttgttccagttaaagaccaatttcttggttccaaaggcagccaagagctattctttgtctcttaaataagtggggcttcccatggggaatacagtgccaggtacaaggaaataagagaggagggattctagccatctttagytgagtactggccagcacatgtatgtgag

SEQ ID NO: 571854 - DNA, 474 bp, Homo sapiens
tctgtcacccaggctggagtgcagtggcacaatctcggctcactgcaacctctgttttgtgggttcaagtgattctcctgcctcagcctcccgagtagctgggatcacaagtgcgtgccaccacgcccccactaatttttgtattttttggtagagacaggtttccctatgttggccaggctggtcttgaactcccgacctcaggtgatccacccaccttggcctccaaagtgctgggattacaggtgtgagccaccgcacccggcccttagctcctatttaaatgtatatatatatttaggttagttaatttcagagatggcaaaacaaaaagaaaatgtgtgtgcatcggagggaacctttgatccacagccaccggcctgtgcttggagacatttctggctcgtcttcaaaattctgtgctaattgacatttgtctktttctctgtgaagcccgccatccccaggtcatta

SEQ ID NO: 571855 - DNA, 596 bp, Homo sapiens
ctcacacataacatccttaaataaaaaggatctttattagctcacaaaactgaaaattcctgaatgggtgggcttcaaagtcaggttcaattcagctgtttgacaacaccaaggccctggtgtctttggtccctccacgctacctcaccagagtcagcttcactgaaggctggtttccctcatggtcacaaaagggctgccattgcactggggcttcacttcccccaaggcctygcagaacctcctgttgtgccatcctggctggagaaggtcaccatccccatggccggaccagtagaatttaatgaattgagtcagatcaaagtcaaacagggtccacctcagagacaggggaagagggagtcctggagcagaaatctgattttttttgttgttgtttgtttgttgtttgtttttgagatggagtttcactcttgttgcccaggctggagtgcaatggcacgatctcagctcactgcaacctctgcctcccgggttcaagtgattctcctgtctcagcctcccaagtggctgggattataggcgcccaccaccacgcccagctaattttttgtatttttggtagagacggggtt

SEQ ID NO: 571856 - DNA, 385 bp, Homo sapiens
caaccctcttctcctcattactgtactatgtaacactagatgcgcattatagtccacataaaaagccatttctgtagcatcttgtcatcggttcatggttgtgctttgaagccgtgttgagttctgaactcagagcctaacagcaatggctcaagtgcaccacaccgtattatttacccagatggggttaattgttaaataaaagaatgggccctttcagtttacttttttgcagtctctctmacactgattatggaagacagggaagactatgataaatatcaaactttctaatcagaaacgagtccagttgtatttgaaatcttgaacttaatccagaattagaaaatgtccttaagttatcttttgctttcttgagaccatc

SEQ ID NO: 571857 - DNA, 385 bp, Homo sapiens
caaccctcttctcctcattactgtactatgtaacactagatgcgcattatagtccacataaaaagccatttctgtagcatcttgtcatcggttcatggttgtgctttgaagccgtgttgagttctgaactcagagcctaacagcaatggctcaagtgcaccacaccgtattatttacccagatggggttaattgttaaataaaagaatgggccctttcagtttacttttttgcagtctctctaacactgattatggaagacagggaagwctatgataaatatcaaactttctaatcagaaacgagtccagttgtatttgaaatcttgaacttaatccagaattagaaaatgtccttaagttatcttttgctttcttgagaccatc

SEQ ID NO: 571858 - DNA, 405 bp, Homo sapiens
ggaccaccagtccttttattttattttttttaatttttaattttttttttaratggagttttgctcttgttgcacaggctgaagtgcagtggcgaaagtactggaggggttggcttagccctttctctcctttctgtcttgtgaggacatagcatttatctcctccaggggacaaagcaacaagtcaccatctaggaagaaactgggcccttatcagacaccacacttgccagccccttgatcttggactttccagcctctggaactatgagaaataaatttctgttcttcataaattaaaaaaaaaaagaaggggaccaccatcccacccccagctcaagagcagcagctcagagattttgctctggtcacaagaacagagctctgtagcttttatcaaggaaa

SEQ ID NO: 571859 - DNA, 405 bp, Homo sapiens
ggaccaccagtccttttattttattttttttaatttttaattttttttttagatggagttttgctcttgttgcacagrctgaagtgcagtggcgaaagtactggaggggttggcttagccctttctctcctttctgtcttgtgaggacatagcatttatctcctccaggggacaaagcaacaagtcaccatctaggaagaaactgggcccttatcagacaccacacttgccagccccttgatcttggactttccagcctctggaactatgagaaataaatttctgttcttcataaattaaaaaaaaaaagaaggggaccaccatcccacccccagctcaagagcagcagctcagagattttgctctggtcacaagaacagagctctgtagcttttatcaaggaaa

SEQ ID NO: 571860 - DNA, 516 bp, Homo sapiens
gagtcaaagggttaagttctcaggccagcagaggcaataggccaggcctgaggactcctggacagtgctgccctcatgggagtctttggatcagcagtatcagaatcacccgggggagcttctgaacaacagtggctcaggctcaccaggatctattggatagaaatattttggagaagggctcaagagtctcaaattattgaaagctccttgcatgattctgaggtagatcgaggtttgggaacgtttactcaaatgaagagttccctgggtcagaagaacttgaagaggaaagactgtggatacttcctaaggctattaggagcaaacccagtttctgaaggtcagttgagagccgagttagytgagttgccactctaaatgtccttagtttttaagattttaggacggatactgggtgtggtgcctcatgcctgtaatccagcactgtgggagactgaggggggaggatcacttgaggccaggagtttgggacctgcctgggcaacaaagtga

SEQ ID NO: 571861 - DNA, 606 bp, Homo sapiens
gaattcagcaaagtttcaagatgcaaaatttaggtacacaaatcagtagctctgctatacaccagcagcaaccaagctgagaatcaaatcaagaactcaacccctttcactatagctgcaaaaaataaaataaaataaaatacttaggaatatacctaatgaaggatgtcaaagacctctacaaggaaaactacaaaacagtcctgaaagaaatcacagatgacacaaacaaatggaaacacatcccatgctcatgaatggtcagaatcaatatcatgtatatgaccatgctgccaaaaacaatctacaaattcaatacagttcccatcgaaataccatcatcattcttcacactagaaaaacaatcctctacttcatatggaaccataaaagagcttgcatagccaaagcaagactaagcaaaaagaacaaatctgggggcatcacattacccaacttcaagctatcctacaaggccatagtcaccaaaacagcatcrtactagtataaaaacaggcatatagaccaacggaacagaatagagaacccacaaataaagccaaatacttacagccaactgatctttgacaaaataaacaaaaacat

SEQ ID NO: 571862 - DNA, 606 bp, Homo sapiens
gaattcagcaaagtttcaagatgcaaaatttaggtacacaaatcagtagctctgctatacaccagcagcaaccaagctgagaatcaaatcaagaactcaacccctttcactatagctgcaaaaaataaaataaaataaaatacttaggaatatacctaatgaaggatgtcaaagacctctacaaggaaaactacaaaacagtcctgaaagaaatcacagatgacacaaacaaatggaaacacatcccatgctcatgaatggtcagaatcaatatcatgtatatgaccatgctgccaaaaacaatctacaaattcaatacagttcccatcgaaataccatcatcattcttcacactagaaaaacaatcctctacttcatatggaaccataaaagagcttgcatagccaaagcaagactaagcaaaaagaacaaatctgggggcatcacattacccaacttcaagctatcctacaaggccatagtcaccaaaacagcatcatactagtataaaaacaggcmtatagaccaacggaacagaatagagaacccacaaataaagccaaatacttacagccaactgatctttgacaaaataaacaaaaacat

SEQ ID NO: 571863 - DNA, 517 bp, Homo sapiens
atcatcatcatcatcttggatattagcttttaattaarctgacttttaaccattgagctccatttaaaaaaaaacctttttaatctcattaccatattttaactaggataaattgctgatatttcaaaagtaacacaaatatcaaaccagaaagggctttagaaaccaaacccagactgtcttgatgaaaaaaaagtgggggcagaagcttagctatggaactgctgcatggggcgacagccattactctttcagtttggcttggctaacaaaaactggccttattatgtaaataaagccctcagggtagtcaaaatcaagaacctttctcttttatccccttttgctggactgtttttccttctccctgctttttttttttttttttccagctgtggaatttagccaattcagaggtcttgttccccgtaatgtggaactttccttcagatttgatcaagttggatagagttggtcaaacccaattgtcaggcctctgagctcaagctaagccatc

SEQ ID NO: 571864 - DNA, 650 bp, Homo sapiens
gagcgggaggcagccttaatttacaaaggaaatagacaccccagcacaggctgaaattgggtgggaccaagagttcttaaactaatcacagctggtttccaaacctcaaagatttgttattgcaaaaacattctcaagcagtagatgaatagattgaatggcgacagaacaaagaaaagatggagacattttccccacagcggcttcaagacaggttcagagaggtatgaactagcaaagtaacacatttatccaatcaacattttttacccatctcctacactgggtctgaggacacagctatcacrtaacatttgacctcctctagtatcctacagaaaaacaactaaagcacctttgtgcaactcagaactacaagctcttccttatgatttggacaacaggtgccttcaaagaatggttctttttcctatattttccttcccttctcttaatggagaattttttcttccaccctaaaaaggaaacacgaccatcagtttcccaaatatgaagagggaaatgcatgtgtgtataaacagtggttaccacctagtagaattttaagcctttaaggattttcccccctaacgattgcaatttccttcagttactattgtcctatgtcttatatccaatgtattatttag

SEQ ID NO: 571865 - DNA, 505 bp, Homo sapiens
agtgtttaaacaggtatgatttcatagattttttaaagtgatatgttaacttagtgaatagagagaatagaaactagtatccatttagtgttctactctgtgctagacaccatattacatgcttaatatttatcatgtcatgtcatctccacacagctttacaaactatttgtgctattattgcttttttactaattagggaactctgctttaaagaggttgaaatattggctcatgattccacagttaacaggtagccaacccaagatttgrccatcatcctgcctggctctcaaatcacttcatttgcccctaagcatagatggatacagacctatgcagcaatgtgatcacggtactggtttaactcagatcaattcagaaagtcacattttgttatatattaactctctttagagtgttccttagaagcatggatactccaaaagtttgtccaagtattttagaaatggcagtggtaaccatattacatttttttttaacc

SEQ ID NO: 571866 - DNA, 505 bp, Homo sapiens
agtgtttaaacaggtatgatttcatagattttttaaagtgatatgttaacttagtgaatagagagaatagaaactagtatccatttagtgttctactctgtgctagacaccatattacatgcttaatatttatcatgtcatgtcatctccacacagctttacaaactatttgtgctattattgcttttttactaattagggaactctgctttaaagaggttgaaatattggctcatgattccacagttaacaggtagccaacccawgatttggccatcatcctgcctggctctcaaatcacttcatttgcccctaagcatagatggatacagacctatgcagcaatgtgatcacggtactggtttaactcagatcaattcagaaagtcacattttgttatatattaactctctttagagtgttccttagaagcatggatactccaaaagtttgtccaagtattttagaaatggcagtggtaaccatattacatttttttttaacc

SEQ ID NO: 571867 - DNA, 505 bp, Homo sapiens
agtgtttaaacaggtatgatttcatagattttttaaagtgatatgttaacttagtgaatagagagaatagaaactagtatccatttagtgttctmctctgtgctagacaccatattacatgcttaatatttatcatgtcatgtcatctccacacagctttacaaactatttgtgctattattgcttttttactaattagggaactctgctttaaagaggttgaaatattggctcatgattccacagttaacaggtagccaacccaagatttggccatcatcctgcctggctctcaaatcacttcatttgcccctaagcatagatggatacagacctatgcagcaatgtgatcacggtactggtttaactcagatcaattcagaaagtcacattttgttatatattaactctctttagagtgttccttagaagcatggatactccaaaagtttgtccaagtattttagaaatggcagtggtaaccatattacatttttttttaacc

SEQ ID NO: 571868 - DNA, 505 bp, Homo sapiens
agtgtttaaacaggtatgatttcatagattttttaaagtgatatgttaacttagtkaatagagagaatagaaactagtatccatttagtgttctactctgtgctagacaccatattacatgcttaatatttatcatgtcatgtcatctccacacagctttacaaactatttgtgctattattgcttttttactaattagggaactctgctttaaagaggttgaaatattggctcatgattccacagttaacaggtagccaacccaagatttggccatcatcctgcctggctctcaaatcacttcatttgcccctaagcatagatggatacagacctatgcagcaatgtgatcacggtactggtttaactcagatcaattcagaaagtcacattttgttatatattaactctctttagagtgttccttagaagcatggatactccaaaagtttgtccaagtattttagaaatggcagtggtaaccatattacatttttttttaacc

SEQ ID NO: 571869 - DNA, 544 bp, Homo sapiens
tctcactctgttgcccaagctggagtgcagtggcataatctcggctcactgaaacctctgcctcctggattcaagcaattcttctgcctcagcctcccaggtagctgggactacaggcayatgccactatgcccggccaatttttgtagttttagtagagacagggtttcactatgttggccaggctggtctccaactcctgaccttgtgatccgcccacctgcagtctcccaaagtgctggaattactttgggagccactgtgcctggccaggattgttttattctgttctgtgaagaataccatcagaactttgatgaggattgtgttaaatctgtatatttgctttgggtagtgtgaacattttaacaatattaattcttctgatccataaacataggatgtctttccatttgttcatgtctaaatttctttcatcaatgttttatggttttcaagtgtacacatctctcaccttcttggttaaatttattcctaagtttttgtttttctttgatgctatcataaatgagattattttctt

SEQ ID NO: 571870 - DNA, 544 bp, Homo sapiens
tctcactctgttgcccaagctggagtgcagtggcataatctcggctcactgaaacctctgcctcctggattcaagcaattcttctgcctcagcctcccaggtagctgggactacaggcatatgscactatgcccggccaatttttgtagttttagtagagacagggtttcactatgttggccaggctggtctccaactcctgaccttgtgatccgcccacctgcagtctcccaaagtgctggaattactttgggagccactgtgcctggccaggattgttttattctgttctgtgaagaataccatcagaactttgatgaggattgtgttaaatctgtatatttgctttgggtagtgtgaacattttaacaatattaattcttctgatccataaacataggatgtctttccatttgttcatgtctaaatttctttcatcaatgttttatggttttcaagtgtacacatctctcaccttcttggttaaatttattcctaagtttttgtttttctttgatgctatcataaatgagattattttctt

SEQ ID NO: 571871 - DNA, 544 bp, Homo sapiens
tctcactctgttgcccaagctggagtgcagtggcataatctcggctcactgaaacctctgcctcctggattcaagcaattcttctgcctcagcctcccaggtagctgggactacaggcatatgccactatgccmggccaatttttgtagttttagtagagacagggtttcactatgttggccaggctggtctccaactcctgaccttgtgatccgcccacctgcagtctcccaaagtgctggaattactttgggagccactgtgcctggccaggattgttttattctgttctgtgaagaataccatcagaactttgatgaggattgtgttaaatctgtatatttgctttgggtagtgtgaacattttaacaatattaattcttctgatccataaacataggatgtctttccatttgttcatgtctaaatttctttcatcaatgttttatggttttcaagtgtacacatctctcaccttcttggttaaatttattcctaagtttttgtttttctttgatgctatcataaatgagattattttctt

SEQ ID NO: 571872 - DNA, 544 bp, Homo sapiens
tctcactctgttgcccaagctggagtgcagtggcataatctcggctcactgaaacctctgcctcctggattcaagcaattcttctgcctcagcctcccaggtagctgggactacaggcatatgccactatgcccggccaatttttgtagttttagtagagacagggtttcactatgttggccaggctggtctccaactcctgaccttgtgatccgcccacctgcagtctcccaaagtgctggaattactttgggagccactgtgcctggccaggattgttttattctgttctgtgaagaataccatcagaactttgatgaggattgtgttaaatctgtatatttgctttgggtagtgtgaacattttaacaatattaattcttctgatccataaacataggatgtctttccatttgttcatgtctaaatttctttcatcaatgttttatggttttcaagtgtacacatctctcaccttcttggttaaatttattcctaagtttttgtttttctttgatgctatcrtaaatgagattattttctt

SEQ ID NO: 571873 - DNA, 578 bp, Homo sapiens
aacttggaaaagctaccctcccctctctgctgcacacaaaaacttacttgtctcagatccataagatctgtgatttcatcttcatataaatagccatcttcactgtaatgttccaggataaaatccttaaagaaaartgaggttagatactataaaatgtgattgaaaaccatgtatgtgcataacagtaatatgtcaattgtgaacctgtttctaaaaaggcagaataaagaaaaacttacagtgattttcaaagtgggggaatttattttcttaatttatgtagttttttttatatggagtcttgctctgtagcccaggctggagtgcagtggcacaatctcggctcactgcaacctctgcctcccaggttcacgcaattctccttcctcagcctctcaaggagctggggttacaggctcccaccacaacgtctggctaattgttgtacttctgacctcaggtgatccacccacctcaccctcccaaagtgctgggattacagatgtcagccaccgtgtccggccatagatttttttttttttttaaacagggtttcactcctgttgcccaggcta

SEQ ID NO: 571874 - DNA, 578 bp, Homo sapiens
aacttggaaaagctaccctcccctctctgctgcacacaaaaacttacttgtctcagatccataagatctgtgatttcatcttcatataaatagccatcttcactgtaatgttccaggataaaatccttaaagaaaagtraggttagatactataaaatgtgattgaaaaccatgtatgtgcataacagtaatatgtcaattgtgaacctgtttctaaaaaggcagaataaagaaaaacttacagtgattttcaaagtgggggaatttattttcttaatttatgtagttttttttatatggagtcttgctctgtagcccaggctggagtgcagtggcacaatctcggctcactgcaacctctgcctcccaggttcacgcaattctccttcctcagcctctcaaggagctggggttacaggctcccaccacaacgtctggctaattgttgtacttctgacctcaggtgatccacccacctcaccctcccaaagtgctgggattacagatgtcagccaccgtgtccggccatagatttttttttttttttaaacagggtttcactcctgttgcccaggcta

SEQ ID NO: 571875 - DNA, 578 bp, Homo sapiens
aacttggaaaagctaccctcccctctctgctgcacacaaaaacttacttgtctcagatccataagatctgtgatttcatcttcatataaatagccatcttcactgtaatgttccaggataaaatccttaaagaaaagtgaggttagatactataaaatgtgattgaaaaccatgtatgtgcataacagtaatatgtcawttgtgaacctgtttctaaaaaggcagaataaagaaaaacttacagtgattttcaaagtgggggaatttattttcttaatttatgtagttttttttatatggagtcttgctctgtagcccaggctggagtgcagtggcacaatctcggctcactgcaacctctgcctcccaggttcacgcaattctccttcctcagcctctcaaggagctggggttacaggctcccaccacaacgtctggctaattgttgtacttctgacctcaggtgatccacccacctcaccctcccaaagtgctgggattacagatgtcagccaccgtgtccggccatagatttttttttttttttaaacagggtttcactcctgttgcccaggcta

SEQ ID NO: 571876 - DNA, 552 bp, Homo sapiens
tgatgagtagagatgatgatggtcataaacaactaataaagaaaatgagcttcacttttttaccttctgttctgtctagttgtttagtttattgaggccttagaaaaaaatatgacagccccagagaaaataytgtcaataaaagttaaatgtatttattttgataagacattgtttttattgcaaaagtaatatatacacagacaatttagaaattacagacaagccaaagaaaatgttgttacacaaatgcaatgttacaatgacttgtaacactttggtgtgtatcctttttttttctaagcacatatgtgtaaatatatgcatttttaaaggatttcagtaatgttctcatgattaaatatatcatgcacatccttctttcttttctttcttgctttttttttttttgagacatggtctagctctgtcacctgggcttgaatgtagtgcaattctggctcacttcaacccccatctcttgagttcaagtgatccttctgcctcagcctcccaagtagctggcactacaggtgtgcgccaccatgccca

SEQ ID NO: 571877 - DNA, 552 bp, Homo sapiens
tgatgagtagagatgatgatggtcataaacaactaataaagaaaatgagcttcacttttttaccttctgttctgtctagttgtttagtttattgaggccttagaaaaaaatatgacagccccagagaaaatactgtcaataaaagttaaatgtatttattttgataagacattgtttttattgcaaaagtaatatatacacagacaatttagaaattacagacaagccaaagaaaatgttgttacacaaatgcaatgttacaatgacttgtaacactttggtgtgtatcctttttttttctaagcacatatgtgtaaatatatgcatttttaaaggatttcagtaatgttctcatgattaaatatatcatgcacatccttctttcttttctttcttgctttttttttttttgagacatggtctagctctgtcacctgggcttgaatgtagtgcaattctggctcacttcaacccccatctcttgagttcaagtgatccttctgcctcagcctcccaagtagctggcactrcaggtgtgcgccaccatgccca

SEQ ID NO: 571878 - DNA, 481 bp, Homo sapiens
ttagtgaggatgtttctattgaaaacacagagttaggaagtcwtaaaatgttcttggaatataaagtaataataccaccggcgtttatcttactgttttcgtgttctaagtgcatgcatctaagtaaaaggatctgggctgcagtccagtctgagagatgccagcaaaggcttcctaggccagttcagtccagtaaatccctcttcgatcttctcttccacacagacagcagtgatgagcatgcccatgaactcacatgattattttggggaaaatgaaagagttgtattctttttgaggtagtaattccactttcaggggcaaatacattttgattattttatcacccttcagtgagttgtttttgttctttaatcaaggatgtatgtttgaagtaagaagtaaagcataaagtatacgattttgtgtgtgtgtgtgtttttatcttgctagacctgtagggaatatttaattctgcctt

SEQ ID NO: 571879 - DNA, 481 bp, Homo sapiens
ttagtgaggatgtttctattgaaaacacagagttaggaagtcttaaaatgttcttggaatataaagtaataataccaccggcgtttatcttactgttttcgtgttctaagtgcatgcatctaagtaaaaggatctgggctgcagtccagtctgagagatgccagcaaaggcttcctaggccarttcagtccagtaaatccctcttcgatcttctcttccacacagacagcagtgatgagcatgcccatgaactcacatgattattttggggaaaatgaaagagttgtattctttttgaggtagtaattccactttcaggggcaaatacattttgattattttatcacccttcagtgagttgtttttgttctttaatcaaggatgtatgtttgaagtaagaagtaaagcataaagtatacgattttgtgtgtgtgtgtgtttttatcttgctagacctgtagggaatatttaattctgcctt

SEQ ID NO: 571880 - DNA, 421 bp, Homo sapiens
tagggaaaggcaggctcccaataaatagaaaacacctgaaactgatcaacttctggataagctttcaggagtggggagaagtaacccaagatcctggaagtatgcygatgtataaaaccccaaatcaaaaggtcaaaccacacacttgtctttcaggtcacccacttggccctcttccaagtatgttttcctccctttcattcctgctctgaagttttttaataaactttcacttctgctctaaaacttgcctcagtatctccttctgccttctgcccctcagtcaaattatttcttctgaggaaacgagaattgaggttgctgcagacctgtgggatttgccatggtaacaaggccaggagttcgagactggcccagaaaacgtggtgagatcttgcctctaaagaaaaggggggaaaaa

SEQ ID NO: 571881 - DNA, 421 bp, Homo sapiens
tagggaaaggcaggctcccaataaatagaaaacacctgaaactgatcaacttctggataagctttcaggagtggggagaagtaacccaagatcctggaagtatgctgatgtataaaaccccaaatcaaaaggtcaaaccacacacttgtctttcaggtcacccacttggccctcttccaagtatrttttcctccctttcattcctgctctgaagttttttaataaactttcacttctgctctaaaacttgcctcagtatctccttctgccttctgcccctcagtcaaattatttcttctgaggaaacgagaattgaggttgctgcagacctgtgggatttgccatggtaacaaggccaggagttcgagactggcccagaaaacgtggtgagatcttgcctctaaagaaaaggggggaaaaa

SEQ ID NO: 571882 - DNA, 421 bp, Homo sapiens
tagggaaaggcaggctcccaataaatagaaaacacctgaaactgatcaacttctggataagctttcaggagtggggagaagtaacccaagatcctggaagtatgctgatgtataaaaccccaaatcaaaaggtcaaaccacacacttgtctttcaggtcacccacttggccctcttccaagtatgttttcctccctttcattcctgctctraagttttttaataaactttcacttctgctctaaaacttgcctcagtatctccttctgccttctgcccctcagtcaaattatttcttctgaggaaacgagaattgaggttgctgcagacctgtgggatttgccatggtaacaaggccaggagttcgagactggcccagaaaacgtggtgagatcttgcctctaaagaaaaggggggaaaaa

SEQ ID NO: 571883 - DNA, 556 bp, Homo sapiens
tttttttttttcccactgaaaagtgaaactatttcacccaaatgcacttccaaatgttggttttttggctccattcaaatacctttacaaaaaaaaattcattaaataagttgtctatcttggagttgtttctctgtaagtttctcttgaatgtttcttaaattttaaatacagcaaacttgtacatcttttatttttgtcccattttggtacagtttataaatgtgtttgattaaaaatagggcttcattaaaagatgccttccatacgttgagatattctgaagcaaaattacataatttcaaaattaaatcttatatgctgtcaggacactcattgttgaatttatctcatccctccctcacttgtaaggggtatatttaatgtcttcctgtttgcaagctttgtcttcaacatttgcaattttctaaaagctttaaaaamtgaagtttgaggccaggcaagatggcctatgcctgtactctagcactttgggagccaaagcaggaggatcatttgagcccaggagttcgagatcagcctgggcaatagactg

SEQ ID NO: 571884 - DNA, 536 bp, Homo sapiens
ttagccgagcgtggtggcgtgcacctgcaatcccagctactcaggaggttgagacaggagaattgcttgaacccgggaggcagaggttgccgtgagctgagatcgtgccactgcactccagcctaggtgacagagtgagactccgtctcaaaaaaaaaaaaaaaaaaaaaagaaaggatcgtgatgcccttcttgttttccttgccatggcgatgaccccatactcgaactgtattaactcaggaagttcacaggaggacgctgagcccattatctcccttctacaggtggagaaactgaggcagggaggcatctggtgagccaccctgccctgctcactcacagcgggtgcccctccagtacccaccagtgggaagaaagcctctcacatacrtgctcaggccaagagtctgagaccccgcctgcccccctcactcgcctgtagggggtgagggttctttggggaccgtagcctgcggcttcggtcttcagttcctgaggtcatgtagagggaatgggtgtccagaacggtccct

SEQ ID NO: 571885 - DNA, 536 bp, Homo sapiens
ttagccgagcgtggtggcgtgcacctgcaatcccagctactcaggaggttgagacaggagaattgcttgaacccgggaggcagaggttgccgtgagctgagatcgtgccactgcactccagcctaggtgacagagtgagactccgtctcaaaaaaaaaaaaaaaaaaaaaagaaaggatcgtgatgcccttcttgttttccttgccatggcgatgaccccatactcgaactgtattaactcaggaagttcacaggaggacgctgagcccattatctcccttctacaggtggagaaactgaggcagggaggcatctggtgagccaccctgccctgctcactcacagcgggtgcccctccagtacccaccagtgggaagaaagcctctcacatacgtgctcaggccaagagtctgagaccccrcctgcccccctcactcgcctgtagggggtgagggttctttggggaccgtagcctgcggcttcggtcttcagttcctgaggtcatgtagagggaatgggtgtccagaacggtccct

SEQ ID NO: 571886 - DNA, 597 bp, Homo sapiens
ctccctggtaactgggattacagatgcctgctaccatccctggctaagttttataattttagtagagacagggtttcaccatgttggccaggctggccttcaactcctgacctcaactgatcgcccacctcagcctctcaaagtactgggattacaagtgtgagccactgcacccagccttaactcagaaaattttgagtctcctaatgctctgccatcttcttggtagaatatttatgttatgtaatccatcatgtttctcttttattctagttgccaggtattcaaattcaagatatttatgcatgactacacaaagaagaagaattatataataattatcatttccaaaaaacagcragcacaaactgcctcaatgtaggattttgccaaataatattcttaatgtccacaattctgtctaattaagcaaactaaatatgactgcacaagcatcagtaataattatgaaaagcagagttctatattcagaaatggtctttcaaactactccaacaaaagatagtaaaataaatagcttgttgtggacacctactgtaagaaaaagaaacaaatatgtatacaaaagacagcaaa

SEQ ID NO: 571887 - DNA, 474 bp, Homo sapiens
ttggctgcagtgtaatttagtagctaaattttaaaaaataagaaggcagttcacattttttcaaataagtaaggaaggtttacatttttggagacagtttttatccataaaaaacatttatgggcagcactgtaacaccattgccattttttttwagaatttactatttagagcgagaagagacttgtgtaagaattgagcttggagccaggttttctctgcaagaaagagtggttctgtctttgctcaaatttaaatatagggagaagacccttttgtttattatcttccaactttatacactatagtttttaaatatttttaacaatattttaatgtatttttaaataaaaatattggtaaaaatgagattgaaaaaagtaaacagaaaacctatttatctaatgtccatcagttgtaatatgtttactaaatattgtgtatatttttatatgtattttattgaattgtaat

SEQ ID NO: 571888 - DNA, 560 bp, Homo sapiens
ccattgtactccacttgaatgacagaacgagaccctgtttctctttattgttttagaaaaaaatacgtacaatttattcattaagtgaggacaaaacttctgtaactctggcaagtcaagttacatcatcaaagttgtttatttaaaagtagaagtatgcatgggcaatagttttcataagagtcagaaaaattaggcaggttttacaatatagagtaccctttctgagaccctgtttctattaaaaaaaattgtcgcagtagaccctcaaagaccagttcaaggatattctctaaggaaatattctctaaggaaataataaaagcaggaatcttggaccatcgagatggaagaaaaaaatatagtaagcaaaaatatgggtaaataaaattgactttccctcttcctttgagtcttctaaattatgttcaagggtcaaagcaaaaattataacattctctcctgtgttcttcaatgtatgtagagggagtatttaaaacagttatattacaaatggcaaagagtaaagagctkcaaaggaatgtttctatactccactc

SEQ ID NO: 571889 - DNA, 574 bp, Homo sapiens
tggcctcccaaaatgctgggatacaggtgtgagccaccacacccagccaaaattagccattttaaagagaagatttcgggcatttagtgtagccacaaagttgtgcaaataccacttctttctagttccaaaacattttcctcatatcaaaaggaaacccaaaaccctatttgttaagcagttgcttttcattctcccctcccaccagctcctggcaactatcaatctgccttatgtttctatggatttacctattctgaatatttcataaaatagaattataaaatacgtgtctttttgtctggcttttttcccttagcatgcttttgagtttcatcaatattgtagcatgtatcagtacttcattcctttttatggctgaatatttcattgtgtatatataccacacttaatacattcatttgttgatggatgtattagtccattctcacactgctataagggttgtacccaagaagaggtaatttataaagcaaagaggtttaattgactcacrgttctgcatggctggggagtccacaggaaacttacaattatggcagaaggggaagca

SEQ ID NO: 571890 - DNA, 526 bp, Homo sapiens
ctggaacttctgggctcaagctatcttcccgcctcacattcctaaagtgttgggattacaggcataagcccctgcacctggcacatatgtcccactttaaaatgaaactatcgtttaaagtgagatttatgttcctaaatcgtccttggaattcgagttggattttgcaatgctgcctattgtgtacaaagctctctgaacatttatgttcaataaacgaagtagccagatcttcaaaaccatctgctaatgwgcatcaaattatttaaattaataatgagggagttgggtaaagagggaaatatatgttgtattacttttaaataaaatgcttggataactagactgatttctcttagtgataatggcaacatttaaatgtacaataactatagacaggaatacatttgttttagtcttttgcaaccagggttatcttggcttgtttatgatgaaatcatttttcacaaagtctaaagaatgttggttgtcaaaatatacggtttctgtggtgccccatatctgc

SEQ ID NO: 571891 - DNA, 591 bp, Homo sapiens
atcctttctgaacctccaggagcctggattgcatcctgtgtcagtgggtcaggggctgtgggctaccctagaaagaacaggagacagcacaacctcccagattatctggttctctggccaacaaaaattctccacttccacatgagcccttggcagccaagggaaatgcatctggagttggatgttgtcattatgcttaaatttatttgtgattatgaagagataggttatagtggtatttcttcatgggagggtggaaggaaaatatcttggggccccaaatctataagctaaagggaaaattcaagctgggaactgcttagggccaacctgcctcccattctattcaaattcacccctgtgctcactgagataaatgcatatcagattgcctcctttggagaggctcatcagaaactcaaaagaatgcaatcatttgtctctcacctacctgtggcctggaagatccctcccsactttgagttgtccctcttttgctttgagttgctccaccttcctggaccgaaccaatattcatcttacacatgttgattgacgtctcttgtctccctaaaatgtataaaaccaagc

SEQ ID NO: 571892 - DNA, 567 bp, Homo sapiens
tgtatatgtaatcgagcttatattaaattttataataaaattattgtgttgagacaattgttatctactaggaaaaaattagagcatacataacaataagctctaaatatattaaatatttgacttaaaaagaaatgtaaaaatactagaaaaacatcagacacatatttatacagcatttagatgaaaaagctctttttcctaagcatgacataaaacaaagaagataaaggtcataaaatataaaattaatttgggcagcagttactctaaacaaaattaaagacaaatgggaaattaggaaatatgttagcaacatatatggcaaagaattaccattttaaaacagaaaaggtttctaccaatcatttacaaaaagataaactatcaccaaaagggcaaaaaaaaaaaaaaaaaaagacaaaaaaagaaaaagaaatctgcaaagaagaaatacaaataacaaataaatrcagttatgagctgtataatgatgttttggtcaacaaagcctgcatacatggcagtggtcacagcaataggctattaacaggctatttcatatag

SEQ ID NO: 571893 - DNA, 652 bp, Homo sapiens
acaagctaggaatttatagagcccaagtttgaaccctgtacatttccaggggcacttgtcatgcagtctgtgctattgatactatctgtatccttgtgttttatgttataatatattatgatcccatagaggaaaaaggctgtgtcttctgaatcttggtgtccctccatcaggaacttaaaacaagctgaaagatgttctggctgcttgccaaaccttttttattaattgctacaaaatattgaagtattaaaaattccatttatattagtgaatataaatgagtgatttgccagaagaatgtccttccttcctccctctttccatgtttcaattcagtcacgatatagcattttctttttttctttttctcttcttgttttctctcctttattttctttctcctcctcttcctcctcttcctcttcctcctcctmctcttccttcttctccttcttattcttcttcttctttcttcttctccctctcctccctctctctttgtcctggaatattttctctcaattgatttcacatccctacagtatcaacaacaggacctgaatgacttagtgcaatatttcccaaaatgtgttttgcagattgttgctagtcgtagtgttaagaaaggtagtggtaggaggatggggtc

SEQ ID NO: 571894 - DNA, 554 bp, Homo sapiens
gaaatttgcataagtaacaaagagccgaatgttaatcaccaagataatggagaaaatgtctccagggtgtgtcagagacctttgctgtaggactcccatcacaggtccagaggcataggaggagaaaatggttttctgggtcagatccagggcctccctgctgtgcatagcctaggaayttggtgccctgcatccgagctgctccagccatagctaaaaggggtcaaggtacaactcaggccatggcttcagagggtggaagccccaagccttagcagcttccacgtggtgtggagcctgcaggtgcagtgcacagaagtcaagaatcgaggtttgggaaccctcacctaggtttcaaaggatgtatggaaatgcctggatatccaggcagaagcttgctgcaaggtcagggcccccatggagaacctctgccagggcagtgcagaagggaaatgtggggttggagcccccacacagagtccccactagggcacagcctagtggaggtatgagaagagggctatcatcctccagaccccagaatggtagatcca

SEQ ID NO: 571895 - DNA, 598 bp, Homo sapiens
cagggtttcaccatattggccaggctggtcttgaactccygggctcaaggggtccacccaccttggcctcccaaagtgttgggattacaggcgtgagccactgcacccagtctcaaagaattttttaatgtttatcttgatttcgttgttgacccaacaatcattcaggagcaggttatttaatattcatgtatttgcacacttttgagtgtccttttaaagttaattttcaattttattccattgtggtctgacagagtacttgatataattccaattttcttaaacttattgagacttgttttgtgagctatcatatggtctatcttctaaaatgtttcgtgtgctgatgaatagaatgtatattcagctgttgttgggcagaacattctgtaaatatctgttaagtccatctgttctagggtgtagtttaaatccattgtttctttgttgactttctttcttgatgacctgtctagtgctgtcagtagagcattgaagtccttcactattattatgttgctgtctatctcatttcttaggtgtagtagtaattgttttataaatttgggagctctagtggtaggtgcatatgtat

SEQ ID NO: 571896 - DNA, 594 bp, Homo sapiens
gaggggtgtgtctgtagtcccagctatgctggaacctgggtgacagagggagaccctgtctcaaacaaacaaacaaacaaagataaataaggtagtagattagcaaatagaatgtatatttgcatattttattcagaatrgacaaggattttctcagtaagcaaatgttattttactaataagtaaccttcagattgctcagataagtagataatctatagaaaataatttttatacaatcaaaatgtgttcagtattttgtagaatagcaagaattttcactatgaataaaattgacagcgcacagtgaatctcaagaaatatgagttttaacaaggtttaaatgtttaaattttaactgaattatactatggtttctcttcagatcatataaatttttcgccttttaaatttaactgaattttatttatctaagaaattgaaatgttttatattgtatcaattttgtttataaactaaattatttaaaattagttctttgttaagtaaaactatatgtatatacatatatatgtatgcatacacacatatcctgtttttgtatcatacaaaatgtttctttttatattgcaa

SEQ ID NO: 571897 - DNA, 571 bp, Homo sapiens
cacatgtgcaggatgtgcaggtttgttacacaggcagtgtgccatgcccattgtggtttgctgcacagatcaacccatcagctaggtattaagtgcagaattctttagctattcttcctgatgctctcctgcctcacaccccctgataagcccctgtgtgcattgatccccaactgtgygtccatgtgttctcatcgttcagctcccacttataagtgagaacatgcagtgtttgtttttctgtttctgcattagtttgccaaggataatgccttccagcaccatccatgttcctgcaaaggacatggtcttgttcctttttatggctgcatagtattccatggtatataagattatgtaaagagatcgaacctacaactgattggcgtacctgaaagacatggggagaatggaaccaatttggaaaacataattcaggatatcatttgtgagaacttccccaacctagtaagacaggccaacatttaaattcaggaaatgcagagaaacccagtaagatgctccatgagaccatcaaccccaagacacatcatcatcagattctccaagg

SEQ ID NO: 571898 - DNA, 406 bp, Homo sapiens
aactttctctttctaaagagttcaaggttatcattctctgtttaaaagagacttatatagacttaaattatgtaagctaagttgcctattttcagataattttccagacaagattatatagttgcttcccataatgaaaggctctccacactttgctttttctattccatctcatttttatccctcctgctttataccccagtctaattatgctactctagagatatatgacagaatcagaagtgacatgaagaaagccatgtgataaatgcgggatataagaaagaataggagggacactttttgaaacytaaaacgaacatttcgtaaccccattgtataacccatcattttttttgaagtgtttgttgtttttagagatgtaatttattctggagtaatgagt

SEQ ID NO: 571899 - DNA, 497 bp, Homo sapiens
tgaattcaatatcaaggattgatatataacatttgcattgtccccctcaagggtctgatagaccaaccctttgcccaactttaaccactatttccataggtctagaatcctctctttcatccagtctcaattcccctctagagatcttactggatgtacacccaaattagaaaattgttgggaggatgaaatgagagaatgcttagctggcatataggagttatcaacacatgtagctctgattacttctgtaacttgctataggaaggkgaagaaagcagacgttgagtatattaaacatatattaggctctgattgattttgatttgcttagatcagtggctctcaactggggatgattctttcctaagagacacttggcaatgtctggagatgttttgatcctcatgactagggctggcagggagagtgttctgggtgggctactggcatctagtgtgtaaaggttgttgctaaacatcctgcagtgcgcagga

SEQ ID NO: 571900 - DNA, 607 bp, Homo sapiens
atatatgtataatttgtttcttttctgtttctgtttctgtttctgtttctttttctttttcttttgagttgaagtttccctctgctgcccaggctggagtgcaatggctcactgcaacctctgcctcccgggttcaagygattctcctgcctcagcctcctgagtagctgggattacaggtgcatgccgccatgcccgggtaatttttgtatttttagtagagatgaggtttcaccatgttggccagactggtctcgaactcctgacctcaggtgatccgtctgccttgacttcccaaattgctgggattacaggtgtgagccactgcacccggcctaatttgtgtatttctaacaatacttacataaggcaggaactattattatttctatttggcaggtaagaaaactaatacatcagatttgtacctcccaaaataataactgtgagctatatgtggttattttaatttaaattaattatctctcatatgtaacattagccacatagcaagcgatcaattgtcatatatggctagggactactatattggacaggacagattatagaacattgccattgatgcagaaaattctattggccagta

SEQ ID NO: 571901 - DNA, 656 bp, Homo sapiens
caacatatgcaaatcaataaatgtgattcatcacataaataattaaaaactaaaaccatatgatcatctcaatagacatggaaaaaaagtcttcagtaaaatccaacatcccttcatgatraaaaccctcaacaaacttggcatcaaaggaacatacttcaaaataataagagacttttgacaaatccatagccaatatcatactgaattggcaaaagctggaagcatcccccttgagaaatgaagcaagacaaggatgcctactctcaccactcctattcaacgtactactggaagtcattgccagaacaatcaggcaagataaagaaataaaagacatccaaataagtaaacaagaagtcaaactatctctcttcattgacactataattttatacctagaaaacattaaaaactctgccaaaaggctcctagaactgataaatgacttcagtgaagtttcagatggaaaatcaacatacaaaaattagtagcatttctaaacatcaataacgttcaagttgagagcgaaattaagaatatacaatagctataaaatacctaagaatacatctaaccaaggaggtgaaaggtctctgcaaggagaactatgaacactgctgaaagaaatcatagatgacacaaacaaatgtaaa

SEQ ID NO: 571902 - DNA, 656 bp, Homo sapiens
caacatatgcaaatcaataaatgtgattcatcacataaataattaaaaactaaaaccatatgatcatctcaatagacatggaaaaaaagtcttcagtaaaatccaacatcccttcatgataaaaaccctcaacaaacttggcatcaaaggaacatacttcaaaataataagagacttttgacaaatccatagccaatatcatactgaattggcaaaagctggaagcatcccccttgagaaatgaagcaagacaaggatgcctactctcaccactcctattcaacgtaytactggaagtcattgccagaacaatcaggcaagataaagaaataaaagacatccaaataagtaaacaagaagtcaaactatctctcttcattgacactataattttatacctagaaaacattaaaaactctgccaaaaggctcctagaactgataaatgacttcagtgaagtttcagatggaaaatcaacatacaaaaattagtagcatttctaaacatcaataacgttcaagttgagagcgaaattaagaatatacaatagctataaaatacctaagaatacatctaaccaaggaggtgaaaggtctctgcaaggagaactatgaacactgctgaaagaaatcatagatgacacaaacaaatgtaaa

SEQ ID NO: 571903 - DNA, 599 bp, Homo sapiens
tgaggtcttcatttgctttttatttgtgttattggccatatatattttcttttctatgaaatgcctgttcatatcttttaaccagtttcctttgagttgtttatcttatccttgacaatataaaaataattccacatttgtggtttacaggtatagcaactattttctcccattttagggattctcttttcaatttaaaaaaatatctatttttaattgacaaaagtggcatatacttatgatgtataacataatgccttgatatatgtatatattttggattggctaactcaagttaattaacatatccaatactccatatacttattatttttgtggtgggaacacttaaaatctactctcctagcaattttcaattatacaataccttcctattaactatcatcatcatcttgtacaaagatctcttgaacttattctgcctgaaattttgtatcctttgtccaacacttcccygatccccactcctggaccatggtaaccactactctacaccctgcttctgtgagtctgaattttttagattccacatataagtcagatcatgcagtatttgtctttctgtgccagttttattt

SEQ ID NO: 571904 - DNA, 523 bp, Homo sapiens
tgtacaaccagcttgttcacttatactcttcaggtctctgtgtcaatttcatattatcagagaggcttactaatgttgcaccccatgcattatcattttttctcttattgacttggtaccctcttcattgcttttctcaccacttgacattatatatatatatatatatatatatatatatatatttatatacgcctatgtctatgtctatatcgctaaccctatatctgggtgtacatctatatttatgcctctacctatgtctatgtstttatatgtctaagtctatctatatgtctatctataagaacagagaggcttttccgtttttttcattgctgcctccctagacctagaaaaattcctggcattgatgaattctgaaacaggaaaaaaaccatgttaggacaaaaggaactattttctaacactgtaaataatgtatttgccatttgtggcttttccagataatttattctgacctgaaattagaatggatgagtggaagatatataaagaaaat

SEQ ID NO: 571905 - DNA, 458 bp, Homo sapiens
gcatatgtattttgagattcgtcctacaatgttgtacatatcaaaatgcatttctttttattactgagcatcagtattcagtggagtgaataaagaagatccaccttcaccaacgtgtgattagatgaggagtatcatstaatcctctaaaggcctggatagaacaaaaggcagagaaagggcaaattcactctcttctggaactgagacatccatcttctactgtccttgaacaacagaaatccaggttctcaggtctttgacttttggaccttagagcagcaatcctctaggttcacaggcctttggactcagactgaattacaccacagggatgtctgattctccagcttacagataacagattgtggtacattttggtctccataattgcataagccaattcctctaactagttccctcttatatatttatgtatatgctatcagttttgtttt

SEQ ID NO: 571906 - DNA, 324 bp, Homo sapiens
ggtacatattccatagacattttctccaacggcgttggcttcatttttattmtctcatttttttgatcaataatgatctttgtttttaatgaagtccaatgtttcattcttttcctttgtgattattgcttttttgtgctgtgtaaaacaactattgtcttccctaagaacataaaataattttagtatcctgagacttcactgaagttgcttatccacttaaggagattttgggctgagttgatggggttttctaaatatacaatcatgtaatctgcaaacagattacaagcattcctatataccagtaacagacaaacagcc

SEQ ID NO: 571907 - DNA, 570 bp, Homo sapiens
ttccaaatctgcctgatgtatatgagagaagatcattatatttctgctccatggcccatggaaatcctgcagtgctttctgaatatacagtctattccacaaacactcatccccacacgcccgcccctctccattaatggcctactgggatatttagccaagactgtggtgcacagtagagctataagctattaatcaaacttatatttcatactaagagaaactcagatatatctaaagctctaatctgttaatatttcttcccgtctttagattttttccttaaactttattagaagaaaaagctcaacagattaatattacatattgaaaataatacatgtggtttatatgaagaattataaacttggtaaatgaacacccaattgtgtaggcatcccacatgtcagataattcatgmcttgaggcagaaatattcttggagataaattcatatcacatgtgcatctcattatggctcacttcacaatagaggtgatgtgctgtaatatctcaaataagtggctggtggaaaagaatatgccaaaattggtcaaaattttagcttta

SEQ ID NO: 571908 - DNA, 601 bp, Homo sapiens
gtgcatacatacaatagagtatttttcagccttaaataaagaatgaaattctacaatatgtgataatatggatgaacctataggacattatgctaagtgaaataatccagtcacagaaggataaatactgcatgattccacttaccatgacatatctaaaacagtcaaactcaggagcagagagtgaaatggtagctaccaggcacagggagaaaaagaaaaatataaattattgctcaataggtataaagtttcagttatgaaagatggatatgttctagmaatctgctctacaacatagtacctatagttaacaatatgatattgtgtactttaaaatatgttaagaagatagattccacattaagtattcctactgtgatgtgaatgcaaaagaaattgcagtttctgcattgctggaattttctgttttatattatatatattttatatttttttggttattttatgcatcattttcgtgggtatttctcactttatttttatctttgctgatgacttattacttgctgtttattttatgtttattttagagtatgaaaatgatgttagacaagaagcaaattcaagcaattttctt

SEQ ID NO: 571909 - DNA, 560 bp, Homo sapiens
aatggaaagacatttcatgctcatgggttgaaagaattaacataattaaaatgagctaacttcccaaagcaatctacagattcaatgcaatccctataaaaataccagagtcatttttttttacagaaatgagaaaaagaattctaaaatttatatagaatcaaaaaaaaaaaagagccagaatagctgaagcaatcctgagcaaaaacaaacgaacaaaaatccccccaaccaaaaaaccccaaaaccaaaaacaacaaaacaaaacaaaacacaaaaacaaacaaacaaaaaacaaagctggaggcatcatacarcctgacttagaaatatattactaggcatggtattggtataaaaatagacacttagaccaatggaacagaatagagaagtcagaaatacatccacatgtttatagccaactgacatttgacaaagctgctaagaacatgtactggggaaaggacatccttttcaataagtgatcctaggaatattggatatccacatgcaaaagaatgaaactggacccctatctgatcatatacaaaaatcaa

SEQ ID NO: 571910 - DNA, 560 bp, Homo sapiens
aatggaaagacatttcatgctcatgggttgaaagaattaacataattaaaatgagctaacttcccaaagcaatctacagattcaatgcaatccctataaaaataccagagtcatttttttttacagaaatgagaaaaagaattctaaaatttatatagaatcaaaaaaaaaaaagagccagaatagctgaagcaatcctgagcaaaaacaaacgaacaaaaatccccccaaccaaaaaaccccaaaaccaaaaacaacaaaacaaaacaaaacacaaaaacaaacaaacaaaaaacaaagctggaggcatcatacaacctgacttagaaatatattactaggcatgstattggtataaaaatagacacttagaccaatggaacagaatagagaagtcagaaatacatccacatgtttatagccaactgacatttgacaaagctgctaagaacatgtactggggaaaggacatccttttcaataagtgatcctaggaatattggatatccacatgcaaaagaatgaaactggacccctatctgatcatatacaaaaatcaa

SEQ ID NO: 571911 - DNA, 495 bp, Homo sapiens
aaataagaatgtacagaaggacaattgactgccaataatctaccagtgacaacattctgattctgtaattcattcccaagtggaaaagtataaccaatgtattttcttattagttctgtttacttgtccagattaaaaaaaaamaaaacaaaacacctatcactgtattctagagagagcaaaccaaaatagaagacctcattgtaaaactatgcttttacaataacagcaacaaaaaatctctcttcatttcaaatattaactatgataataatgtacagagtcaaacaaaactctgatcatgacatagagagtcgaacaaatatagagtcatgatttgtgtgtattgataatatctgtccttcatgtgatctcatattcatgaattaataatcctctcaaagttatgagaactaggttattaatatgaattttgactatttggcttgctcatgattaatcacaggaaagaaaacaacaacaaaacaaaactca

SEQ ID NO: 571912 - DNA, 608 bp, Homo sapiens
tagcagggtttgagaggactgactccaattttgaaggaagttctaatgtgggtaaaacgctaccaaacggtaccacatgctacaaataaatctttcctgaaaggaagagtcaattactgtggaaaacttcagtgtcttagttttaaaatttgccacagccgggccgggcgcggtggctcatgcctgtaatcccagcactttgcgaggcccagatgggcagatcacctaaggccaggagttcaagaccagcctgaccaacatggagaaactccgtctttactaaaaatacaaaaaacaaaaacaaaaacaaacaaacaaacaaacaaacaaaaacagttagccgggcatgttggcacatgcctgtaatcccagctactcaggaagctgaggcaggagaatcgcttgaacccaggaggcggaggttgcggtgagccaagatcatgccattgcactccaacccgggcagcaagagcraaactcggtctcaaaataaataaataaataaaaataataaaataaaataaaatttaccatagccaccccatctttcagcaaccaccaccctgatcagtcagcagccaccaccctgatcagtcagcagccatcaa

SEQ ID NO: 571913 - DNA, 687 bp, Homo sapiens
cagggtttgagaggactgactccaattttgaaggaagttctaatgtgggtaaaacgctaccaaacggtaccacatgctacaaataaatctttcctgaaaggaagagtcaattactgtggaaaacttcagtgtcttagttttaaaatttgccacagccgggccgggcgcggtggctcatgcctgtaatcccagcactttgcgaggcccagatgggcagatcacctaaggccaggagttcaagaccagcctgaccaacatggagaaactccgtctttactaaaaatacaaaaaacaaaaacaaaaacaaacaaacaaacaaacaaacaaaaacagttagccgggcatgttggcacatgcctgtaatcccagctactcaggaagctgaggcaggagaatcgcttgaacccaggaggcggaggttgcggtgagccaagatcatgccattgcactccaacccgggcagcaagagcgaaactcggtctcaaaataaataaataaataaaaataataaaataaaataaaatttaccatagccaccccatctttcagcarccaccaccctgatcagtcagcagccaccaccctgatcagtcagcagccatcaacactgaggcaatatcttctgccagaaaaagatgattgactcactgaaggttcagatgatcattagcattttttagttataaa

SEQ ID NO: 571914 - DNA, 565 bp, Homo sapiens
tttccttaattcatattgggtttagtgatcacctacttcaaaargggagtgacagcgtttgaaaaataagctactacataaacttagaaaggggctatgccttgtgagtcattctcagagggctcagtctcttggttttaattaaaagtgaaataaagaattctttaagattatatcagccttttaagggcataagaaggtcactgatttgtaagcatcttctttctttttctaatggtgctgtttcccagattgaatcgtgtgaacaaggctcaaatttcctttcagaatctacagattcgtggcagagtggatgtgggaagtggggaacagagtgagaagctacagtgtacagagtgaacgtgattaaggctctgtgagaagatgagcttggatgtgagaatgccttgggtacagcccagattcctccaattgctagatcaaaacacacactttgcaaaattaatgagattattagaaacaataaactacctatgtaaagtgcctggctactgatctgtgtaccataaagcggctattattttgtccacactcctgagaagaa

SEQ ID NO: 571915 - DNA, 565 bp, Homo sapiens
tttccttaattcatattgggtttagtgatcacctacttcaaaaaggsagtgacagcgtttgaaaaataagctactacataaacttagaaaggggctatgccttgtgagtcattctcagagggctcagtctcttggttttaattaaaagtgaaataaagaattctttaagattatatcagccttttaagggcataagaaggtcactgatttgtaagcatcttctttctttttctaatggtgctgtttcccagattgaatcgtgtgaacaaggctcaaatttcctttcagaatctacagattcgtggcagagtggatgtgggaagtggggaacagagtgagaagctacagtgtacagagtgaacgtgattaaggctctgtgagaagatgagcttggatgtgagaatgccttgggtacagcccagattcctccaattgctagatcaaaacacacactttgcaaaattaatgagattattagaaacaataaactacctatgtaaagtgcctggctactgatctgtgtaccataaagcggctattattttgtccacactcctgagaagaa

SEQ ID NO: 571916 - DNA, 501 bp, Homo sapiens
ttaaggtggggcaggaacaaatcacaatggtggaatgtcatcagttaaggcggggcagggccttttcacttcttttgtgattctccagttacttcaggccatctgggcstatacatgcaagtcacaggggaagcgatggcttggcttgggctcagaggcctgacattcctgccttcttatattaataagaaaaataaaacaaaatagtgttgaagtgttggggcggcgaaaatttttggggggggggtggtatggagagagaatgggcgatgtttctcacagctgcttcaagcgggattaggggcggtgtgggaacctagagtgggagagattaagctgaagggagatcttgtggtaaggggtaatattgtggggttgttagaagaaacatttgtcatatagaatgattggtgatggcctggatacggttttgtatgaattgaaaaactaaatggaataagagaaggagaaaaacaggtaaaaaaggactaagaattggga

SEQ ID NO: 571917 - DNA, 501 bp, Homo sapiens
ttaaggtggggcaggaacaaatcacaatggtggaatgtcatcagttaaggcggggcagggccttttcacttcttttgtgattctccagttacttcaggccatctgggcctatacrtgcaagtcacaggggaagcgatggcttggcttgggctcagaggcctgacattcctgccttcttatattaataagaaaaataaaacaaaatagtgttgaagtgttggggcggcgaaaatttttggggggggggtggtatggagagagaatgggcgatgtttctcacagctgcttcaagcgggattaggggcggtgtgggaacctagagtgggagagattaagctgaagggagatcttgtggtaaggggtaatattgtggggttgttagaagaaacatttgtcatatagaatgattggtgatggcctggatacggttttgtatgaattgaaaaactaaatggaataagagaaggagaaaaacaggtaaaaaaggactaagaattggga

SEQ ID NO: 571918 - DNA, 501 bp, Homo sapiens
ttaaggtggggcaggaacaaatcacaatggtggaatgtcatcagttaaggcggggcagggccttttcacttcttttgtgattctccagttacttcaggccatctgggcctatacatgcaagtcacaggggaagcgatggcttggcttgggctcagaggcctgacattcctgccttcttatattaataagaaaaataaaacaaaatagtgttgaagtgttggggcggcgaaaatttttggggggggggtggtatggagaragaatgggcgatgtttctcacagctgcttcaagcgggattaggggcggtgtgggaacctagagtgggagagattaagctgaagggagatcttgtggtaaggggtaatattgtggggttgttagaagaaacatttgtcatatagaatgattggtgatggcctggatacggttttgtatgaattgaaaaactaaatggaataagagaaggagaaaaacaggtaaaaaaggactaagaattggga

SEQ ID NO: 571919 - DNA, 501 bp, Homo sapiens
ttaaggtggggcaggaacaaatcacaatggtggaatgtcatcagttaaggcggggcagggccttttcacttcttttgtgattctccagttacttcaggccatctgggcctatacatgcaagtcacaggggaagcgatggcttggcttgggctcagaggcctgacattcctgccttcttatattaataagaaaaataaaacaaaatagtgttgaagtgttggggcggcgaaaatttttggggggggggtggtatggagagagaatgggcgatgtttctcacagctgcttcaagcgggattaggggcgrtgtgggaacctagagtgggagagattaagctgaagggagatcttgtggtaaggggtaatattgtggggttgttagaagaaacatttgtcatatagaatgattggtgatggcctggatacggttttgtatgaattgaaaaactaaatggaataagagaaggagaaaaacaggtaaaaaaggactaagaattggga

SEQ ID NO: 571920 - DNA, 602 bp, Homo sapiens
gtaaactcccctaatctatacatctctcctattagttctgtccctctagagaacgctgactaatgccaattttggtactaggagtgattctagtggttacagaattttaaggatggatttctttagttggttttggggtttatggagttggctgcttaatttgatgagacccccaaatgctaagaactctacttctaatagtataaagaacactgatactctttggggtgaactgtatagtatgcaaaataaatacattgctactcctgattcaccgctcttgagaagcaaggaattagtgactctgcacatagtacctttgaccatatgtggagaaccaaggaatgtaatgaagttggttggttgctcctaagtttgctggataaagttgtaaccgcccaatgggttcacctttcccgctgcctagamagaactgacttatcaagacagaggaattgcaatggagaaagagtaattcacacagagctggctgtgtgggagaccagagttttattatcactcaaatcagtctccctgagcattcagggatcagagtgttgaaggatcatttggcgggtatgggctcagaaagtagggcttat

SEQ ID NO: 571921 - DNA, 572 bp, Homo sapiens
caatgctgatccttctcaaaacccacacccaacacctctgttttcatctagacctataactagactcaagtcatgacaggcccctaaaggtgagattcagagtgtgacacatgaggaagtgcactgcactccaaatgaactgctagggttttctaatttatataagtagaaatctggagaacaggcataggaacggatattacgggtgagggataatggtggaaggagcataaagttggagaaggctgaatttattaatattggcccactaagcagggattctacatttaatgttgcagtttagggagtaaaaaaaaaaagattttggccagacrcggtggctgacacctgtaatcccagcacttgggaggccggggcaggtggatcacctgaggtcaggagttcgagaccagcctgacccacatggagaaaccccatctctactaaaaatacaaaaattaggcaggcgtggtagcacatgcctgtaatcccagctactcaggaggctgaggcaggagaatcgcttgaacctggaaggtggaggttgtggtaagccgagatggcaccattgc

SEQ ID NO: 571922 - DNA, 519 bp, Homo sapiens
tgacacataaaccttcaacaaaatactagcaaactgatatcaacaatatattaaaaagataattcaccatgaccaagtggaatttttcccagggatgcaaggatggttcaacatacacaaatcaatcaatgtgatatatcagattaatagaatcaaggatctaaaccatattattgtttcaattaatgctgaaaaaatctgatcaaattcaacacctcttcaagataaacaccctaaaaaaacagggtattgaartaacatacctcaacataataaaaaccacataagacaaatccatacccagtattatactgaatggggaaaaactgaagggcttaccactaagatttggaatgcaacaaagatgaccacttccactactgttattgaaaatagtactggaaatcttagctggagcaaattggacaggagaaagaaataaagggcacccaaattagaagggaagaaaaattatccttgtttgcagacaatatgatcttacatttgaaaaaaactcaa

SEQ ID NO: 571923 - DNA, 519 bp, Homo sapiens
tgacacataaaccttcaacaaaatactagcaaactgatatcaacaatatattaaaaagataattcaccatgaccaagtggaatttttcccagggatgcaaggatggttcaacatacacaaatcaatcaatgtgatatatcagattaatagaatcaaggatctaaaccatattattgtttcaattaatgctgaaaaaatctgatcaaattcaacacctcttcaagataaacaccctaaaaaaacagggtattgaagtaacatacctcaacataataaaaaccacataagacaaatccatacccagtattatactgaatggggaaaaactgaarggcttaccactaagatttggaatgcaacaaagatgaccacttccactactgttattgaaaatagtactggaaatcttagctggagcaaattggacaggagaaagaaataaagggcacccaaattagaagggaagaaaaattatccttgtttgcagacaatatgatcttacatttgaaaaaaactcaa

SEQ ID NO: 571924 - DNA, 586 bp, Homo sapiens
tctgggcttaagctatcctccctcctcagcctcccaagtagctgtggctacaggcatgtgacactgtgccaagccctatgtatattatactacaatagcatttgcaagaaaaacgaacasttaaaagtttaaaaatttgtatgttgatgtaatttcacaacagtaacaggggtctatatatagttgtaagacttctttgttttacttgaacttgtgaaatatcgactcttaagtaagtagactgtgacaagttaggtttgtatattgtaatccctagagcagctactaaaatgcagtacaaagatagttgaaaagtagataaattaatatggaatactaaagtatattgaacagaggggaggggcacctcaccaaagaaagtacacagatgtcaaataagcatatgaaaagatgttccacattatatgttattagggaattgcaaattaaaacaaaaatgagataccacagcacagctattggaatggcagaagtccaaaacaatgacaacaccaaatgctggtgagaatgtggagcaacaggaacactcattcattggtggtgggaatgcaaaatggtacagcca

SEQ ID NO: 571925 - DNA, 512 bp, Homo sapiens
tgtgctgggagagatcccagggagactgtgtgttttgttaataataaacagctrggacaaatgatgtgtcttcacactgggacaaccgtctcacatgggaggctagccctcagcagctggctcacagctgccacaaacaacagtgattttttttttgccagttttataggcactattcttgtctctctgatatacatatatgaaaaatgcctataatatttgtatgtttctctttctcaaaatcccttcctttctttgccttcaaatattaatatatagggtaacttccctgaaccagaaaacagtcaaaattatttattaagtgctaatttatgcatagtttggtgctagaaaccatccaaaggacacaaccagcacttttgctgtggagtgggaattttagtttcagagaagcagtgattcaggctaacaaacagaaaatacaaaaaaacaggagaagggggctgcagaaaataaagcaaaatacatacagttttaccagcgtgggcaaa

SEQ ID NO: 571926 - DNA, 512 bp, Homo sapiens
tgtgctgggagagatcccagggagactgtgtgttttgttaataataaacagctgggacaaatgatgtgtcttcacaytgggacaaccgtctcacatgggaggctagccctcagcagctggctcacagctgccacaaacaacagtgattttttttttgccagttttataggcactattcttgtctctctgatatacatatatgaaaaatgcctataatatttgtatgtttctctttctcaaaatcccttcctttctttgccttcaaatattaatatatagggtaacttccctgaaccagaaaacagtcaaaattatttattaagtgctaatttatgcatagtttggtgctagaaaccatccaaaggacacaaccagcacttttgctgtggagtgggaattttagtttcagagaagcagtgattcaggctaacaaacagaaaatacaaaaaaacaggagaagggggctgcagaaaataaagcaaaatacatacagttttaccagcgtgggcaaa

SEQ ID NO: 571927 - DNA, 422 bp, Homo sapiens
tataaagttaaactgttacagaattgtttttcttaaactgcaataatgagactttagcactctcttgtcctctaaaagacattatttcatgacatgtgcccattggcagtatttgagaatctaagaaagtagatcamactaaatattgatatgcagacactaaaatcgtacaaccacttggatgactaggtttgagatattcccaaagtgacaggtttttgttttgttttgttttgttttttgagacaaggtctcgccctgtcgcccaggctggaatgcagtggtgcaatctcagctcactgcaacctctgcctcctgagttcaagcaattctcctgcctcagcctccctggtagctgggactgcaggcatgcaccaccacacctggctaatttttgaatttttagtagagacagggtttct

SEQ ID NO: 571928 - DNA, 422 bp, Homo sapiens
tataaagttaaactgttacagaattgtttttcttaaactgcaataatgagactttagcactctcttgtcctctaaaagacattatttcatgacatgtgcccattggcagtatttgagaatctaagaaagtagatcacactaaatattgatatgcagacactaaaatcgtacaaccacttggatgactaggtttgagatattcccaaagtgacaggtttttgttttgttttgttttgttttttgagacaaggtctcgccctgtcgcccaggctggaatgcagtggtgcaatctcagctcactgcaacctctgcctcctgagttcaagcaattctcctgcctcagyctccctggtagctgggactgcaggcatgcaccaccacacctggctaatttttgaatttttagtagagacagggtttct

SEQ ID NO: 571929 - DNA, 606 bp, Homo sapiens
aaatcatgagctatttagtgagaaaatacacaggccttgtcactgagaatgcaacagtaaaacatgcttacagtctctaggcactgtgagtgatgtgggcttagatggagttacatacagattgtcatagcagctcaaagaaagtctacctattttttttcccccaggggaggaggcatcctgcagaaaggggtctaggctgagacctgtgtaggatgaatgtctgatagacmcatgcttggtacataccatgcttggtaaataacatgcaaataacacaccctttgtaatcactgcatttacattcatccaagaacaagacaaatctgctgtgttctcccatgggcagcagaagttataaaagcaaacacggtagaaccagaaggatgaaagaaatactgatcagaattaggacaaagccacgttccagccactctaggctgagaaagcatggtcaggagagccaaaatagctgattgagacaacatatagaccatttatctcagcattctacatatctatatcatacatatattatccagttcacagcctattttaggtgtaaagaaggtaaaggctttaagttttttggtttcacggaattgc

SEQ ID NO: 571930 - DNA, 606 bp, Homo sapiens
aaatcatgagctatttagtgagaaaatacacaggccttgtcactgagaatgcaacagtaaaacatgcttacagtctctaggcactgtgagtgatgtgggcttagatggagttacatacagattgtcatagcagctcaaagaaagtctacctattttttttcccccaggggaggaggcatcctgcagaaaggggtctaggctgagacctgtgtaggatgaatgtctgatagacacatgcttggtacataccatgcttggtaaataacatgcaaataacacaccctttgtaatcactgcatttacattcatccaagaacaagacaaatctgctgtgttctsccatgggcagcagaagttataaaagcaaacacggtagaaccagaaggatgaaagaaatactgatcagaattaggacaaagccacgttccagccactctaggctgagaaagcatggtcaggagagccaaaatagctgattgagacaacatatagaccatttatctcagcattctacatatctatatcatacatatattatccagttcacagcctattttaggtgtaaagaaggtaaaggctttaagttttttggtttcacggaattgc

SEQ ID NO: 571931 - DNA, 582 bp, Homo sapiens
caactatcactgtaggttgccatgagaataaaataataagtaatgcctagtacaatgctaggcactacaaaagactatatgctttttcttcttcctttccattttctgtctaccaagtgagatgttcatttgtttgatagcatttatggaacacattwtataacaggcactgtgttagaacctggagatagggcatgaccattggccaaatgagtgtgactctctaacagggaggatagacattaaccaattaatgacataccaattatatttgccaattctgtgtattctaaaggaaaagcccaggatatgctgggataatttgaacagagaagagtacctgaggtcattagggaaaacaagattgaattaggtgaagacagaaaagggaggggaagaagcttccatgtaggaagaatctgaaaacttaaaaagtatctcctaaactcattagggtaagaatttttcagatttatcatgaagacctccagggaattattttgcactttcctttagcaacctattctagtgtgtgtttttgttgttgttgttgttgttgtgggggaggtggattataatata

SEQ ID NO: 571932 - DNA, 582 bp, Homo sapiens
caactatcactgtaggttgccatgagaataaaataataagtaatgcctagtacaatgctaggcactacaaaagactatatgctttttcttcttcctttccattttctgtctaccaagtgagatgttcatttgtttgatagcatttatggaacacattttataacaggcactgtgttagaacctggagatagggcatgaccattggccaaatgagtgtgactctctaacagggaggatagacattaaccaattaatgacatwccaattatatttgccaattctgtgtattctaaaggaaaagcccaggatatgctgggataatttgaacagagaagagtacctgaggtcattagggaaaacaagattgaattaggtgaagacagaaaagggaggggaagaagcttccatgtaggaagaatctgaaaacttaaaaagtatctcctaaactcattagggtaagaatttttcagatttatcatgaagacctccagggaattattttgcactttcctttagcaacctattctagtgtgtgtttttgttgttgttgttgttgttgtgggggaggtggattataatata

SEQ ID NO: 571933 - DNA, 600 bp, Homo sapiens
  misc_feature 1, 2, 3, 4, 5, 6, 7, 8, 9, 10, 11, 12, 13, 14, 15, 16, 17,18, 19: n = A,T,C or G
nnnnnnnnnnnnnnnnnnncatctgcctttattttcttttacgttttgtttaaaaaaaaaactctcaaaagggaaagaacacagccatgaaactgatagtgacaaaaagcactctctttttttctttatcaggtcagactctcatctaaatgcagttctgatgaatagtttaaaaaataaaaaagaagcccgctttgtggatttggagtgggtctcaagaccagccatgaaacctaatgattatttaacggcgctgcactcgaggctggcttctgtaagcctcctttccccsctttaagagtttgatgaataggtcttgtgacagccatttaggaataaacaagaattcatcagtctgcataagaagaagccagtttatagattaagtttcctgaggtaattcatgaggtcagtcccatttagatggagactattagggcctggctctcgagagtggccgtagaggggagtcactccaaatggaccccgctcacacaaagctccctttcagggagaagcctgccatttttatgaccctgctgttaggacgcacatcaacttgtcactgtgcagatctgctagggcaagacctcatcactc

SEQ ID NO: 571934 - DNA, 551 bp, Homo sapiens
taggtctgctttaaatgtttcctctataggtaggtgtcagctgagtttgttccagttttgctttctgctattacagggcagcactgagttcaatgcaatgccttatgagttcagtgctctccctctccctagagttcagattctctctctgcaccatgctgccactgccggaggatgagggatgagttgtgtcagaggcgcaacactgttttgcctaactcttcggtgtttctttgagtaatatatagttaaaccaggtacttcaagtgttcacttgatttttagttcttataaaggtgcttttttgggtgtagatacttgttaaattgatgtccttgcctatgggatgattggtagagccttctattctggcatcttgcacaacctcctctttttacatgtgattaactgataaatactcttactaatactgagcttgataaaggaaagaaacatgttcaactgatagaacgttttctcaaatgttcaaatgagattttaaaamataaaacacattcatctcttgttataatcagtgtaaacagtcatca

SEQ ID NO: 571935 - DNA, 558 bp, Homo sapiens
gtaactcaggaatggaaaaccaaacatcgtatgttctcacggatatgtcggaggtaagctatgaggttgcaaaagcataagaatgatgtaatggactttggggacttgggaggaagagtgggaggagggcaaaagatagaagactacaaatagggtgcaatgtatactgctttggtgatgggtgcaccaacatctcacaaatcaccactaaagaacttactcatgcaaccaaataccacctgtaccccattaacttatggaaaaataaaaatgaaaataaaatatatgtagaaattrgctattgagtttttactatgtaaaattttggtttttatggattaaatataattaaaatgcaattttactttaaaaaattagaccaccaccacccatcaactaccaattccccacccccccaactctttttttgagacagggtcttgctctgtcacccatgctgtagtgcaggagcatgatcatggctccctgcagcctcaacctcctgggctttagcgatcctcctacctcagcctgaagagtaggtagggctacaagtgt

SEQ ID NO: 571936 - DNA, 558 bp, Homo sapiens
gtaactcaggaatggaaaaccaaacatcgtatgttctcacggatatgtcggaggtaagctatgaggttgcaaaagcataagaatgatgtaatggactttggggacttgggaggaagagtgggaggagggcaaaagatagaagactacaaatagggtgcaatgtatactgctttggtgatgggtgcaccaacatctcacaaatcaccactaaagaacttactcatgcaaccaaataccacctgtaccccattaacttatggaaaaataaaaatgaaaataaaatatatgtagaaattggctattgagtttttactatgtaaaattttggtttttatggattaaatataattaaaatgcaattttactttaaaaaattagaccaccaccacccatcaactaccaattccccacccccccaactctttttttgagacagggtcttgctctgtcacccatgctgtagtgcaggagcatgatcatggctcmctgcagcctcaacctcctgggctttagcgatcctcctacctcagcctgaagagtaggtagggctacaagtgt

SEQ ID NO: 571937 - DNA, 548 bp, Homo sapiens
tcctcctacctcagcctgaagagtaggtagggctacargtgtatgccaccaggcccagctagtttttaaaatgtttttgtagagacagggtcttgctatattgtccaggctggtcttgaactcctgggcttaggtaattctcccactttggtctcccaaagtgctgagattacaggtatgagccatgatgcctggccaaccaattcacttttcttgctcaaactaaagttgctgttgtttataacatgtcctgacactatggcctatatcaggacttgttctcagtttccatatctaaaatcagacaaaattctgggatcaaatccatgaattggacatgagttgaataatgttgaatgagatgttgtagggaatatagcaattgaagatcttgtggtgtggatacacatcacacacatagacatacacatgtgtacacatacacacacacaagagcatacatatattaattcaccattggtattgacaagttcttgatgtgtggcttctcttcttcctttttctgaatagaaatttttatttaactt

SEQ ID NO: 571938 - DNA, 548 bp, Homo sapiens
tcctcctacctcagcctgaagagtaggtagggctacaagtgtatgccaccaggcccagctagtttttaaaatgtttttgtagagacagggtcttgctatattgtccaggctggtcttgaactcctgggcttaggtaattctcccactttggtctcccaaagtgctgagattacaggtatgagccatgatgcctggccaaccaattcacttttcttsctcaaactaaagttgctgttgtttataacatgtcctgacactatggcctatatcaggacttgttctcagtttccatatctaaaatcagacaaaattctgggatcaaatccatgaattggacatgagttgaataatgttgaatgagatgttgtagggaatatagcaattgaagatcttgtggtgtggatacacatcacacacatagacatacacatgtgtacacatacacacacacaagagcatacatatattaattcaccattggtattgacaagttcttgatgtgtggcttctcttcttcctttttctgaatagaaatttttatttaactt

SEQ ID NO: 571939 - DNA, 548 bp, Homo sapiens
tcctcctacctcagcctgaagagtaggtagggctacaagtgtatgccaccaggcccagctagtttttaaaatgtttttgtagagacagggtcttgctatattgtccaggctggtcttgaactcctgggcttaggtaattctcccactttggtctcccaaagtgctgagattacaggtatgagccatgatgcctggccaaccaattcacttttcttgctcaaactaaagttgctgttgtttataacatgtcctgacactatggcctatatcaggacttgttctcagtttccatatctaaaatcagacaaaattctgggatcaaatccatgaattggacatgagttgaataatgttgaatgagatgttgtagggaatatagcaattgaagatcttgtggtgtggatacacatcacacacatagacatacacatgtgtacacatacacacacacaasagcatacatatattaattcaccattggtattgacaagttcttgatgtgtggcttctcttcttcctttttctgaatagaaatttttatttaactt

SEQ ID NO: 571940 - DNA, 441 bp, Homo sapiens
cctaagaataattggtgttcctgaggaagaagagaattctaaaagcctggaaaacatatttgggggaataatcaaggaaaacttccctggccttgctaaagacctagacatcctaatacaagaagcacaaagactatctgggaaatacatgacaaaaagaccttcacctaggcacattgtcatcaggttatccaaagtcaagatgaaggaaagaatcttaagagctgtgggacagaagcaccaggtaacttacaaaggaaaaccagttagattaacagcggatttctcagcagaaaccctacagtcgagaagagcttgggtacctatcttcagcctcctcagacaaaaaaattatcagtcaagaattttgtatgagtgaaactaagcatcatatatgaagrtaagatacagtcattttcagacaaacaaatgctgagagaa

SEQ ID NO: 571941 - DNA, 656 bp, Homo sapiens
ccaggcaaacagggtctggagtggacctccagcaaactccaggagatgtgcagcagaggggcctgactgttagaaggaaaactaacaaacaggaatagcatcaacatcaacaaaaaggatgtccgcacaacaaccccatctgaggtcaccaacaacaaagaccaaaggtaggtaaatccacaaagatgaggaaaaaccagcacaaaaaggctgaaagttacaaaaaccagaatgcctcttctccaaaggatcacaactccttgccagcaagggaacaaaactggatggagaatgagtttgacgaattgayagaagtaggcttcagaaggtgggtaataacaaactcctctgggctagaggaacatgtcctaaccactgcaaggaagctaagaaccttgaaaaaagcttagaggaattgctaactagaataaccagtttagagaagaacataaatgacctgatggagccgaaaaacatagcacaagaacttcgtgaagcatacacaagtatcaatagccgaatcgatcaagtggaagaaaggatatcagaggttgaagatcaacttaatgaaataaagtgtgaagacaagattagagaaaaaagaatgagaaggaacaaacagagcctccaagaaatatgggattgtgtgaaaagac

SEQ ID NO: 571942 - DNA, 581 bp, Homo sapiens
attttattgtttcaatgggtatgaatggcagtgccatgtgtatggtgtatgttttctgcatgcattacctctcttcagttagactcttatgttctttgagatcaggttctctgtcttgtacatactttcggatgaggttgtaattcttagtgtctaatctagtgcccagatggattctggcatacattgcaagctcagtgttttttctttatggacaaactgtttagatgtttactttcatatcagtgatttcaacaccacctgtrattctggataccagagtagaactgcatgttataaagaacaacagcattgacctgactgattggggcaaagcagataaacatttgcttaaaacttgagcaaggggagaggaagaattgtttagaagtggaagtgttaaaaaaaaaaaaaaggaaattatagagagggattatcgattatctaacaaagcaattcaagaatatctactagaacaatggaaatttgccaaatataaaaataaccagagaatgtaagttcacttttgaaacaattaaaaccacactgatattcctaatctgatctttattttttataaa

SEQ ID NO: 571943 - DNA, 477 bp, Homo sapiens
actttccaattaagttgttgggaaacgcccttttaaaagctgatgcattcagggcttgcttgccatctacttgtgatgtcaatgctaattgctttaagaacctaaagtttggaaaaatgaccatatttctgtattgcagaggccatatccattcttttgggaagcaacttttttaatagcaaaaaggtgcaatgtataaacacataatctagagtcatctattagaaattcatttgttccaaatacttctcccaatgtgtaacactgatacaaaataaccattccgtgatgtgcttcaaaaatgtaccagatgtattcctccattcttgtgggaacctgtggattagccttcccacatgagctatccctatgcaagaagataatttcctcctacttttcccatagctctgttgcaatttgcargacattatgggaaatttgccacaatatgtgggacattttggtcttctgctggaa

SEQ ID NO: 571944 - DNA, 549 bp, Homo sapiens
tatccaaattgttctgttatcaataatttatttctttgtgttactgaataatatttcactgtatagttataccatgatttgtttttccattcacttattgaaaaacactgggttatttccaatttggggccaatgtaattaaagatgctataaacattcacgtacaggttttgtgaaaacacaggttttcactttactaaaaaaaaaaaaaaaaaaaaaaaaaaaaaaaataccatgaraggaattgctgggtcatgtaataaggacatgtttagctttacaataaactgccaaactgttttcaaaatggctgtcatatttggtattgccatcagtgatgtatgagtgttccagttgctccacttccttgtcagcacttgatattgtcaatatagccattctaattaatgtatattactatctttcactattaagtattatattagcttgtagatgtcctttatcaggctgaagaactttccttcaattcctaatttgctgagagttttcattatgtatgaatattaaatatttttaaatacttttttg

SEQ ID NO: 571945 - DNA, 586 bp, Homo sapiens
ctgaaaggcatgcaggtggtagatttatgtggggcaacatttctcaagcattttgttctctaggatctttacacgctctttttttaaaaattaaattatatatatataaatatacatatataatatataatatacaaccaaattttgtaattatataaattatgataaaataattatatagtgtataattttataattaataaactatacatatataatacagatatatgtaatatattataktttatatattaattataaaattatacataaaataatataaaatatatattttataagtattataaaatatatattttataagtattataaaatataaatataaaatatatgtcctgtagatattttaaaatataatatataaaaatatataatgaatataaaacatgtaatacaatgtatatatttatcatatatatgaattacatatacatatatcacttatataaataaataaaaataaaaatatatatagtgtgcccttaccccaacttcccccaatgataatatcttacataaccatagtatatttcaaaacaaaaaaaattaattttggtacaataca

SEQ ID NO: 571946 - DNA, 506 bp, Homo sapiens
ttgcctgttcactctgatggtggtttcttttgctgtgcaaaagctctttagtttaattagatcccatttgtcaatttgggacattagtaattttctaaggattgcaytgaatctgtagattgcactgggcactattgtcactttaatgatattgatgcttccagttcataagcatgggattttttctatttgtttgtgtcatctatgatttctttcatcagtgttttgtagttttccttgtagagatctttcacctcctttggttaatgttttcctaggtatttaattcagccaacagttattgaatgcttattttataccagtcactaatgagaagtatagagtttacattccagtgggaaatacagcaagtaaacaaattctttatttaatcacataaagctgccatatcagtggatttttttcagttgattactgatttcatttttttgagttttatgtagcagaagatgataaatttaatggaaaaaaactaaagtagaaga

SEQ ID NO: 571947 - DNA, 599 bp, Homo sapiens
gctcacatctgtaatcccagcactttgggaggccgaagcaggtggataacttgaggccaggagtttgagaccagcctgaccaacatggtgaaaccccatctctactaaaagttcaaaaaaatagtattttctatggtggtgggcacctgtaatcccagttacttgggaagctgagacaggagaatcacttgaacctgggaggcggaggttgcggtgagccgagatcgtgccactgcactccagcctgggggacagtgacagagccagagagccagaccctgtccaaaaaaaaaaaaaaaaagcctcaatgttatattcaaaaagaaagaaaggaaggaaggaaaaaagaaagaaaaatgaaagaaggaaagagaaagaaaagaaataaaagaaacgaaaagagaagaaaagagaaaagaaaagaaaagttatctgggagctagggcctggaatggggaacctcacaaccctgcttgatrccctgtcctactgtggccgaactggtttccctgttgcaagacaaagtcctctttacttttccctctcctctcctcagggtaaggaagggtctcttttggagctgtgaattgtgctgcctg

SEQ ID NO: 571948 - DNA, 567 bp, Homo sapiens
  misc_feature 556, 557, 558, 559, 560, 561, 562, 563, 564, 565, 566, 567: n = A,T,C or G
agacatgaacagacaattctcaaaagaagacatacaagcagccaacaaacataatgaaaaaatgctccacatcactaatcatcagagaaatgctaatcaaaactacaacgagacaccatctcacaccagtcagaaaggctattattaaaaaatcaaaaaacaacatatgctggcgaggctatagtgaaaagggaacacttacacacygttggtgggaataaaaactagttcagccaccattcctgaaagcagtttggagatctctcaaagaacttaaaacagaactacattttgacctaacaatcccattactagttatatgtgcaagagaaaataaattattctaccaaaaagacatgcactcatatgttcattgcaatgctattcacaatagcaaagatatggaatcaacctaggtgtcccttcagtgatggattagataatcaccaacaaggcacatgtatacatatgtaacaaacctgcacgttgtgacatgtaccctagaacttaaggtataataataaaaataaaaatgaagaaagaaaattaagggagnnnnnnnnnnnn

SEQ ID NO: 571949 - DNA, 567 bp, Homo sapiens
  misc_feature 556, 557, 558, 559, 560, 561, 562, 563, 564, 565, 566, 567: n = A,T,C or G
agacatgaacagacaattctcaaaagaagacatacaagcagccaacaaacataatgaaaaaatgctccacatcactaatcatcagagaaatgctaatcaaaactacaacgagacaccatctcacaccagtcagaaaggctattattaaaaaatcaaaaaacaacatatgctggcgaggctatagtgaaaagggaacacttacacaccgttggtgggaataaaaactagttcagccaccattccwgaaagcagtttggagatctctcaaagaacttaaaacagaactacattttgacctaacaatcccattactagttatatgtgcaagagaaaataaattattctaccaaaaagacatgcactcatatgttcattgcaatgctattcacaatagcaaagatatggaatcaacctaggtgtcccttcagtgatggattagataatcaccaacaaggcacatgtatacatatgtaacaaacctgcacgttgtgacatgtaccctagaacttaaggtataataataaaaataaaaatgaagaaagaaaattaagggagnnnnnnnnnnnn

SEQ ID NO: 571950 - DNA, 567 bp, Homo sapiens
  misc_feature 556, 557, 558, 559, 560, 561, 562, 563, 564, 565, 566, 567: n = A,T,C or G
agacatgaacagacaattctcaaaagaagacatacaagcagccaacaaacataatgaaaaaatgctccacatcactaatcatcagagaaatgctaatcaaaactacaacgagacaccatctcacaccagtcagaaaggctattattaaaaaatcaaaaaacaacatatgctggcgaggctatagtgaaaagggaacacttacacaccgttggtgggaataaaaactagttcagccaccattcctgaaagcagtttggagatctctcaaagaacttaaaacagaactacattttgacctaacaatcccattactagttatatgtrcaagagaaaataaattattctaccaaaaagacatgcactcatatgttcattgcaatgctattcacaatagcaaagatatggaatcaacctaggtgtcccttcagtgatggattagataatcaccaacaaggcacatgtatacatatgtaacaaacctgcacgttgtgacatgtaccctagaacttaaggtataataataaaaataaaaatgaagaaagaaaattaagggagnnnnnnnnnnnn

SEQ ID NO: 571951 - DNA, 567 bp, Homo sapiens
  misc_feature 556, 557, 558, 559, 560, 561, 562, 563, 564, 565, 566, 567: n = A,T,C or G
agacatgaacagacaattctcaaaagaagacatacaagcagccaacaaacataatgaaaaaatgctccacatcactaatcatcagagaaatgctaatcaaaactacaacgagacaccatctcacaccagtcagaaaggctattattaaaaaatcaaaaaacaacatatgctggcgaggctatagtgaaaagggaacacttacacaccgttggtgggaataaaaactagttcagccaccattcctgaaagcagtttggagatctctcaaagaacttaaaacagaactacattttgacctaacaatcccattactagttatatgtgcaagagaaaataaattattctaccaaaaagacatgcactcatatgttcattgcaatgctattcacaatagcaaagatatggaatcaacctaggtgtcccytcagtgatggattagataatcaccaacaaggcacatgtatacatatgtaacaaacctgcacgttgtgacatgtaccctagaacttaaggtataataataaaaataaaaatgaagaaagaaaattaagggagnnnnnnnnnnnn

SEQ ID NO: 571952 - DNA, 581 bp, Homo sapiens
tgcctagggactttgggacttgaacaatgaaacagcaataaggtctctggatttccttattgtctcccatatatcccagacaggatacacatcccctgtatctctaataggcacacacaaaatatgctccaggagacacctaatcccctagccaagggaccaggaagatggtggcctgatgacmgaaaatctttttggtgatacccatgctacaccagccagacacaacaaaaaaacataaccattctcccgaccgccgttgacaatttctgcctcgctgggagctgatcttccactggatccttgacctaaggaagcaggcaaaagcaggggtagtactcccatcccccacccagtggccttagtggggctgagcagggagctcatctttcattcctctcctggtggaaacaggtggtgctcagattccccaccagagtagtgtcagcaaggcccggtggcgaatccacccccactcagcagcaacaagaaccaatgaagtggcttaaggtggagcccatcaccagtgtgcttctgctacccaccctggggccagcaggggtccagcagggagctgagtc

SEQ ID NO: 571953 - DNA, 581 bp, Homo sapiens
tgcctagggactttgggacttgaacaatgaaacagcaataaggtctctggatttccttattgtctcccatatatcccagacaggatacacatcccctgtatctctaataggcacacacaaaatatgctccaggagacacctaatcccctagccaagggaccaggaagatggtggcctgatgacagaaaatctttttggtgatacccatgctacaccagccagacacaacaaaaaaacataaccattctcccsaccgccgttgacaatttctgcctcgctgggagctgatcttccactggatccttgacctaaggaagcaggcaaaagcaggggtagtactcccatcccccacccagtggccttagtggggctgagcagggagctcatctttcattcctctcctggtggaaacaggtggtgctcagattccccaccagagtagtgtcagcaaggcccggtggcgaatccacccccactcagcagcaacaagaaccaatgaagtggcttaaggtggagcccatcaccagtgtgcttctgctacccaccctggggccagcaggggtccagcagggagctgagtc

SEQ ID NO: 571954 - DNA, 581 bp, Homo sapiens
tgcctagggactttgggacttgaacaatgaaacagcaataaggtctctggatttccttattgtctcccatatatcccagacaggatacacatcccctgtatctctaataggcacacacaaaatatgctccaggagacacctaatcccctagccaagggaccaggaagatggtggcctgatgacagaaaatctttttggtgatacccatgctacaccagccagacacaacaaaaaaacataaccattctcccgaccgccgttgacaatttctgcctcgctgggagctgatcttccactggatccttgacctaaggaagcaggcaaaagcaggggtagtactcccatcccccacccagtggccttagtggggctgagcagggagctcatctttcattcctctcctggtggaaacaggtggtgctcagattccccaccagagtagtgtcagcaaggcccggtggcraatccacccccactcagcagcaacaagaaccaatgaagtggcttaaggtggagcccatcaccagtgtgcttctgctacccaccctggggccagcaggggtccagcagggagctgagtc

SEQ ID NO: 571955 - DNA, 407 bp, Homo sapiens
tgtggcctgcccggacctgtctttccgtaccagggatggtcaccctcacctacttcaatggaggccaagccatacgacacaaaagatctgtgcccttcagcctctgccctgttgttggggactccaagaatgtgaaagaagagagatataaaagcagcatgagaagcaagaaattgctaagcccattttacgttggatactatcacttgatggagctaaytgcaagctaatatcaaggacacattaaagaaccataaataagactttagaattaatttctggatctattattctatttcaacattagatttgtctgttcctattgattattacctaattctctatactgctggactttgttctaattattttatttatttttattttttaaattatactttaagttc

SEQ ID NO: 571956 - DNA, 570 bp, Homo sapiens
aagcagccgagtatgtgccgggcctctgcttctctctttcagtaagagggagaaccaagaaagaggctgaagcatggtctgcagagaaggcacttgtgcaaacaccaggagaatgaggggcctgagttgtcttcatttctcctaaaaacacgcatttcctcccaggccaccctagtgagggcatgaagcacagcgtgtgtgtctgtgtgtgtgtgtgtgtgtgtgtgtgtgtgtttgcaggaatatgcatgtgtatgtgtgtgcatgtgtgtgtgtgcaggtatatacatgtgaatgtatttatgtatgtgcatctgtgtgcatgtgtgtgtgcatgtgtgtgtgcaagtatatgcatgtgcatgtatgtgcatgtgtgcgtgtgtgtgtgtgcgcctgtatgtgtgtgttgcagggctttacagcggacaggatgtgggagggcagctgcagctccaagctgcaagtctttctgatagaatggttaagattccctggaccacagaaagartgttttcatttgcacctatttttattagcatttaaagctgtattcttcgtagcacgtga

SEQ ID NO: 571957 - DNA, 366 bp, Homo sapiens
gtgggaacacagaaaaaaaatcatgaaataattgtgaagtatttaagccaggcacgatggctcacgcctgtaatcccagcactttgggaggctgagacgggcagattacctgaggccaggagctcgagaccagcctggccaacaggacaaaaccccgtctctgctaaaaacagaaaaattagtcaggtgtggtggcacatgcctgtaatcccagctacttgggaggctgaggcaggagtatcacttgaacttgggaggcrgaggttgcagtgagctgagatcacgccaccacactccagcctgggtaacagcgcgactgcgtttcaatcaatcaatcaatcaatcaataaaatatttaaaattata

SEQ ID NO: 571958 - DNA, 661 bp, Homo sapiens
caataacaatttcaagatgatgcttgtcactcctttcactattattagctagcacatggttcagaactttcacacacattgtggcttttagacttctaacttttttctttttttgacatggagtctcgctctgttgcccaggctggagtgcaatggtgctatctcgtctcactgcaacctctgcctcctgggttcaagcgattctcctgcttcaacctcccaagtagctgggattacaggcacctgccaccacgaccagctaatgtttttgtatttttagtagagacagactttcactgtcttggccagkacggtctcgatctcttgacctcataatcctccctcctcggcctcctaaagtgctgggattacaggcttgagccaccgcgcccggccctagactcctggcttttaagtaaatcagagatacatgtttacatgaggacttgttgcttatctctacttagaaaagcactacatttttcttgactatttatgggaatcatattgaaatgttattttactagaaattaggaatgacctctttaaaatgttttcagatgttaatattaaaagattaaaaacccattttcaaccatgaaagctatagcttactcattggcaaatgacaaaaattctgaaaatcaaatattttatattc

SEQ ID NO: 571959 - DNA, 567 bp, Homo sapiens
aaccagacggtgcaatctagcttgcaaacataattctaagaagtttttaacttagatgtagtaatgcttcatacagtcacttattcagacttaagtgttgaacatcaactatatgccattgttttcagcactggagatacactactgaacaaaattaaaaaatcgtttcttcctgagtcttagattgcaggtcctaggaaatcttaccataccacamgatagtccctgttttccggaaagtaacgaaaatcacctaaaaagatcaggtagcttttcttgtaaatcctgagaccatgagaggtctcttttaaaaaaattgtacaaatgtatggggatacacgtgtagtttcgttacaggcacagatttcatagtggtcaagttggggcttttagggggtacccatcactcaaataatgtaaattgtgcccattaactaatttctcatcatcctcctcctcccatcttctaacccttttgagtgttcattacctgtcaatcattccattctctacatccatgtgtacacattttttagtccctacttaggagtgagaatatgtgatatt

SEQ ID NO: 571960 - DNA, 508 bp, Homo sapiens
gaattcaccaaagataggtayatatgattaatgatggtggaaaaaagagggttggtattgacaaggaaatgtggttggtgtctagataatttgtagtaatgctattttattaattgtactccttctaaaaaaacaaccagtttgggtggggaatggataggcaaaagataaaaatgtatttctagttttaaagacaaaattccctcttggatgattctacatatttaggcattcatatcttaatttgaaacacatttaccttgtaactagctttgtggtgcatctgacactgcagcagaagattggcaataggcctggaaaaagggatacagatagactgatgtgggagaagggctctgatttacaagaccagaacacagcatgaatccactggaggcctgaatggtagtgaacacagaacagagataggtggatctgcagaggccactaactgttctgttgttctcagaagagtattactgatatatacctgagcatatggctgtgg

SEQ ID NO: 571961 - DNA, 373 bp, Homo sapiens
agattttaattcagtaggtgtagggtggcgcargaatctgtgatgctgatatgcactgggatttatgctatcaaggataatcttttatttctttagttctccaaagcatgtttgtttttatcttttgaatattcccttgcattttcccctgcactttactctgaagtgggaataatggaacttgggtgcctgttggctgattcaccatgtttagttagtagatctgtgaatgtaatctttaatggatttaggcagaatgtccaatgtggaagtaaattcagtctgtcttggaattaattgtagaatgtagtaaagtagccttcatttatttgcatatcttttggactaaacttctgtatttaatagaatgcct

SEQ ID NO: 571962 - DNA, 420 bp, Homo sapiens
ggtagttttactatattatctttagaagttttatggttttgcttctcatcttattcttaatccactggaaactacgtgttgtatagtcagtgttcatttatatttactcacatatttgtcttcttacgtactcaccatttcttctcgcaactcawgtcttccatctaggtgaacaccattctactgaagaacatctcttagaacttcctttagtgaaggtctcttagttagcaaattcagcatttgtttggtttttatgacttaaatattgtcttatatttggcctgtttattaaaagatatattaatttcatatgtgattattttttctcagtacattgtcttcttgcttccatttttaagacattagctcttggtctaaatccatattctttcatggataatgtgaattttctctctg

SEQ ID NO: 571963 - DNA, 420 bp, Homo sapiens
ggtagttttactatattatctttagaagttttatggttttgcttctcatcttattcttaatccactggaaactacgtgttgtatagtcagtgttcatttatatttactcacatatttgtcttcttacgtactcaccatttcttctcgcaactcaagtcttccatctaggkgaacaccattctactgaagaacatctcttagaacttcctttagtgaaggtctcttagttagcaaattcagcatttgtttggtttttatgacttaaatattgtcttatatttggcctgtttattaaaagatatattaatttcatatgtgattattttttctcagtacattgtcttcttgcttccatttttaagacattagctcttggtctaaatccatattctttcatggataatgtgaattttctctctg

SEQ ID NO: 571964 - DNA, 420 bp, Homo sapiens
ggtagttttactatattatctttagaagttttatggttttgcttctcatcttattcttaatccactggaaactacgtgttgtatagtcagtgttcatttatatttactcacatatttgtcttcttacgtactcaccatttcttctcgcaactcaagtcttccatctaggtgaacaccmttctactgaagaacatctcttagaacttcctttagtgaaggtctcttagttagcaaattcagcatttgtttggtttttatgacttaaatattgtcttatatttggcctgtttattaaaagatatattaatttcatatgtgattattttttctcagtacattgtcttcttgcttccatttttaagacattagctcttggtctaaatccatattctttcatggataatgtgaattttctctctg

SEQ ID NO: 571965 - DNA, 420 bp, Homo sapiens
ggtagttttactatattatctttagaagttttatggttttgcttctcatcttattcttaatccactggaaactacgtgttgtatagtcagtgttcatttatatttactcacatatttgtcttcttacgtactcaccatttcttctcgcaactcaagtcttccatctaggtgaacaccattctactgaaraacatctcttagaacttcctttagtgaaggtctcttagttagcaaattcagcatttgtttggtttttatgacttaaatattgtcttatatttggcctgtttattaaaagatatattaatttcatatgtgattattttttctcagtacattgtcttcttgcttccatttttaagacattagctcttggtctaaatccatattctttcatggataatgtgaattttctctctg

SEQ ID NO: 571966 - DNA, 540 bp, Homo sapiens
tgccagatgcaaacttgtcatcccaccctgtgtgtgggcttcctatgccctggacagtctttcctgaggcagaggctgttttaagagcttagagcacccattctacagcagaatttcttatgaatgaggtccctgttctgtgctcctcacctatcctgggcgcttttcccaacttgactttgggtagtgggtggatacaggccccaggtaaacacgaggccccaggtggacatcagggctcaagtggacacacagsctccaggtgtatatcaggccccaggtatataccattttcctggtacatatcagtaaccaaggggacactggactccaggtgtacatcaggctcacaggtggacacccaggccccatatggacaccagcctacaggtgagcatcaggctgcaggaggatacccaggccttaggtagatatcaggccttataaggacaccaggcctcaggtggacatcagggcccagctggggactcaggttctaggaagacacccaggctgcaagtagcatcagggccaaggcgg

SEQ ID NO: 571967 - DNA, 540 bp, Homo sapiens
tgccagatgcaaacttgtcatcccaccctgtgtgtgggcttcctatgccctggacagtctttcctgaggcagaggctgttttaagagcttagagcacccattctacagcagaatttcttatgaatgaggtccctgttctgtgctcctcacctatcctgggcgcttttcccaacttgactttgggtagtgggtggatacaggccccaggtaaacacgaggccccaggtggacatcagggctcaagtggacacacaggctccaggtgtatatcaggccccaggtatataccattttcctggtacatatcagtaaccaaggggacactggactccaggtgtacatcaggmtcacaggtggacacccaggccccatatggacaccagcctacaggtgagcatcaggctgcaggaggatacccaggccttaggtagatatcaggccttataaggacaccaggcctcaggtggacatcagggcccagctggggactcaggttctaggaagacacccaggctgcaagtagcatcagggccaaggcgg

SEQ ID NO: 571968 - DNA, 540 bp, Homo sapiens
tgccagatgcaaacttgtcatcccaccctgtgtgtgggcttcctatgccctggacagtctttcctgaggcagaggctgttttaagagcttagagcacccattctacagcagaatttcttatgaatgaggtccctgttctgtgctcctcacctatcctgggcgcttttcccaacttgactttgggtagtgggtggatacaggccccaggtaaacacgaggccccaggtggacatcagggctcaagtggacacacaggctccaggtgtatatcaggccccaggtatataccattttcctggtacatatcagtaaccaaggggacactggactccaggtgtacatcaggctcacaggtggacacccaggccccatatggacaccagcctacaggtgagcatcaggctgcaggaggatacccaggccttaggtagatatcaggccttataaggacaccaggcctcaggtggacatcagggccyagctggggactcaggttctaggaagacacccaggctgcaagtagcatcagggccaaggcgg

SEQ ID NO: 571969 - DNA, 183 bp, Homo sapiens
atctccttccttttcaaggctgaacactattccactgtatgcagagacagcattttgttgwtccgtccgtccatccatggacacttgggttgtttccaccttttggttattgtggatgatgctgctctgaacatggttgtgcaagtgtctcttccaggctagccccattatacagaagagcat

SEQ ID NO: 571970 - DNA, 183 bp, Homo sapiens
atctccttccttttcaaggctgaacactattccactgtatgcagagacagcattttgttgatccgtccrtccatccatggacacttgggttgtttccaccttttggttattgtggatgatgctgctctgaacatggttgtgcaagtgtctcttccaggctagccccattatacagaagagcat

SEQ ID NO: 571971 - DNA, 183 bp, Homo sapiens
atctccttccttttcaaggctgaacactattccactgtatgcagagacagcattttgttgatccgtccgtccatccatggacacttgggttgyttccaccttttggttattgtggatgatgctgctctgaacatggttgtgcaagtgtctcttccaggctagccccattatacagaagagcat

SEQ ID NO: 571972 - DNA, 183 bp, Homo sapiens
atctccttccttttcaaggctgaacactattccactgtatgcagagacagcattttgttgatccgtccgtccatccatggacacttgggttgtttccaccttttggttattgtggatgatgctgctctgaacatggttgtgcaagtrtctcttccaggctagccccattatacagaagagcat

SEQ ID NO: 571973 - DNA, 516 bp, Homo sapiens
accaaaaaaaaagcagaataatgaggggatagagtgataggagatgaaatgggagaggggttcagattacatgaattttataggacttggtgatttagattttattcyagtatgttgagaatccacagatcattttaagcaaaaaaaaatggcatgatctcatttatattttaatagtcagttgggcttctctgtataatatggatttttatggggcaagaaggaagggagttgttacaggtacttgagaggaaaggtgatgtttgcttgactaggtcagtagcaatagagttgggaaaatgcaagcagatcagactcactttttgatctttagttcacttaaagtgttgacacattggagcataaaagataaatattttacttttcatccctaaaaggcagaaaaatataggggcaaaaaatggaatgttggaagtttaggaaatgtggtttttgacttgaccttaaactgttccagctgtatatgatcttagggcgatcacacagctgttttgg

SEQ ID NO: 571974 - DNA, 516 bp, Homo sapiens
accaaaaaaaaagcagaataatgaggggatagagtgataggagatgaaatgggagaggggttcagattacatgaattttataggacttggtgatttagattttattctagtatgttgagaatccacagatcattttaagcaaaaaaaaatggcatgatctcatttatattttaatagtcagttggkcttctctgtataatatggatttttatggggcaagaaggaagggagttgttacaggtacttgagaggaaaggtgatgtttgcttgactaggtcagtagcaatagagttgggaaaatgcaagcagatcagactcactttttgatctttagttcacttaaagtgttgacacattggagcataaaagataaatattttacttttcatccctaaaaggcagaaaaatataggggcaaaaaatggaatgttggaagtttaggaaatgtggtttttgacttgaccttaaactgttccagctgtatatgatcttagggcgatcacacagctgttttgg

SEQ ID NO: 571975 - DNA, 516 bp, Homo sapiens
accaaaaaaaaagcagaataatgaggggatagagtgataggagatgaaatgggagaggggttcagattacatgaattttataggacttggtgatttagattttattctagtatgttgagaatccacagatcattttaagcaaaaaaaaatggcatgatctcatttatattttaatagtcagttgggyttctctgtataatatggatttttatggggcaagaaggaagggagttgttacaggtacttgagaggaaaggtgatgtttgcttgactaggtcagtagcaatagagttgggaaaatgcaagcagatcagactcactttttgatctttagttcacttaaagtgttgacacattggagcataaaagataaatattttacttttcatccctaaaaggcagaaaaatataggggcaaaaaatggaatgttggaagtttaggaaatgtggtttttgacttgaccttaaactgttccagctgtatatgatcttagggcgatcacacagctgttttgg

SEQ ID NO: 571976 - DNA, 516 bp, Homo sapiens
accaaaaaaaaagcagaataatgaggggatagagtgataggagatgaaatgggagaggggttcagattacatgaattttataggacttggtgatttagattttattctagtatgttgagaatccacagatcattttaagcaaaaaaaaatggcatgatctcatttatattttaatagtcagttgggcttctctgtataatatggatttttatggggcaagaaggaagggagttgttacaggtacttgagaggaaaggtgatgtttgcttgactaggtcrgtagcaatagagttgggaaaatgcaagcagatcagactcactttttgatctttagttcacttaaagtgttgacacattggagcataaaagataaatattttacttttcatccctaaaaggcagaaaaatataggggcaaaaaatggaatgttggaagtttaggaaatgtggtttttgacttgaccttaaactgttccagctgtatatgatcttagggcgatcacacagctgttttgg

SEQ ID NO: 571977 - DNA, 322 bp, Homo sapiens
ctttttggaatatgctaaggttttcattgaggcccaatactttgtccaytttgactattattccatgagtatttgaataaatatgcacatattagttatcctccgttaatcgcttatgtcctcctaaatctcacttatgttttttcacttgatcttccatcagctgaaaaaatagtattataaattgtattttaaaaaatgcttctgaagtttttgctttctgaattttgcatacatatttaataaatatttatgacagttacttatttatagtgatctttttattgataaaaagtgcctttgtcctaattcatatttttta

SEQ ID NO: 571978 - DNA, 322 bp, Homo sapiens
ctttttggaatatgctaaggttttcattgaggcccaatactttgtccactttgactattattccatgagtatttgaataaatatgcacatattagttatcytccgttaatcgcttatgtcctcctaaatctcacttatgttttttcacttgatcttccatcagctgaaaaaatagtattataaattgtattttaaaaaatgcttctgaagtttttgctttctgaattttgcatacatatttaataaatatttatgacagttacttatttatagtgatctttttattgataaaaagtgcctttgtcctaattcatatttttta

SEQ ID NO: 571979 - DNA, 322 bp, Homo sapiens
ctttttggaatatgctaaggttttcattgaggcccaatactttgtccactttgactattattccatgagtatttgaataaatatgcacatattagttatcctccrttaatcgcttatgtcctcctaaatctcacttatgttttttcacttgatcttccatcagctgaaaaaatagtattataaattgtattttaaaaaatgcttctgaagtttttgctttctgaattttgcatacatatttaataaatatttatgacagttacttatttatagtgatctttttattgataaaaagtgcctttgtcctaattcatatttttta

SEQ ID NO: 571980 - DNA, 322 bp, Homo sapiens
ctttttggaatatgctaaggttttcattgaggcccaatactttgtccactttgactattattccatgagtatttgaataaatatgcacatattagttatcctccgttaatygcttatgtcctcctaaatctcacttatgttttttcacttgatcttccatcagctgaaaaaatagtattataaattgtattttaaaaaatgcttctgaagtttttgctttctgaattttgcatacatatttaataaatatttatgacagttacttatttatagtgatctttttattgataaaaagtgcctttgtcctaattcatatttttta

SEQ ID NO: 571981 - DNA, 522 bp, Homo sapiens
accagttgatggtgaacacttcaaatcacatagatacatggtgacaagcctgacttcttaaatagataaaaaatatttggcagaaggggacacagttttgttccaaaatcattagttaggtgaactgtgattgtcttcttggggttacttagaagcttcaaacagcattactctaagccagatacttagatctacggagtcaaaatacctgcgcagtagaggagcctacagcacagactgaacctgctgcaaagagctctttcttctaaatgggtagacttgtgagttagcctgtaataggtttgaatacacacagctgtagtcatgttacttccaaaatccagagaagcctctcagtcactctgctctttctgtgtggtaggcagtacaaggtatagctacctgttattccctaagaaagagatattcttacayaccccattttgtaatagcttctacattaattaggacccttgtataaaacagaaatctgcttcaggcttggtattgtgcctcacacct

SEQ ID NO: 571982 - DNA, 446 bp, Homo sapiens
tcacagagatgaacctttcttttgattgagcagtttggaaacactctttttgtagaatctgcaagtggacatttacaacgctttgaggcctatggaggaaaaggtattatcttcacagataaactagacagaataattctgagaaacttctttgtgatgtgtgcgtttatctcacagagttgaacctttctcttgattgagcagtttggaaacactctttttgtagaatctgcaagtggacatttgaagcactttgtggcctatggtagaaaagaaatatcttcacatagtatctagacagaagcaatctgagaaacttctttgtgatgtgtgcattcatctcacggagttaaaactttcttttgatagagcagtcttgaaactctcttttwgtagcatctgcaagtggacatttggagcgctttgaggcctatggtggaaaaggt

SEQ ID NO: 571983 - DNA, 589 bp, Homo sapiens
atggctttctccatatcttgatgataacctatttatatctctatgtatttggagcaagatataaaatttagagttgattttttaaagatttttcaagatgtaattcttatttatttttgttctatttgacgttctctgagtttcctatatctgaagtttgattttctgtcacttcttttagaatatttttggcagttattttgaaaaatatttcttttgctctattattttttcctcttttctttttgggatttcaattataactagggtaggtaatttcatctcagacttatgcaggtactttttctcagggtctcaggcatgtagccttctcacacttctgttcttttcctggctgttttggtgagatcagtgatattcctccttcaccttcaagagcagttttgttttgtttttcctgttttcatactcccagcatcaggagtattctaagtgtggcagtttttgttgccttcccctacatattaagtggaatatcttggtctatttggactcttataacaaaataacatraactgggtgactaaaaaacaacagatatttcttttttcacacttcttgaggctgt

SEQ ID NO: 571984 - DNA, 466 bp, Homo sapiens
gatgctcacaaattcagtgttgatgagagcccatttcatggttcatagatggtgtcttcattcaatgtcctcacatagtggaaggcacamaagaactccattgagcttcttttataaaggcactaatcccattcctaagggctcagcccccaagacttggttgcctcccaagtgttctgctctccctgatctgtatcatatacagactctcttggattccttaccaattgcttgagagatcacagtgggtttgtggggaaaaagttttcaagatgatggatctttcccaacttctgcagctgtcagcggtctcccaatctcaccagccccactttgtctttaggaatttattgattattccagctttacttgtcatagtgatgtctatttgcatctgtcctatgtaagtgcatctgtcctccttctccttgctggtgcttgttttccctcacattttgactcagtt

SEQ ID NO: 571985 - DNA, 525 bp, Homo sapiens
catttcatggttcatagatggtgtcttcattcaatgtcctcacatagtggaaggcacaaaagaactccattgagcttcttttataaaggcactaatcccattcctaagggctcagcccccaagacttggttgcctcccaagtgttctgctctccctgatctgtatcatatacagactctcttggattccttaccaattgcttgagagatcrcagtgggtttgtggggaaaaagttttcaagatgatggatctttcccaacttctgcagctgtcagcggtctcccaatctcaccagccccactttgtctttaggaatttattgattattccagctttacttgtcatagtgatgtctatttgcatctgtcctatgtaagtgcatctgtcctccttctccttgctggtgcttgttttccctcacattttgactcagttcttggcaacctggttgccataaagtaaagtcatgactttgaagttagtttggttctttcattgttgtaaggttaggacccctattccatc

SEQ ID NO: 571986 - DNA, 525 bp, Homo sapiens
catttcatggttcatagatggtgtcttcattcaatgtcctcacatagtggaaggcacaaaagaactccattgagcttcttttataaaggcactaatcccattcctaagggctcagcccccaagacttggttgcctcccaagtgttctgctctccctgatctgtatcatatacagactctcttggattccttaccaattgcttgagagatcacagtgggtttgtggggaaaaagttttcaagatgatggatctttcccaacttctgcagctgtcagcggtctcccaatctcaccagccccactttgtctttaggaatttattgattattccagctttacttgtcatagtgatgtctatttgcatctgtcctatgtaagtgcatctgtcctccttctccttgcwggtgcttgttttccctcacattttgactcagttcttggcaacctggttgccataaagtaaagtcatgactttgaagttagtttggttctttcattgttgtaaggttaggacccctattccatc

SEQ ID NO: 571987 - DNA, 576 bp, Homo sapiens
gagacctaacaaaccacagatgcttagggcaaaaattagagtttacacatatagtagatcaccttcagcacaggaagaaaagttggagaagagtatttggaaaactaagacattcaaaatcattcacgtacatggragagtctagaaagtcacatgtatgcataggttaagccacatgctgacaaatgtcataagaagaccctacacttttaccttggcgatccctcccctcagtgcaagctctgtgcaagagtgaacttgaacttcactcagtgcaagagtgaacacacattttgtgccggctttaaagaacccagcacaaagccagtctgcatggcctagagacatattttgctggctaattattacttgtttttctttttgtttttgttgtatttgcctgtttgcttagttcctgacatacaagaaaatcactgtcaaaacattagcttaacatttgttaaggaaacaaaaagacttcggtggccacaccttataaagcaaacagttttgtaaatcactttggaaaatttcactaaaaaaaaaaaaatccttaacaatataataagtaaataa

SEQ ID NO: 571988 - DNA, 576 bp, Homo sapiens
gagacctaacaaaccacagatgcttagggcaaaaattagagtttacacatatagtagatcaccttcagcacaggaagaaaagttggagaagagtatttggaaaactaagacattcaaaatcattcacgtacatggaagagtctagaaagtcacatgtatgcayaggttaagccacatgctgacaaatgtcataagaagaccctacacttttaccttggcgatccctcccctcagtgcaagctctgtgcaagagtgaacttgaacttcactcagtgcaagagtgaacacacattttgtgccggctttaaagaacccagcacaaagccagtctgcatggcctagagacatattttgctggctaattattacttgtttttctttttgtttttgttgtatttgcctgtttgcttagttcctgacatacaagaaaatcactgtcaaaacattagcttaacatttgttaaggaaacaaaaagacttcggtggccacaccttataaagcaaacagttttgtaaatcactttggaaaatttcactaaaaaaaaaaaaatccttaacaatataataagtaaataa

SEQ ID NO: 571989 - DNA, 576 bp, Homo sapiens
gagacctaacaaaccacagatgcttagggcaaaaattagagtttacacatatagtagatcaccttcagcacaggaagaaaagttggagaagagtatttggaaaactaagacattcaaaatcattcacgtacatggaagagtctagaaagtcacatgtatgcataggttaagccacatgctgacaaatgtcataagaagaccctacacttttaccttggcgatccctcccctcagtgcaagctctgtgcaagagtgaacttgaacttcactcagtgcaagagtgaacacacattttgtgccggctttaaagaacccagcacaaagccagtctgcatggcctagagacatattttgctggctaattattacttgtttttctttttgtttttgttgtatttgcctgyttgcttagttcctgacatacaagaaaatcactgtcaaaacattagcttaacatttgttaaggaaacaaaaagacttcggtggccacaccttataaagcaaacagttttgtaaatcactttggaaaatttcactaaaaaaaaaaaaatccttaacaatataataagtaaataa

SEQ ID NO: 571990 - DNA, 608 bp, Homo sapiens
tcttgcctgaggaaggttattttttcctgctggaaagaaatgaaagattagaaaccaaatcacacacaatcttgcatactgcagccaccaaggaggtaactttccaccattacttgagacaaatgcgtgtgtgcgtttttaatctagtctgacctcagagcttctaaatagatgaagaaatacttgtgtaattgaaaaaaaactgttctctcagccattattcaaaggacactaactcaaataacaaatcttaaagctctttaaaatgtaaaaacattttcttggtggaacatcaaatgatagctgattcacattaaaatccataattacaacaagcctcagtgaacaggtctggctatttttcattgaaaagaaaaaagtataacaatcrtagaacacctgaatttattggctttaattaaatgtgtttgttctaaactgatgtaatttaggcacaatccatagaaaagaaaatttattgtatattcagtactgatttgcctgtccatataagaatatttacagtctagtgaaaattagcctgatgttatatacagaaaagtataaagcctctaataacattatttttttcatttaaagacaaaggt

SEQ ID NO: 571991 - DNA, 544 bp, Homo sapiens
attcaacatattaaatttataaatgtagtttaaaatctttaagggagtttaattaactaagytgtaaacggaccaaacattaatcaaagtcccccttaaaaataatttttaatgcactagatttataaatataacaataagatttctaatttaaactcaaaaatttttttaattggttaacaatttaatgtaatatgctgcacattaactcagaatatgaaatcttataagtagtcctttttacattcaagaatcacattgataaacatcacaaaatgaccactggtaaccactatgaaactctttaagcgataggtattgtatgaattttactcctcatgatttgaagataatgcataaattccttcttgttattttgtttccaatttagtctttacatagacaattcaatttagtctttacatagacaaaactcctataacagaaaaactgaaaacaaagagggtacattccttcggttgctttctgaggacgccctactctaaaaggcagtagctttcaacaaactatgtctccttctcat

SEQ ID NO: 571992 - DNA, 464 bp, Homo sapiens
actgtaggcatttaaaaaaccatgtaaactaaaaagaagaaattgtgacactgccrcttaggttgtttaaatctttggacatgaatcagtatattttttaattttatcttaattagacattgtgagttcaccatcttcctgtcagtatagcatccaagctgattatcatagattacaagttcaactatcaactgtgttctgagagtctaaaaaaataaatgaatgtatttgtttgggtattcttaaagcaggagtgaggacacagcaaaagtgagacaaggaagagagaacaaaataaaacaggaaagatagaaaagccaataccacacgtgttaagaggcaagttcctgtgtatatatctgggcttaattctatgggaagctatgtggaacatgcctcagaattacatcactgaatccggggagattcttcttagttaccctcaccttttcttcccacttcat

SEQ ID NO: 571993 - DNA, 445 bp, Homo sapiens
aagcaggagtgaggacacagcaaaagtgagacaaggaagagagaacaaaataaaacaggaaagatagaaaagccaatrccacacgtgttaagaggcaagttcctgtgtatatatctgggcttaattctatgggaagctatgtggaacatgcctcagaattacatcactgaatccggggagattcttcttagttaccctcaccttttcttcccacttcatgcccagtaacaagctcccgttctgctagagaaagtcctcagctagaaacaggtgcaaattctggagatgagatcttgtagaatgttaagaatggttttcttcacagcagctacaggtaaggaataggggctgggctattaatacatctgctacaaatcaataaagcccttatgctccttttggtgatcgacaatgtatttaaaaatattagatgatcaagaagggc

SEQ ID NO: 571994 - DNA, 445 bp, Homo sapiens
aagcaggagtgaggacacagcaaaagtgagacaaggaagagagaacaaaataaaacaggaaagatagaaaagccaataccacacgtgttaagaggcaagttcctgtgtatatatctgggcttaattctatgggaagctatgtggaacatgcctcagaattacatcactgaatccggggagattcttcttagttaccctcaccttttcttcccacttcatgcccagtaacaagctcccgttctgctagagaaagtcctcagctagaaacaggtgcaaattctggagatgagatcttgtagartgttaagaatggttttcttcacagcagctacaggtaaggaataggggctgggctattaatacatctgctacaaatcaataaagcccttatgctccttttggtgatcgacaatgtatttaaaaatattagatgatcaagaagggc

SEQ ID NO: 571995 - DNA, 445 bp, Homo sapiens
aagcaggagtgaggacacagcaaaagtgagacaaggaagagagaacaaaataaaacaggaaagatagaaaagccaataccacacgtgttaagaggcaagttcctgtgtatatatctgggcttaattctatgggaagctatgtggaacatgcctcagaattacatcactgaatccggggagattcttcttagttaccctcaccttttcttcccacttcatgcccagtaacaagctcccgttctgctagagaaagtcctcagctagaaacaggtgcaaattctggagatgagatcttgtagaatgttaagaatggttttcttcacagcagctacaggtaaggaataggggctgggmtattaatacatctgctacaaatcaataaagcccttatgctccttttggtgatcgacaatgtatttaaaaatattagatgatcaagaagggc

SEQ ID NO: 571996 - DNA, 488 bp, Homo sapiens
tctccagaattaacattacaatgattaataagagaaatcatatattttacaaagccactatgagtcaaatacacatttttctgtgaaagcatttttggagctgggaaatatcctctcctgttctctgtagtatcctgtctggagaaaatccagtttgtatcttttatatgcttttcaaaaattactcatctttagaggctactgggagctgattgtggtgtaatttctttgctgtgttcaattctgcggatcaaatttgcaatctgatatgcatacatacctctagctggcttagaatagatggagatagcaccttttcatacatgcctgcagtgtcagtgtctatccacaaatgtttgggaattagwccagaatgttaatattgaccttgccacttccttgctgtgagcttgggcaagttacttaaccacttggagcttaaatctcatctgtaaaatggagatgattatttatcataggatgatact

SEQ ID NO: 571997 - DNA, 598 bp, Homo sapiens
ttattgtataatttattaacacatcgtggatataggaaaacatctgaaagttayagtgagagatgaagtcctttctaaattaaataaacacagaaacacagagagctttcagcttccattcttcaacctcagccttgggtcaagagtaaacaaacacaaaaactcactgcttcaaatgtgaaatttttcttctctttttttttcctgtgtatgaaatatgttcttgcacaaacgaatcaatacaagaaactacaaaatacaatctctgttgcctctcatccagtggataatagagaatcgtagttagagattaccaaatggtcagcagtaggattcactatcattgccgtcaccaactaggaataacttatttgctgtgtgcacaccagaagaagaaccaaacaagtaggctaggaaccagaaatagtaacacaaacatagagttaggataagaaagagaaatagagaactcttacagaaggtaaagttctaatattgataacttctattgtttgaaattgactcctgggaccagagaaaagtgtgcctttgcttaaatatttctagtaggtaaatcacctctgggaggcataagcgt

SEQ ID NO: 571998 - DNA, 545 bp, Homo sapiens
atttcctcaacatacttattcttataactttgctttcaaaacatgacttatctatgtgataggtagaagaattacccccaaagatgtatccacgtccataccccaggtacttctgaatatgttaccttatgtggaaaaaggaagttgggtagagatgttacactggtggctttccagatggaagaagaagagaccatgctataaggagtgcatgcagtctctagaaactagaaaacaaaaagagatggactcatctctagagcttcttgaatggaatgaagcctactgatatcttgactttagctcagtaggacctgtttcatatttcatgtagaactgtaagataatacatttgtgctgttataaaccaccaaggttttgtggcaatttttayaaccacaataggaaatgaattcagacttaagtgtctgaaagtgaggtgccactataatgtactaagcctgtaattatttataaattatatattcaaagctatcatataataaaattgattttcctggattgctttctgctatggttgagtg

SEQ ID NO: 571999 - DNA, 421 bp, Homo sapiens
  misc_feature 377, 378, 379, 380, 381, 382, 383, 384, 385, 386, 387, 388,389, 390, 391, 392, 393, 394, 395, 396, 397, 398, 399, 400,401, 402, 403, 404, 405, 406, 407, 408, 409, 410, 411, 412,413, 414, 415, 416, 417, 418, 419, 420, 421: n = A,T,C or G
ggtgactccttggctcagtgtcacctcctcagtggggtctggcccacctcccaaactgaacaccgtagcctactcctgacacctgctctcccacccgagaccccttccctggctcagcgttttgctttttttcatgagytccccaggggcagcaatctttgtcttaagggtcccccggtagatcccaaatgcccagatgagggcctggtacatgacaggtgctgaacacacacacacagttgaatgaagaaatgagtgcatgtgggcctctccctgctctcaggccaggtcccagctaagatatgtgccaatcgcactggttgatcagagtggacgtctcactgtgcttttctacagctgccgctagggcctcttcnnnnnnnnnnnnnnnnnnnnnnnnnnnnnnnnnnnnnnnnnnnnn

SEQ ID NO: 572000 - DNA, 421 bp, Homo sapiens
  misc_feature 377, 378, 379, 380, 381, 382, 383, 384, 385, 386, 387, 388,389, 390, 391, 392, 393, 394, 395, 396, 397, 398, 399, 400,401, 402, 403, 404, 405, 406, 407, 408, 409, 410, 411, 412,413, 414, 415, 416, 417, 418, 419, 420, 421: n = A,T,C or G
ggtgactccttggctcagtgtcacctcctcagtggggtctggcccacctcccaaactgaacaccgtagcctactcctgacacctgctctcccacccgagaccccttccctggctcagcgttttgctttttttcatgagttccccaggggcagcaatctttgtcttaagggtcccccggtagatcccaaatgcccrgatgagggcctggtacatgacaggtgctgaacacacacacacagttgaatgaagaaatgagtgcatgtgggcctctccctgctctcaggccaggtcccagctaagatatgtgccaatcgcactggttgatcagagtggacgtctcactgtgcttttctacagctgccgctagggcctcttcnnnnnnnnnnnnnnnnnnnnnnnnnnnnnnnnnnnnnnnnnnnnn

SEQ ID NO: 572001 - DNA, 421 bp, Homo sapiens
  misc_feature 377, 378, 379, 380, 381, 382, 383, 384, 385, 386, 387, 388,389, 390, 391, 392, 393, 394, 395, 396, 397, 398, 399, 400,401, 402, 403, 404, 405, 406, 407, 408, 409, 410, 411, 412,413, 414, 415, 416, 417, 418, 419, 420, 421: n = A,T,C or G
ggtgactccttggctcagtgtcacctcctcagtggggtctggcccacctcccaaactgaacaccgtagcctactcctgacacctgctctcccacccgagaccccttccctggctcagcgttttgctttttttcatgagttccccaggggcagcaatctttgtcttaagggtcccccggtagatcccaaatgcccagatgagggcctggtacatgacaggtgctgaacacacacacacagttgaatgaagaaatgagtgcrtgtgggcctctccctgctctcaggccaggtcccagctaagatatgtgccaatcgcactggttgatcagagtggacgtctcactgtgcttttctacagctgccgctagggcctcttcnnnnnnnnnnnnnnnnnnnnnnnnnnnnnnnnnnnnnnnnnnnnn

SEQ ID NO: 572002 - DNA, 493 bp, Homo sapiens
ggcccctaatacaatttaactgatgtcctgagaagaagagagaacgtgggcagagacacacggggggaatgccatgtgatgacagaggcggagatggagtcatgcggctgtgagctggggtacccaggatgggcggcccccaccagagacggggtcatgcagctgtgggccacggtacccaggatgggcagcccccaccagagacggggtcatgcagctgtgagccacggtacccaggatgggcagcccccaccagagacggggtcatgcagctgtgagccacggtacccaggatgggcagcccccaacagagacggggtcatgcagctgtgagccacggtacccaggaggagcagcccccaccagagacggggtcatgcagctgtgaaccacggtacccaggatgggctgtccccrctggaagctggaagaggtggggaacgattctgctcagagcctccgagggagcagggccctgctgaggtcatatgtc

SEQ ID NO: 572003 - DNA, 557 bp, Homo sapiens
tttcactatgttgggcaggctggtctcamactcctgacctcaggtgatctgcctgccttggcctcctaaagtgctgggattacgggcgtgagctgccgtaatctttatagcaatgtgagaacagactaatatatagtaggtgtatatatttatgagatacatgagatactttaatacaggcatataatgggtaataatcacattgaggtaaatggggtatgcatcacctcaaacatttattatttctttgtattgcaaatgttccaattagactattttagttatttttaaatgtactataaattattgttgactgtagtcacatttgtgctatcaaatactagatcttatttgttctatctaactgtatctttgtacctattaaccatctccactcctccctgccaaccccactactcatctcagcctctattaaccatcattctactgtctatctctatgagttcgattgttttaattttcagctcccacaactgagtgagaacaggtgaagtttatctttcagtgcctggcttatttcacttaacataatgtcc

SEQ ID NO: 572004 - DNA, 523 bp, Homo sapiens
tccagcctgggcaacaagagataaattccatttcaataaatacgtaaataattagccaggtggtgtgcactgtggtcccagctcttcaggaagcagagatgggaggatcgcttgagcccaggaggtcgaggctgcagtgagctgtgatctcaccactgcaattcagccttcactcgcacagagcaagaccctatttccaaaaaaaaaaaaaaaaaaaaaaaaagattatggtggaagaacaggacaaaaatatttaacataagtgagcatcttttttttttttattgctggtcaaaaatatagccggtattcagaagggctaatgagtgcaatttcagttccctggggcttgactctcatactctttgatttgtttggaaggctgtacttttattaggccatctttttttggagggttttgtagcctcattctgcaggctcaccaacttgccrcatatatctttttctagtgtgcttaaaacataggagtggaaatcagaaagctgcaaaaaaggctggcctg

SEQ ID NO: 572005 - DNA, 329 bp, Homo sapiens
cttttaaaatttactaaaaatataagaaaaaattcaaaataataatttaatgttagtgcaaaaatataattagtgactgagttcgattttgggcagtwctttttgtttctatcacattatgctgtagatttgcagtcagattattttgttttagaatgatggttctcaagactcattgtgcatcagaattgcccggaaggtttgtttaaaacaaatagctgggctttgttcactgaatttctgattcagtaaatttggggagtggctgataatttgcatttccaataaattccctggttggagggggccaagatggccgagtagaagca

SEQ ID NO: 572006 - DNA, 603 bp, Homo sapiens
tttttattattcacatttttatttttttatttttgaggcagggcctccctctgtcacccaggctggagtgcagtggtatgatatcagcccactgcaacctccacctaccaggatcaagcgatcctcccaccttagcctcctgagtgctagctatgactacaggcacacaccatgacacctgcctaatttttgtactttttgtagagacagggtttcgccatgttgcccaggctggtctcaaaatcctgggatcaggtaatccacctgcctcagcctctcaaaatgctaggattacaggtctgaaccaccgtgccaggcctacattattcttaaataaggaaaggtttattttcttatgagtatttcaaaccttgtgaccaacatattccagaattatgccctagaaaattttcatatatggctagtcaggttatgcagtgatttatgtttagaagaattcattacaaggttattgaaatagcaaataaattttaaatactgtaaatccaaaattaagtggtaaatttaataaagtatattatatccaaatgaytaaatactacttatttactataaaacacttaaaatggtttaatgacataa

SEQ ID NO: 572007 - DNA, 533 bp, Homo sapiens
tatactatttttgcaagttttctatatatctgacattatttcaaaaattaaaatttaaaataaagtaggcagagttaaagaaggccttttatgccacattaycgagcaggatgtgtgacgcctcacagcgcacaggcttgtggctcatcttcacggtgaagtcctctggcaacctcagccaggtacttccccatgcagcctcctccctttgtccatatgcacagattctgcatagtgtagtccaggtacctagccctgggaagtcttcatcttttgataacttttaatctgcaaagtatctcactataattgataggccaggttccatgcagcattccccactgttggattctcatcagtttgcctccagcgtgcctttgagatgcggtaacaaaggtatcagaacatgtgttgtctctccccactgcacattctcacgggagccatcgctggtccatgtgtgcccatggtctgaaggctcatgctccccgctgtcctgttgctctctgtggaggctgtgcccactcacacgt

SEQ ID NO: 572008 - DNA, 533 bp, Homo sapiens
tatactatttttgcaagttttctatatatctgacattatttcaaaaattaaaatttaaaataaagtaggcagagttaaagaaggccttttatgccacattaccgagcaggatgtgtgacgcctcacagcgcacaggcttgtggctcatcttcacggtgaagtcctctggcaacctcagccaggtacttccccatgcagcctcctccctttgtccatatgcacagattctgcatagtgtagtccaggtacctagccctgggaagtcttcatcttttgataacttttaatcygcaaagtatctcactataattgataggccaggttccatgcagcattccccactgttggattctcatcagtttgcctccagcgtgcctttgagatgcggtaacaaaggtatcagaacatgtgttgtctctccccactgcacattctcacgggagccatcgctggtccatgtgtgcccatggtctgaaggctcatgctccccgctgtcctgttgctctctgtggaggctgtgcccactcacacgt

SEQ ID NO: 572009 - DNA, 533 bp, Homo sapiens
tatactatttttgcaagttttctatatatctgacattatttcaaaaattaaaatttaaaataaagtaggcagagttaaagaaggccttttatgccacattaccgagcaggatgtgtgacgcctcacagcgcacaggcttgtggctcatcttcacggtgaagtcctctggcaacctcagccaggtacttccccatgcagcctcctccctttgtccatatgcacagattctgcatagtgtagtccaggtacctagccctgggaagtcttcatcttttgataacttttaatctgcaaagtatctcactawaattgataggccaggttccatgcagcattccccactgttggattctcatcagtttgcctccagcgtgcctttgagatgcggtaacaaaggtatcagaacatgtgttgtctctccccactgcacattctcacgggagccatcgctggtccatgtgtgcccatggtctgaaggctcatgctccccgctgtcctgttgctctctgtggaggctgtgcccactcacacgt

SEQ ID NO: 572010 - DNA, 583 bp, Homo sapiens
  misc_feature 324: n = A,T,C or G
attctcattttatttttattccatgactttttaaaaaaaaatcccgtaacttctttttcataactttttttgtaacttttcataatactgttttctacttttttcccasaagtttttttgccacaacgtttttacattttttatcccataacgttttcaccccataactttttttaatcccataacttattaaatcttgtgttcttttaagaaacacttgcatagttatattacaactttgtaaaaatgaaacacattatctcgtgccaagcatgcccagcatttgcacagtatcaatacctttaaaactatagttttgaaganacgcaaaataaaattttaaggcaaaaacaacacttagaaacaatttaataatttattacattacagtggcatcacaccagcagtcaataaggccactctagggaaaaatctttcagtatttccatgacacattctgtttacaataattcataaactggtaaaattcattctaagaaaacttggcaaataaaactttggactggaattggcatttctttctctgcttttcgttcccaccatttctttcttttatactaca

SEQ ID NO: 572011 - DNA, 583 bp, Homo sapiens
  misc_feature 324: n = A,T,C or G
attctcattttatttttattccatgactttttaaaaaaaaatcccgtaacttctttttcataactttttttgtaacttttcataatactgttttctacttttttcccagaagtttttttgccacaacgtttttacattttttatcccataacgttttcaccccataactttttttaatcccataacttattaaatcttgtgttcttttaagaaacacttgcatagttatattacaactttgtaaaaatgaaacacattatctcgtgccaagcatgcccagcatttgcacagtatcaatacctttaaaactatagttttgaaganacgcaaaataaaattttaaggcaaaaacaacacttagaaacaatttaataatttattacattacagtggcatcacaccagcagtcaataaggccactctagggaaaaayctttcagtatttccatgacacattctgtttacaataattcataaactggtaaaattcattctaagaaaacttggcaaataaaactttggactggaattggcatttctttctctgcttttcgttcccaccatttctttcttttatactaca

SEQ ID NO: 572012 - DNA, 660 bp, Homo sapiens
ctggccaagaaatgaagacaacctttcagacacgatcggcccacaggatggagaagctcaaggccctgatgagttgggacccatttatcctgttctagttgtccgcagctgcagaaactcacatgaagttgctggttaagtgacagcttttgcttcccacttgaacagctgttttttatttgcttctttgcttttatcttgtagtctatactcactgtcccatttccgtcagtactgactttcatcttgttagattcagtgcaccacaaytcctgcctaggacaagccatctggactccttttggctctagttgcccggcctaacctccaggcagaatcacacactcacagctctgcgtactcacaggaccggatccacaccccagggacctcactatcttaaggagcatcccatctcattcacctgctatctcctcactgggaagttcctggagatcaagaactgacacatgcatatttgcaaccctacgacttagtgctgaataaaacttaaccaaataaatgacaatttgatctgtgggccacgaatgttctcactgtgcaagagtaggtgtcagggcacctcagcctgcccatcagctgcctgttttttataaattaagttttactggaacacaagcacaactgttcatttatgta

SEQ ID NO: 572013 - DNA, 418 bp, Homo sapiens
cgagcggaatgccacagcatacamggtaatgcaaaagacttgcaggacagagagggagagagaacacaggccactcccaggtcgtgcccaggaagagctgtgtgcgctcctgcagagggctgaacaggccagacctcctagctatgcctgctagagcaaggatgctatggcctaggaccacaggatgaatccccaagactcagggctggaaaagcaggactggcagactcagaagcagagagctgagggacccaggggcatgagcactcacaggaaagggcaggagctccatgagatacagacgtccacaaaggtgccagcggggcagcgaggtgtggacaaacccagcagcattctctggacaccagcctgcacacacgtggggcacctgggaacctgcatagggacagctatgaga

SEQ ID NO: 572014 - DNA, 601 bp, Homo sapiens
aaattctgaagttaggattagaaataatgggttttgttgttgctgcctaatacacattatattagcttcttttaaagctgcataatagcttatattaagactataacattgatctgtccacattcactcctttaaaaatttttttttgcctgaaacaaacatttcctgagtacctaccatgtgccaagcctttagctaaggcttggggattcagtaatgaaaaatacagcctttcattttgaggagtagagtttatagtgggagtgagccaggttagagacatgtaaaaaagcaatttgacttcagtacatgataagtttgtgcaacaaattaagaaggcccaagaatggtagrttttctaactcataatactggcttagagagagcattcatacacaggttgtacttgaaattacctaatagaaagcgtaggaattatctatggagactgaatgactgaatgggtgaggtgttttttgttttttgttttgtttgtttgtttttgtttttgtttgagatggagtctcactctgtttcccaggctggagtgcaatggcacgatctcgactcactgcaacctccgcctcctggtttcaagcaa

SEQ ID NO: 572015 - DNA, 432 bp, Homo sapiens
taaactcaaaatggaagaaaataataataataagagtaataatcaatgacatagggaagagagaaaaattaatagagcctaaagttgattctttaaaaaaaattaataaaattgaaaacatccaagcaacagcaaagttataaaaaagaatttaaaaaacaccatcagaaataaagtagacagtatctctacttatcctacagacattaaaatggtaagtaatgattctgaacaaagttttktaatttgacaactcagatgatgggcatattagaaacacaagtaataaaactgactcaaagagaaatagaaaactcaaacagtcttacatttagtaaagaaagtaaactcaaaatttaaaaccagcttttcacaaataaaatacaaaataattatcctggttaatgctactaaacttttaagagtgaaata

SEQ ID NO: 572016 - DNA, 553 bp, Homo sapiens
aaatttgaaagcctgagatgattgattctcatttgttactaattgtgtctgtatctgagactaatgtccccatctgcaaaatgggaatgacagcagccatttgcaggactttgttaagattagaattgctataygtgaaggatccagcagagggctagacacactggagtcatgcagaaagtggcagctttagtccagaatacagaggtctgtattcatgggatattagaagtaaaccctgggctcatcaattccctcctgccattttcagtgtggaaacctattttactgtgtacaagtagtatcttccaatcactgcttgaacacatttattgctacagaatgcatttcctcgtggggtaccacagtttcattgccagaacaggcagaaatgccctccttattgactcccattgaaccaatttttaccatcagcaataatacaccttattgaaatgcttttatagataatttttttaggaaatatagccaactgtttgatagcacaggctttggagctaagctgtctgggttcacatcctagccccatcat

SEQ ID NO: 572017 - DNA, 474 bp, Homo sapiens
gcttaggcacttaaaagggctctgtttttgtttctgcggcgtgagccactggtaggcagggaaagaaagccagaaggcttgagagcagagctgcgagagcctgggaccttggatttaggattggttagtgcaagaagtaacagtgctaaccagatttcatgggcatggcaaaattgtttcatcaggtggcacccagaaggttcagactttgatgctcagcartcggaggagaattatgcagatttctactggtaatggcagaaccttcatgtggacctggtgctgtgatacaagccctcagctgaaaacatcagtcttgactgcacagcacacagaagtgtaagaccatattagccactaagaaagatgaacgtagttcagcagtgatattctggaagcaatgtctttatgcaaaggataagtttaatagtcaaatttttggatgcaagtgacagtagaataaatttgagttgg

SEQ ID NO: 572018 - DNA, 474 bp, Homo sapiens
gcttaggcacttaaaagggctctgtttttgtttctgcggcgtgagccactggtaggcagggaaagaaagccagaaggcttgagagcagagctgcgagagcctgggaccttggatttaggattggttagtgcaagaagtaacagtgctaaccagatttcatgggcatggcaaaattgtttcatcaggtggcacccagaaggttcagactttgatgctcagcaatcggaggagaattatgcwgatttctactggtaatggcagaaccttcatgtggacctggtgctgtgatacaagccctcagctgaaaacatcagtcttgactgcacagcacacagaagtgtaagaccatattagccactaagaaagatgaacgtagttcagcagtgatattctggaagcaatgtctttatgcaaaggataagtttaatagtcaaatttttggatgcaagtgacagtagaataaatttgagttgg

SEQ ID NO: 572019 - DNA, 554 bp, Homo sapiens
ttttgttgtttctttctccttttagcctcaatatgatcattttataaatctccacagtattcgatactttaattttcttccctgtgtacaagacaatttgttttcagattgaagtaacatctgtttctgtagataattaagttattagatgctgatcaatttaataaagccacaaggctttcctgacctctttatgcataatcaatgaatttagatgcaaaatgtgaaaaccttactttttaaaaagtgaagaaaatcttccattaacatagtcattttgtaattacttratacttgcaatcagatggctatgcaaacacaacattctggaaacacagattattcaatcatttcagggtagcaagagaaaggcctgggaaatggttgatcttccttttgtccttgaaccaacaatttccatcctttattacctgaagtatgtttattttatacctactacagttaaagtttctattccacctgctataacaggtatcacttctagagtgttctagacattttgcatacatccttcactcaatcctttcagtaat

SEQ ID NO: 572020 - DNA, 573 bp, Homo sapiens
acattaacatgacaactgtgataaggtgatattttatgtctccctccacaaaaggcaattatggrattcacagttattatttagctttgttctatgcactaacagatttaacatggaaaataattcccccataaacatattataatacaacaatattcagtgttttaaacagcctgattctgtttagactcatttgagaacagagaaagagggaaaatccagacatttttagtattgcctaaaattagtcccacccgaatatatgccgccaggtgcggttatgctcttatttctttgtttttttttttccttcatgaactttccacgtgttcctccagctaatgttgccctttttactagccttttcaccaaatgtgggtaaaatgttaagttttcactccaatagagggggcttgtggaaggtgtcccaggatctcctagggcaccaatatgcttcatgctcaacagtaaggctttgttaaaatgcttcatgtttgtgcgtcaaagacaaaatacagaggaaccaggagaaaatgggcagtcaacttgggggaaaaaggtttgtgccttttt

SEQ ID NO: 572021 - DNA, 573 bp, Homo sapiens
acattaacatgacaactgtgataaggtgatattttatgtctccctccacaaaaggcaattatgggattcacagttattatttagctttgttctatgcactaacagatttaacatggaaaataattcccccataaacatattataatacaacaatattcagtgttttaaacagcctgattctgtttagactcatttgagaacagagaaagagggaaaatccagacatttttagtattgcctaaaattagtcccacccgaatatatgccgccaggtgyggttatgctcttatttctttgtttttttttttccttcatgaactttccacgtgttcctccagctaatgttgccctttttactagccttttcaccaaatgtgggtaaaatgttaagttttcactccaatagagggggcttgtggaaggtgtcccaggatctcctagggcaccaatatgcttcatgctcaacagtaaggctttgttaaaatgcttcatgtttgtgcgtcaaagacaaaatacagaggaaccaggagaaaatgggcagtcaacttgggggaaaaaggtttgtgccttttt

SEQ ID NO: 572022 - DNA, 557 bp, Homo sapiens
tgaacatagcaatgaaatctattagaaagacaccaagccaatgaaggaacaaaagcaatggtctgacaggaaggatcctgtttttttttktttttttttttgctgttgttgttgttgctcatgagctgcactgtcaaatatttgtatttgtgctgatggtgtcttgaaaagttcttgggccagctctgcaagaatgcatgcacttgacaaaacgaaactcaataacaactgaacaaatgtttcttttatttcgaaggccaagcacttggctttagaaggaaaagggagtcctgtgaattgcttcgctttgagaactatttgtcagtccccataatatgctacttctgcctgatgtgggcaggcctattgtctatcattaagaaatcagctggtttttaagagaatgactaggtggatataagcaggcacctcaaatctagatggctggtcatttctctagtgctcacataaacagtttacaaatgcataagtatgttattcataagacactctcttgtaggtagttaaaatgttcagtgctgtaggaataaagaaaa

SEQ ID NO: 572023 - DNA, 634 bp, Homo sapiens
ccttttgttcacctatgccctgcccccagaggtggagtctacagaggcaggcaggcctccttgagctgaggtgggctccacccagtttgagcttcctggccagtttgtttacctactcaagcctcagcaatggcgggtgcccctcccccagcctcgctgccaccttgcagtttgacctcagactgctgtgctagcagtgagcaaggctccacgggcrtgggacctgccaagccaggtgcgggatataatctactggtgtgctgtttgctaagactgttggaaaagagcagtattagggcaggagtgtcctgattttccaggtactgtctgtcatggcttcccttggctaggaaggggaattccccaaccccttgtgctttctgggtgaggcgatgccctgccctgctttggctcacactctgtaggctgcacccactgtccaaccagtcccaattagatgaacccagtacgtcagttggaaatgcagaaatcagcagtcttagcattcttctgcattgctcacgctgggagctatagactggagctgttcctattcggccgtctcagaaccgccccttctacacatatgtcatttttaaaactttttttattgtggtgaaataagcataacaga

SEQ ID NO: 572024 - DNA, 227 bp, Homo sapiens
ttatgtttaaaatgtgaatgtctttttttttcttcttttatttatgttgtrggagaaaacttagtaaatatctttagatgattcttcagagtaattcattagcatctatttcctaggtagaaaaagaggggctggaggattaggaccaaactcagtcatctccacaattgctgttaccacgttcaaatcacttgtgcacagatccacattatcaggcttagaagggt

SEQ ID NO: 572025 - DNA, 355 bp, Homo sapiens
tgttcctaatatccagaagggagaggatgatatttcttccaatattgcagggggtgtacaaccttcctgtgatattgttcctaatatacaggtggggagaggataatattgtttgtaatatccaagtggaaagaggattaaattactctcaatatcgaaggaggtgtacacctcccctgtgatatagtttctaataaccatgagrggagaggatgatatatcttccaatatcacaggaggtgtacaccccatttctgattttgttaataattgcaaggatgggagacgattatattactttaaatatctcagtgggtgtacaactgctctgtgatattgctcttaatatctaggg

SEQ ID NO: 572026 - DNA, 556 bp, Homo sapiens
tgcaatatactgaaggtttctaaacatctaaatccttagatgttgtgattgatatctacacttctgggaaagatagataagatctatggtcctaggttcacagctgaagaaagctgtctgtttcattctcaggtgatacagggacacacacaggtgctaacttggaggcctcattaggacttctgaagcatttgctctcagcctataaacaattttgtgcttagtatgtgtaygtgtttgttcagctttttttttttttcttgagacaatcactctgtcgcccaggctggagtgcagtggtgcgatctcggctcgctgcaacgtctggctcctgggttcaaacaattctcatgcctcagcctctcgagtagctgggaccacaggcatgcgtcaccacgcccggctaatttttaggtatttttagtagagacagtgtttcaccatgttggacaggctggtctcgaactcctaacctcaagtgatcagcgttcagtttatttctaaaggaactttattattattgttattatattattatttgtttatttttgagaca

SEQ ID NO: 572027 - DNA, 556 bp, Homo sapiens
tgcaatatactgaaggtttctaaacatctaaatccttagatgttgtgattgatatctacacttctgggaaagatagataagatctatggtcctaggttcacagctgaagaaagctgtctgtttcattctcaggtgatacagggacacacacaggtgctaacttggaggcctcattaggacttctgaagcatttgctctcagcctataaacaattttgtgcttagtatgtgtatgtgtttgttcagctttttttttttttcttgagacaatcactctgtcgcccaggctggagtgcagtggtgsgatctcggctcgctgcaacgtctggctcctgggttcaaacaattctcatgcctcagcctctcgagtagctgggaccacaggcatgcgtcaccacgcccggctaatttttaggtatttttagtagagacagtgtttcaccatgttggacaggctggtctcgaactcctaacctcaagtgatcagcgttcagtttatttctaaaggaactttattattattgttattatattattatttgtttatttttgagaca

SEQ ID NO: 572028 - DNA, 473 bp, Homo sapiens
  misc_feature 450: n = A,T,C or G
acgaggaaattgtaagccccacagcattttttcccttcattcaggaatcactgacctcaaccatataagaaaaccattgtagcctaacttatgttctttttttcttatttttgctaaaagcagaggcctttcattgattttttttattttgcaaatatgtcttttcattctctttgtggtatcttttgaataatggaagacctggattttaagtgttgtcaaatttggcttagatatatttttctttattagtgccttttgcatcaggcttaaaaaatctttctctctttccctgccacaagattatgaagtaatttctattataatcttctgtcagctttgtagtttttcttttcacatttgggtctttaattgaactagattgactttagataaacaacygtttcagcaatatttattttaaaaatacaaaatacctgtttgatctanagggccacctctgtcacatgtca

SEQ ID NO: 572029 - DNA, 629 bp, Homo sapiens
attacctaatctgtagcatctgaactacagaatatgaataatggccagattatgtaacaacaccaattttatctagcttattttaataccttaacatatttttgaagtttcacaaaataacatttgtgaaaagagtattccaaatgtgcattttttgtttataactgtaggtttgttcctttcatatgttaacaatttaattatgtgtcttctatgtctaattaattatatattacaagttgactttataatcatttatttataataatagctgcaaattaatgagttccatagcaattttatattaatacctagaaagatatytacatggagtgtttgctttaaatacattgaatgttgttgtgtatacttccatggctatattttttcacattatttttccctgatggcatattacaaatctgtaagttgaccttttgtcacttctaaaatattaaattttctttcagcttatgatttatataattgcatatttagtgacaatatgtcagtatgaattccttcttgacactaatagtggctaaattccttgtttagtactgtgttttgtcgagaaagagttaagacaaaaaaagttgctatataaaaaatttagtaggtatcatttc

SEQ ID NO: 572030 - DNA, 542 bp, Homo sapiens
cagatagaatattgttttcaaccactataacataacaatataccagtagtaaaagatttttacacttggattgctaccctgtaccattagctgtctgtctgaacctaccatcagctatggagtactcattgcaggccttttggtaagtcattcaactctaaaatgccattccaacatctgctttttgkgccattcctggtgccaactatgtaagctgggttttctggattgcaaatgccaggatggagattaatactcaggaggattgttaaggagtagttttctggatagaagaaataaatcatatttaggtaggaaattgagagcgatatagtctcaacaagtctccaatgattgcatgggacattctaaaactgggatgaacaatccatgttcttctgaattgagttaatcaattttcaatattgatcaaataccgtagtaaagctaaatcagtgagtgtgaccttgggtgaggtttcttccaactatagggagtactgaaagttgaagtttctctgccagtagcactccctgaagaaa

SEQ ID NO: 572031 - DNA, 542 bp, Homo sapiens
cagatagaatattgttttcaaccactataacataacaatataccagtagtaaaagatttttacacttggattgctaccctgtaccattagctgtctgtctgaacctaccatcagctatggagtactcattgcaggccttttggtaagtcattcaactctaaaatgccattccaacatctgctttttgggccattcctggtgccaactatgtaagctgggttttctggawtgcaaatgccaggatggagattaatactcaggaggattgttaaggagtagttttctggatagaagaaataaatcatatttaggtaggaaattgagagcgatatagtctcaacaagtctccaatgattgcatgggacattctaaaactgggatgaacaatccatgttcttctgaattgagttaatcaattttcaatattgatcaaataccgtagtaaagctaaatcagtgagtgtgaccttgggtgaggtttcttccaactatagggagtactgaaagttgaagtttctctgccagtagcactccctgaagaaa

SEQ ID NO: 572032 - DNA, 542 bp, Homo sapiens
cagatagaatattgttttcaaccactataacataacaatataccagtagtaaaagatttttacacttggattgctaccctgtaccattagctgtctgtctgaacctaccatcagctatggagtactcattgcaggccttttggtaagtcattcaactctaaaatgccattccaacatctgctttttgggccattcctggtgccaactatgtaagctgggttttctggattgcaaatgccaggatggagattaatactcaggaggattgttaaggagtagttttctggatagaagaaataaatcatatttaggtaggaaattgagagcgatatagtctcaacaagtctccaatgattgcatgggacattctaaaactgggatgaacaatccatgttcttctgaattgagttaatcaattttcaatattgatcaaataccgtagtaaagctaaatcagtgagtgtgaccttgggtgaggttkcttccaactatagggagtactgaaagttgaagtttctctgccagtagcactccctgaagaaa

SEQ ID NO: 572033 - DNA, 600 bp, Homo sapiens
gcctctgagcagaagaaaattaatttgtctcatagagctgctgcttaaattcactgaatggtgtttgattctcacacrgagaaagaaacagcccagacggagaggaaagctatcacttggtgtgaaatattgctttatacagtgccatgtggggtcatcataaggagatgggggatccttagactgaaatcttgaaattcttctgtctcaaggaaatcacagaaaagcaaatctgtgagttacattccaggttactaagaaagtagctgattttaccaaacaaaattatatttctgagctgcaaaacacctgcaacattgcatacaaaaacaggttaagagacataacagctgtgacagaaaaaaagaaaatgtgaataaaaatactggaggtcctggtgctgacaccctaatgggctgtcagggactggagtcagtccaggggcctttagggaactctgaggtgtaacctcagcctgatacactcaatgacctcaggacctccttccagtcccaggcagtggctagacttctgtgaagggaaactgggttagaacagagccaatgttcccaagacctgagggcaattggggactgacaa

SEQ ID NO: 572034 - DNA, 600 bp, Homo sapiens
gcctctgagcagaagaaaattaatttgtctcatagagctgctgcttaaattcactgaatggtgtttgattctcacacagagaaagaaacagcccagacggagaggaaagctatcacttggtgtgaaatattgctttatacagtgccatgtggggtcatcataaggagatgggggatccttagactgaaatcttgaaattcttctgtctcaaggaaatcacagaaaagcaaatctgtgagttacattccaggttactaagaaagtagctgattttaccaaacaaaattatatttctgarctgcaaaacacctgcaacattgcatacaaaaacaggttaagagacataacagctgtgacagaaaaaaagaaaatgtgaataaaaatactggaggtcctggtgctgacaccctaatgggctgtcagggactggagtcagtccaggggcctttagggaactctgaggtgtaacctcagcctgatacactcaatgacctcaggacctccttccagtcccaggcagtggctagacttctgtgaagggaaactgggttagaacagagccaatgttcccaagacctgagggcaattggggactgacaa

SEQ ID NO: 572035 - DNA, 597 bp, Homo sapiens
atttgcatatattgaaccattcttgcatccctgggataaatctctcttggtcataatgaataatcttttaaatgtattgttgaatttgattttctaataatttgttgaggattattgcagcaatgtttatgagatatattagcctaccatttctttttttttggtggcggtggggatagagtctcactctgttgcaaggctgcagtgcagtggcactatctctgctcactgcaccctccgcctcccaggttcaagcgattctcctgcctcagcctcccgagtagctgggactacaggtgagcgccatcatgccgggctaatttttgtatttttagtagagacggggtttcaccatgttggccaggatggtctcaatctcttgaccttgtgatccacccgcctcagcctcccaaagtgttgggattacaggcgtgagccaccatgcccgacccacttctrtttttttaaatgtgcctttggtttttgtatcaggacaatactggcttcaaataattagtttggaagtatgcccgtagccttttttggaatcattcaagtaggactagtattagttctttaaatgtttggttttcctct

SEQ ID NO: 572036 - DNA, 509 bp, Homo sapiens
ttttttttcttaagaccagttattttatttatcagtgtccagcatggaagttgtgatacaataagaactgtatttgatctttgttcccagtccctgacacagagctccgaaaagccttataatttcctgagtgaccggagtgccttttgttagtcataataagccccttttgatcatacctgagtttaagctaatgaggtgacagcatgtgacccctagatagcctaaggttggggcctgtctccagaaaaatcaagtgagtagagggttagaacattcagctcagtccacagacctttggcgaggtgggggtcagggacggcagggaataggggatggggattaagctctataaaaactcttgggmcgggtgtggtggttcacacctgtaatctcagcactttgggaggccgaggcgggcagattacttgaggtcaggagtttgagagcagcctggccaacatggtgaaaccctgtctctactaaaaatacaaaaattagctgggcat

SEQ ID NO: 572037 - DNA, 509 bp, Homo sapiens
ttttttttcttaagaccagttattttatttatcagtgtccagcatggaagttgtgatacaataagaactgtatttgatctttgttcccagtccctgacacagagctccgaaaagccttataatttcctgagtgaccggagtgccttttgttagtcataataagccccttttgatcatacctgagtttaagctaatgaggtgacagcatgtgacccctagatagcctaaggttggggcctgtctccagaaaaatcaagtgagtagagggttagaacattcagctcagtccacagacctttggcgaggtgggggtcagggacggcagggaataggggatggggattaagctctataaaaactcttgggacgggtgtggtggttcacacctgtaatctcagcactttgggaggccgaggcgggcagattacttgagstcaggagtttgagagcagcctggccaacatggtgaaaccctgtctctactaaaaatacaaaaattagctgggcat

SEQ ID NO: 572038 - DNA, 503 bp, Homo sapiens
agataactattctaattatcttgatcagaaaataaatctttcctgcaccccggagggagacactatctctgtcttccatgtctgtttgctctacattaccattatgggatacttctgaacaaaaagctcatacaagatgggaaaaaatgtcctggagagacttttgaaatgtattgtttttgttattttgaaatatacaatacattgttgctatggtttgaatatctgtmccctctaaactcatgttgaaatttaatttccagtgtggagaaatgtaattcattcataaattaatggattaatagcttaatggactaacaggttatcataggagcaggactgttggctttataagaagagggagagagatctgagctaacacattcagccctcttgccatgtgataccctgtgctaccatgggactttacagagagtctccaacagcaagaaggttcttaccatatatggctcattggccttgaactttccagcctccagaac

SEQ ID NO: 572039 - DNA, 560 bp, Homo sapiens
tctggagatgaaaaatgcaattgacatactggagagtacatcagagtcttttactagcagaattgatcaagtggaagaaagaattaatgagcttgaagacgggctatttgaaaatatacagtcagagaagacaaaagaaaaaagaataaagcatgtccaccaggtctggaaaatagcctcaaaaggacaaatccaagcattattggctttaaggaggaggcagagaaagagataggggtagaaagcttattcaaaagaataatatmagaaaacttttcaaacctagagaaagatatcaatattcaagaacaagaggtttacacaacaccaagaagattaaatccaaataaaattacttcaaggcatttaataatcaaactcccaaaggttaaagataaagaaaggatcctacaagcaacaagagaaaagaaacaaataaggtgcaatagaacttcaatacacgtagcagcaaactttacagtggaaaccttataggccaggagagaacagcatgacatatctaaagtgctgaaggaaaaaaccttttaccctggaataat

SEQ ID NO: 572040 - DNA, 659 bp, Homo sapiens
ggttgtgggtcttaagtccctctcatgaaagagtcccgccctatacccttggggaaggaatgctgacatcatgaagcttccatagaccccaagacggcagcgttcagtgagcttccagataggtgcatacgcggaggttcctggagggtggtgcacctaggsagggcatagaagctccatgccccttcccccaaatctcaccctacacatctcttcatttgtatcctttgtgatatcctttataataaactggtaaacataagtaagtgtttccctgagctctgtgagccactccagcaaactaatcaaacccaaagagggggtcatgggaaccccaacttgaagctagtccattggaagttctgacggcctggacttgcaactggtgtgttgggggcagagagggggccagtcatggggactgagccttcaacctgtggcatctgacactatctccgggtagtagtgtcagaactgaattagagggcacgcagctggtgtctgctgcttggtgtgtggggaaaataaagccacacatttggtcacaaaagccttcttctgtgttgatgactcttgtggtgtgagagtagaagaaaaacatggtttgagaagagttttttcctgtacactagtacaatcacagaaaagtagattgcagg

SEQ ID NO: 572041 - DNA, 528 bp, Homo sapiens
agggtgcaatgaggtatggtcatgccactgcagtccagcctgggtgacagaacaagaccctgcctcttaacagcaacaacaacgacgacaacaaaaagtggaccacacgttgaatcccttttgtgcctttgatatttctgcttccaataatatagtttctagagacaaatgatactattggagtatattaattattttcaccatacatataaattaagagtgccaaagcatcaaagaagactataatttactctaatcaaatactgatatacttttcttaaaatatgaatcaacagtgccatctattccaatttctagtaaccttctcccttgaatccttttggaggtgttaataagtttaaaaacaggagagtacacccctcatgctaaaaaaagacccaaaaaactaggtattgatggaacatatctcaaaataataagagctatttatgamaaacccacagcaaatatactgaatgggcaaaagctggaagcattctctttgaaaactggcacaacacaaggatg

SEQ ID NO: 572042 - DNA, 635 bp, Homo sapiens
tccaaactcattttacaaggccagtgttaccctgataccaaaaccagacaaagacacatgaaaaaaaaagaaagaaagaaaactataggccaatatttctgatgaacattgattaaaaaatcctcaacaaaatactagcaaattgaattcaacaacaccttaaaaagatcattcaacatgaccaagtgggatttatcccagggaagcaaggatggttcaatatatgcaaatcaatcaatgtggggatggttaatgaatataaaaaaatagcaagaaagaatgaataagacctagtatttgatagcacaaaaaggtggctacagtaaataataatttgatcatacattttaaaataacttaaagagtatagttaaattgtttgtaacacaaaggttaaattcttgaagggatggatatcccatttaccrtgatgtaattactatgcattgcatgcctgtatcaaagtatctcatgtacctcataagtatatacacctgctacgtacccagaaatatataaaaaaggcaatgctttgggctaattttctgccagctagcaggtggttcctcagaacaaatattatctagaagattaatattagtattactttatttgcatttcaagctggtgagccc

SEQ ID NO: 572043 - DNA, 589 bp, Homo sapiens
tgtttccttttttttttttttgactattatcaataatgaaggtatgaacattcatgtacaccaggagtccccaacccccagggtacagactggtaccaattcatgacctattaggaaccagggtgcacagcaagaggtgagtagcaggcaaatgagcattgctgcctgagctccacctcctgtcagatcagtggcagcattagattctcacaggagctcaaaccttattgttaactgcrcatgtgagggatctaggtttcatcctcctaatgagagtctaatgcctgatgatttgaggtgaaacggtttcatcctaaaaccattcccatcccagtctgtggaaaaattgttttccacgaaaccagtccctggtgccaaaaagattagggaatgctgatgtacactaaatatggtggacatatgtttttatttctctaagttatatatttaggagtggaattgctggtcatatgtaactttatgtgtaacattcctaccaacaatttatgaggtttcaaatttccccatatagatgtcaatgcttgttattatctttttaattataggcattttagtggttgtgaagtag

SEQ ID NO: 572044 - DNA, 597 bp, Homo sapiens
tctcacagcatatacaaacgtcaactcaaaataaattaaagacttaagacctgaaactgtaaaccttctagaagaaaatatagggatagaggaaaagctctatgacattagtctgggcaacaattttgtatacggccccaaaagcacagccaacaaaagcaaaaatagtcaaattggtttacatcaaactaaaaacttctgcgcagccaaggaaataatcaacagagtaaagacacaagctactgaatgagagaaactatttgcaaacagtacgtctgataaagggttaatatccaaaatacataaggaattcagtaaktcaatatcaagaaaacaaaaaaccaatttaaaaatgggcaaaggtcctaaatagacatttgtcaaaagatttgcagatggacaacagatatatgaaaaaaatgttcaacatcactaatcagggaaatgcaaattaaaaccacagtgagatatcacttaacacgtgttagaacgtctattatcaaaaagactaaagagaagttttgacaaaaatgtggagaaaaagcaactcttgtatcctgtcggtgagagtgtaaattagtgccaccattgtggaaa

SEQ ID NO: 572045 - DNA, 597 bp, Homo sapiens
tctcacagcatatacaaacgtcaactcaaaataaattaaagacttaagacctgaaactgtaaaccttctagaagaaaatatagggatagaggaaaagctctatgacattagtctgggcaacaattttgtatacggccccaaaagcacagccaacaaaagcaaaaatagtcaaattggtttacatcaaactaaaaacttctgcgcagccaaggaaataatcaacagagtaaagacacaagctactgaatgagagaaactatttgcaaacagtacgtctgataaagggttaatatccaaaatacataaggaattcagtaagtcaatatcaagaaaacaaaaaaccaatttaaaaatgggcaaaggtcctaamtagacatttgtcaaaagatttgcagatggacaacagatatatgaaaaaaatgttcaacatcactaatcagggaaatgcaaattaaaaccacagtgagatatcacttaacacgtgttagaacgtctattatcaaaaagactaaagagaagttttgacaaaaatgtggagaaaaagcaactcttgtatcctgtcggtgagagtgtaaattagtgccaccattgtggaaa

SEQ ID NO: 572046 - DNA, 584 bp, Homo sapiens
ttgtcctttactcttgtttatactaatgtacagcttattctatccccctttggacatgcaccatgtatatgagaaagattggttctaaacacattggtcctttcattgtgtttcctgtgattttagtcatggcatcatgctttggattacttttacaaataagcctgtatgaraaatacagatatcattgcatttatatgattcactttgatttttgagtctcatttagaaatagagcattgacatttttagggtgttcttattttgatgatagttctcttggtgagttactccatagttatctcacctcttattgagatatccttctcgtttctaattttcttaggcccacagaaatgtcattagtatctttatttatactcacagcattgtccagtaccagttccacaggggatcttatctaaaatctagccaaacaccagtgatatcctatctcaaactatcgattttccctcacttcattatgattacctttgatttccagtcttagcaaatctctattctctgtgatagtgctgactaccaagctgagagggttatttctgtgattaaaatttcataat

SEQ ID NO: 572047 - DNA, 621 bp, Homo sapiens
atattttcctttattcctataacatagttgtatgtggaataagtaaaagacagtattctactgtttcttcaaataaaaaaaaagacagtttcttttttgaaaacttcccagtatggtatctagtctagactctagacaagaaagaagcaaaaggagagagatagagagaggaaaaagagaagaaggaggaagaggaagaagaagaagaaagcagggaggaagagagaaaagaagtaaagaaggattcgggtatgaaaggacaataaatctcagggccccaaaatcactaagccaaagggaaagtcaagctgggaattgcatcaggcaaacctgcctcccattttattctaaataagataggtacaaagatttgaaaagctacatacctccctcacaattaacccacaaggaaattccttgtggcctcaagatctttaccctraaacagttctgctggacttcacccttgtgatgtcaattgttagcttatcttcacaggtgcgggacaaaggacagaactcaaagtcatccctgtgctcgcctgagacaaatgtgtatcattgcttcctctgccctattgtttatgtaaaaatgcagattcactgagccagactaagacat

SEQ ID NO: 572048 - DNA, 612 bp, Homo sapiens
taaatgtgatgagtccaagatgttgccaattattctaaactgccaggaaccactaaaattcatcatttcacatacaacatcaaattatttggatccattatatctgatttgtttgtacctttagtctttgttcataaggtgatttttcagctgaattttgtgatttaatacttggccattgttcaaatcartatctttgatttccatattatagaacagaaattttaaaatcttttgaaattcgtgtttctggcttttgtacatggtaaacagtcatttgtgaaacttgacagcatacaattgtattacttagaacaaatgtttttgcaaccacgtttgaaagatgttacacaatgcagtatttttacaatgtcttctttagaatgtgtgactatatttgtcaggttcagatgaattatgtaacaattaaacctcaaagctgttatgaagtatacagtttatgattacttttgtaaaagaaaatggaaagcatttgaaatataattttactctgtttcatatgtactttgaaaaagaataaagtattataaattatttttgtctgtgtttataggaaatatcttttccagattttaattttgtgacctttat

SEQ ID NO: 572049 - DNA, 612 bp, Homo sapiens
taaatgtgatgagtccaagatgttgccaattattctaaactgccaggaaccactaaaattcatcatttcacatacaacatcaaattatttggatccattatatctgatttgtttgtacctttagtctttgttcataaggtgatttttcagctgaattttgtgatttaatacttggccattgttcaaatcaatatctttgatttccatattatagaacagaaattttaaaatcttttgaaattcgtgtttctggcttttgtacatggtaaacagtcatttgtgaaacttgacagcatacaattgtattacttagaacaaatgtttttgcaaccacgtttraaagatgttacacaatgcagtatttttacaatgtcttctttagaatgtgtgactatatttgtcaggttcagatgaattatgtaacaattaaacctcaaagctgttatgaagtatacagtttatgattacttttgtaaaagaaaatggaaagcatttgaaatataattttactctgtttcatatgtactttgaaaaagaataaagtattataaattatttttgtctgtgtttataggaaatatcttttccagattttaattttgtgacctttat

SEQ ID NO: 572050 - DNA, 450 bp, Homo sapiens
gtgcttggcattttttatgcactcagtaaacatgaccgtgctaatgaatgaatgaaagtttagagattgaccagacattatgtgtgtgtgtgtgtatacacatacatatgtacatacatgtatatatgtttacacmaggcactttacatgtttgctatctaccttgcaaattatttattttatatatatatagagggtggagtttttgggttgtgggagcataataaaaaatttgtaagatgaaggcagaaaaaaaatgtagagactagattagtaggggccacatgtgtcatgtcaaatagttgggacttcatattgtatatcctgcgtgtccaccacacatcagataatcctcttgagaattttagcgagccagaagatcgtataaatgacattgcacatttattatcccgtatggcctttcctcatgaatccccaactagatcaagc

SEQ ID NO: 572051 - DNA, 517 bp, Homo sapiens
ggcactttacatgtttgctatctaccttgcaaattatttattttatatatatatagagggtggagtttttgggttgtgggagcataataaaaaatttgtaagatgaaggcagaaaaaaaatgtagagactagattagtaggggccacatgtgtcatgtcaaatagttgggacttcatattgtatatcctgcgtgtccaccacacatcagataatcctcttgagaattttagcgagccagaagatcgtataaatgacattgcacatttattatcccgtatggcctttcctcatgaatccccaactagatcaagcctgatacgctcagccttgaggattgratccttcctcctctagcatattatctggaagtttaaatgatagccactttttatgactacttgttcttgacctataaatttatctgttcacatcagcgattgtttgtggtcttttcaaggaggctccgccaggactatagcaaacaaagcctgaaagggcttgaccagacattctcca

SEQ ID NO: 572052 - DNA, 540 bp, Homo sapiens
gtgtgtatgagaatggaataaaaatcttcttacccaaaataaattttatggaatactgcatcctagactttataacaggctttcaaatggttatttgccccaaaatacaagaatttttcagaggttgatatgggaaactcatgtttatataaaattgtagraaaatgagactacatgcaattttcagaaactcaaagccttactcattttaagctgaaattataataccactttaaacattttaagcattttggataaaaataatcctgaaagatagtgcacatgtctctattttcttgaacagaacatataggatatatttccttaccttgatgactcaaggtcattactttaaatattatttactgttcaagtctgtaataaaatgttgagtttaagttactgaggcattattattgtttaatacccctaatacaaaaagattccaatttgctattctttttagaatatttgcttcttttttttagcagttttgtacctttgtagctatttttacttgctgtcttcactaaacttact

SEQ ID NO: 572053 - DNA, 540 bp, Homo sapiens
gtgtgtatgagaatggaataaaaatcttcttacccaaaataaattttatggaatactgcatcctagactttataacaggctttcaaatggttatttgccccaaaatacaagaatttttcagaggttgatatgggaaactcatgtttatataaaattgtagaaaaatgagactacatgcaattttcagaaactcaaagccttactcattttaagctgaaattataataccactttaaacattttaagcattttggataaaaataatcctgaaaratagtgcacatgtctctattttcttgaacagaacatataggatatatttccttaccttgatgactcaaggtcattactttaaatattatttactgttcaagtctgtaataaaatgttgagtttaagttactgaggcattattattgtttaatacccctaatacaaaaagattccaatttgctattctttttagaatatttgcttcttttttttagcagttttgtacctttgtagctatttttacttgctgtcttcactaaacttact

SEQ ID NO: 572054 - DNA, 588 bp, Homo sapiens
atggaataaaaatcttcttacccaaaataaattttatggaatactgcatcctagactttataacaggctttcaaatggttatttgccccaaaatacaagaatttttcagaggttgatatgggaaactcatgtttatataaaattgtagaaaaatgagactacatgcaattttcagaaactcaaagccttactcattttaagctgaaattataataccactttaaacattttaagcattttggataaaaataatcctgaaagatagtgyacatgtctctattttcttgaacagaacatataggatatatttccttaccttgatgactcaaggtcattactttaaatattatttactgttcaagtctgtaataaaatgttgagtttaagttactgaggcattattattgtttaatacccctaatacaaaaagattccaatttgctattctttttagaatatttgcttcttttttttagcagttttgtacctttgtagctatttttacttgctgtcttcactaaacttactgctattaatttccccatctccacattgcgtgtgtgagattggacccgcctgtaaccccag

SEQ ID NO: 572055 - DNA, 588 bp, Homo sapiens
atggaataaaaatcttcttacccaaaataaattttatggaatactgcatcctagactttataacaggctttcaaatggttatttgccccaaaatacaagaatttttcagaggttgatatgggaaactcatgtttatataaaattgtagaaaaatgagactacatgcaattttcagaaactcaaagccttactcattttaagctgaaattataataccactttaaacattttaagcattttggataaaaataatcctgaaagatagtgcacatgtctctattttcttgaacagaacatataggatatatttccttaccttgatgactcaaggtcattactttaaatattatttactgttcaagtctgtaataaaatgttgagtttaagttactgaggcattattattgtttaatacccctaatacaaaaagattccaatttgctattctttttagaatatttgcttcttttttttagcagttttstacctttgtagctatttttacttgctgtcttcactaaacttactgctattaatttccccatctccacattgcgtgtgtgagattggacccgcctgtaaccccag

SEQ ID NO: 572056 - DNA, 605 bp, Homo sapiens
atattgtaagaagaattcttgtcaaacattgcagaaattgtaaagtcagattgatccaacccagtgaaatgtatgaagaaaaggaagaggcagaaatcagagagatgttggactccagtgtcctccccaaccctcacacactagtggctcttccccttccayccaatacacacacttggtggatttttgtggaatggtgctatacaaacatccacatgaatttgaagagactcaatatatttgatgctagtagctttcttactgattcagaatctggaaaggtaataggcttctaagaaaatccttgcattaggctttgtgtcatttccatcattggtgattagaggtggctgggtaaagatgtcacaacactggtgcttgcaggtgactaggaagaagggtccacaagttccttcaggctctgatctgtggccagtgaagtgccaagatcaatgtacccagggggaattagggttgggaaaaaacccagcatggtatacaggaacttcctgattagaaatacagggccagggccaccgactttagtgtcaggaacatggaaattctctgaaagcctggatgagcagttccatggcagtagacat

SEQ ID NO: 572057 - DNA, 605 bp, Homo sapiens
atattgtaagaagaattcttgtcaaacattgcagaaattgtaaagtcagattgatccaacccagtgaaatgtatgaagaaaaggaagaggcagaaatcagagagatgttggactccagtgtcctccccaaccctcacacactagtggctcttccccttccatccaatacacacacttggtggatttttgtggaatggtgctatacaaacatccacatgaatttgaagagactcaatatatttgatgctagtagctttcttactgattcagaatctggaaaggtaataggcttctaagaaaatccttgcattaggctttgtgtcatttccatcattggtgattagaggtggctgggtaaagatgtcacaacactggtgcttgcaggtgactaggaagaagggtccacaagttccttcaggctctgatctgtggccagtgaagtgccaagatcaatgtacccagggggaattagggttgggaaaaaacccagcatggtatacaggaacttcctgattagaaatacagggccaggrccaccgactttagtgtcaggaacatggaaattctctgaaagcctggatgagcagttccatggcagtagacat

SEQ ID NO: 572058 - DNA, 605 bp, Homo sapiens
atattgtaagaagaattcttgtcaaacattgcagaaattgtaaagtcagattgatccaacccagtgaaatgtatgaagaaaaggaagaggcagaaatcagagagatgttggactccagtgtcctccccaaccctcacacactagtggctcttccccttccatccaatacacacacttggtggatttttgtggaatggtgctatacaaacatccacatgaatttgaagagactcaatatatttgatgctagtagctttcttactgattcagaatctggaaaggtaataggcttctaagaaaatccttgcattaggctttgtgtcatttccatcattggtgattagaggtggctgggtaaagatgtcacaacactggtgcttgcaggtgactaggaagaagggtccacaagttccttcaggctctgatctgtggccagtgaagtgccaagatcaatgtacccagggggaattagggttgggaaaaaacccagcatggtatacaggaacttcctgattagaaatacagggccagggccaccgactttagtgtcaggmacatggaaattctctgaaagcctggatgagcagttccatggcagtagacat

SEQ ID NO: 572059 - DNA, 534 bp, Homo sapiens
tttgcgagtgtgcaacatgagtaacaccagctataggcaagctgctttgactctccaaaccttagtttttcttctaaaaaaaatctggggtcacattacgtaaattaagattttttcaaaaaataaatgccataatttttyttgggacattgcacagtttctaaaatcaacttagaagtcaaagattcttaccttgtttttttcatatgataaaaggggagcacagagagatacataccctcactgacattgaaacataaaacaccttcatttactcagttatttatcaactattaattaagcagcacctagctgccagatcctgtcctagtggaaagggatgtaacagtatacaaaacaaaaaaacaaataaatgcatattaaaaaaagcacaggaagagaataaagcaaggaagaggaaagtaaattgatggtgaccatcgtgtgtgtgtgcatgaataactgtgtacagatgtgtgcctgtatgcacatgagtgcaagagaatgtgtaaatactgaaatggtaatattcaa

SEQ ID NO: 572060 - DNA, 534 bp, Homo sapiens
tttgcgagtgtgcaacatgagtaacaccagctataggcaagctgctttgactctccaaaccttagtttttcttctaaaaaaaatctggggtcacattacgtaaattaagattttttcaaaaaataaatgccataatttttcttgggacattgcacagtttytaaaatcaacttagaagtcaaagattcttaccttgtttttttcatatgataaaaggggagcacagagagatacataccctcactgacattgaaacataaaacaccttcatttactcagttatttatcaactattaattaagcagcacctagctgccagatcctgtcctagtggaaagggatgtaacagtatacaaaacaaaaaaacaaataaatgcatattaaaaaaagcacaggaagagaataaagcaaggaagaggaaagtaaattgatggtgaccatcgtgtgtgtgtgcatgaataactgtgtacagatgtgtgcctgtatgcacatgagtgcaagagaatgtgtaaatactgaaatggtaatattcaa

SEQ ID NO: 572061 - DNA, 587 bp, Homo sapiens
cagtgacaaatgctcagttgtatctacctacacttattgctgtgagaatcaataggggtaattggcaaagcagataggggccctgatgaaaacatctgcaacttttttagtttgaatttcaatggattcatgattcgctctctctttctaaatagtagtcacaagttaaattttttaaaaattataaattcatttctagtagacagtgcttgcaaatgttatttttcagtgttccccccctagctctaagccagaggagagcacattaatatctctcagttacagggtcctggtgatgatacyataaaatggacacttagcgtgtgtttgtgcgttttagaacaaaataaatatactaaggtactgtttatgtgttgataattttgtaggttaaaaacacaagtattcatttccaaagattttataaatataaagggcaacataataagaggaagtatatagtaaggcccaaataagagacataaaccattgatgggacaagagttcagaggaagaagaggattggtcagcaaagcaagacttacagaggtgctgacataagccaggctgtggggtgttggtgggac

SEQ ID NO: 572062 - DNA, 587 bp, Homo sapiens
cagtgacaaatgctcagttgtatctacctacacttattgctgtgagaatcaataggggtaattggcaaagcagataggggccctgatgaaaacatctgcaacttttttagtttgaatttcaatggattcatgattcgctctctctttctaaatagtagtcacaagttaaattttttaaaaattataaattcatttctagtagacagtgcttgcaaatgttatttttcagtgttccccccctagctctaagccagaggagagcacattaatatctctcagttacagggtcctggtgatgatactataaaatggacacttagcgtgtgtttgtgcgttttagaacaaaataaatatactaaggtactgtttatgtgytgataattttgtaggttaaaaacacaagtattcatttccaaagattttataaatataaagggcaacataataagaggaagtatatagtaaggcccaaataagagacataaaccattgatgggacaagagttcagaggaagaagaggattggtcagcaaagcaagacttacagaggtgctgacataagccaggctgtggggtgttggtgggac

SEQ ID NO: 572063 - DNA, 611 bp, Homo sapiens
atggaatttatgtctaagatcctgcaaaggtagaatttcatttctactaataataattcaggcacctaatgctgaatatactagtaaccctagtgattgtgtgaataaaaaaacgtagctcttataaattagcagaactggtaggctatttstcctttaaaatattcatctgtaatataaatatcctatctgcagcaccaagtttcctcacagttagtattgactttcattatttaaggtaattttgttattttcattattttagaaattatttcactctttaagaataatgacttcattatttaagataattcatcagatcaaacctaaaatgtactttgatgctatttggaaaagtccttggtttgatctgaaacaacccattatttcagaagctttcagggaatacacacaattacaatatatgaaatgatcagtgatcaagaagtaatcattgtttacattaaaacttttctttttcattacaaaatactttttctgattataaaataataccaactttagtactgaaaatttaaaaaacagtaaaaacacatagcataaaattaaaataatctacagtgctaccaattatatttaatattttggca

SEQ ID NO: 572064 - DNA, 571 bp, Homo sapiens
aatggaataaacactaattgctcctacataacataatgcatatgtagcaaaaaaatgtaactgtcttcctcttctctgggtaaaatcagtcgttatattattttttgagagctgttcttttttcctttatctcggtcacaattttgtcttgaaatatttggagtgattcactaaataataaacttacctaccaccaacacacatacaaaatgtggggaaatataagaaaaaagggaaactgattaatactcataaatgcatagtaaatcaaggagaaaatacagatatcttatttagccttggtctttgcagctggacacagactgtaattagtatttatgatgcaattagtatttctaacttcattattctgctacctatttgatgtttcctttgacctcagtcagcactccagctgatcaagttttgttacctgacatgtgattctaaccttcattcctgaggtatctgaatcctaaatgtcctcctcccgtgtggttgctgcacctttaattaaattttacctcttcaatatttgtagkttctgggaggatttcctggttcttagaca

SEQ ID NO: 572065 - DNA, 633 bp, Homo sapiens
tctaacttcattattctgctacctatttgatgtttcctttgacctcagtcagcactccagctgatcaagttttgttacctgacatgtgattctaaccttcattcctgaggtatctgaatcctaaatgtcctcctcccgtgtggttgctgcacctttaattaaattttacctcttcaatatttgtaggttctgggaggatttcctggwtcttagacatacacttccatgcttctttgtgtagtagctatcctgtgtccccttggtaatcaggattagttatcattacccagtgggtttttcctgccttcttcccccaacaaaattaatttactgaaaccacagcattgcagtatagaaagagtttaattgacatgaggccagccacgtgggagacagagttattactcaaatcagtctccccaaaggttcaaaaattagagtttttacggacaatttggtgggcagggagctagggaatgggtacttctcattggttggggctgaaatcataggggtttagaaaacagtccttgtgtaccaagtctgtctctgggtggagccacaggatggctgagttatgaatcacaggtccagatggagtcggtcagtttccaaaaaaagattgaaaaagaa

SEQ ID NO: 572066 - DNA, 575 bp, Homo sapiens
tttccaactttttgctatgcatattttaaaatattaagaccatactaagttaaattttttcaagccaattttctttcattctatatttgttttagtgcatgatgttgaaatacatgatccatttaaccattttcttactgttagacacttaagttagggataaattttgttatatgaaaaattatgttctttttttgtaaatctgttttttttttcaagattatttgtccggtatagaattatagaagtggaattagagaagtgatctcttaagttagattgttttcttyattagtttttaaatggggacatttaattttttaccatcaggttgtttttacatatttactgtcttttgtttgagttgtatcgcaacttacaagtttaaaatgttgaagttttgaacagagacaagggattatttaaaatataagcatttttttattcaaaatagcttgtgtttttccatttatgaatgttttactaattacaatcagtatgtgggataattatattgtcattgtaaattatgtggataaattaatttaaaaatttatactgccagttcaatattg

SEQ ID NO: 572067 - DNA, 582 bp, Homo sapiens
cttttcacatagacacaatgtttgataattgcctaggaaaattttggaaggaattaaaatgtggtaaaaacattgatatgtataaataaaaattaaacaagaaaaattaaaaattaatgatgatatctttaaaaggggaagggaagtatagagaaggaagtgatggcagtaggaggtagataaaccctaggcagacagggccaggtccctggtgaaacccgaccttgaagccaaaaacagtttaaagtctagctacaagtcacaggtaaatccagactggactgagagcctgtcttcccatttggcatgctttcttctgattgattctccacctttcacctattttacatatacctacactttcctaattggttttttattctgtcatgcccacctttcagtgktgcctttgttttagcctttcctgcatactcacaaaccaatcagcatgcactccccattctgagcccataaaaaccctggacccagccacattgagagagagaccacccaactttgggtggggcaccaccctcatgtcccgtctccactgagagttgtttatatcactcataaaattct

SEQ ID NO: 572068 - DNA, 596 bp, Homo sapiens
gaagaaatggccaaatctctcagaatagaacatagaacttttcaaaagctaggagaggttggagtgactgattagtatgttataaagaactgtatcactcagatgcccatcagtgatctgtcaaagacttccaggtgactaacaagtaaagtgtttaacttccattaatacatacttcaattgaagatgtagaggtggaaaggtgtaatacctttcctcacccatcataagggtcagggctgacattcctatagcaaaaaataggttaacaagaggaaagtataacaaatttatttaatcaaagttgtacataagggagtctgcagaaataatgacccaaagcccagggaaaactattcatttttgtgcttaaatttgatgaggaatggagagctgtgtagaaatgtaactggacaaaaagagtgcaatctaatggtaatagactgagtgggggtggggagggagcccagccttgcctgtctgttcagattcttcttggcttctctgtgtagcattccttcctctggrcatagagcaggactccttctggaatgaaggtctaatggtctacaatctgtcaaggtaggtcagagatt

SEQ ID NO: 572069 - DNA, 596 bp, Homo sapiens
gaagaaatggccaaatctctcagaatagaacatagaacttttcaaaagctaggagaggttggagtgactgattagtatgttataaagaactgtatcactcagatgcccatcagtgatctgtcaaagacttccaggtgactaacaagtaaagtgtttaacttccattaatacatacttcaattgaagatgtagaggtggaaaggtgtaatacctttcctcacccatcataagggtcagggctgacattcctatagcaaaaaataggttaacaagaggaaagtataacaaatttatttaatcaaagttgtacataagggagtctgcagaaataatgacccaaagcccagggaaaactattcatttttgtgcttaaatttgatgaggaatggagagctgtgtagaaatgtaactggacaaaaagagtgcaatctaatggtaatagactgagtgggggtggggagggagcccagccttgcctgtctgttcagattcttcttggcttctctgtgtagcattccttcctctgggmatagagcaggactccttctggaatgaaggtctaatggtctacaatctgtcaaggtaggtcagagatt

SEQ ID NO: 572070 - DNA, 403 bp, Homo sapiens
tgcaaatctccaatgtaatttagaccaaaatttactggggaaaagaataccattttgctatcagtttgaaaagcactagctggtgtatctttaatttttaatgattcttctcagaatcattaagacttgctttattatcatattgttgtaaatgycatggctctctttttccttcttcatgctaattatataattatatctttcaatgcggtgaaaataagactctaggaaaatcagaccatcggcttttgtgattgttgtttttaagggtcttaagtgtctcattcctacaaattttcattacagggtctctgtcatattttcttccacaggtccaaaggcctgtgcaagatcttatccaaaaaaatcttcctagaacagttcattctctaaaattcgctgt

SEQ ID NO: 572071 - DNA, 621 bp, Homo sapiens
caattctaatttcaccctggccttgtgatcttgctctgcccccatatgccttgtgatattttattgccttttgaagcatgtgatctctgtgacccataccctattcgtacactccctcccctttgaaaatcgttaataaaacttgctggttttgcggcttgggggcatcacggaacctgccaacatgtgatgtcacccccaagaccaagctgtaaaatttctctcttttgtactctttctgtttatttctcagactggccgacacttagggaaaatataaaagamcctacgttgaaacactgggggctggttcccccaatacctggggttcatgatctcccactgagaagtctaatgacacagacacacacacatggattgggttaaggagtgaaaattttaataggcagaagaaaagagagagaagagcagctgtctctctcttgtgatagagacatccaaaaggggaaaagcagcagactgcagccaattttataggtaggcttgaggaggcagtgtctgatttaccaggacccacagattggttcaaccagatatgatgtttacgtagcacagagaaggctggtcaccccaccctaatcttattatgtaaatgggctt

SEQ ID NO: 572072 - DNA, 560 bp, Homo sapiens
tgtatttttcagcaagtatctctcatttagctatttagaacgtcctatgtattccaacactgtgagaacttcagatttcagctcacagatccctaggagctttccttttcttttccttttttatttcccagcaccaagtattgaactacatgatcttaaacatctaaaaaaaatttccatatgtagctcatatacatatatatacacacacaaaaattagatatacatagtcatatagaagcaatatatacataatacatacatatataatttrtataaattatatgcatatatgtatattaaaatatacatgtgtcttggccagagtggaattataataaaccattttaaatggctagtttttcctttattatacaagtattacatgttcattacagataaattagaaaagcaaaaaatttatttgataagaaaactacctataatactagtaatcagaggcaatctttgtgttatatatgtaatatatatatatataaaattttcaaattatatacacacaaattattatatgtgtataatatatatgaatgttttaa

SEQ ID NO: 572073 - DNA, 572 bp, Homo sapiens
tgccacacactattgctgggaggcacaatggctggctctgactccaatgggagaggacatttagaagtgtcatgcttgaaactctcctgaactctgccccttgcacctcttcctttggtttattttaatttgtacacatcactgtaataacccataaccgtgagtgtagcagctttcagtgagttctgtgagtctttctagtgattattgaaactgagagtgttcttgggaatccttgcactttcatttggtgccagagtgagggtgatcttggggacacctgaactttggagttggtgttagaagtggaatttgcaagaatgactgtattagtccattttcacactgctgataaagacatacccaagattgggcaatttacaaaagaaagaggtttaattggacttacagttccacatggctggggacatctcacaatcatggttgaaggcraaagacatgtcttacatcacagcaggcaagagagagaatgagagtcaagcaaaacgggtttccccttatcaaacatcagatctcatgagacttattcactaccacaagaacagtatggg

SEQ ID NO: 572074 - DNA, 549 bp, Homo sapiens
ttttgccatcttgtattttagtacagacggggttttgccatcttggccagggtggtcttgaactcctggcctcatgtgatctgcctgccttggtctcccaaaatgctggtattatgggcatgagccatccctttataatgaatcttatttaccaaaataaaattkaataagcaacaagtcgttaaaaaccatatgcaacaaaaggaatgaaaaattgttcaacacacaacccagacaaatctcacgtgtgtaatacttaatgaaagaagccacacacaaaaatgtgatggtgtatgattagcgtgctgcggaggtgagaagagtggttaccctttgcggggaagtaggggtacggagaatgattcaccagtaggtggcaccagggagcgctggggtgctaacaacattgatccaggtggcagtcactcaggacatacacataggtaaaaattatccaactgtacatttaagatgtatacactttactgtaagtgaaacctcaaaaaagtaataagatgcaaaaaaacttagataacaaaaatgcaggag

SEQ ID NO: 572075 - DNA, 549 bp, Homo sapiens
ttttgccatcttgtattttagtacagacggggttttgccatcttggccagggtggtcttgaactcctggcctcatgtgatctgcctgccttggtctcccaaaatgctggtattatgggcatgagccatccctttataatgaatcttatttaccaaaataaaatttaataagcaacaagtcgttaaaaaccatatgcaacaaaaggaatgaaaaattgttcaacacacaacccagacaaatctcacgtgtgtaatacttaatgaaagaagccacacacaaaaatgtgatggtgtatgattagcgtgctgcggaggtgagaagagtggttaccctttgcggggaagtaggggtacggagaatgattcaccagtaggtggcaccagggagcrctggggtgctaacaacattgatccaggtggcagtcactcaggacatacacataggtaaaaattatccaactgtacatttaagatgtatacactttactgtaagtgaaacctcaaaaaagtaataagatgcaaaaaaacttagataacaaaaatgcaggag

SEQ ID NO: 572076 - DNA, 568 bp, Homo sapiens
tctgcaagaagaaaactatggctctattctgcctgaccccgcaggcagtcagaacttatggttatcttcccttattccctgaaaatcactgttattctgttctttttcaaggtgcactgatttcatattgttcaaacacacgttttacaatctattgtacaatagtggtcctgaggtgacatacattctcagcttatgaagataacgggattaagagattaaagacaggcataagaaattacaagagtattattacagaagtgataaatgtccatgaaaccctcacaatttatgttcagagattgcagtaaagacaggcataagaaattataaaagtattaattttgggaacttataaacgtccatgaaatcttcacaatttatgttctgcccatggttccaggcggtctctccattyggggtccctgacttcccgcaacagatggggtttcaccatgttggccaggctggtcttgaactgctgacctcaagtgatcttcccacctcagcctcccaaagtgctgggattacaggcatgagccaccgtgcccagcctgaaagaaggtga

SEQ ID NO: 572077 - DNA, 474 bp, Homo sapiens
tgcttttgggtcttgagggcagagtcccacaacctttggccattgactactgcagaggagtaagctgggtgtaattctgctcaaaatgagagtcaggctaagccccggctttagtagtggccagaaagctaaagtcattctctgaaacagaaaatgtggattctttgcactctcgccaggtgcacgttataactggtggggaagctccagctgaaatgcctacagccctttgaactaaagtgctttacattccctgtcttctcacaaggaggaatggtagaaatataggtgacaggggaccgrtatcactgagcaccatgatactgttcactggacacctggtggctcaggtgtgtaggagacagcggcagtgtctgcagtggcacattgaggctgcaggaagaggccatgcctgacccaggaggccactccctcaaagcctccagcagccaccagaaataggagagacttgtc

SEQ ID NO: 572078 - DNA, 564 bp, Homo sapiens
ttcatattttaccttaccaaaccgagcagtaaataaacwcctgttcttactcctttaattctcaactgcatcagggctggtcatccaattctgagtctcaaggcaaagcctcatgctctcacagacctctcgttacaggacagccttgtatgcacaggaatgtttatgcacagatggccaaatgacttttggcttactttatgatttaacaatgctttgcatgttctcaagagtccaggttggcgaaagcaacagcatttaaagccccaaatcaatcgatcttactgcttgtcagcaaatctcagttaaaaatgtttgatgagggtataaagttggaactattactgggctgctccttttgcccttttataaccctagctagcactgcatgggataattgagagacagctacacctatcattgttagatgcctgtaaattccctgaacacaaactgaaattacatgtgcgtgctaaaagaaagctgccagtcctccacccttcgtttaatccagacttggcactgaccctatacaatacactatacattgcagcttggtttcag

SEQ ID NO: 572079 - DNA, 427 bp, Homo sapiens
ctttgttttttgttttttgtttttttacttccaaaatacttggggttaaatttcttacatggtgttaataactctgttttgttatacattacttttytgttatacattacttctccgaatagtatttaatcatctgatttattttctttaaactgcctcaagttatacgtgtcttaatatttatgacctcaaatactttgtagaaaaagaagaaatgggtaagttatatataaacagttaaggattctgacaggatgggagaaaacgtggcccttacatgtcttctctctaaaggttgtgaggcacattgtggcagtctcacttccccctttctgcagcacatcaccctcagataaataaataaagcagaggactttcatttccagccagttgtcatagcaacttttgactatccagagaagaagga

SEQ ID NO: 572080 - DNA, 596 bp, Homo sapiens
ttgaatctcaaatatctcactctacttctggcaccaaaaggaagcatgccaaggcctaagagaaataaattgttataatttacatgttagttggctttcagtaggtttggctcctgagccttttaaatgtcaaggattttagcgttaaaacacttagctttcaacactttagaaactcccaatgctaatgtttttgttttgtattttaactaacaattctttggctgaagactttcatttttgaaacacttaaattcctaataagtaaaaacctggcagggggtttggagagtttgggccataatgatagactgaaaattamttttactcttgaccttcatattgacttgttgtgatctaacaaagatcatttatcttcctgggctttcaattttttcattataaactataaaaaataatatggatattattttgagatcatttatcttcctgtggtttcagttttttcattataaactataaaaaataatatggatattgttttgagatcactggagaaaatggacaagcccagcatggttatttgtagaggtacttatatcaaattcaattatgtaaatcctgtttttaaacaa

SEQ ID NO: 572081 - DNA, 536 bp, Homo sapiens
cacgcctggcctatagccaatttctttactaaaacaaagggcttccaggctgcagcccaggaactcaggaagatcgaagtgcaggtcctctctgaacttcagcttctccatgtataaataaaatagtgaatataaaatatttacatggatgtcgaatgtggcagccattactatttctaccccrccctttatatatttattgactaaaagtcaggaaagaaaagtcacaaatgtcctgatgttacaggggctggagttacacaaagcagacaccctaaaactgcttccaaaagttcagaactgtgatcttcagaactgtagggcagttcacatgtaggctgaccccattcagtgtttcataactagttctcagcagaagttacatttcatacaggcctcagtaaaaaatcacagaagctcaccaagcggcccgttgtccctgcagtctgatgctcagaattaccatttccctgtaaaaaggcaatcctctagaggaatttttagatcatgcagcacattttagagcttcttccctt

SEQ ID NO: 572082 - DNA, 461 bp, Homo sapiens
atgcagcacattttagagcttcttcccttcaaatgcgaaacttgatcctggcacagccgggagcatggtttcggaagaagctcgtgggaatgtttctatcactgagtgttgctctacttctcagttcttggaagtgtcccataaatgtgatcaaaattgctgcccccacttgtgccaacttccatttgcctctttgcttcgtcttctgctccagcatagtcccggaagagggttttcaggcctccagcactgggacctccaggtatcacagtaatgggtactgagcaccgaccgtgtgccaggtgctgtgctgggcaccagggataccamcaggaacaagacagatacagccctgctcctcaaccagagcgcaaaggctggagacacggaagcagagctgcgattcagagcgcttgaggctctccaggagcaaggctggggcctggcagagcccagaggag

SEQ ID NO: 572083 - DNA, 461 bp, Homo sapiens
atgcagcacattttagagcttcttcccttcaaatgcgaaacttgatcctggcacagccgggagcatggtttcggaagaagctcgtgggaatgtttctatcactgagtgttgctctacttctcagttcttggaagtgtcccataaatgtgatcaaaattgctgcccccacttgtgccaacttccatttgcctctttgcttcgtcttctgctccagcatagtcccggaagagggttttcaggcctccagcactgggacctccaggtatcacagtaatgggtactgagcaccgaccgtgtgccaggtgctgtgctgggcaccagggataccaccaggaacaaracagatacagccctgctcctcaaccagagcgcaaaggctggagacacggaagcagagctgcgattcagagcgcttgaggctctccaggagcaaggctggggcctggcagagcccagaggag

SEQ ID NO: 572084 - DNA, 439 bp, Homo sapiens
gagagccctctgggaaaattccacaataaagagactacctagagaagaatgtatgctgtttaaaacccatcccttcctcagaggtaaccacttctactattaccttggtatgaatccattcagaacttttttctactgcttgtgactggtaagataaaaaaacaaaaaaattttttaaaaattaaaaagaactattgtgccttcacacacacacacacacacacacacacacgcaagttttgtcttctcagtagttggggtgtactctccgatacattctggttcactccttttcactactgcrtactactccactgtgcgaataggccacagtttacttgttcactctccacctgatgggcatttatgttgttttgaatttctgctaagattgaaataaacatctttgcacgtaagtgtatatgtttgtctcagatct

SEQ ID NO: 572085 - DNA, 467 bp, Homo sapiens
ttgtttaagccactcagcttgtggtacgccttgttacaacagtcctagcaaactaatacacagctatgcttcagtaaaaggcacctcatggagaaagacctctgcctacctccccaggcttgcctgacttcatcctcatatactagccacctgcaccccaccaaataattaacttctgctagtttcctggacaccccaagccattgtgtgccttgttcccttgctatgatatttcccctttctggaacacctccatcaatgttccagctcaattatcacctcctacaggaagccttccctcatttcctcctatgcctatcactcaagaagtattaaccacacttttctctgtgctgtagcttttttttttgtacctrgttctatggttacctttacactgcattgtaacctggtattcatgggcttatctgtgtcccctgtggagctgtcagtctctgaaaggccag

SEQ ID NO: 572086 - DNA, 566 bp, Homo sapiens
  misc_feature 23: n = A,T,C or G
gaactgtgttcccagatcattgnatccttgaggtctaaaatagtaactgaacagaagaggtgatgaatatacatgcaaaatgaagagaggggacctttcacagagagatagaatagtagccaaccaaaatggacataaagtttcaagaaacaaaagttaattactatggcagaaatcaggttaaaagaactttaggtataatggattacattgtgttgtactagggttgataactctttattgccggttacgttgggcttgaggaatattgaaggcaagatttttttgtttcacttcatgtagtaaaakcttataaaatataatgataaagatcacagcacccttcccagtacctgacacacattaggtacttggtaaatgcaaatatctttgtagagaatgcttatctaacacttactatgtgccaggtactcttccaatgctttatatacattaactcattaaatccttaccactacccattttgcagtggaggaattgagcttcagagacgttaagtgagttgtccaaggtcacacacggcatagctgggatttgaaatctgg

SEQ ID NO: 572087 - DNA, 614 bp, Homo sapiens
ccaaaagcatcttcatcttggataaataattgagacagggaaaagaatgaacccactggaaaaaaaggagggaaaaatagtccttcccacagactatcacattcctttaggcccctttctctggaaaatgagaagaagaagcytcatagacaagaatgttaattataattattacctaacataacaaatctttcatgacaagggccaaagctgttagatattaataccaaaactgtttcattttagtacaaattactttcctgttccctttgacaaatgcctcaattttcatctcaaggttgctcttcgaaggaacatgtaattatctggtcttgtttacagcaacaaaggtcaggttctttagtagatattaataaccactttgctgagagcattcttccagctcaccccacatgctgagctttgccctgatttcaaccttgtgaaattttcatggtgcccattctgtaccctaccaactttttatgattctatatctatggtgataactgctttcagccaaatttccttttattaaaccaaataattatgcattagacagcaccttgctctcttagggttagcagagtctggtgaagtgatatggaaaagtt

SEQ ID NO: 572088 - DNA, 398 bp, Homo sapiens
aaaaggagggaaaaatagtccttcccacagactatcacattcctttaggcccctttctctggaaaatgagaagaagaagcctcatagacaagaatgytaattataattattacctaacataacaaatctttcatgacaagggccaaagctgttagatattaataccaaaactgtttcattttagtacaaattactttcctgttccctttgacaaatgcctcaattttcatctcaaggttgctcttcgaaggaacatgtaattatctggtcttgtttacagcaacaaaggtcaggttctttagtagatattaataaccactttgctgagagcattcttccagctcaccccacatgctgagctttgccctgatttcaaccttgtgaaattttcatggtgc

SEQ ID NO: 572089 - DNA, 614 bp, Homo sapiens
ccaaaagcatcttcatcttggataaataattgagacagggaaaagaatgaacccactggaaaaaaaggagggaaaaatagtccttcccacagactatcacattcctttaggcccctttctctggaaaatgagaagaagaagcctcatagacaagaatgttaattataattattacctaacataacaaatctttcatgacaagggccaaagctgttagatattaataccaaaactgtttcattttagtacaaattactttcctgttccctttgacaaatgyctcaattttcatctcaaggttgctcttcgaaggaacatgtaattatctggtcttgtttacagcaacaaaggtcaggttctttagtagatattaataaccactttgctgagagcattcttccagctcaccccacatgctgagctttgccctgatttcaaccttgtgaaattttcatggtgcccattctgtaccctaccaactttttatgattctatatctatggtgataactgctttcagccaaatttccttttattaaaccaaataattatgcattagacagcaccttgctctcttagggttagcagagtctggtgaagtgatatggaaaagtt

SEQ ID NO: 572090 - DNA, 563 bp, Homo sapiens
ctcccattcagtcacattagtcattagtccagcccatcatattgtcgtaagaatgtgtctcgcagggcgaggccattcaggtttgcaggcttccgttcgatcataccatgttcgaaaaacaggagtgatctccgcgaacgaagcttcaccctttcaggcatctgttaccactgagctaagcgacaatgatatctcttgctctgagcctcttttgaggtgttaatgtaatattggatttccctgacttcataacccatttattcctttatcctcagctactatttttccatccttcattaaaaacctttgcaaggagcgttagcgttgttgctgtgctgtttagattgcaggcagcaatagcagtctagtgtatgcctcccctcagtccactcccattcagatggggtaaggatacatacatacatacatacatacatacatacatacatacatacatacatartgggttacataggtgcagcaatagtggatccccaggcaacataactgtatccactgttaagctcagttttgccaaatggggtgaaggcacaatccatccc

SEQ ID NO: 572091 - DNA, 539 bp, Homo sapiens
gcatgcattttaaaagctctcccactaatgtgcgttgttcttggtttataaagcttcagattattatgcttcaaggagtagtgttctgcctctgcttccctctccacttccattcctcaatcccactccacctaggaccttcagcaacatagttccctctgcttagaatatcactgctgtcccttcctgccgttagtcctgcccctcactcgccccacccatcaatttcactctcccttcaagatgcaatccagtgtcactcctttcacccgtttggtatcctagttggacatttcaatcacactcttgcttatcctttgtgtcacttattacaatcctaatttaatattttaaatttaatttctgtcttcctactagactccccacttggcaaagactttatatcacccaatgctgtatttccagcacacaraatgagcccaatgaatagctgtttaatgaatgagcaagtatgtgtatggctttactcatgttgttatacgtttgatcactgttaatgagcacagaaaaaaaaaatc

SEQ ID NO: 572092 - DNA, 623 bp, Homo sapiens
ctgagctgtatgccaaggcaatcttgatatcagtgtcctcatctttaaaatggaagggtagatatatagccttcaagatctgtctaatgtactgtttgtggtccaggtctcatcacacattttatacttagcccacatccttaccaatacatttgtattattaatcatacaaataaatgaatgattctcagaatggaagggagaacatatcatagaccaaaagtgggtatttatcaaactcttatgcctacttacactkcctgtctaggatgtctcggttttaggaaacagaggaatattatcttgagaaagctccaagtggtccccaatgtatacacacctacctctgtttacaattactatactaaatcagcaacttctttccattcaaggcttgagattcatttgaatctcaaattgaatcaccaaatacatcataattggataagaattatcattcatactaccattaattaattaattttgcctttagtgaaatattccaaggcagaatgtttgggactgttttactgactgctttttcttgagatctaattcattcgacattttcctatggagtaaactacaggcaaaactaattaatattattaataatgatatga

SEQ ID NO: 572093 - DNA, 548 bp, Homo sapiens
tctttaaaaagttaatattcttgttgtatcacttttaaaagaattataatatcaatatcattaggttttaacttttatattttctggttttctacataaaagtactcttgtatagtcttattatgtttctagacataacaactatttcaattctgcttaacagagatttctagccaataaagggtgccagacatgagtctgrtcccagggaatcgctgtggattaagactcagtctctggtctggaggagtttaccccagaaccctctgtccatttttaaacacttcccgtctggggccaagattcctctatctccagtcaccttgcatgctgactggctgcataacaactattttaaacttagtctttggaaggagtttaaccttcatttagtagaaggagataatactttgttttcctctggctttgatatgtatcttccatagttagaattcctattaatgttttaggttctgcttcgccagagtgaaaacaggggcctgtcttcaagcaggttaagacctaatgatacactaagtgtttaaaag

SEQ ID NO: 572094 - DNA, 618 bp, Homo sapiens
tgccttgttttatcataagcaaaatcctgatttgtggggttcgttgcatawcctgcttccctaggcctacccagcctggagttaaaaacagtaaccaaacagaatttgctttagtttgcccccagtttcccctacaagaatttcagttacctttgaatctctccctaattgttctgggaagtccaggagttacttcacttgtattctcatcttggccaccatctgccaggagccactttcttcttctctgctcagcagctgagaggttgccaagaagccaacaagaggcttctgataagtgtatgcaggcattaggcatccattttcagtgtgcattaaagcccactgttctcccaccctccattgcagatgtaggcccatatgatgacttctcagtccatcatttctttctgtactacagcatgctccagttcttcttggtgaaagacagtattgttaggtggtcaagagtgtggattttaaattcagagagatgtacatagaatcctggatctgccatgtttgagctatgtgtccacaggcaagttacacatcccttttaagccttaattggagaaaataatgaccatatcattggatcactgtgatgattggatt

SEQ ID NO: 572095 - DNA, 558 bp, Homo sapiens
ggagagcacaggctttggattaaaatggatgcccttctgtttaaaatccaactctgccaagagctagttctgtaaccttggacaagttatttaacctctttaaacctcggacaacctattctgtaaaataggtgcaagagtttctttctcacaagactgtaaagatgaaattcaccttagtaaagtagctggctcatagtgagtactatacaaatgatagctgttaacattattattaagcatattaatttatgattatttattcagttttttkgggggggaattgattgacttcactctaggtgtaacccaatagatataaatctaaacagaccagtcattgttaaggaaaaaagctcttgctaagagtgactcttttagtacaatgcttgtgacatgcacataaacaggcaatgaactgcctctaggacaaaggacctcaagcagctggtttcacacagagcaatctaactttatgccaccgaaggttagaatgcccctacatgctcatcacaaacttagatgaaataacaaaccaaataaatatctactttgtgc

SEQ ID NO: 572096 - DNA, 451 bp, Homo sapiens
tgagtaatacatgaataagaggtaaagaacctaccagctcgttacttaatgctctttaataataccacaatatggaagattcacattctctatttcccattatctggatgacttggataattcaaataagatccacagactgggaaaccagtgaggactaaacaagttgtcattgyccttcccacgtgggccctcgatatgcccctaggttccagccaacgttctaatggctttctcactgtgaatgaatatttcttcgttgccattatttctggctttcctaaggtggggcacatacattaaaaaaaaaaaaaaaaaaaaaaaacctataactcatgtaacaggttttaattaaatcagcccggttacattggagtttcaacaactggtttcctatcttgtgtgtctgtgctggggttcctgtgttggtttgctgggccattagtgaatt

SEQ ID NO: 572097 - DNA, 569 bp, Homo sapiens
cagaagacttttgccaatcatatggtagaatggaagtgtcactcctgctttccagagagccatgtagaacaacttaagaaattaagtggaaatagaaacgcaaccaaagccagttaacctaaactagaatctattatgctccatgaaactttatgaagcagatacagttagttctgataatccagtattttgtagttcagaaatccttttgattccttttggaaagtcaaaggaatccaggaaaatactgtgttccattatgtgccaggcattgtctcaggtgcttcagatggattaattcttaatcttcagaacaatacaatccagtactgtgagtgcttttcttacttttgcttttgaacccccattgaacagatgggaaaaagaggggrcataaaggttcaaccacatgcccaagattgcatagcaaatgggtggcagaaacaggattcagtcccccaccttctaattctgaaggcaacattttcagctactttcactgccttagaaattatcggataagtgtcctaagtgtattcactgagttggtatgtcattaacccacaaat

SEQ ID NO: 572098 - DNA, 554 bp, Homo sapiens
tttgtgttcaataattttgccctactctgggctaatttaagtcttctgaacacacttaagctaaaatgttctacagtgtaagctagaatgtaggtaggttggatgtactaaaagcattttcatcaaaccatggtaggttgaggggcatctgtaaactgctaccaacaatatcatatccacacacttaggaaatgtcgacktccgctaggactttctcagtcattagtgtttcttttctctttcttttgtgaactactaaaaataatacaaaatgggaatcaaaaaaatctggattctagctgtttctttattacatagtatctgtttcccagatgtcaaatgaggataagaaaatttgtcttagaagctttgtgaggacaaaaataagacatttgctgtgaaataacttcaaaacagtaaatcaattgcatgatacatggcattgttatttttagaaaaaaatatttctcaacgactttttacatggttgttaccatcattagaattgttttggtgaaaaatgataccaaacaggatagaatttctttgcattg

SEQ ID NO: 572099 - DNA, 598 bp, Homo sapiens
attttcctttctcaggatcaaaattgggagcaggggggaataaaacaccccaaagacacaaggtgacctgtctcagtggggtgacctagtgcaccagccagctaatgatgcccgtctgtcagctgggccccgggtgccagagcccgagggagaggagaccaaccctgacagatggtggcggctttgctgattatagagctcagttggaccaaggctctattttattccctgcaccaaggtcccttctgaacataggctgtttacttaaaacatatccattcctgtttctgctcatcatattcttaggataaaaatgcacataggcagctgttgcattttttggtactaaatattcaattctgctttgtgttaaggaaatttataatccattttaccccataattattctttataagtgagaaatcaaatcygaagtggcaacagagagtggactctaggaaaagaaatccaaataggcattgcctttggttatgctatttctctgcatgagacattcagacttttatattatcccactaaaaaaggaaacagcaaccaaatttagcaagctggtgttttcaagcacaaaagaatgtca

SEQ ID NO: 572100 - DNA, 593 bp, Homo sapiens
tgcctgttaatgggacataagccaaccagtcataaggctcaaaatcttagcactgttttgactttcctctttgtctgtcctttgtatttaatcagatgtactatatttatattcttcctcaaaacccattacgttgcttmccacagttacctcaaatatcaattacagttcaattgtaactgcttccgatactctaggcattacttgcaataaaaaaaatcttctaaaagcacagctccttttatttcactcttctactttatttcagtggctccccattgcttagtaaagaccaaattcccccagtgaacatcttttcattatctagtcccaaacctacactcttatttgggttccccttcacaaacttgcccagtgattctccaaagaacccccttgggttttctaaaacactttcaggaagtctatgagatcaaaattaatttcataataaaactcagatgttatctatcttttcattctcaatatctcatgagtatatagtagagttttccagaggcttaatgacatgtggtattttaacagattaatgcataagcatatgtgagaatccagctgtcatctgtaagctt

SEQ ID NO: 572101 - DNA, 534 bp, Homo sapiens
accaacccgacagctccgcggagaaaggctgcaggcccaccccaccttccttgccctcccggggaggccgggtaagcaagaacataaaagaggacaggcttaagaaacagcctggagaaaacacagcatgacaggggtcaaaactagccccatggagggcaaaacccggccgtgaccgtgaagcacagatttcgggacggtctggacgcgcaagaggctctctaccctggggctccgggagcggctccggcgcgaacgcgcgcgggcccccagccttcaagctcctccggccgcctgggacctgaccctgctcccacctcacctgtccgrtgcccgctggcccggcccgagccttcagctccctgcccgcaccccggcccacccttccatcccttgctctccccgcatgtctctcgggaccactggccgagtcagcgtgggcagggggccgctgccccgcagccccaggcccggccccggcactcactttctgaatcctcttcagcgccatgggtcagggatggcggtggggac

SEQ ID NO: 572102 - DNA, 626 bp, Homo sapiens
tcgggttatttgaaagtacacagtcagaagagacaaattagaaaagaatgagaaaaaaatgaagcacatctaccacaactagcaaatagcctcaaagggacaaatctaagagttattggccttaaagaggaggtagagagagatataaaggtagaaagtttattcaaagggataataacagagaacktcctacacctagagaaagatatcaacattcaagcacaagaaggctacaaaacatcaagcaggtttaacccaaataagactacttcaagacatttaataatcaaactcccaaagactcaaggataaaaaaaggatcctaaacgcagcaagagaaaaaaacaacataaaatggagctccagtacacctggcagcagacttctcagtggaaactttacaggccaggatagagtggcctgccatatttaaagtgctgaaggaaaaaaaatcttcttttcctagaatagtatatcaagagaaaatatacttcaaacataaaggagaaataaagactttccagacaaacaaaagcttagagattttatcaacaccagacctgccctacatgagatgcaaaaaggagttcttcaattggaaagaaaatgttaatgagcaataagaa

SEQ ID NO: 572103 - DNA, 626 bp, Homo sapiens
tcgggttatttgaaagtacacagtcagaagagacaaattagaaaagaatgagaaaaaaatgaagcacatctaccacaactagcaaatagcctcaaagggacaaatctaagagttattggccttaaagaggaggtagagagagatataaaggtagaaagtttattcaaagggataataacagagaacttcctacacctagagaaagatatcaacattcaagcacaagaaggctacaaaacatcaagcaggtttaacccaaataagactacttcaagacatttaataatcaaactcccaaagactcaaggataaaaaaaggatcctaaacrcagcaagagaaaaaaacaacataaaatggagctccagtacacctggcagcagacttctcagtggaaactttacaggccaggatagagtggcctgccatatttaaagtgctgaaggaaaaaaaatcttcttttcctagaatagtatatcaagagaaaatatacttcaaacataaaggagaaataaagactttccagacaaacaaaagcttagagattttatcaacaccagacctgccctacatgagatgcaaaaaggagttcttcaattggaaagaaaatgttaatgagcaataagaa

SEQ ID NO: 572104 - DNA, 626 bp, Homo sapiens
tcgggttatttgaaagtacacagtcagaagagacaaattagaaaagaatgagaaaaaaatgaagcacatctaccacaactagcaaatagcctcaaagggacaaatctaagagttattggccttaaagaggaggtagagagagatataaaggtagaaagtttattcaaagggataataacagagaacttcctacacctagagaaagatatcaacattcaagcacaagaaggctacaaaacatcaagcaggtttaacccaaataagactacttcaagacatttaataatcaaactcccaaagactcaaggataaaaaaaggatcctaaacgcagcaagagaaaaaaacaacatamaatggagctccagtacacctggcagcagacttctcagtggaaactttacaggccaggatagagtggcctgccatatttaaagtgctgaaggaaaaaaaatcttcttttcctagaatagtatatcaagagaaaatatacttcaaacataaaggagaaataaagactttccagacaaacaaaagcttagagattttatcaacaccagacctgccctacatgagatgcaaaaaggagttcttcaattggaaagaaaatgttaatgagcaataagaa

SEQ ID NO: 572105 - DNA, 408 bp, Homo sapiens
ttgggtaatttataaaggaaagaggcttaatggactcacagttccacagggctgcggaggcctcataatcatggtggaagatgaaggaagagcaaggaacatcttacatggtggcaggcaagagggcatgtacaagggaactcccctttataaaagcatcagatctcmtgagacttattcaccatcatagaacagcatagggaaaatccacccccatgattcagttaactcccacaacacatggggatgattacaattcaaggtgagatttgggtgggacacagaaccaaaccttatcaagaggagacctaagttttagaaagactgtgtttgtggtaacagggaggaagggctggaatagagaacagacttgagccatggagactaactggaagatctgcaatggtc

SEQ ID NO: 572106 - DNA, 500 bp, Homo sapiens
gaactaatacagttactaaactgtaactgttgtggttagaggcaaggtagattaaggaatgagaatgttctttctaagcttaattacagaaatgctatgattaactcactgcgtaacctcaataaaaatgttgttggtctgtaatttgtttctttaacctgtaaaataagggaaatttaaagcagttatatctgggacaaatatatgcaatttgtaaatactatgtgtatataagccaaacaaaaaataaatgacaacaatttagaagggaggaaaagaattatgactactttaattgctcttaaaagtcctgttttcaattcctcaaagacctaaacacaaaaatatcatttsacccagcaattccattactggatatatacccaaaggaatataaatcattctattataaagatacatgcatgtgtatgttcattgcagcactattcacaatagcaaagacatgaaatcaatctaaatgcccatcgatggtagtctgg

SEQ ID NO: 572107 - DNA, 523 bp, Homo sapiens
ttgggagtttgagaccagcctgaccaacatagagaaaccccatcactactaaaaatacaaaattagctgggcatggtggtgcatacctgtaatcccagctactcaggaggctgaggcaggagaatcatttgaacccgggaagtggaggttgcagtgagctgagatcacaccatttcactccagcctgggcaacaagagtgaaattccatctcaaaaacaaacaaacaaacaaaacttatatactgtacttctattttaaatataagttccagctttaagacatttctttactcccacatctgagaakaggttgttagaagaagcaaagcagaatgctttgctgcttagaatttttttccaccagataccctaggtctcatccatctcaagtacaaacttgcattaaaaattaacgcatttttgttacaactttttaaccagtctataagaaattccattttccctcatcttcctgtcttcttctgagccctccaaactcttctaacttctgcttgttacccag

SEQ ID NO: 572108 - DNA, 457 bp, Homo sapiens
aatcattatcaaatggaatcaaaaataaccatcatcaattggtattgaatggaattgtcawcaaatggaattcaaaggaatcatcatcaaatggaaccgaatggaatcctcattgaatggaaatgaaaggggtcatcatctaatggaatcgcatggaatcatcatcaaatggaatcgaatggtatcttcatcaaatggaatctaatggaatcattgaacagaattgaatggaatcgtcatcgaatgaattgaatgcaatcatcgaatggtctcgaatggaatcatcttctaatggaaaggaatggaatcatcgcatagaatcgaatggaattatcatcgaatggaatcgaatggtatcaacaccaaacggaagaaaacggaattatcgaatggaatcgaagagaatcttcgaacggacccgaatggaatcatctaatggaatggaatggaataatcc

SEQ ID NO: 572109 - DNA, 440 bp, Homo sapiens
aatcatcatcaaatggaatcaaaaataaccatcatcaattggtattgaatggaattgtcatcaaatggaattcaaaggaatcatcatcaaatggaaccgaatggaatcctcattgaatggaaatgaaaggggtcatcatctaatggaatcgcatggaatcatcatcaaatggaatcgaatggaatcatcatcaaatggaatctgawggaatcattgaacagaattgaatggaatcgtcatcgaatgaattgaatgcaatcatcgaatggtctcgaatggaatcatcttctaatggaaaggaatggaatcatcacatagaatcgaatggaattatcatcgaatggaatcgaatggtatcaacaccaaacggaaaaaaacggaattatcgaatggaatcgaagagaatcttcgaacggacccgaatggaataatctaatgga

SEQ ID NO: 572110 - DNA, 537 bp, Homo sapiens
atgtgttaaaggttgaggtttatttttatccatggaaatatccattttttaaaccactatttgttgaaatatttacttagatttagtgttattttaaaatatattctttactatttccaggttcccttatattaaggtttktttctgattaaattgtcatcgatttagtgtagatgaagttttctcagactgtactatataacttaatatgccctcattttgcctttatagaggaattctatcctggaaaactatagaagtcttgtaacgctagcctttattctcgatagtatacctatgctagttcactgctttttaaatgttaatgtggactggaaatgactgggaacttctttttttagttagcgttctcaaaataaaataaaatctatggacatagcaaaactgaagatggtagctaattatggtatttgctatggtaaggaggcatcccagaaaattcatgtgttggaaacttaaaccacaattttgggaggtacagcctttgggaaagcgtttaggtcatgccttcataag

SEQ ID NO: 572111 - DNA, 590 bp, Homo sapiens
gggtttccctatgttgtccaggctggtcttgaactgggcttaagcaatcctctggcctcagcctccaaaagtgctgggattatagcatgagccaccatgcccagcctaaaagtaagaatgtctaagtttctttccccaatcatcccattccttcacagttaacacttttgctcccagcattctttacaaattctgcttctgaaacctgtgttactctgaatttgtccattgtcttttactgccctggcctctaactttggatacacccttaacttgatgtctgccacagraccttgagttaggttcccattcacaacagcttggccttgacagcttcagttcagccacttgccatgtttaagctgggttttctccaatttaaatactttcattttttaaagagctgcctggccttcctctcatcagctatagaagagatttagtggtggtggttttacaagctaaaatacaatcaagaagttgtgaataagacattctagcctagaaggaatgaatggtatctcctaaactctaaggaaatattgattacagtatttaatcatggagagtatggaagaaaataacaaaat

SEQ ID NO: 572112 - DNA, 584 bp, Homo sapiens
ttcatgggagctttattcataatggcctcaaactggagacaatcaaatgtgcatcagcaagagaatggataaatacaaagtggtatatccagacagcaacaaggaataatacacattgatacaatagttgatacacacaatgacatgaatctcaaaaatattatgttcagcaaaaaaatgtagacacaggagagtattctgtatgtttccatttgtctgaagttcaacaacaagcaaatctaatccgtggtgatagcagtcagaagagcggttgctggggctggcgaagaaggtggtaataacaggaatgaagcaccaggagactttctagggagatggyaatgttccaaaatttgtggggtttgtttgtttaagacagagtctcgctctatcgcccaggctggagtgcagtggtgcgatcctggcttactgcaacctctgcctcccgggttcaagcgattctcctgtctcagcctcccgagtagcagggactacaggcacccatcgccacgcacagctcatttttgtattttcagtagagacagggtttcagcatgttggccaggctggtctcacactcctga

SEQ ID NO: 572113 - DNA, 613 bp, Homo sapiens
aaaaagtttatgaaatggagggaacatccctgaagaaatgaaacaaataaatataaataacttattatggcaaagtcaaagaacttgatttaaaaagcatagatataaatatatttaaaaataaatgagcatacagatacagtctcataatagtttttttaaacttttaaaatttaaatattattaatttatttttagaaatgggtctttctatgttgcctaagctggtctcaaactcctgggctcaagcgatcctctcgcctcaacctcccaarttgttgggattacaagtgtgagccaccatgcccagcaagtctgataatagttttaatgtcatatgagggctgggtgtggtggctagctcctgtaattccagcactttgggaagctgaggtgggcagtaacttgaggtcaggagttcaagaccagcctgtccaacatggtgaaaccctgactctaccaaaaatacaaaaattagctgggtgtggtggcatgcacctgtagtcccagctactcaggaggctgaggcgagaggatcccctgaacctgggaggcagaggttgcagtgatctgagattgcaccactgcattccagcctggatgacagagcgag

SEQ ID NO: 572114 - DNA, 613 bp, Homo sapiens
aaaaagtttatgaaatggagggaacatccctgaagaaatgaaacaaataaatataaataacttattatggcaaagtcaaagaacttgatttaaaaagcatagatataaatatatttaaaaataaatgagcatacagatacagtctcataatagtttttttaaacttttaaaatttaaatattattaatttatttttagaaatgggtctttctatgttgcctaagctggtctcaaactcctgggctcaagcgatcctctcgcctcaacctcccaaattgttgggattacaagtgtgagccaccatgcccagcaagtctgataatagttttaatgtcatatgagggctgggtgtggtggctagctcctgtaattccagcactttgggaagctgaggtgggcagtmacttgaggtcaggagttcaagaccagcctgtccaacatggtgaaaccctgactctaccaaaaatacaaaaattagctgggtgtggtggcatgcacctgtagtcccagctactcaggaggctgaggcgagaggatcccctgaacctgggaggcagaggttgcagtgatctgagattgcaccactgcattccagcctggatgacagagcgag

SEQ ID NO: 572115 - DNA, 600 bp, Homo sapiens
gtctcaaacaaaaacaaaacaaaaaagaaatcggagaagttaattttatataaattataattccataaagccatgaaaaacaaaacgatggagtaaggagccagttctgccttccttgaagcagagcagtcatttgcctgctccatcaactcatagagtcacccttgagaacagagttatcactcttccttgaagctggtgaagctacagggcagaggggtaaagtaacttaargaagaccatatggtttgagctgtttctcgtgttataaagctgcagtgctgtggaataccaggctgtttggtgtctcagagaggcaaggttcaccgaactgtccctcatttctccatcaaagtattacttagcatgagtgaagcatccagtatgtgctagtgattgcaaatattgtgggaaaacacataatgtcatttaaattgtagcattagacatggcccctacagctaaattagtaagtcctggtgatttttcattcactttgcttctctttatgctacttctctgagttgcttaataggcatctttaatttagccttgaagagaggagagtttcccaaccatccttttatgtatgtttagacc

SEQ ID NO: 572116 - DNA, 555 bp, Homo sapiens
ggcacttatactattgcctgacacagtaggcacatcatcgaggtgacttgttattggtttccttgcatttaataccaggttttgcaaaagatagacacaattttcagcaattactctaagaatgtctaaatttaattaagttctattcctcaagccaatatccaaaatgtttgcatggttcattgagtctcacagtgctctggttatttaaatattccctcattgaatatcacagttgcaattcttaatttaaagtctgcacatctctatggaatatgtttaataaaaatgtttgaaaagaactgggtcattttggttaaggttctcaactcacttcaatagttgccacatatgatcatctgtaaagtcaatttttaatgtcacacaaatcaaataagttaaacttcaaagactaawtttcaagcatttagtgactatatacttcagtaattagttgtgcacacattctcatgatttttgacattttgttcaagggtaggaaaaaggtggtgtcaaactctgatctaattgtgacatatcaagtgaggatgctct

SEQ ID NO: 572117 - DNA, 399 bp, Homo sapiens
cctttaagaaactcaatttggggtggagtcccagggggccaatggcagggagaaagcagtcttgagtgtctggattcaacagtgggctcttgacttccttaatcctcatattaagcccacagggaatgaatggaagattgtcccaattttgtaagtgaagaaactgaagaggggaagcaaattagacaaggtgatagggataaagctagaatgtgccagtctagctccaaagccaaggctttttgtactatttcttcaaggaattcagtctaacttgacagttcagaacactgaacaaaaaagcatccatcagttgyttttttctccagttaactcacagattttcctgtttttccccttcttatgccagtaaatcatctggtaagtgaatgagataag

SEQ ID NO: 572118 - DNA, 598 bp, Homo sapiens
gttaggcaacatgccatgggcatgtctgtcctgtgagcacaaggtcctcttccactgagggctcctgactgcgagtccatggtgattccaatttcctccaggtcattctgcccactatccagcatcacgatgctctgttagaaaccaagcttccatttgcctctctctactttccagccatgggctcatactctgccttcttgagctatccaaatcaagcataccagccattcccaagaaagctgtacgtggctaaygggaccctccatggtcactcacacagggcatggtgatttatctcctggttaccaccaatggagtgatttttgatctggctgacccaggacaaagcaggaagagcatatgcagacccagccatcagaagcaaaactgggaagtggggatactcactagaaagaccatggaaatgggggacatggaaatgggtcgtatcaagctgagttcctgctttgccaggggcagggagaccccagttgagttgtgtgccccacgtccatgatacaaataccgcttgtaaggtaaagaacatgagtaactctcacagatgctccctttgtctatacaatgcaaacactaa

SEQ ID NO: 572119 - DNA, 564 bp, Homo sapiens
gaacaataaaagtgacaatttcaaaattacagtggtaatattttgttatggaaaaagaaaaattttattaaaagtatcatatagttaatataattatcttagaattatgaatataatggtttctgaaataataaaggcatgattctctgtctttaatatacttacccaccaacattatgccatttcttataggatttaaacattaaaagaatatttgttgccctgaatgattgtttcagagaaatgaatattaacttggaagacttttagctgtatgtaaacttctggcattacttaaccttactgagcttcagtttccttaacagtaaataataatataacatgaaaccacattagattatatgacctagccatgacaaccactaaatataattccaggcccaagtcaggttatttacaaatattaactttttatatttctaaatacattttatgcctccttttggggcaaaacagaattataaaatacttcaccttttcttttttgttacggctgccccaaaattcaaagttatattgwttgtttgtttgtttctttgtttt

SEQ ID NO: 572120 - DNA, 559 bp, Homo sapiens
ttcccaccttagcctcccaaacacttgtaccttgatgtatcttcatcttgctatcatttcaagattttaagagaaaaatgcattcttctctttcccaatgtattcagaagctttaactctcatgagagtagayggatggcaaatagggaagtacatagggggatgccagatgaatgtaataattacttacagtcgtatagcatcccttaaattttaaagtaacttattatgaatggctcttttttattacttacaaagtactctgtgaggtaaatcttattttatagatgagaaaactgaggttggaaaaggcaacttgccaagctcacggagctagtagaacttgcattaaaatcccaccttttgccttcccaacattccataatagccgtaagtatagcactgctattctaaactactgatttataatgcaacaatatgggtgataccagtaggagaaaggatcaatttggttttcatggttaggttaattattaaaaaataatgactgtattttctgaaatttgaatcctgggggaaaacaaatatttaaggaaaa

SEQ ID NO: 572121 - DNA, 622 bp, Homo sapiens
aataatttgataacagaaagaaagaaataagtaatattaacagaattcaagcagaygtatcaagaccagatattgggcctgtagaatgatattaaacatttttatgaaaaaagcaggcatttcaccatttattttaatttttgcaaacatataaacatcctaaaacagagaaagaagaatatctaaatattaggctgatgcaaaagtaattgcagtttttgccatttaaagtaatggaagtaatagaaaatcttattttccccttatcccctgagctgcttgggagggttagagggagttatacaagaaatgtcaaggtatccatatttttttaacaaaagcataatatatttatcatgtaaaatctaatgaataagttattctccttattaaaatatcactatatgcttccacgggttacagaaaacatggcacaaagaaaagggcacagtattaagattagagaaaagaaagcagaattgttgaaagactcagagagggatatagaaaacccttttcctcattaagaagcaaagcaggcagctagcattgtgcagagtttattgggcaaaacagtcatcacaaataatatgttttaatcgaattttgggaatgaggataa

SEQ ID NO: 572122 - DNA, 622 bp, Homo sapiens
aataatttgataacagaaagaaagaaataagtaatattaacagaattcaagcagacgtatcaagaccagatattgggcctgtagaatgatattaaacatttttatgaaaaaagcaggcatttcaccatttattttaatttttgcaaacatataaacatcctaaaacagagaaagaagaatatctaaatattaggctgatgcaaaagtaattgcagtttttgccatttaaagtaatggaagtaatagaaaatcttattttccccttatcccctgagctgcttgggagkgttagagggagttatacaagaaatgtcaaggtatccatatttttttaacaaaagcataatatatttatcatgtaaaatctaatgaataagttattctccttattaaaatatcactatatgcttccacgggttacagaaaacatggcacaaagaaaagggcacagtattaagattagagaaaagaaagcagaattgttgaaagactcagagagggatatagaaaacccttttcctcattaagaagcaaagcaggcagctagcattgtgcagagtttattgggcaaaacagtcatcacaaataatatgttttaatcgaattttgggaatgaggataa

SEQ ID NO: 572123 - DNA, 501 bp, Homo sapiens
atgttgttgggcagagaggaaggaacatccctccttatcccgctccaaagctgaaatacttataagcatttaacctcaaagaagaattgggccaggaagttgtgttacagagaagtctaacgtttgatttttgcccacaagaggtttaaaatctactaaggaataatgacaataagaagccattaaacaaatactaaatgaataaaatacattttattaacaagtgccttgaactctaaaagcacctaaaatattagaaaatagtaagtactgaagttatctgtggaatttaattgtgttatttatcttgaggctattattacttatttttaaagcatgtatgtcattctcataatagactatatctmtaaaagaaaaggtgtaagaaagaaaaactactaaatctctgaactctaggagagtgacttctcttagcattttggtttatattcttccagttgtctttatttttctcttcttacatagataagatcatatgga

SEQ ID NO: 572124 - DNA, 531 bp, Homo sapiens
ttatttttcaatttgatgagagataggagtccattttattcttctgcatatgggtgtccaattttcccagcaccatttattgaagaggatgtccttttcccagtataggttcttgacctctttgtcaaaaatcagttggctatatatacatagatttatttctgggtcctctattctgttccgttggtctgcgcatctgtttttatgccaatataatgctgttttggttagcagagacttgaaatatatttcgaaatctaatagtgtgatgcctcccgctttgttttttgtgttcagggttgctttgsttattcaggctcttttttggttccatacaaattttttctatttctgtgaaaaattacattggtattttgacagagattgcactgaatctgtaagttgctttgggtagtatcttcattttaatgatattaattcttctgatccacgagcatagatgcctttccatttgtttgtgatttcttcagtttctttcatcagtgtttggtagctttccttgtagtggtc

SEQ ID NO: 572125 - DNA, 481 bp, Homo sapiens
ggaggattttaaacaggagcatgacatggtcagatttccatttaaatggttgtctttcagccttggcactattggcatttcattctggataattctttgctgtgaggcctgtcctatgtrttgtaggatatttagcaacatccccggattctacccactagatgccacgcccatgtcaaccaaaaatatttccagatattgccaaatggcccctgtgggacaaaatcactcccacatgaaaaccactgattttaataaatcactctgcaactacttcaaggagaaatttttgcaggagacataatagtgaaagccaaaagaccagttagagagctgtaatatgttccaggcaagagaagatggtagtttttaactgcagaaagagaaatgagctgggtgcggtggctcacaactgtaatcccagcactttgggaggctgaagcaggaggatagctttagcccaggagtctgagaccagcct

SEQ ID NO: 572126 - DNA, 756 bp, Homo sapiens
aaattaaaaggtaattattaaagaaacaaatatattgttttttaataaaaattaacagcattattatcaaactaaatatgatcaagtttttaaaacttccttctcactttaaccttcactattttcacctataacacagtactatatatttttgtctatgatgaaaaactaggcatttatagttatctataattaagtcaagtaagctttgtgaaatacactatttttatcccaaggggttaaccagtaaaataacttttattgtaactataaaattctaagtcataaaattaactctccaaacaaatcataaataatgctgtaaagaaagattattaagatatatacaaaaaaattctgaagacataaaatcattttttgttgactaaaatattttgcaaatattgataatacacaaaatcccattatataggttggctatacttgctgttcttataatattctctcattccaatcagcttttcaaactcaatcatttccctgaaacatcttacaaaatcagcaatgacttctatttaagcaaaatacagttcttatcttacttgaccatggcatttattatagtggatgatttgttccctgaattactgtctttcctggccatagctttaaacagtttctatggcctaacctttcatttgttcattagamccccaaacccaaagataccatgtttaacatttctctatttggatttctactatgcatctaaaacttaacattgctaaacaggac

SEQ ID NO: 572127 - DNA, 221 bp, Homo sapiens
ttttagtcttattttgttttcttttaaaatagagtgaactttttaaaaacattttttaaattttatttttaaattttaatctacgtatgtatgtatgtatgtatgtatgtatgtatgtatktatttatttatttatttatttattttgtgaccgggctatgagactggctaatttttgtatttttggtagaaagcgggagttcaccatgttattcaggctg

SEQ ID NO: 572128 - DNA, 737 bp, Homo sapiens
tgtaactaattttctgaagccttgcaggtttaaaatattttgtatttttagccaggaagctcttttagtaaaaaataataatagcaattatttcaatgttttcaggatcagttagtattgaaatgaagatgaatggttcatttggttctttatattattcatacctacagaagagtttctcctttgtgattatctagaataatatattttaagttttctagactcaccattataatgaagcattggtactgttgtcatatgctgtgtgtcaacatgcaaatggcttggtttttgttcaatgccagtgaataaaataaaacaattagtacaaaaaactttctctggaaatctctttcatcctacttacaccatgaacccaattaaagtattcaattaggaggaaactaaattgcactgatgtgtttcctacaacactgttacaaaagtatggttctatgtagattcttagttaacttgccagacagaagcatacaacccaatgtgaacttgaattagcattagaactcactttttgcttttctttttgaggttttggtttgtgtttgtttttcacaaccttggtggtacatttatcttatgtaagagcaaatgtcactctccttcaaataacagaaagtattccataatatgcatctttctatatgcaacattatgaagaaaaaatatttttactaagatattgggttcmttgtgtactgagaactcattacttttcc

SEQ ID NO: 572129 - DNA, 603 bp, Homo sapiens
taagcagtcgattttcttcccgcagaacagatatttgaaacaacacagtgggttcttaagcgaagtctattattttctccaagttgaacttgaaagttgccagaccaagcagaaaacagattggtggtgtttcagtaaaggcaaagcggtatagagaaaataatacagtctgtgaagtcacacaggcctgatttcaaatcccagctctgccatttacaagctgggtggtcctggataaattatttaacctctgtggtcttcagtttcctcccaactttgtagggttattgtgagtattcaactataccaagttataagtgcayaggtattcaatcagtgttcattcccttctgtatcaaagatttataatggacttttcatggaattgtctccacctataattatgtgactgtgccttcagattatcaaaattatatgaattgtccatgtgcccttggttctgaatattcaactctgtattgcaggaatgcctactcagttgcttgaatgggtctttggagttaacaaaatggctgtagaattgaaaaaaaaatacttaaatgcttaatcacttcaaaattttagctaaccctttgaaaaaga

SEQ ID NO: 572130 - DNA, 602 bp, Homo sapiens
aattttctttttgaaaattagtagaaacagaagaaaacagtagaaaacagaagaaaatatcagtcttaagaactgattaaatcttaatgcacaattatcaaattatttgaataaaacaaacaactataaggaatgaaaagaaagtacacttggaagagggctaagcgggcaacttgaaagacaagtacatgatttgaccttttgacttggagttttatatgttggcatgattccagggtcttgtgttctttctcccctgattcttccctttgggtgggctgccgacatgtgtagtggcctgctggcacttggaagaggagcatgctcagtgtgtttactggagttgtatgcttgttcacttcaggcatccttcccttacmagctgaatgtccctaggagatcatataccagttaaatgccaccattttgcctcctagtgtgcatgtgtgagcccactcacccaactcctgacatcttactggcaaactgctgatgaccagcttctggtgtttctgtttgctggagtactggctttctctggcgctggctgtgactagttattattttagagagacagttaacaatagcctgaccatcagttg

SEQ ID NO: 572131 - DNA, 186 bp, Homo sapiens
ttcaccttctaccatgattgtgaggcctctccaaccatgtgaaactgtaagtccattaaatatctttttctttataagttatccagtcttgggtatgtgtttattagcagcatgaaaatgtactaatacagtaaattggtactggtatagagtggggtgytgctgtaaggatacctcaaaatgtgg

SEQ ID NO: 572132 - DNA, 606 bp, Homo sapiens
aagaatgggccgggtggaaaaatagaagaagcctgggacttttacgatattgctaatctgttgacctcaccaaccttggcactgccctacctggagatactgagaatatagatccatattattaaagttattttcactttttgtttgtttttttttttttwactgtaaaaagcattctgatacaatataagctcaggacttgaaggtcaggacttatagaagaattgtccaacaacaacaacaaaagtattcaaaatgaaaaactttttaggaaacatataataaaaattggagatgtgctgatataaggaaaatgtttaagttcagaataagatgggcaggaatagaaagaaattgtttaaaattcacagttctttattttaaaaagtatgggatttttaaattaacatgatagtttgtttttgttttttgtttgtttttttggggggggggttggctttttgttgttgttgttttgagatggagtctcactctgtcacccaggctggagtgcagtggcacgatcccggctcactgcaacctccgccttccagtttcaagcgattctcctgcctcagcttcctgagtagctggaattacaggcat

SEQ ID NO: 572133 - DNA, 516 bp, Homo sapiens
tttttcttccttgatgggtagatgttgatggtggaggggaggaatatctgggtaaaaaacaaaggaaattatctcatccagtagactgcaaaactcctggggatagaaggaagtctgtagaggaagtgggcaggattgggtagagaagagaaacatcaaagaaattaaatatatcacaataggaactggaatagtacccttttgctataatgtaacaacataatagtgtagccttagaaatgagtccattgtctctaaatcggtcctatctaaaggtatctaatgtccgaaggagtgaaaaggaatataatcttatccaaatgcagtcctgtgacctggattctcagagtgacattwtggtgacctaaggcctcattataaatgatcctgttctgaagattcaggccatagaacatcctgagaagtaagactatcttgttatgcagctctttcaggggtcagaaactacagctcttagcagagggcctaatatattcccagatataccaagtccca

SEQ ID NO: 572134 - DNA, 369 bp, Homo sapiens
gaggccaaggcaggcgattacttgagcccaggagttygagaccagcctaggcaacatcatctctacaaaagataaaaaaattagccaggtatggtggcgggtgcctgtaatcccagctacctaggaggctgaggtgggaggatcgcttgaggccaggaagtggaggctgtggtcagctaatattgtgccaggtatatatatatacctgggcatggtggtgcacatctgtaatcccagcaactctggaggctgaggcacaagaatcgcttgaacctgggaggcagaggttgcagtgaactgaggtcactccactgccctctggcctgggtgacagagcaagacactgtttcaaaaaaaaaaaaaaaaaaa

SEQ ID NO: 572135 - DNA, 548 bp, Homo sapiens
atcactacaaaaaataaataaattatccagtcgttctggcacatgcttgtagtcccagctacttgggaggctgaggtgggaggatcacttgagcccaggaggtcaaggttgcagtgagctgtgattgtgtcattgcactctggcctgggcaacagagcaagactctgtctaaagaagaggaagaagaagaggaagargaagaagaggaagaggaagaagaagaagaagaagaagaagaagaaagaaggagaaggaaaagaagaaaggaagtctatgtctaataaagctacagtaaacaaggcaagggtattggcataaggattgacaaatagatccatgaaacagaatagagaacacagaaaaagacatccccccccccccaacatatacatacatggtcatttgcttttagatgatccagtgacaaaaggcaagtattttcaacaaaagcctctggaacaactggctacctgtgtggggaaataaagaaccctaacccttacctcacaccatacacaaaaatcaattcaagatgcatcatagatgaa

SEQ ID NO: 572136 - DNA, 569 bp, Homo sapiens
ttgttttcattttaaaatcgaagatgaattcattttatgagagaggccaaagctggctcatagttttgagcccatcccaccatttccctctagagtaccaggctgcaaaagtaaacacctcctttaccatgctctcttcctcccactcttcctttcttcttcttactctaaaacaaactcatagaagtggagtgtaggatggtggttatcagagactggggtgcgatggggtggatggagaaagaggagatgttactcaacaggtccagggtttcagtcagtcagacgggaggaggaataggtctggtgctgtatcgcaacagcatggtgactatacatattttggaatatatacattttktggaataatgaaaagagagcattttaggtgttctcacaacaaagaaatgataaatatttgggccagatgcagtggctcacgcccgtaatcctagttttgggaggttgagacaggcagattgcttaagcccacgagttcaagaccagcctgggcaatatggcaaaaccccatcactacaaaaaaactacaaaaattagccaggtgtggt

SEQ ID NO: 572137 - DNA, 564 bp, Homo sapiens
atgacatcagcagttggagaagcaaagaaatgccctggacaagtcatgcagagtcatttttctactaatcaaccatcacccatttaagaagtgtctttatggccgggcgcggtggcttacgcctgtaatcccggcactttgggaggccgaggagggtggatcacgaggtcaggagatcgagactatcctggctaacaaggtgaaaccccgtctctactaaaaatacaaaaaattagcctagcgtggtggcgggcgcctgtggtcccagctactcaggaggctgaggcaggagaatggcatgaacccaggaggcggagcttgcagtgagccgagatcgcaccactgcactccagcctgggggacagaacgagactctgtctcaaaaaaaaaaaaaagaagaagtgtctttattaccgccattgcaagaatccatctaggagttaagagtcaggcaggaggaatcatgaaaagaggaaacacttggaataatggaaggtaagagtgcsgtggctcacgcctgtaatcccagcactttgggaggccaaggctggcggatcacaaggt

SEQ ID NO: 572138 - DNA, 639 bp, Homo sapiens
ggtttgttacataggtatacacatgccatggtggtttgctgcacccatcaacccatcatctacattaggtatttctcctaatgctatccttttcctagcccccaccccctgacaggccccggtgtgtgatgttcccctccctgtgtccatgtgttctcattgttcarctcccacttatgagtgagaatatgcagtgtttggttttctgttcctgtgttagtttgctgagaatgatggtttccaactttatctgtgtccctgcaaaggacatgaactcatccttctttatggctgcatagtatttcatggtgtatatgtgccacattttctttaaccagtccatcattgatgggcatttgggttagtcccaagtctttgctattgtgaatagtgctaaagacacatgacaaatactttctctggagatcaggaacaagaagagaatgtctgtcatcaccacttctattcaaaactgtactaaaggaacttgtcagttcaatgggacaaaagaaggaagtctttagaattgttttcagaaagtttgatttaaaaatttttttagtacccagaaaaacttgaaatatgtgtcaatttagcaaggaagttttatataaagactatatattgtaattttataac

SEQ ID NO: 572139 - DNA, 639 bp, Homo sapiens
ggtttgttacataggtatacacatgccatggtggtttgctgcacccatcaacccatcatctacattaggtatttctcctaatgctatccttttcctagcccccaccccctgacaggccccggtgtgtgatgttcccctccctgtgtccatgtgttctcattgttcagctcccacttatgagtgagaatatgcagtgtttggttttctgttcctgtgttagtttgctgagaatgatggtttccaactttatctgtgtccctgcaaaggacatgaactcatccttctttatggctgcatagtatttcatggtgtatatgtgccacattttctttaaccagtccatcattgatgggcatttgggttagtcccaagtctttgctattgtgaatagtgctaaagacacatgacaaatactttctctggagatcaggaacaagaagagaatgtctgtcatcaccacttctattcaaaactgtactaaaggaacttgtcagttcaatgggacaaaagaaggaagtctttagaattgttttcagaaaktttgatttaaaaatttttttagtacccagaaaaacttgaaatatgtgtcaatttagcaaggaagttttatataaagactatatattgtaattttataac

SEQ ID NO: 572140 - DNA, 543 bp, Homo sapiens
actcactgactgtcacgagaacagcatgggggaaaccgcttcatgatccgatcacctccaatcaggtcccttcctccacacgtagggattacaattcaagatgatatttgagtgagggcacaaggcctaaccatatcattccattctatcattacattttctatatgtgatttattgaacccaacatatctaaaacagttaaataaaaataacatgtctaaaataatagatatctgtattcttatatatctactgaaatgaatttctgaagatattaggctggtctgtgtgttaatttgatttttgtcagaagcaaagctcaaattgggatgaggtatggcaaatgatatattaggaaaaaatgcytacaaaagataaagggaggaggaggtggactaaattaaagagatttatcatataacatggtgactatagttaataataatgtattgcattcttaaaactgctgagagtgtagattttaagtgttctcaccacacaaaaagataagcatgtgaggtaatgaatgtcagttagcttcat

SEQ ID NO: 572141 - DNA, 543 bp, Homo sapiens
actcactgactgtcacgagaacagcatgggggaaaccgcttcatgatccgatcacctccaatcaggtcccttcctccacacgtagggattacaattcaagatgatatttgagtgagggcacaaggcctaaccatatcattccattctatcattacattttctatatgtgatttattgaacccaacatatctaaaacagttaaataaaaataacatgtctaaaataatagatatctgtattcttatatatctactgaaatgaatttctgaagatattaggctggtctgtgtgttaatttgatttttgtcagaagcaaagctcaaattgggatgaggtatggcaaatgatatattaggaaaaaatgcttacaaaagataaagggaggaggaggtggactaaattaaagagatttatcatataacatggtgactayagttaataataatgtattgcattcttaaaactgctgagagtgtagattttaagtgttctcaccacacaaaaagataagcatgtgaggtaatgaatgtcagttagcttcat

SEQ ID NO: 572142 - DNA, 543 bp, Homo sapiens
actcactgactgtcacgagaacagcatgggggaaaccgcttcatgatccgatcacctccaatcaggtcccttcctccacacgtagggattacaattcaagatgatatttgagtgagggcacaaggcctaaccatatcattccattctatcattacattttctatatgtgatttattgaacccaacatatctaaaacagttaaataaaaataacatgtctaaaataatagatatctgtattcttatatatctactgaaatgaatttctgaagatattaggctggtctgtgtgttaatttgatttttgtcagaagcaaagctcaaattgggatgaggtatggcaaatgatatattaggaaaaaatgcttacaaaagataaagggaggaggaggtggactaaattaaagagatttatcatataacatggtgactatagttaayaataatgtattgcattcttaaaactgctgagagtgtagattttaagtgttctcaccacacaaaaagataagcatgtgaggtaatgaatgtcagttagcttcat

SEQ ID NO: 572143 - DNA, 564 bp, Homo sapiens
aatgctgcttttaaaaagctactttggcctggtgcrgtggctcacacctgtaatcccaacactttgggaggccaaggcaggtggatcacctgaggttgggagttcaaagccagcctgaccaacatggagaaaccctgtctctactaaaaatacaaaattagccaggcatggaggcacatacctgtaatcccagctactcgggaggctgagacaggagaattgcttgaacccggcaggcagagtttgcagtgagccgagatcacgccattgcactccagcctgggcaacaagagtgaaatttctcctcaaaaaaaaaaagaaaaaaagctactttattttggtaaacttttgttctccaaaattggttgactatggcacattattttttctcgtataacattaaaatacagttcaactagtattctgtataaaacattttcgaaaagaggagatactctaaaaatctattaagttctacaattaattattttaaaatatggcaccctttcagtccttcttactctttttcttcctcctctctctcgctatgttctctcttaccta

SEQ ID NO: 572144 - DNA, 483 bp, Homo sapiens
ccaccatgcctggctaatttttgtatttttagtagagatggggtttcaccatcttggccaggctggtcttgaactcctgacctcgtgatctgcccaccttggcctcccaaagtgctgggattacagagggtttttttaaaacaataccatttatgtaaaackaacataaatacacataacaattacatattttacaaagatgataatggtaacaaaccgagcagatgtggttgcttttgaaagggagaaaaatagggtaagtaataaggagaaaatcaaaatatgtgtaattaaatgagagggactttgtatagaccaatgacaacagtgtgctctgaagtaaggattagaattaggtacactcttctacgcatatatggtaccattttttcaaaaaaaaaaagtaggcgttatgaagatataacaaagaatatcagtgagctagatggccagtaggtaaaactggtaatgacttcatgatgt

SEQ ID NO: 572145 - DNA, 519 bp, Homo sapiens
ctgggcttcccaccactgcaaagaatggcagggaatagactttccacagtgtttgtggtgaatggcttccggccccataaaagagcacagaaaataaaaataaaccaccccatagaggtgttgagcaagggggagcaggaaatgctagggtctacctcactctccatgcagtagtactcaaaatcaactccttcaacatacttcagctgaaaaaacacctaagaatcagaaacgcaatggggcttgggggkgtgtctttaagttcaagacagggtcttgttctgttgcccagactgaagcgcagtggtgcaatcatgcagtctctacctcctgggatcaagtgactctccaaactcagcctcccgagtagctgggactacagaggtgcactgccacgcccagctaatttttttaatttttgtagagacagggactcactgtgttgcccaggctggtcttgaactcctgggttcaagccattcttccaccttggcctcccaaagttctgggattacaggt

SEQ ID NO: 572146 - DNA, 600 bp, Homo sapiens
ggaccccggctcagccactcactcactaggcagccatgagaagatcaccaagctctcccagcctcagttaacctaaaatgtggasattattattccagccttgactacttcaaaggatgctatgaaattcagatgagataatatatgtgaaatctccttgaaaaagatgggtggtcaaatgattcatgatttttttttttttttttttttttttttgagacggagtctcgctctgtcgcccaggctggagtgcagtggcgggatctcggctcactgcaagctccgcctcccgggttcacgccattctcctgcctcagcctcccaagtagctgggaccacaggcgcccgccactacgcccggctaattttttgtatttttagtagagacgaggtttcaccgttttagccgggatggtctcgatctcctgacctcgtgatccgcccacctcggcctcccaaagtgctgggattacaggcgtgagccaccgcgcccggcctcatgatttttaatagttagattttatgcaaaatttcatttgagggtaaacttaaaggtgaacaagtttaatggactttggccatggcagagaaatggttagg

SEQ ID NO: 572147 - DNA, 600 bp, Homo sapiens
ggaccccggctcagccactcactcactaggcagccatgagaagatcaccaagctctcccagcctcagttaacctaaaatgtggagattattattccagccttgactacttcaaaggatgctatgaaattcagatgagataatatatgtgaaatctccttgaaaaagatgggtggtcaaatgattcatgatttttttttttttttttttttttttttgagacggagtctcgctctgtcgcccaggctggagtgcagtggcgggatctcggctcactgcaagctccgcctcccgggttcacgccattctcctgcctcagcctcccaagtagctgggaccacaggcgcccgccactacgcccggctaattttttgtatttttagtagagacgaggtttcaccgttttagccgggatggtctcgatctcctgacctcgtgatccgcccrcctcggcctcccaaagtgctgggattacaggcgtgagccaccgcgcccggcctcatgatttttaatagttagattttatgcaaaatttcatttgagggtaaacttaaaggtgaacaagtttaatggactttggccatggcagagaaatggttagg

SEQ ID NO: 572148 - DNA, 293 bp, Homo sapiens
gtttccagtttttcttgccgttgtcagtaactgcgttggctatttttgctcataaatctttatccacagctctgatgatttctttaggaaagatttctcagatgtggaattactggacaaaagtgtgtgtrtattttatggtacttggattcattatcaaattgacttcctgaaagcttgcactgatctgtctcactactgaagtggggagagtgctgcttagtgttctaagcttgaatttctcagattaatcgagtgcttgaacattttttcttccgtcatttgttaataat

SEQ ID NO: 572149 - DNA, 429 bp, Homo sapiens
ccgggcgtggtggctcacgccttaatcctagcactttgggaagccaaggcaagcggactgcttgagctcagaagtttgagaccagcctggacaacatggcaagaccccatatyttaaaaaaaaataaatacaaaaaaaattagccaggcatggtggtgtgcacctgtagtttcagctacttgagaggctgaggtgggaggactgcttgagtccaggaagtggaggctgcaatgagccaacactgtagcactgcactccaccctgggtgactgagggagactctgtcttaaaaaagaaaaaaaaaaaaaagttaaaaattgtgcaaatcacacaataaagagagtgaaatgctaaccaacagaatgggagaaactattcacaaatcatatatctaacaagggtttaatatccagaatttgtaaagaattc

SEQ ID NO: 572150 - DNA, 654 bp, Homo sapiens
tttgacttcagagctcagacccttaacctccccacttatttgtattttcttctttaatacaaagaaaatttattactagtgccataaggggaaaagtgttatttcttaaaaccactgagcacaactaccattttgtatagattttcaaagttatatttcccaatctgttcatggtccatttggtaagtcccacctccaaagtttatttctctgggcctttattagaactggtacttaaatttctttctacaaaatraatattttagtcaaagatttttagctactagcttatctctggctggaagcctgtggcttttgttgttttcaaatttcctcttttggcaggaataccaactcatctctttctcctaagctcctcaaagcagagaggttacttagaaagctgaactagagaggaagggccagaaattgtattttatcctgcaggggacaggaaaggtttgtattttttcatttgcaaatatttgttcatattctttaatcattcgttcagtagatactaaatattatctgtgtatatttttattcattttacatgttattaatagtcatgctttaaccatgtatatgaggctgctaaaaaatatacgtaaggagccttgagtagcaaacaggagactataggaacagaaa

SEQ ID NO: 572151 - DNA, 654 bp, Homo sapiens
tttgacttcagagctcagacccttaacctccccacttatttgtattttcttctttaatacaaagaaaatttattactagtgccataaggggaaaagtgttatttcttaaaaccactgagcacaactaccattttgtatagattttcaaagttatatttcccaatctgttcatggtccatttggtaagtcccacctccaaagtttatttctctgggcctttattagaactggtacttaaatttctttctacaaaataaatattttagtcaaagatttttagctactagcttatctctggctggaagcctgtggcttttgttgttttcaaatttcctcttttggcaggaataccaactcatctctttctcctaagctcctcaaagcagagaggttayttagaaagctgaactagagaggaagggccagaaattgtattttatcctgcaggggacaggaaaggtttgtattttttcatttgcaaatatttgttcatattctttaatcattcgttcagtagatactaaatattatctgtgtatatttttattcattttacatgttattaatagtcatgctttaaccatgtatatgaggctgctaaaaaatatacgtaaggagccttgagtagcaaacaggagactataggaacagaaa

SEQ ID NO: 572152 - DNA, 540 bp, Homo sapiens
ggagaatcttttgaacccaggaggcagaggttgcagtgagccaagagcgcgccattgcactctagcctgggcagcaagagcgaaactccatctcaaaaaaaaaaaaaaaaaaaaatagataaaagatggtacacatgtatcgggcactcaccgtaaatggagttggcaggagtagaagttgctctgcctgagtcagtgaggggtgaagaaatgggaagccctaggacatcactgcacactactgtagactttataaacactctacacttaggctacactaaatttaattttaaaaatagttttcggctgggcacggtagctcccacctgtaatcccagcactttgggaggctgaggcaggcagatcacctgaggtcgggagtttgagaccagcctgaccaacatggagaaaccctacctctactgaaaatacaaaattagccaggtgaggtggtacatgcctgtaatcccagctactcgggaggctgaggcaggagaatcgcttgaacccrggaggcagaggttgcggagagccgagatc

SEQ ID NO: 572153 - DNA, 538 bp, Homo sapiens
atgtagtatttttgaagaacagtcaaaatatatcatttgcttttctttagaatttttccatgttaaaaaaacttcctaattgtgtgtaggtggcagatcttagaagatgtctgctaagtcaacagtgtctttctatgctgtaagccttatctaaaattaatacttcgtttactttagataaaatgctctgaaatacatttttggaagcaaagctttttgtttggagacaaaacacaaaccttacagccatttattttattacaagaagtaaatatatttagtttatgtagtacacaaaggaggtgatagtttttacactaataatgtgattgatcatgtacttcttgagtttcttgttaatgatggaagatccacctttattggtcaccttctggaagtggtgttaaarttactggtatataaccaggttctctcaagcattttcaaagtaacaatccactggtgagtttttccttcccagtgtgatttatttgttcagtaattcagtgtctactgcattttattttcaaatatgttt

SEQ ID NO: 572154 - DNA, 553 bp, Homo sapiens
gaattcctctgctgaaaaagatttttctttctctgccatatggccaggctgcaaatctttcaaacttttatgctctgcttcccttctaaatatagattcccacttttcatcatttatttgctcccacatatgagttaggctgttagaagcaaacaggccacacttgaacactttsctgctaagaaatttcttctaccagataccttaaatcatcactctgaagtttcaacttccacagatccttagagcgggggcacagtgcagccaagttctttgctaaggaataacgtgtgacctttgccccagttcccaataatttctgatttccatctgagaccttgtcagtctggatactgtccatatcactatctgcattttggtcacaattatttagccaatctctaagaagtttcaaactttccctcatcttcctgtcatttgagccctccaaactctaacaacctctgttcattacccagttccaaaccagtattttcttaagttacttagattcgtgccttttctttctcacctcttcaaagaggctatgtca

SEQ ID NO: 572155 - DNA, 527 bp, Homo sapiens
gcaaatctttcaaacttttatgctctgcttcccttctaaatatagattcccacttttcatcatttatttgctcccacatatgagttaggctgttagaagcaaacaggccacacttgaacactttgctgctaagaaatttcttctaccagataccttaaatcatcactctgaagtttcaacttccacagatccytagagcgggggcacagtgcagccaagttctttgctaaggaataacgtgtgacctttgccccagttcccaataatttctgatttccatctgagaccttgtcagtctggatactgtccatatcactatctgcattttggtcacaattatttagccaatctctaagaagtttcaaactttccctcatcttcctgtcatttgagccctccaaactctaacaacctctgttcattacccagttccaaaccagtattttcttaagttacttagattcgtgccttttctttctcacctcttcaaagaggctatgtcatgtaattgtaatgtaattgaattc

SEQ ID NO: 572156 - DNA, 527 bp, Homo sapiens
gcaaatctttcaaacttttatgctctgcttcccttctaaatatagattcccacttttcatcatttatttgctcccacatatgagttaggctgttagaagcaaacaggccacacttgaacactttgctgctaagaaatttcttctaccagataccttaaatcatcactctgaagtttcaacttccacagatccttagagygggggcacagtgcagccaagttctttgctaaggaataacgtgtgacctttgccccagttcccaataatttctgatttccatctgagaccttgtcagtctggatactgtccatatcactatctgcattttggtcacaattatttagccaatctctaagaagtttcaaactttccctcatcttcctgtcatttgagccctccaaactctaacaacctctgttcattacccagttccaaaccagtattttcttaagttacttagattcgtgccttttctttctcacctcttcaaagaggctatgtcatgtaattgtaatgtaattgaattc

SEQ ID NO: 572157 - DNA, 527 bp, Homo sapiens
gcaaatctttcaaacttttatgctctgcttcccttctaaatatagattcccacttttcatcatttatttgctcccacatatgagttaggctgttagaagcaaacaggccacacttgaacactttgctgctaagaaatttcttctaccagataccttaaatcatcactctgaagtttcaacttccacagatccttagagcgggggcacagtgcagccaagttctttgctaaggaataacgtgtgacctttgccccagttcccaataatttctgatttccatctgagaccttgtcagtctggatactgtccatatcactatctgcattttggtcacaattatttagccaatctctaagaagtttcaaactttccctcatcttcctgtcatttgagccctccaaactctaacaacctctgttcattacccagttccaaaccagtattttcttaagttacttagattygtgccttttctttctcacctcttcaaagaggctatgtcatgtaattgtaatgtaattgaattc

SEQ ID NO: 572158 - DNA, 621 bp, Homo sapiens
tttttttttttttgagatgtagtctcactctgttgctcaggctgaagtgcagtggtgtgatctcggctcactgcaacctctacctcctgggttcaagtgatttttctgcctcagcctcccaagaagctgggactataggcaggtgccaccacgcccggctaatttttgtgtttttggtagaaattgggtttcaccatattggctaggctagtctcaaacccctgacctcaagtgatccacccacctcagcctcccaaaatgctgggattacaggtgtgagtcactgcacccagcctgattttttttttaacggtgttttaaaaaattattttatttagagacaaggtcttgctctgttacccagtctggtgtgcagcagggtggtcatagctcactgcaacttggaaggcaacacttgcacacaagttatcctcctgcctcaacctcctgagtwgctgggactacaggtgcatgatactacacctggctaattttgtaatgttttgtagaattgaggtctcgctatattgcccaggctgatcttgaactcctgacctcaagcaatcctcctgctgtggcctcccaaggtgctggggttacaggtgtgagttaccatgccca

SEQ ID NO: 572159 - DNA, 630 bp, Homo sapiens
attctgcagccttgctaaatgtacttatttgttctgatagctcttttggggtttctctggaagtttctatacagataataatgtcatctgttgatagacatagtcttatttctttctataatctgcatgccatttaaaatacttttttttgtcatattgtactgaataggacttctagtatgatattgaatgggaacagtcagayctgacatctttaaatttttttctgatcctggaggatgagcattcattctttcaccataacgtatgatgttacctgtaagttttctctagatgctttttgtgaagttgaggaactattgtttctagtttgttgaatattttattacagataaatgttgaattataaatgcttttcttacatgcatcgagatgatcatatggtttttcttctttagtctgctgatgtagtgaagtatattgactaatttttgaaagtggaaccaagcttatattcctgggataaaccccacttgcccattatgtactgtcatttttatatgtttctgggttaatttgctaatgttttgttccaggttgatgaagaatgatgtgaagttttatttatttactttgtaatgtctttggtatcaggataaggctggcttc

SEQ ID NO: 572160 - DNA, 630 bp, Homo sapiens
attctgcagccttgctaaatgtacttatttgttctgatagctcttttggggtttctctggaagtttctatacagataataatgtcatctgttgatagacatagtcttatttctttctataatctgcatgccatttaaaatacttttttttgtcatattgtactgaataggacttctagtatgatattgaatgggaacagtcagatctgacatctttaaatttttttctgatcctggaggatgagcattcattctttcaccataacgtatgatgttacctgtaagttttctctagatgctttttgtgaagttgaggaactattgtttctagtttgttgaatattttattacagataaatgttgaatyataaatgcttttcttacatgcatcgagatgatcatatggtttttcttctttagtctgctgatgtagtgaagtatattgactaatttttgaaagtggaaccaagcttatattcctgggataaaccccacttgcccattatgtactgtcatttttatatgtttctgggttaatttgctaatgttttgttccaggttgatgaagaatgatgtgaagttttatttatttactttgtaatgtctttggtatcaggataaggctggcttc

SEQ ID NO: 572161 - DNA, 569 bp, Homo sapiens
ttttttttacaatctactctctcaggcagtggtgcagccgcagtggagatttcatacatgaaaatgctgagactgaaactcaggtgttctcactacaaattttgcagtgtttcsccaatatcccatgtattcattttctatgactgctgtaacaaattaccacaaatttattggcttaaaataacccaaatacatactgttctatagttcagaaacccaaatggctcacactgggctaaaatcaagaccagacttatttactcttgctaaatatgtcaaagccaactaattgacgaaatataatttaagcttggccttttattatattctgtagctgaaaatccaaggctggactgaaaaatcagcagagctgtatttctttctccagtccctaggggagagtccatttccttgctgtttccacttccagaggctgcccacattcctgtctctatgttcgtagttaccaaagttgagttgagtccttctcacactgccatctttctggttctccctctgtctactacctctgtcttaacttttaaaggatcctttatttaccttaggcc

SEQ ID NO: 572162 - DNA, 569 bp, Homo sapiens
ttttttttacaatctactctctcaggcagtggtgcagccgcagtggagatttcatacatgaaaatgctgagactgaaactcaggtgttctcactacaaattttgcagtgtttccccaatatcccatgtattcattttctatgactgctgtaacaaattaccacaaatttattggcttaaaataacccaaatacatactgttctatagttcagaaacccaaatggctcacactgggctaaaatcaagaccagasttatttactcttgctaaatatgtcaaagccaactaattgacgaaatataatttaagcttggccttttattatattctgtagctgaaaatccaaggctggactgaaaaatcagcagagctgtatttctttctccagtccctaggggagagtccatttccttgctgtttccacttccagaggctgcccacattcctgtctctatgttcgtagttaccaaagttgagttgagtccttctcacactgccatctttctggttctccctctgtctactacctctgtcttaacttttaaaggatcctttatttaccttaggcc

SEQ ID NO: 572163 - DNA, 609 bp, Homo sapiens
cttttattatattctgtagctgaaaatccaaggctggactgaaaaatcagcagagctgtatttctttctccagtccctaggggagagtccatttccttgctgtttccacttccagaggctgcccacattcctgtctctatgttcgtagttaccaaagttgagttgagtccttctcacactgccatctttctggttctccctctgtctactacctctgtcttaacttttaaaggatcctttatttaccttaggcctacctggataatccaagataatctgcctatttcaaggtcagttgacaaacaaccttagtatttccctttgccatgtagtatactgtggagtctaaagcaactccatctgggatgctaattatccatgttggcttctgattaactccacttccaggaaggcctctaaggtttccagtgtatctgtaccttgtgtaagggcagatacttaatgtaaatgaggcccttagatcaaacaaccttgatgttagttaatttcmattgtcctacatattccttctaactcactctttccttatgttatataagtctgggggataatggtatggggatccaccatcttatctcaccactgcct

SEQ ID NO: 572164 - DNA, 551 bp, Homo sapiens
ttctacaatttactcatcaaatgcttaggcaactcatcatacaagaaaggggaaaacaaaaaacctggatgtatatacaacaataggataatgattttctcctgcactgaaaattcactgttttactattttcaaagtttgaaaaagtaagacttttggtacacaatagtgaaaacaaaataatatgaacagttggtcaaatgcccttcaatgtcttgtagtatcttccattagcactctacagttctatgcccaaatttcattaaaattgattttgtcacaatggactaaatgagttcactgaaaatgttctaaatgtgagcaacaactagtatataaaaggaatrtattttttaaaagaggtcattcatagtaacataaaaaccataaggcacctcaaaacacattagtgaaaaagatccttagagaaactataaaactttaccaaagggataatagacaaataaatggaggtataacgtatttatgggtgataaactcaataacgattttcctaatttcactagtaaatcaaggactcataaacaaat

SEQ ID NO: 572165 - DNA, 573 bp, Homo sapiens
tttttctctggcagagtgaaggtacacttctagcaactggttcctatgatgggtttgccagaatatggactaaagatggtaaatgaagcattttccttyttactttgttgttgatctaaagatagaaaatttaaaataatgttaatgtttttcttttgcattttaggtaaccttgctagcaccttagggcagcataaaggccctatatttgcattaaaatggaataagaaaggaaatttcatcctaagtgctggagtagacaaggtaaaagctcattaagttctgtaaaggcaaatgtattacagagcttaattgaaagcagtattttgtcttagctgccaattacataaacattcctatttgggaaattcacataggaatttatgctagaaatactccttaggtctatcagctcatttctgaatctacttaccaaaatgtccttatccttttatctatgtgaacacttttaattttacctggaatttgaaccataaacaatgtcatacgtcctgcactttttgcttcccttctacaatttctagttagtctcaccagtgaatatggctctgg

SEQ ID NO: 572166 - DNA, 585 bp, Homo sapiens
tttggggcttacctgatttgtctttagccaggcartgaaatcaatttcactctttcctgttgtactttatcttttaaaaaaaaaaaatctcagtatagttctgattaaaatttcctttctgagtcctaaatgctttaaatcttcttttcccattctttttacttctcctatccatagttacaagttcttacgcatgacatatctcttggctgataagtttaactgcttaagcacctgtttatgtttcatttttaacatagccagttactattatgcttggatatacacaatgagggagtttgtggctttgttttccctttccacagacgtctctaatctcctttattaaatgctttgtatttctactaattagtatacatagctaaactttttgtttttgttttttgagacatagtagtcttactctgttgcccagactggagtgcagtggtgcaatcacggctcactgcagcctcggcctccccagctcaagcagtcctcctgcctcagccttccaagtagctgggactataggcatggaccactacacctggctaattttttattttttagaaatgaggtccc

SEQ ID NO: 572167 - DNA, 585 bp, Homo sapiens
tttggggcttacctgatttgtctttagccaggcagtgaaatcaatttcactctttcctgttgtactttatcttttaaaaaaaaaaaatctcagtatagttctgattaaaatttcctttctgagtcctaaatgctttaaatcttcttttcccattctttttacttctcctatccatagttacaagttcttacgcatgacatatctcttggctgataagtttaactgcttaagcacctgtttatgtttcatttttaacatagccagttactattatgcttggatatacacaatgagggagtttgtggctttgttttccctttccacagacgtctctaatctcctttattaaatgctttgtatttctactaattagtatacatagctaaactttttgtttttgttttttgagacmtagtagtcttactctgttgcccagactggagtgcagtggtgcaatcacggctcactgcagcctcggcctccccagctcaagcagtcctcctgcctcagccttccaagtagctgggactataggcatggaccactacacctggctaattttttattttttagaaatgaggtccc

SEQ ID NO: 572168 - DNA, 511 bp, Homo sapiens
tatgctactttttacggttctctgtgagtcctcattatttataagttggttatttattttcagttctccattgtaaaattttcctgattctaaaattctaagagcagtttattatgtagatcttttgcttaagggacagtgtaaaaactgtgccttcaacattttaggatcgttaactaatctcagaacaactatagttaattcagtcttcaaactttgtaatagtgaatatttttaaagggcttaaagctaacttttttttttaaacagagatgtaaatattaaatatatcctattgcatttcagtttctttgtaaatattctatcatcattctggttatatcactcatgttttagactgwccatataatattttaagtgtcaaaataatattttaaatatactcattgtatggaaaaataattgtatacatttttcttttttgtttagatatggagtatgaaacaagacaattgtgtccatgatttgcaagcacataataaagaaattt

SEQ ID NO: 572169 - DNA, 619 bp, Homo sapiens
gatgaggagcaagtaataccatgacaacatggccaaagacctacccccttcccctgcataattattgctatcaaataaaaacatatrtgaaaatattttttgaaagtcagtgcccatcctcaaattcactttcccatctctgtcatcatcccttgcccacctcacattcctggggaagtagtacaagaaggacgaacaaggtagatgtccttcatttgcacttcccaaagggagaaagtatctgaatgctgtaaatacagaactatgaaaaggaaaaaaactcaagataagctatatacacagtgaaacaagaatcactgtcctattggttctacaattgttataaaatttcattttgtatcaacttagcaattacagaccaaaaacaaataataaccttccagtaactttggcactgaatcatctggtggacagtctaattgtgttgtctaagttgtggggtagcgtgtctactgaatgtgaatcaagtcaatttggttgataaggttgctcagatctcctatatccacactgatttttctatctacttgtcccatcaatcactaagacagaagtgttgaaatctccaactataactgtggatttgttgagtcgtata

SEQ ID NO: 572170 - DNA, 619 bp, Homo sapiens
gatgaggagcaagtaataccatgacaacatggccaaagacctacccccttcccctgcataattattgctatcaaataaaaacatatatgaaaatattttttgaaagtcagtgcccatcctcaaattcactttcccatctctgtcatcatcccttgcccacctcacattcctggggaagtagtacaagaaggaygaacaaggtagatgtccttcatttgcacttcccaaagggagaaagtatctgaatgctgtaaatacagaactatgaaaaggaaaaaaactcaagataagctatatacacagtgaaacaagaatcactgtcctattggttctacaattgttataaaatttcattttgtatcaacttagcaattacagaccaaaaacaaataataaccttccagtaactttggcactgaatcatctggtggacagtctaattgtgttgtctaagttgtggggtagcgtgtctactgaatgtgaatcaagtcaatttggttgataaggttgctcagatctcctatatccacactgatttttctatctacttgtcccatcaatcactaagacagaagtgttgaaatctccaactataactgtggatttgttgagtcgtata

SEQ ID NO: 572171 - DNA, 619 bp, Homo sapiens
gatgaggagcaagtaataccatgacaacatggccaaagacctacccccttcccctgcataattattgctatcaaataaaaacatatatgaaaatattttttgaaagtcagtgcccatcctcaaattcactttcccatctctgtcatcatcccttgcccacctcacattcctggggaagtagtacaagaaggacgaacaaggtagatgtccttcatttgcacttcccaaagggaraaagtatctgaatgctgtaaatacagaactatgaaaaggaaaaaaactcaagataagctatatacacagtgaaacaagaatcactgtcctattggttctacaattgttataaaatttcattttgtatcaacttagcaattacagaccaaaaacaaataataaccttccagtaactttggcactgaatcatctggtggacagtctaattgtgttgtctaagttgtggggtagcgtgtctactgaatgtgaatcaagtcaatttggttgataaggttgctcagatctcctatatccacactgatttttctatctacttgtcccatcaatcactaagacagaagtgttgaaatctccaactataactgtggatttgttgagtcgtata

SEQ ID NO: 572172 - DNA, 602 bp, Homo sapiens
  misc_feature 409: n = A,T,C or G
gaaaacaacagtgacagcttaccmagtgtttttccttacttgaatcagctggtggccaatcagttgaaattaaactgctgtgattgcctaagattcagccacgtgttacaagagtatattcctaagataggccttcagtcaatctatgtacaaaaccaggtttcagtttgccatgtaaagcctcaagcacagaggtatcctcaggcttaaactcaattgaacaacgtatagcattctctcttgactcctatgcccaacctcctgacatatgccacagggctttcctgattcagccgggcctgacctctggtgggcaacgtttgtaacaccatttgttaggaatgccaaaattaccatatgttggtatggtagctccccacctcacccccactccccaacttcttccccngtgagtgaatcatttcgtgcatataattctggacatctttttagttgcttcctgtagaactaatccttcaaatgtccttactgaacctcggctttgatgcatgaagctattgtgtggtcctactaacctaaacttttctgatcatacgaatcacctgagtgcttgttactaaggcaaacttctcgaccatccc

SEQ ID NO: 572173 - DNA, 272 bp, Homo sapiens
tgatttctttcaaagtctgctatcacattgatatcttattgctacaaagagtctgttttgtcagtcttacagtctctattttaatattaatgctggtcatttctgcctgaaatccaaagagaggagagtataatgaggcacgtctgacccccctctttttataatggcctgaactagtttttcaggttaacttcaraaggaccttggctaagaggagggggttcattcagttggttagatggcttagaattttacttttggtttgcaatgtt

SEQ ID NO: 572174 - DNA, 272 bp, Homo sapiens
tgatttctttcaaagtctgctatcacattgatatcttattgctacaaagagtctgttttgtcagtcttacagtctctattttaatattaatgctggtcatttctgcctgaaatccaaagagaggagagtataatgaggcacgtctgacccccctctttttataatggcctgaactagtttttcaggttaacttcagaaggaccttggctaagaggagggggttcattcagttggttagatggcttasaattttacttttggtttgcaatgtt

SEQ ID NO: 572175 - DNA, 412 bp, Homo sapiens
aaaactgtccttcaaacatgaagaaacaaagtatttcccagacaaacaaaagctgaaggacttcatcaacaccagacctacaagaaatgctaaagagagttctttaatctgaaagaaaaggatgttaatgagctataataaatcatytgaaagtacaaaactcactggtaatagcaagtacacagaaaaacacagaaggttataacactgtaattgtggtgtgtgaaccacttatatcttgagtagaaagactaaaagatgaaccttttaaaaataataactacaaaaacttttcaagatattgtataataagatatttagaaacaaaaagttaaaaagcagagaaaagaagataaagtgtagagattttattagctttatctttgcttgttttttggttatttagttcatg

SEQ ID NO: 572176 - DNA, 412 bp, Homo sapiens
aaaactgtccttcaaacatgaagaaacaaagtatttcccagacaaacaaaagctgaaggacttcatcaacaccagacctacaagaaatgctaaagagagttctttaatctgaaagaaaaggatgttaatgagctataataaatcatttgaaagtacaaaactcactggtaatarcaagtacacagaaaaacacagaaggttataacactgtaattgtggtgtgtgaaccacttatatcttgagtagaaagactaaaagatgaaccttttaaaaataataactacaaaaacttttcaagatattgtataataagatatttagaaacaaaaagttaaaaagcagagaaaagaagataaagtgtagagattttattagctttatctttgcttgttttttggttatttagttcatg

SEQ ID NO: 572177 - DNA, 453 bp, Homo sapiens
atttgacccagccatcccattactgggtatatacccaagtgtagttgttctttattaactactgaaaaatatgacaattttttttttttttttttttttttttgagacagagtctcactctttcacccaggctggagtgcagkggcacgatctcggctcactgcaagctccgcctcccgggttcacaccatgctcctgcctcaacctggtcccagctgagtagctgggactacaggcacctgccaccacgctcgggtaattttttgtatttttagtagagacggggtttcactgtgttagccaggatggtctcaatctcctgacctcgtgatctgccagcctcagcctcccaaagtgctgggattacaggtgtgagccaccatgcccggccctggaaaaatacgacaatgtattttttaaatattatgtatttcttataaaacttgtaatgaa

SEQ ID NO: 572178 - DNA, 453 bp, Homo sapiens
atttgacccagccatcccattactgggtatatacccaagtgtagttgttctttattaactactgaaaaatatgacaattttttttttttttttttttttttttgagacagagtctcactctttcacccaggctggagtgcagtggcacgatctcggctcactgcaagctccgcctcccgggttcacaccatgctcctgcctcarcctggtcccagctgagtagctgggactacaggcacctgccaccacgctcgggtaattttttgtatttttagtagagacggggtttcactgtgttagccaggatggtctcaatctcctgacctcgtgatctgccagcctcagcctcccaaagtgctgggattacaggtgtgagccaccatgcccggccctggaaaaatacgacaatgtattttttaaatattatgtatttcttataaaacttgtaatgaa

SEQ ID NO: 572179 - DNA, 540 bp, Homo sapiens
tgttatgaacattccaattatgctcttctagttttatttatttatttattgagagagggtctcactctgtcacccaggctggaatgctatggcaccatcatggctcactacagcttcaacttcctgagctcaagtgagcctcccacctcagccttccaagtagctaggactacaggcgcaygccaccacgcctagctaatttttgtggtttttgtagagacagtgtttcaccatgttgcccagcctggtcttgaattcctgggctcaagtgatctgcccacctcaacctcccaaagtgctgggattacaggcatgcatcaccatgcctggcatagttacttttaaatgttctatatattattgttgactgtagtcaccttgttgtgctatcaaatgctggatcttactcatgctacctaactatattttttcaccattaaccattcctacttctacccccattgccccactacctctcctagccactgataatcattacttctctacttctgtgagttcagttgttttaaattttatctc

SEQ ID NO: 572180 - DNA, 197 bp, Homo sapiens
gggtcaggaaaaatgtgaagaatgagtaaatgagacaagagtgtagataatgcttgtattacattgtmccattaaggaaaagagagatagaggaggggtgatggaggaatttggtttcagaaatgatgaggaaggtttcagcatggtaaaaattggaggaaaaggagccaatgagaagaagaaattgataatccagg

SEQ ID NO: 572181 - DNA, 587 bp, Homo sapiens
tttcctgtctcagcctcctgagtagctgggattatggggcacccaccaccatgcccagctaatttttgtatttttagtagagatagggtttcaccatgttggccaggctggtctggaactcctgacctcaagtgatccacccgcctcagcctcccaaaatgctgggattacaggcgtgagccacmgcgcctggccgctgttaattttctaatctttaaaaataataatagttttttaaaaagctgctcacaaagattttattgatgatgtgtgcatttttttttcctctggtaggacataattctccctgagaaggggaaagacagtaagaattttgtgagttgcataatagtccattgattaccctttgtcccccagtggagggcactaaacccctgaagaagcaggcccctgtgtgggcgtgttatgattgtagaacaaggagaggggaccctccagtactcagtgtctttagtgggtggggcgggggcttcaaggcagtagcctcagatacctgcggggcccatgcagggaaccctaattggggtgcagggtgggggagcaacagaatgcaaaatagctcttag

SEQ ID NO: 572182 - DNA, 587 bp, Homo sapiens
tttcctgtctcagcctcctgagtagctgggattatggggcacccaccaccatgcccagctaatttttgtatttttagtagagatagggtttcaccatgttggccaggctggtctggaactcctgacctcaagtgatccacccgcctcagcctcccaaaatgctgggattacaggcgtgagccacagcgcctggccgctgttaattttctaatctttaaaaataataatagttttttaaaaagctgctcacaaakattttattgatgatgtgtgcatttttttttcctctggtaggacataattctccctgagaaggggaaagacagtaagaattttgtgagttgcataatagtccattgattaccctttgtcccccagtggagggcactaaacccctgaagaagcaggcccctgtgtgggcgtgttatgattgtagaacaaggagaggggaccctccagtactcagtgtctttagtgggtggggcgggggcttcaaggcagtagcctcagatacctgcggggcccatgcagggaaccctaattggggtgcagggtgggggagcaacagaatgcaaaatagctcttag

SEQ ID NO: 572183 - DNA, 582 bp, Homo sapiens
acaacacttccccagcacaccctcccaaccctggcccaccagtctgttttccacctcaaaggggccrtgcttgttcctttcacccgttatcccccatctctacgtccccagaatcactcactctagaatccttccagtgaaaaccgcaggctccaccttgcctctcgtttgaccattcttgggttttcagggtgaatctcttcccttcaatagctcccacccttcatttgcacagtacgcagtatttaacttttctccacaggttccaaaggctgatttcttgcaagcaaaggccacctgatgtgtctttttttacaaatctctgctgaacaggtaacaggtgcccaataaaactttgtgagttggcagtctaagggcatctaccctcaaaacagctaacgtagcattttatgggagtggaaacggagtcgtgtggaaagacgaccaggcactttcgtttttgagatggagtctagctctgtcccccaggatggagtacagtgctgcgatctcagctcactgtgggcatgcaccacaaagcctggctaatttttgtatttttagtagagacagggtttcacc

SEQ ID NO: 572184 - DNA, 567 bp, Homo sapiens
aatataaatctatgataatgggaacacaatatgtaaagatataatttgcaataacaaaataggaaggcacagaaaacatatatagcagtagrattcttgaataattttgatgccaagatagtattaactcaaatttgataattataaagtttaacatgttaattgtaatgcccaatataactgctaagaaaattactaaaactatgaagaataataatgagaatggaattaaatggtacattacaaaaaaattaaacatgaaaaaagacaatgttggaggaattgaggaagaaaaaatatataagacagaaaagaaatagaataatgatgtaagtaagtcttttctaatccatatttgctttaaatgtaaatatattaaattctccaattagctgggcatggtggtgcatgcacataatcccacctactcaggaggctgaggtgagagaattacttgagtgtaaatgtttgagtccagcctgagcaacatagtaagatcctgtctcaaaagaaatcctctccaattaaaaggcagaaactggcaaaaataaattttaaaagaaacat

SEQ ID NO: 572185 - DNA, 656 bp, Homo sapiens
tattctctgagtcttatagggaaaaagtgtctcttctgagggcagacgggggtaagagtatgagaaatgagagttttcatccccctgtgggcactatttaaccttccacctgtgctaggattgagggcaggctgggtgggtgagggattgagcccagagacccacttcttaataccaaggctttgaccctgtgggccaagactgagctctgaccagcccctgtggtgtccagatgctgtgggtgagtcagggatggggtgggagaccagaatttgtaggcccacacagtgccagctttaagtaagactggacttaaccccttccccatagatgmtatgtctgatgagtgacttggggtaacttctgactgcaagaacttccacagcacctcatcagtgctctccttgttctggactgggaattgggtcaggcctggagtggatttccctctgtacccctttatgggtgagcatggctaaggctactagcttgggaccttcaggatctggccctaaattggccctcaaaggggacatggattagatgtggctcccactccaggacctttctgtgcttagtatcactagtgaccaagcctataagtccttacccagctaagcaggcatttactatctcccaatattgggctaagcaca

SEQ ID NO: 572186 - DNA, 570 bp, Homo sapiens
ttgaggtataattgacatatagtaaaatgcccaggtctcaagggtccaattcaatgagttttgatgattgcacacacccttgggacccaaacttccatcaagacagaaaacattcctagctccccagaaagctctcacrtcatcgcccttttcacttcctgtgcagcacttgctcacaacatacaattagcttgttcctttgataactctttaagcaaaaacacacatacagatattgtactttcaatgtgcctggctctgtttggagtactttataaacattaggaggaaaggacttcattatcaccactttttggatgagaaattgaggcacagagaggggaagtaactggccccaaatcacatggctgatcccccagccaggccaacaccagcagcctccctcatcagactgtgggcccacagggcagggccagtctgcctggccacctctaggtcccagtactgggatacggggcctgacacagagcactaactcaggtaatagttgtagattttttttttgagacagaatcttgctctgtcacccaggctggagtgcagtgacac

SEQ ID NO: 572187 - DNA, 579 bp, Homo sapiens
ggtcgggagttcaagaccagmctggccaatatggtgaaacctcatctctactaaaaatacaaaaactagctgggtgttgtggtgggtgcctgtaatcccagctacttgggaggctgaggcaggagaatcacttgaacccgcgaggtggaggtttcagtgagctgagatcacgccattgcactccagtctgggtgacaagagtgagactccatctcaaaaataaataaacaggtgggctttatcaggtcaaggaagttcaattctattttagtttgttcagtgtttttattgcaaaaggatgctggaagctgggcatgctgatgtttgccatagttctagatagatgagaggctaaggtgggaggatcactggagcccaggagtttgtggccagcgtgggcaacatagcaagactcccatctcttaaaaaataaagacctgaaaccaaaaatttctatgaggtaatatcagaaaaactcttctaaacattggcttaggcagagttcttgaccaagagcccaaaagcaaatgcaacaaaaataaaaataaatagatgggacctaattaaactaaaaagctt

SEQ ID NO: 572188 - DNA, 585 bp, Homo sapiens
ggtcgggagttcaagaccagactggccaatatggtgaaacctcatctctactaaaaatacaaaaactagctgggtgttgtggtgggtgcctgtaatcccagctacttgggaggctgaggcaggagaatcacttgaacccgsgaggtggaggtttcagtgagctgagatcacgccattgcactccagtctgggtgacaagagtgagactccatctcaaaaataaataaacaggtgggctttatcaggtcaaggaagttcaattctattttagtttgttcagtgtttttattgcaaaaggatgctggaagctgggcatgctgatgtttgccatagttctagatagatgagaggctaaggtgggaggatcactggagcccaggagtttgtggccagcgtgggcaacatagcaagactcccatctcttaaaaaataaagacctgaaaccaaaaatttctatgaggtaatatcagaaaaactcttctaaacattggcttaggcagagttcttgaccaagagcccaaaagcaaatgcaacaaaaataaaaataaatagatgggacctaattaaactaaaaagcttttgtac

SEQ ID NO: 572189 - DNA, 563 bp, Homo sapiens
ggaatatcttcccataaaaagtagacagaaggattctgagaaactactttttgatgtgttcattcaactcacagagttgaacactgcttttgatagagaagttttgaaacactcttcttgttgaacctacacatggatactgggatctctgtaaggtctctggtagaaaaagcaatttctttatataaaaaccagagggaagcattctcagaatctagtttctgatgtgtgcattcaactcacagatttcaacctttcttttgatggaacagttttgagacactttttgtggtatctgcaagtggatattttgactgctttgaggaattcgttggaaacgggaatatcttcacataaataccacacagaggcattctcaaaaacttccttgtgatacgtgcattcaactgacagagttgaatcttcctttggatctagcagttttgaaacactcttttggtagtatctgcttgtgtatatttggagtgctttgaagccttctttggaaacggraatatattcacaaagaaactagacggaagcattctcagaaacttccttgt

SEQ ID NO: 572190 - DNA, 360 bp, Homo sapiens
tgaactctccttttgagagagcagttttgaaacactcttctggtagtatctgcacgtgtatatttggagtgctttgaagcrttcgttggaacaggaatatattcagataaaaactagacagaagaattctcataaacttccttgtgatgtgtgcattgaactcacaggtttgaaccttccttttgatagagaagttttgaaacactctttttgaaggatgtgcaggtggataattggagttctttgaagccttcgttggaaacgggaatatcttcacctaaatactagacagaaacattctccaaaactactttgtgatgcgtgcattcaactcacagagattaacctatctttttacag

SEQ ID NO: 572191 - DNA, 586 bp, Homo sapiens
tgactctgccttctctccacctaatgctgagcttctcataagtcaatatgcatagaaggccctgctcatggcatgtagcctgcacagtgtgactcttaaaggacatttgctgatgataaagaggaatgcaaggaaattaataacatctgaggaagcacaagagcatcataaggattcagcagagcaaatgggtagctgaattgacataccacttctttgttcctacytgaataaaagtctaaatgtgtaaaattaaatctttttagttaaaatgtgcattctagaagggttttaatagccatctagataataatggaaagacacagggtcactaagcaaaggaagaaagaacaatatgtaggaaaataaagcatatgggaatacagcgcatggcacacagtatgtgtttatatttctcaaatattgagtaagagatcagctttcctccttgctaacagacaccccttatcttggattctattaagcattcactaattgaaataaaaatgaaacaaaacttagaaaaatgtgatagtgtcgactgcactcgaagaaaaaaataattacttagtcactctaattacac

SEQ ID NO: 572192 - DNA, 267 bp, Homo sapiens
gtaaggactttactgggactaatgcatctaggagagagctgcctaaaatcccattcttaatgtctaataaccaaacgaaggcatatgatcccaaacyagcgttctaatccttgttatccaatgtattagacatttgcggctgcttcttggggtttaatatatttcattttcactcaagattcagtaagaatttaattgagtttggggaactttttattaaaaattaaaccctaaacactcattgttttgctttcttatacttgggaa

SEQ ID NO: 572193 - DNA, 591 bp, Homo sapiens
tttgaacaaaattattgggatatgtttttaacctcttatatgaagctattttcaaaataaggtatttttatcttgtatcataagttatttatttggatgaaaattggagagatagaggtgccagtcagtaacagagctactggctttgcacaacttgattgtatttttcttgtttttttctcattattggaattggaaaggccttcagagggtcctggaaactttggatcattccaaaagctytctttccatgaggaaaacatctttcctgtctgatattatccaaagaaaaggaagaacagtctccctaatttaagcgtcttgagtataaatctttagattacgattgtgtaacttcaaagtaatcaataaaaaaatacaaacttcaagatataacacaatttattaatgaaagccttaatggtacatcagtttgttgtggaatcagttttttctctggtcatgttggtactattaagttgcattcatgttcataattggtttaactctttcattttaaccatgtatgtacctggtttagttaaaagacaaaaagtgtaaaatttatttactgggttgaatcatatagtt

SEQ ID NO: 572194 - DNA, 573 bp, Homo sapiens
gaatgtaatattttgtaagtataacttgttattagcatattaaatactcaataaatttagtaaatttctcctgcaccctcccccagtaaggaagcagtatactcttctaaattaacttggctgaaaactgttttcctaccctttcagattcttattaattttaaatacataaactcatgttcaagaagaamatcctacaaagcattttcacagatggcttggtttctcagtgaatagcactctgacatagcatgaaatgacaacctattatcactttaatgctaaggtcaaaaggattattttgtatgcctaatttaggtatcccaaagctttagtccttatcagacccacacctagacaaactatcataaagattgaacaggctgatgttatttaagaaagaattaattttcaatactgaagtgctacttatatagcctttaaaagtaaacaagaagctaacttcgtgccttgttaaaggtaggtcatttctaacccttaaaattcaatttcttatcaagtggtattttatcagcacaaatatagatcttataagcaggaaacaagctcaca

SEQ ID NO: 572195 - DNA, 599 bp, Homo sapiens
gctttaacaagctagttgcttatgtatctgtcctctctaaattatgaatttctcaagaaaaaaatcatttcttatttagttttgtgtcctgagtttctacaagtgtctgaccaatggtaggtactttaaaaacactgggtgaaatcacagaggagttcatagtttattcctgtttccacacatttaaaacatgtaatttatattaaatgtataaaaatgctgaatctgaaattttgttttacaagtcttttcatggtcygatctctgaagaaatcttataacgtaagtaagtataaaccatgaaactttcataccaaataagacaaatcattaccatatgacttgcttcaatactagatgtaatggacaacacgatctgaatgtaacatctcaactcctcaaaatttaaactgtaatgaaccaaacaaattaatgatgacttctagttttttctggcaattgatttacattttttattcttcattgtaaagctaagaaattctactgaatgatggtcttatttctacatgatatcataagaaatacagttacattaagctgtattttgaaaatatttattgatttcattaaaaagtagg

SEQ ID NO: 572196 - DNA, 599 bp, Homo sapiens
gctttaacaagctagttgcttatgtatctgtcctctctaaattatgaatttctcaagaaaaaaatcatttcttatttagttttgtgtcctgagtttctacaagtgtctgaccaatggtaggtactttaaaaacactgggtgaaatcacagaggagttcatagtttattcctgtttccacacatttaaaacatgtaatttatattaaatgtataaaaatgctgaatctgaaattttgttttacaagtcttttcatggtccgatctctgaagaaatcttataacgtaagtaagtataaaccatgaaactttcataccaaataagacaaatcattaccatatgacttgcttcaatactagatgtaatggacaacacgatctgaatgtaacatctcaactcctcaaaatttaaactgtaatgaaccaaacaaattaatgatgacttctagttttttctggcaattgatttacattttttattcttcattgtaaagctaagaaattctactgaatgatggtcttatttctacatgatatcataagaratacagttacattaagctgtattttgaaaatatttattgatttcattaaaaagtagg

SEQ ID NO: 572197 - DNA, 595 bp, Homo sapiens
atccacctttaagcttaatwttacaaaaatatgtatctatataaacatatatatttaatcatttaaaggcttttttctcttttccttttaaaaactcgtttgaagtttcccctgctgtctgctatgtagagggaaaatagccagcgataattgaatagatttgtacatgggaatgagagagagtctgaaggtagggataaatgacaggtagctattccagtagtgaggtaaggaatgcaaaacttctctagctaaccagggcaatcattattctcttagagcaaaaaatccttttatttgctaaattcagtaactttttaattactatggttagtagtatatgtgtgtgtgcatgtatagaatgagtaaaagagtaaatctggctttcaaaaatataaaatatatcattagtaatcaacttaaaatgtgcaatttaagtatactttgtataaagtactgcattctcaatgaattttctaaagaaataacttattataagctctggtatctgcccacctctctggaaatggtctaacttgaatcatctgttcacttcctctccatttcatgtcttagaagtttctttctagtttta

SEQ ID NO: 572198 - DNA, 595 bp, Homo sapiens
atccacctttaagcttaatattacaaaaatatgtatctatataaacatatatatttaatcatttaaaggcttttttctcttttccttttaaaaactcgtttgaagtttcccctgctgtctgctatgtagagggaaaatagccagcgataattgaatagatttgtacatgggaatgagagagagtctgaaggtagggataaatgacaggtagctattccagtagtgaggtaaggaatgcaaaacttctctagctaaccagggcaatcattattctcttagagcaaaaaatccttttatttgctaaattcagtaactttttaattactatggttagtagtatatgtgtgtgtgcatgtatagaatgagtaaaagagtaaatctggctttcaaaaatataaaatatatcattagtaatcaacttaaaatgtgcaatttaagtatactttgtataaagtactgcattctcaatgaattttctaaagaaataacttattataagctctggtatctrcccacctctctggaaatggtctaacttgaatcatctgttcacttcctctccatttcatgtcttagaagtttctttctagtttta

SEQ ID NO: 572199 - DNA, 541 bp, Homo sapiens
gataaggagtccatgctacccctctgaggcacatttttgtcctaaactcaatttcagtcttcaagtcaaagcccttggaaggaatactggatcggagggatcaagacaaagacaataatggaagttaaaaggcacagggcaggtgagtgtggctgattcctaccaattaagccaagcctcccatttcatggataaaggccatgttagtatccacaacacaaatgaggtctagggaattcaaggctactgacaggagatgggaaagagacataggtgacagtggataattcctattctctaggacctccctgcttcatgggtgcaagctgctttggcactcatgacagcacctgccaaggttgccaggactcaggaatacaggcacggaagaaggaaaraggatgctcttccttctgttcctcatgtaccctgggtatctgctaggaacagaagggagccagggatgcctgcgtctttctagatgggtaaccattcatcttcagcctgtatccctttcaaatgcatactgaacccctgggac

SEQ ID NO: 572200 - DNA, 463 bp, Homo sapiens
tcataaatcaagtccttagagacctacaaagagacttagactcccacacaatagtagtgggagactttaacaccccactgtcaatattagagagatcaatgagagagaaaattagcaagtatattcaagacatgaactcaactctggaccaggcagaccttagaaacatctacagaattctccaccccaaatcaacagaataagttagtctttcagttggtttacatactaagttagttggagttggtcacttagtgactcaacgtatgcagtcatccgtaggcaaaatttagtttaacacaagtaaaaaacacacttctgcatttttyattttttctttagagaaagggtctcactctgtcacctgagctggagtgcagtggggtgatcatagcttgctgcagcccccacttcctggttcaagtgatcctccctctgccgtggaccccaaagctggagttac

SEQ ID NO: 572201 - DNA, 545 bp, Homo sapiens
agcatgtgagtggactgtggcggcattgagaatgccattgactccagggacagtaatagccaaggctccagtggctaagtttgaattccagtgcagtcatgctttcccaggaggcacactaaggtacatgctccctgggagacagggactctatgacaacctttccaggctaagccatgcrgatatggagcataaaggaaataactgaactacagctatggtttctataatagcgttaggactgcacaagttccatatttcttcttgaacatattggtagtttgtgacttcaaagaaatttttaattccattgaagttgtcaaacttaatgcatgaagattttcataatattcccatttttagcatctgtagaatacatagcaatgtcatctctcttatttctgatattagtaatttgtgttatctttccttttacctgatccagttttttcaagaggcctcaaaaaaagtctcaaagaatcagcttttggttttacaatttttgtaatgcttgtctattttctatgtcattgatgagtagtttg

SEQ ID NO: 572202 - DNA, 479 bp, Homo sapiens
tcaacagtgaaatctcaaaaccaataaaggcaaacatgattacccatataccaatatcagtgtggttagcagtggccaagaaatcaaataactatcaggtrtgacacactggggtgtgataggttcactatgggcaagtagaacaagcaagatgagatcacaaaggtgcttctaagagttaaaaagagaatcctggcacatatacaggtagactgaggaacatttctgacatgcttatgatgtgatcaatgatttatgagtaaattatcttgtttgtttttaagtgctgagtatatataaaatcatttgtttttcctttctatacttgtcttgtttttacaatttggggagaaaaataaaagctgcccagctgtaagtaagtagttcataatatcatttttagttatttactgccagagtttgaagtatgagattcctgctttgaagttttcatttctattttacttatttattaaact

SEQ ID NO: 572203 - DNA, 479 bp, Homo sapiens
tcaacagtgaaatctcaaaaccaataaaggcaaacatgattacccatataccaatatcagtgtggttagcagtggccaagaaatcaaataactatcaggtgtgacacactggggtgtgataggttcactatgggcaagtagaacaagcaagatgagatcacaaaggtgcttctaagagttaaaaagagaatcctggcacatatacaggtagactgaggaacatttctgacatgcttatgatgtgatcaatgatttatgagtaaattatcttgtttgtttttaagtgctgagtatatataaaatcatttgtttttcctttctatacytgtcttgtttttacaatttggggagaaaaataaaagctgcccagctgtaagtaagtagttcataatatcatttttagttatttactgccagagtttgaagtatgagattcctgctttgaagttttcatttctattttacttatttattaaact

SEQ ID NO: 572204 - DNA, 611 bp, Homo sapiens
ctgcataaggtgtttgcatcttaaaacacatatttttaaaggggaaaaacatacattttctctaaaaaagatggactgttttgttttgttttttaatttaggcgtttaccttctgagagattataggctttctttaaggaaaaaatatattaaatatatcaggtcttcaatgggctattgaagctgagatgctcgatattctttgatcggttaaaatgggctggtttgaataagagagaccaaatgcacgaagcacttcttttcaagcactcatgcattgaatcatcacattattattttttgtcacttattggagatgagatatttgagagactattgtgctaatataaatgtacattttatacaatgtctaaaaattgctcatcaactaacataaggggcaactctccatasttttaatatctgataccattgtatttaaacataggtaaattcgtggaaaacttctgctctccagaaattacctgacagctcaactgtcttcagtattgtcaagaactaagaaagaagtagaaattccttcaatattcaaagcagaagtcacaactgaataccaaggaaatgccttagcatattttcatgctgtaagc

SEQ ID NO: 572205 - DNA, 611 bp, Homo sapiens
ctgcataaggtgtttgcatcttaaaacacatatttttaaaggggaaaaacatacattttctctaaaaaagatggactgttttgttttgttttttaatttaggcgtttaccttctgagagattataggctttctttaaggaaaaaatatattaaatatatcaggtcttcaatgggctattgaagctgagatgctcgatattctttgatcggttaaaatgggctggtttgaataagagagaccaaatgcacgaagcacttcttttcaagcactcatgcattgaatcatcacattattattttttgtcacttattggagatgagatatttgagagactattgtgctaatataaatgtacattttatacaatgtctaaaaattgctcatcaactaacataaggggcaactctccatagttttaatatctgataccattgtatttaaacataggtaaattcrtggaaaacttctgctctccagaaattacctgacagctcaactgtcttcagtattgtcaagaactaagaaagaagtagaaattccttcaatattcaaagcagaagtcacaactgaataccaaggaaatgccttagcatattttcatgctgtaagc

SEQ ID NO: 572206 - DNA, 553 bp, Homo sapiens
  misc_feature 551, 552, 553: n = A,T,C or G
tcaagaggtcccctctaggctcttcagattgtacagtcatttaagacctcatggtaaaattgaccatggaggtttgttcccagaagcatttcacagcctagacatgaacagctttcccaagatcatagatcaagatttctctcctctgtttttgtaaaacttgtgtctctttttctactttccttgtgttacttttctgtttatgcatagcaaaattatatgataattgatcatttgaaattgatagcttctacagtaaacataactgaatatcacatatgttatgctaaactaaaatctccatatgatcttaargtttttccactttaccctataacaaatttcactgatattttctgtgtgactacttgttcgaattgcacctctggtccttgctgtaggttaggctttaagatccacatgtttacattccttgtttcagtctaacagtaagtaaaacctatggggaggatttatggttaaattatgccagaaactgaataagaaaaccaaaaacaaaataatttgaaattttacagacaaattaatannn

SEQ ID NO: 572207 - DNA, 638 bp, Homo sapiens
  misc_feature 296, 362: n = A,T,C or G
attagacaacaacttgagttaattcttttgagtagatgaaattagtcaaaagtgtgaagatgaaaaaatttaaaattcactgtaaactgtatattgaaaaaatgtccctgtagtatatgaaatgctttgatactaaacatgagtgtttcagtaaaacttcaaaatacagaagaaagaaataaagrttggatacagtatgatgtacatgtacaggaaaacaattcaaaacacagaagatagatggctcagaaaatgaggcttagcttatgtacatcttccttgcacagaacaatagngaataaaggcaaaatctatatatttgttgggaataattttgttcaaacaaagaaaagccccaccgngctcaactgtcttcataaaatcaatcactcaaggacaagggaggtaaaattaaagaggcaacattgtgagattctgctctcaagccattttgtcaggcaagaggacaatatattaacatgttagatttattacacaagcctgactcagcaaaaaaactatattcaaacaaaacattataagaacgcagtataagtgaaatgatgtttgaatttaaaaaatatacccgcaatttaaaccacccaaactatgctgatacttgtcccccagtaaaagaa

SEQ ID NO: 572208 - DNA, 646 bp, Homo sapiens
gttattaatgaatattttatatattccttaaagaactgaaagcaataaataaaaaaataaacagacaattcatataaaaatargcaaaagatgttaactaacacatagaaaagatggactccaaatctgcaaataattatatgaaaagtttcagttgcatagaaggaataagttcaagagatgttaggtacaacatggtgtttgcagttaacaaaaatgttctgtatttctgattactgcgaggagaatggtttttaagtgttctcaccaaaaatcacgttttaaagattatatgtatgtattatatgtatgtatataaaaacatataatacatacatataactggcttgatttagtcatcccacaatgtagtcatgtattacaaatttctctttcaaaaagaaactgtgctaacccttcttagtcattagagaagtgtagttgaaattgcaacggttaacacttcaaacaaaacaattgctaaaattaggaaaacagaaaacactaaatattgaagaggagatggaacaaagggatttgttatgcactgatggtgagggtgtcaattagtgtaatcattttggtaaacatttttttgagcatatttctactgtatgacactgtattccagatagatagcaatcag

SEQ ID NO: 572209 - DNA, 450 bp, Homo sapiens
tcaaacgttttaaaaattgctcttccttcttaattatttgctaataatttttttaaagttggtgcactgtgtggtaattgcactgaaagagaaggtagtctgttttcatgtctgctaccccagtgattattattagtattgatctcttggtttggctgcatgggaggggaaccacacatttagcaccacagcaagtttygcaggtggaaaaaagcctttctttggctacaggtactggtttcctgatactttccctacttctggttcaaaaatttagtggacgactttgttgggaaacaattcttcatgggtttcttgtgtttctgcatgttttgtatcagtttttgttctcaattatttttccaaggatgtttgtatggtaaatagttttggaagatgcgatagtgtctatctctgacaaggacagatttgtttgctgtctggaataaa

SEQ ID NO: 572210 - DNA, 450 bp, Homo sapiens
tcaaacgttttaaaaattgctcttccttcttaattatttgctaataatttttttaaagttggtgcactgtgtggtaattgcactgaaagagaaggtagtctgttttcatgtctgctaccccagtgattattattagtattgatctcttggtttggctgcatgggaggggaaccacacatttagcaccacagcaagtttcgcaggtggaaaaaagcctttctttggctacaggtactggtttcctgatactttccctacttctggttcaaaaatttagtggacgactttgttgggaaacaattcttcatgggtttcttgtgtttctgcatgttttgtatcagtttttgttcycaattatttttccaaggatgtttgtatggtaaatagttttggaagatgcgatagtgtctatctctgacaaggacagatttgtttgctgtctggaataaa

SEQ ID NO: 572211 - DNA, 606 bp, Homo sapiens
aatggatggaaaaataagatgtggtgtatacatacaatggaatattattcagctttagaacagaaggaaattctggcacatgctacaacatggatgagcctttgttgttgaagtgaaataagccagtcacaaaaactgtatgatttcacttacatgaggtatctagagtagtcaaaccctagaaacagaaaaatgatggttgtcagggactggggagacgcagaaatacagagttattgtttaatgggtatagagtttcagttttgcaagatgagaaagttctagagattggttgaagaacaatgtaaatatacttaacaccacttaactgtactcttaaaaatggctaagatgttaaattatatgtgtagtttaccacaattaaacattttaagaaatcaatgaataaccctaaaaattatgaaggactgaaattttaaaataaactttaaaacagtctgaataatatttttaaaaagttattaaaagtcartaagagtctcaagttggaatggggcattactagtctagcaaaatcacatcgatgtaccatacaaagctgagtaaacaaataaccccaaaggtcttcaaataataattgtgagg

SEQ ID NO: 572212 - DNA, 560 bp, Homo sapiens
ttttaaaaaaatacatagggaataaaagcctaccatgtgctagtctttgggcttggtactagaaaatgaaaatgaatgagacagaagcagaaacatctctggagttattaatgatagtatctggtaggcaagataacgacaacaacaacaaaaatacaagcaagcaaaatatttatgaattgtgataaagtttaaaaagaaaacactagtgtgctagagagacagcgacaggtggttggggatgatgaagtccttggggcaaagggaacatagctcttccagctgcagtagagcaggattcaaacatctctaattgagggacactaagcaggggggtgatgtgcaaggaatgtgatrtcatttatactgtaagatgatggcactggctatggtgtaagagtggatgggacagaggcatgatttaccaccataacctgttttgggccatgatccaagtcctccattctttctgtaaactcaagatggcatataagcatctgtacccccattggggtgttggggtaatcattctatcattcttctccatgcacattaataaa

SEQ ID NO: 572213 - DNA, 581 bp, Homo sapiens
atcagtcataattctaaacaggagaaacaaacaatagagaaacacatgttttaataagcagatgtaaagtgctctaaagaaaaatatagctgaggcaggaggattacttgggccaggagcttgagaccagcctgggcagcaaagcaagaccctcatctctacaaaaaaatttaaaccaccaaaaaacaaaaaaaaacacagaatctggggataagagagtgaggcagggmagatcagtgttatttcataaaacttggtcataaaacctctttctcataaattgaaatgagccaaggactgatgaggtgagggagtaagccatgcatttaactggagaaagaatttcaagaagaagaaacagtaaatgcaaaggccttgaggcaggagtgcaatggctgctgagctgttcaaagaacagcaagataccccataggtgtaagctaaagaaagtgcaataggggagagcctgataggcagcaggggccagatcaggttgagccaggggccagtgtaataatttgaagttttattctcagtgagaggagtatcagcagagagttttgaacagaggactaacttgt

SEQ ID NO: 572214 - DNA, 540 bp, Homo sapiens
tcaaggttacagacgaaaagtctaaaggtaactccagggcccacttcatgagtgtgaaacccatgcagtcacacagggccccgtgattgctttaatgacctgctgtcgccatcttgaaattaacaatatttcttcaacacggggcccacatctttattttccacttatccttgcaaattatgtgacagtcctgggtaactgatttactttttttaagtatcagaggtagtctctgcattcaaaaattaagaaaaaataagcttatattatgatgagaaatactttgattggaaataagataggcctggcacatcagtgaaatagttccttacatatggatattcaaacagatgcacaaaaatgaattaataaaagaaacagactagggggatgagtaatgacaatttcaaaatgattattaaaaaatgactattgggtagttttgtggaaagacaggcaatcaggccaaacaacatggcatatccttcttacccggataattctatgaaacaattcaayaacttatcattaatttgtctt

SEQ ID NO: 572215 - DNA, 556 bp, Homo sapiens
aatgatttaaagaaggacgaataccaatcctactcaaactattccaaaaaatagaggaggtgggaatatttccaaactccttctataatgccaatattaccccgatatcaaaaccagacaaagacacatcaaaaaaataaaactacagggcgatatctctcataaatatttttgccaaaatcctcagcaaaatgctagcaaatcaaattcaacagtacattaaaaagatcattattatcaccaagtgggatttatycctgggatgcaaggatggttcaacatacaaaaatcaatccatgtgatacattatatcaacagaataaaggataaaaaccatatgatcatttctattgatgatgtaaaagcatttgataaagttcaacatctctttatgatgaaaacccacaaaaaactgggtacagaaggaacatacctcaacataacaaaaactatatatgacaaaccaacagctagtatcaaactgattgatgacaaactgaaagccttttttctaagattgggaacatggcaaggttgcccacttttaccacttgtt

SEQ ID NO: 572216 - DNA, 465 bp, Homo sapiens
atagacttagttcagcatttggttaaggtgcatgattttctgtataattcattcagcccacatgcattgaatattcatagccaggcactgtgctaggcatcagagagatagagctgaataagaccttgccyctgctggtgaggagttcctggtctagagatagtgctaggcatgtaaattccaggaggagtgtctgattggcctagtttggccaatctcatgtattcaaatactttggccacgggagggcaggatactttaattggcagcccctgcaaagattggaggaatagtccaaaacagaatggggtgcactaccatgaggatgctgaccgggcagacacagacaacacatgtctgctaaactgttcagtgtagtaatgccatgtcatttccaagttgatgaaattttgaagagagatggctatttaataataaggacatacataagaggaaaacaaccac

SEQ ID NO: 572217 - DNA, 465 bp, Homo sapiens
atagacttagttcagcatttggttaaggtgcatgattttctgtataattcattcagcccacatgcattgaatattcatagccaggcactgtgctaggcatcagagagatagagctgaataagaccttgcctctgctggtgaggagttcctggtctagagatagtgctaggcatgtaaattccaggaggagtgtctgattggcctagtttggccaatctcatgtattcaaatactttggccacgggagggcaggrtactttaattggcagcccctgcaaagattggaggaatagtccaaaacagaatggggtgcactaccatgaggatgctgaccgggcagacacagacaacacatgtctgctaaactgttcagtgtagtaatgccatgtcatttccaagttgatgaaattttgaagagagatggctatttaataataaggacatacataagaggaaaacaaccac

SEQ ID NO: 572218 - DNA, 630 bp, Homo sapiens
ttctgctctgtcattgatcttaggccattctttttcttctcacttcatgtgttcaaaactttatattctcaactgtagggatacctaaaaatggtgctttgattaaagatgaatgtggggatttaggtttcgttttttttttctgggcaggggcaataaacgattttaagtacacaactttcccctctacctagtggataatattttcaaacagtttaacatatcttccccatttagtgaaatgagtctgaatttctggtcgtgactgacaatcttgtctgaaaatagttgttcttagctgaatccttcataaattttttgctttgtgaataaagcagacgtgtgacattgagtcgagtgtgcaaacctactctactttctacaggctgattttctaaataaatctctgrttacaataccacagactaatagtgctgggaggaacttcagggaacacctgcctgaatcctttcacaggaccaagtgctgagcatcagaaaggagaaattgcttgtcatctgtcacctctcctggatcatgggtgttcctaatgacctagggagaactgaaatttagtttggtgggctcatgtctcctttttcatccttactgttaaaagcaggagcccag

SEQ ID NO: 572219 - DNA, 630 bp, Homo sapiens
ttctgctctgtcattgatcttaggccattctttttcttctcacttcatgtgttcaaaactttatattctcaactgtagggatacctaaaaatggtgctttgattaaagatgaatgtggggatttaggtttcgttttttttttctgggcaggggcaataaacgattttaagtacacaactttcccctctacctagtggataatattttcaaacagtttaacatatcttccccatttagtgaaatgagtctgaatttctggtcgtgactgacaatcttgtctgaaaatagttgttcttagctgaatccttcataaattttttgctttgtgaataaagcagacgtgtgacattgagtcgagtgtgcaaacctactctactttctacaggctgattttctaaataaatctctgattacartaccacagactaatagtgctgggaggaacttcagggaacacctgcctgaatcctttcacaggaccaagtgctgagcatcagaaaggagaaattgcttgtcatctgtcacctctcctggatcatgggtgttcctaatgacctagggagaactgaaatttagtttggtgggctcatgtctcctttttcatccttactgttaaaagcaggagcccag

SEQ ID NO: 572220 - DNA, 615 bp, Homo sapiens
ttttccttccacatgtctactatctttgtccccaggtcatgaaccttatcaatgggaggcggcggtggatgtgattcctttgggcaggatcttttcctgccctgtttggactctcttgcgttgagacaagtggtctgacatggtgctcttcagggaaaccagttgttcagaggctgcatggtgtaagaagctgctataggacatccatgctctctcatctccctgtctcatgctctacacagcagtgtgtctgctccatttcacagaggaaagaacagtaccccagggcttgartgaggttcccagtgttacacagaccatggcagagtctagattcaaacatgggtcttctgagcacgatgttcttttagaagcaggtgaacagtgggagcttattgactcttcttctgcaaaggtcctaactttattctaattctgtattgttagtgcatgagttttccacagcaaattatcagacccgatccttttctgggtcatttatctttaccagctattggtttgtgttgaaaaactgaaagttgaatataaatatcaatcaatcttatgtcaaaacattcacatgtgtttgtatatgtatgtgtgtacttgtatata

SEQ ID NO: 572221 - DNA, 582 bp, Homo sapiens
gcacgttgacctgagaaatctgtccattctactttaaatatcttaaatattaacctgggaaatcaagtcaccattccttttgatgccctctagggttcttcccacagacttcagatgcagcttcctacacaaaacaccaagaattacagagtaggaggggaataatctgttagacttggctgcctgcgtagatggacaataacataaattcacaaaataagcagaatagcaatgctaacctgctcactcactagaccctaccatctttcaggtcacattgaatgaataacttgtttcctttactgtaaatactctaamgcttgaaagcaaggctaggcttttgatatactaacaaccagtgtgaaaaataatgtgatttatttgaggcatttctttcttgggtagcatgtactttctagtagtaacgatattgtccagaaggtagaattctagtgcaacattcatttgaagtctggaaagcccctaagtcattaagtatagaagtaaacagggctgaaggatctagaatagcctttctgcagaacaaagcacccttccttttaagtctatgttcagggatgg

SEQ ID NO: 572222 - DNA, 521 bp, Homo sapiens
gttgtctaagaagtaatatattaagcactagatgacagaaactagtagtttcttgagtatcctggaggaaggagaaaatgcctaaatgaatactttgaagaaaactagctgataaatgatttccaaaggataattagacacaaactaaacctcttcttactatgaataactaacactgaagttttactgtgtggcagttactatattaaatactttatatataatgtctcatttagtcatcatattgtgggatacagactatcttaattcttagtttactgatgagaaaactgaaacataaggattaggttagttgtagaggcagagatggaattttattgcagagctgggttgtatactaaagcaatgcgtttctttacatcaatgattcttagtgttgatgtacattagaatcacctgggaaactgaaaaagggctatgctgggctycactgccagagatttgggtatggcatagcgcctaagcattgaggtttttaaaaagctctccagagattctga

SEQ ID NO: 572223 - DNA, 606 bp, Homo sapiens
cacatgtttatttaaagatgtaggaaagcagttctggctcagtaactattggaacattttaatttagtacacaggtcaaaagcaatattcatttatttgtttggtagataaaatttcaactggaagtataaagaagaaaggatgttacagacaccatctttacctactcttcaacccctcaagctaacacaaaatagaattcatgttggtagggagggagaggaagtttaaaggagttccctttgctcattattctcctttctgttcgagcttgarcaatatggtttcatgttcttctttctggattagccagcaaatggagaaagtgattcagaaataagtctctgagaacttctccaagctgagtttatgtaaaaagtttgatttaatttacaaataaccacataacatattctttattgcacttggaaaacagtaagaaattaaaggcagttaaaacctaagtgacaaaacagtaggccagaatatgaatttgagtagtctgtgctaatctatgtgtattttcaaacatttgagtgacagaagtaactttaacaccagaagcttttgcgcttacagttgataatactctcattctagtgacac

SEQ ID NO: 572224 - DNA, 464 bp, Homo sapiens
aaatttttgtgggagtatttatatgtgttttatttaagccaagagtcatcagagttcaaagtcttattttaaaagttcatgttcatcttacttaagtcaaaaataatcagcatttttattttattgtattttatttaaattattatactttaagttctagggyacatgtgcacaatgtgcaggtttgttacatatgtatacatgtgccatgttggtgtgctgcacccattaacttgtcatttacattaggtatatctcctaatgctaatcaacatttaaaatgaataccaaaattgagtatcggatcttgactaaatgattcttgtattttctgggtgatctttagttggatttttgcattaaaaatatgaatcatggctgggtatggtggctcacgcctgtaatcccagcacttcgggaggctgaagcaggaggattgcttgagcccaggagttcgagaccag

SEQ ID NO: 572225 - DNA, 631 bp, Homo sapiens
gagccaccgtgcccagccgtaaaaaccttttgaatttttgttttgtaagggaccttgcagacgacatawcagacaaattcttgaggttgaataagaacttaccagtttgaattaaggatctgctggtttagggaggcagatatagaatagtatcaagttcattgtcaaaagatctgggctcaaattttggccatgtcagttactagttgtagtagtgtatgacctctgagcaattcttcagcctctcagggcttcacttttaccatctgtaaaatggacaataatacagacctgaccaagtggattttaatggcaaaatttaaaaaaagtgttgtataaactataaaatgctatgtaagggaaaggaattgcatttggagacaacccatgacttgtgatggaaagtccaacttgggtacaagatgcctgtacatttcaaataggcttaaaatctgggatgtatctccatataccatctcagataacagtattatggtatcagtatttctcttcagccattgtgcagtgctgtcattatgccaggaagttcttccactggctgtggaacactgccatgtagtacattcattatctcagcgtttcaccagcctactgatcttcctcttatgtt

SEQ ID NO: 572226 - DNA, 598 bp, Homo sapiens
tgtgtgcctagagatgttcgcaatctgtctctgattatcttttgctacttctgtgggatctgtctataatgtgatctttgtcactttctgattgtgcttatctggatcttctctctgtttttctttgataatctagctagcagtctatcactcttgtttatcccttcaaagaaccaacgttttatttccctggacctttgtatgtttttggggggtctcaatttcagttagtctctgctctaattttagttatttcttttcttctgctacctttcagctttatgctcatttcttgtttgtctagttccttcaagggctgcaaggttagcttgttaatttggaatctttctgtcttcttgatgtaggcattttgctctataaactttccacttaacactgcttttgctgyatcccagagatttcggtatgttgtgtctctgttttcatttgtttctaataatttttctatttcatccttgatttagttgtttgcccaaaaattattcgggagcaaattatttagtttccatgtgtttgtgtggttttgagagttactcctggtattgatttctatttttattttactgtagttcaaaaa

SEQ ID NO: 572227 - DNA, 517 bp, Homo sapiens
atactatatcaaaacttataagatgtaacttgagcagyagagacaaacttatagccttaattgtgaatatattttaaaaataaaaatagaaaggctgaagattaatgaggtaagtattcatcttagaagggggataaataaaagcaaaataaacccaaacattctgtaaccaggtctctacagagctcagttcaccttcatacccccaaatgcaacatggccttcttccaccctgcaaggaaaggtcccttccattcccaaggcaatatttctccaaacatgctaggctgtcttccaatagtacagaggatgattttcagtgtacttgggcacatatttattttactagattttaaataatagctttttcctacatttgacaggtaatgtagttttacatttatagtagtaaaataaaatttccttttaaaattacttagtaagaggccaggcatggtggctcatgcctgtaatcccagctctttgggaggccaaggtgggtggatcacttgaggct

SEQ ID NO: 572228 - DNA, 517 bp, Homo sapiens
atactatatcaaaacttataagatgtaacttgagcagcagagacaaacttatagccttaattgtgaatatattttaaaaataaaaatagaaaggctgaagattaatgaggtaagtattcatcttagaagggggataaataaaagcaaaataaacccaaacattctgtaaccaggtctctacagagctcagttcaccttcatacccccaaatgcaacatggccttcttccaccctgcaaggaraggtcccttccattcccaaggcaatatttctccaaacatgctaggctgtcttccaatagtacagaggatgattttcagtgtacttgggcacatatttattttactagattttaaataatagctttttcctacatttgacaggtaatgtagttttacatttatagtagtaaaataaaatttccttttaaaattacttagtaagaggccaggcatggtggctcatgcctgtaatcccagctctttgggaggccaaggtgggtggatcacttgaggct

SEQ ID NO: 572229 - DNA, 517 bp, Homo sapiens
atactatatcaaaacttataagatgtaacttgagcagcagagacaaacttatagccttaattgtgaatatattttaaaaataaaaatagaaaggctgaagattaatgaggtaagtattcatcttagaagggggataaataaaagcaaaataaacccaaacattctgtaaccaggtctctacagagctcagttcaccttcatacccccaaatgcaacatggccttcttccaccctgcaaggaaaggtcccttccattcccaaggcaatatttctccaaacatgctaggctgtcttccartagtacagaggatgattttcagtgtacttgggcacatatttattttactagattttaaataatagctttttcctacatttgacaggtaatgtagttttacatttatagtagtaaaataaaatttccttttaaaattacttagtaagaggccaggcatggtggctcatgcctgtaatcccagctctttgggaggccaaggtgggtggatcacttgaggct

SEQ ID NO: 572230 - DNA, 531 bp, Homo sapiens
caggagaaccctgggcaaacagggacaagttggcccccctgctggccactaagacagacatgtctgccacttaacctcgcataacttcacttttctcatttgggatcacagcccacattagcaatgttcaagtgagtttcagtagcatagcaccttcagacaaaatcttacacggaaaagttggtagagaaagcacccaaaactggagcccccaggaggaagtagaggatgggatggggtkgggggtgaaggaccgacatgctcacaccctcaggccctgacccacctctgcaaaaccacagcgtttgacagccattggcctagatggtcagagggtctcatgactacattcatttgttgaactgaaaacccaactgaattaaaatcaatgatctggttcaactgcagactatgctaaagaataaaataataaatccactcccaaattggcccacctctttgaactggaactaaatccatacggtttctccaattattgtcttggaataaaatctaatccccctgtgaact

SEQ ID NO: 572231 - DNA, 540 bp, Homo sapiens
cctgctagctgctctgaatcttctagtgtctaaggatatactctctattttttcttgttattaacaagtattcctgttgtcatagcacatccagagtgaggatactggctacctttcaggattggcagagtttatggaaggcactggtttgtgggacagtatatacaggttttgttcctggttatgtaattttgggcatatgtgattttggacaagttaattttgttctctggastgtagtatctcatcttaaatgacatgatggactagagttaggactggagttaataatttatttgcatatggccccttttaaaaaattactttattctgtctccccttttatttaataggtgtttttgggcaagagaactcacctctctgagctacagttgtcttgctctaaatgccaggatggaccatggttggcttcatcataataccccagatccattggctctagatgtgtggcccaggcatgtgcatgtagaaaagctgcctggtgactgttatattcattgctcgttacgaaccagtgtt

SEQ ID NO: 572232 - DNA, 540 bp, Homo sapiens
cctgctagctgctctgaatcttctagtgtctaaggatatactctctattttttcttgttattaacaagtattcctgttgtcatagcacatccagagtgaggatactggctacctttcaggattggcagagtttatggaaggcactggtttgtgggacagtatatacaggttttgttcctggttatgtaattttgggcatatgtgattttggacaagttaattttgttctctggagtgtagtatctcatcttaaatgacatgatggactagagttaggactggagttaataatttatttgcatatggccccttttaaaaaattactttattctgtctcccsttttatttaataggtgtttttgggcaagagaactcacctctctgagctacagttgtcttgctctaaatgccaggatggaccatggttggcttcatcataataccccagatccattggctctagatgtgtggcccaggcatgtgcatgtagaaaagctgcctggtgactgttatattcattgctcgttacgaaccagtgtt

SEQ ID NO: 572233 - DNA, 571 bp, Homo sapiens
  misc_feature 1, 2, 3, 4, 5, 6, 7, 8, 9, 10: n = A,T,C or G
nnnnnnnnnngtttgtgaaccatcagagaagctgcccaagaaaatgctgcttaagggcacatggttgatcaacccacagtttagtcatctttcatttactggtagatgagttctaactttggtgaccatgtttcccatgttgcttggcaaaagatacttgttttgacttctggatctgaaaactgttgtttagatrttgagaggttttaattctcagcatttcaatggcttctgaggttgacaattctctttgaagttaggacggtatcagaaaacctagggttatacagcgaatatagcagtgatccctctattgtggacttgtacagatgagggtaatggaaacctctggtctctcttagttgctcccctaggcgcttacacaagaggaatggctacccagggttggaatggagtctagccttgtagcagaaaaagaagccataatctaggcctccttattgcaaagcctaatactagagctaattagctcggggatgcagtagtgattgcctggcatttagaagccagccttttggggtttagtcatttctactcagatagtaaaaat

SEQ ID NO: 572234 - DNA, 544 bp, Homo sapiens
tcaaggtcaagggaggatgccaatgacagtcggctctaaatacagacattactgtcccaacatatgtatgcatgcactcwctcacacacacacacacacacacacacacacacacacacacaccagccccagccactctaacttcccttccccctccactttggcctttttgtcccagtaccacttcaccctaggcccttcgctgcctagtatggtcttctctaagagctgcatggcttactcccttgcctccatggatgtgttgctcaaatgttatcttctctatgaggcctaccctggccaccctattcaaaattgtaactcctcttcccttaagctctgattcccccttatcctacgtcatttctccctagagcagttatcaccttctaacttactatatactttatttattatatttattgttttattttttctctcccccactggaatgtaagctccatgagggtaagaattttttcctgttttgtctactggtgtgtcttacacacatggaacaattcctgccttatggtaggctttc

SEQ ID NO: 572235 - DNA, 544 bp, Homo sapiens
tcaaggtcaagggaggatgccaatgacagtcggctctaaatacagacattactgtcccaacatatgtatgcatgcactctcwcacacacacacacacacacacacacacacacacacacacaccagccccagccactctaacttcccttccccctccactttggcctttttgtcccagtaccacttcaccctaggcccttcgctgcctagtatggtcttctctaagagctgcatggcttactcccttgcctccatggatgtgttgctcaaatgttatcttctctatgaggcctaccctggccaccctattcaaaattgtaactcctcttcccttaagctctgattcccccttatcctacgtcatttctccctagagcagttatcaccttctaacttactatatactttatttattatatttattgttttattttttctctcccccactggaatgtaagctccatgagggtaagaattttttcctgttttgtctactggtgtgtcttacacacatggaacaattcctgccttatggtaggctttc

SEQ ID NO: 572236 - DNA, 651 bp, Homo sapiens
atatcattaacattgggggaaactgggtgagaggtattccaaaataaaaggtgtgygcgtgtgtgtgtgtgtgtgtgtgtgtgtgtgtgaagccccacagacaaggattgggtccctctcctggcctcagcccttccatatcactgtgcactgcccatttagaacatgatgggacaactggcgactcatacgcctgcgtctgtgactgcccctaagagggctgctctgccaggggcccttgtttgctcaacaccaggatcctaatgcaggcacaagagtctctgccttcattccatcaagctgcctctcatatcgtgggggccacatcctttctttcttagtaaatcctaagggatgatcttagcacaaagccagttgccccagaaattgaaatgagattgttaagtaccattagaggctggatccatagccactgaggacatggatacacttggttcttgggggaaacccaaagccaataaatacattctccatatcaaccacaattgatttaagtccaaatgaactacaagttgcatgctagaaggtgtctaagtgtcagtaactagataacatagaatctctttacataccatttcaattattttgttgatatgtttctgcatttccataagcatctcgacaccctgt

SEQ ID NO: 572237 - DNA, 651 bp, Homo sapiens
atatcattaacattgggggaaactgggtgagaggtattccaaaataaaaggtgtgtgygtgtgtgtgtgtgtgtgtgtgtgtgtgtgtgaagccccacagacaaggattgggtccctctcctggcctcagcccttccatatcactgtgcactgcccatttagaacatgatgggacaactggcgactcatacgcctgcgtctgtgactgcccctaagagggctgctctgccaggggcccttgtttgctcaacaccaggatcctaatgcaggcacaagagtctctgccttcattccatcaagctgcctctcatatcgtgggggccacatcctttctttcttagtaaatcctaagggatgatcttagcacaaagccagttgccccagaaattgaaatgagattgttaagtaccattagaggctggatccatagccactgaggacatggatacacttggttcttgggggaaacccaaagccaataaatacattctccatatcaaccacaattgatttaagtccaaatgaactacaagttgcatgctagaaggtgtctaagtgtcagtaactagataacatagaatctctttacataccatttcaattattttgttgatatgtttctgcatttccataagcatctcgacaccctgt

SEQ ID NO: 572238 - DNA, 568 bp, Homo sapiens
ttggctgtgtgtttgtcatagataaactcttattattttgagataygtcccatcaatacctaatttattgagagtttttagcatgaagggtcgttgtattttgtcaaaggccttttctgcatctattgagataatcatacggtttttgtcattggttctgtttatatgctggattatgtttattgatttgtttaaaagaaaatgtttgttgaatgagtggaaaaacaaggtgatgtttgagtctacagtgctcaaaagcatgggggcttcagaaaagaacaagatcaatttcaaatccctgtacttcaaatttctacttcatgccatgcaaaattactttacccctcttaacctcaatttccttctgtgtgaaatgggaaaaataaagtttcatttttcattcagtttctgtcaatatttcatgagataaaacatataaaacatccaacttgcttaaatgtatgattattcctgtcattattagtagtgggatcaatttcactattattgtctatacagttctgtgcctaaaacctacaaaacaagaaaatgttaactctagaaagtg

SEQ ID NO: 572239 - DNA, 568 bp, Homo sapiens
ttggctgtgtgtttgtcatagataaactcttattattttgagatacgtcccatcaatacctaatttattgagagtttttagcatgaagggtcgttgtattttgtcaaaggccttttctgcatctattgagataatcatacggtttttgtcattggttctgtttatatgctggattatgtttattgatttgyttaaaagaaaatgtttgttgaatgagtggaaaaacaaggtgatgtttgagtctacagtgctcaaaagcatgggggcttcagaaaagaacaagatcaatttcaaatccctgtacttcaaatttctacttcatgccatgcaaaattactttacccctcttaacctcaatttccttctgtgtgaaatgggaaaaataaagtttcatttttcattcagtttctgtcaatatttcatgagataaaacatataaaacatccaacttgcttaaatgtatgattattcctgtcattattagtagtgggatcaatttcactattattgtctatacagttctgtgcctaaaacctacaaaacaagaaaatgttaactctagaaagtg

SEQ ID NO: 572240 - DNA, 543 bp, Homo sapiens
agcaagagagctgtgaacacctgaactaccacagaatcctttcaccacctcccactaatccaggaacaccaaggttcagtttgtcatcatcagtggattctgctatggaatgctttagaatcacaggagtttaccactagtccaaacctccagaaggatgaagtttctccaagtagycaaatcttttcttgcttggaaaattctgagggccctgcagacaccttggccagtttggaaaacaccacactgcacagatcactgagttgggttccaccaggagtcaatcctgtgccagctggacatgaaacatgtattgtattgaaagaaaataaacaataaagaataaacacaataagagttaacagcacacaacaacatggataaatcttggggacattatgataaatgaaataaaccaattaccaaaagataaatactgtatgatttctcttacatgaggaacttagaatagttaaaatcatagagctagaaagtagaatgattgctagaagctgggggacagtgaaatgggagttattattc

SEQ ID NO: 572241 - DNA, 332 bp, Homo sapiens
ggcccatttttaaaaagaaaaagctcatttcctaatactttaattttctgttaaatgycaaattttgtttacatacaggaattgagctattgccatattatatgtgaaccataaatgaaatagtatcatgaagattattattaaaactgattcccaatgcagcatatgcaaacttctaagtcataaatcattaggggtagtttgtttccttcctccctgaaaaggaagtgtatgttaatgctaaaatgaatgcagcctatagacattactaaaagtgagtaaattgaaatgtcaggagacaaagcacttatcacagaattggcagctcggat

SEQ ID NO: 572242 - DNA, 587 bp, Homo sapiens
aatgctcattgcagcactattcacaatagcaaagtcatggaatcaacctaggtgcccatcaacagtgaattggataaagaaaatatagtatatatacaccatagcatactatgcaggcctagaaaaagaatgaatttttgtcctttggagcgacatggatgcagctggaggccattatcctaagcaaattaatgcaggaacagaaaaccaagtaccatacattctcacttacaatgggatctagacataagtattcatggacataaatatggcaatgatagatacggggactcgtagaagggggagggagggaggtaagcaagggttaaaaaactcactgttgggtactatgatcagtacctgggtgacaggatcattcataccccaacctcagtatcatgcaatatactcatgtaccaaacctgcatatgtaccccctgaatccaaaataaaagttgaaaaagaaaaaaaataaataaatarcaaatgaatgtactatgaagaagagaaataaattcactttctttggctagaaattaatagtagaactaataataaatatctgaacttgtacattttatctcaat

SEQ ID NO: 572243 - DNA, 563 bp, Homo sapiens
tttctccactaaatagtaaaacatatatatataaaagaatttttttctgaaaaccccaactattaggtttcaactaaaaccatttctaaaatcaagtcgtaaaaccaaagaagcagagaaaggcagaaccagttgtgtgctggaggtggttcatactggctcaagagagccaaccactaaattttgagagtcgattattagagactgacattattttaaaaccagttatataaacctacaagtaagtaaattatattataaacaaaggtaataaaaattcattacatcttaattaatttaatattatctatgctctttaggttatttacatctaaccaatcactatggtagaagtattatataacggcatactgctgtgaatctcttcccaattctcccttcagtgatgtcacattgagaactcaaaatcagacttgatgataatatttacactgaggaaagcagcaaaggctaaaaattagagcttttctttctccagaaagctgattgttaaataattatgaagcayaccactggactcactcctccttaatagcgtaagt

SEQ ID NO: 572244 - DNA, 529 bp, Homo sapiens
cccactgcctattgttgccatctttatgtctgtgtgtacccaatttttagcacccataagtgagaacatgtggtattttgttttctacttctttgttaattcacttagaataatggcctccagctacatccatgttgctgcaaaggacatgatttcattcctttttatggttgcatagtattccatgatgtatatgtagcaaattttctttacccaatccactgytgatggacacctaggttgattccatgaccttgctattgtgaatagtgctgtaataaacatgcaagtgcagatgtctttttggtagaatgatttatttttccttgggtatacacccagtaatgcaattgctggctcaaatggtaattctatttttggttctttgaggaatctccaaactgctttccacaggggctgaattaatgtacaatctcaccaacagtatataagtgttcccttttctctgcaatatcaccaaaaaaaactggctttaaaaaaaatttaataataaccattctgactggta

SEQ ID NO: 572245 - DNA, 400 bp, Homo sapiens
gaattctattattccaatgaagtaaaattaaattttctcctcttcccagaagcccacatctattgcatggatagccatgcttttctatagcttaatttcctctaggattctttagttgaaacttacatttctatgagctttaatggtgtgacccttggtttctttcttctctctcattctcccttcctgggctatgtgtgagtcatagctagagctagaagccaaagggagagaaaaaagactaaatctcgattaagatctgtataccaaaaacagatcatctttatttcaaagcctgttagcttaragttttgttaactttagaaatgtatttggattaaatatatgtataatacttacacattattgaacaagattattctgcaatcaacatcattct

SEQ ID NO: 572246 - DNA, 613 bp, Homo sapiens
gttgacaaggataataattctttcccaatgtactgttgtaactctcaattgttycatattaaaacaagagagcaaaaaggctttgggaaaggatacacatttttaatagaagctataattctgtgtgaagggttatctgaatagtttgcccaagaaatgaaattatagcacttcttctattgatatagcaattgagggaatgaagccaaagtcctatcatccctttccatagaggtttgtaaggttacagttaaccctgtgtaatttctgtccgtaagtccaaaggctttttcttttctctgaaaagaacaaactgatgctattaccctttgcttaatctgactacacagccttatacaaaataaaaggcattgtagccagtgaatccttgcagatattaatatttttaaataaatgacaagttataaacctaaagaatatatagcctcatgagtaaacttagctgggttggatagtacagttaatacagtttatctggcatcatcctaactctatgagatacataaaatggtgcttcagtttagttaaacatatcagaaatgtctaattgcctgggtaatttttggtctcttcatcctctagaaaattacca

SEQ ID NO: 572247 - DNA, 245 bp, Homo sapiens
gtctctcctctctgtatattctgatgagccttcgtctccctccatgttcttttcccgttctcctccttctyccttggcaggattatcactgtcatatgtctaaagtctgatgccactcaaataccagcacccccaccgcccaaggatgacttgatgtctcagctcacactgacttgtaggttttctgggttcttctggtctagcagttggctgtctgtgctttcatgttgctaattccagacttg

SEQ ID NO: 572248 - DNA, 245 bp, Homo sapiens
gtctctcctctctgtatattctgatgagccttcgtctccctccatgttcttttcccgttctcctccttctcccttggcaggattatcactgtcatatgtctaaagtctgatgccactcaaataccagcacccccaccgcccaaggatgacttgatgtctcagctcacactgacttgtargttttctgggttcttctggtctagcagttggctgtctgtgctttcatgttgctaattccagacttg

SEQ ID NO: 572249 - DNA, 407 bp, Homo sapiens
cctgttgtaaggttaaaggagacaatggatgttttgctattaagatgtaagttcaacttcactgaactcagcaaatgttgactctggggggcttctccatkccagatgcctgtggggtgctgtagagccagactctgcccccgaccctgtagcccaccatcatccaggaggataggggacagacagacagacagacagacagacacacacacacaaacatgtagagtcctaagcaagctgtggttgtgggagctggggtgtgcgaggagaaagccatgacttctgaccccattcctcagggaggacctgaaggacaagggcagtaggtaaggaagaggaaggccattccagactgcgagtgcagcagaggtggaggctggaggtgggaaggggcagtgtgggtgtgg

SEQ ID NO: 572250 - DNA, 413 bp, Homo sapiens
caggcatgtgccaccacacctggctaatttttgtatttagtagagacggggtttcgccatattggcctggctggtctcgaactcctgagctcaggtgatcccgctggccttgccctcacaaagtgttgggattacaggcgtgagccaccacgcctggctgcatttttaatttattgctcttacgtggactaattttggaaaatttcctccaaatatggcttgttctgtttctgcaagtagcaaaagwtaacatctgaccaaaacaacttcaacatagctcacaagttttgatgcagaaaagacctccaagcccagcttccctttggagttcttttccaaagtgcaaaattctcacagaagtattgctgtaggagtcgtaagtcagagcaactgtccctttcaacatgcccaaa

SEQ ID NO: 572251 - DNA, 433 bp, Homo sapiens
tcaaaaaaaaaaaaagtgtattctaattttttacccaactttacatgttaataatctcccaccctattctatgttcttttaagaattaagaattccatcactataatgatttctggacacaatggaacactttgccaagttttagtttttaaaattttaagtggtaaacaagtaagattggaaatatttrgattaaacaaagttaaacaggcatattttacctcatgacttctttgaatctttcagtgggtgcaaggccctgagactcaccaaaactaacataccatatttcttagtcttaaaggtcctctcctcagcaaaatattgtactaaattttgtttccaaagaatttattataaagtatttgaataaatgttaactgaagattattttattggaatttttaaattagagttaaggtacccatagata

SEQ ID NO: 572252 - DNA, 521 bp, Homo sapiens
cctccatccacaactagaggaggggcagaagcctgactcaggaggcacagaagtgacagcatcctggggtgtccacatgctcacccagccacaggccccttctctcaggactgcgccctcctgcaggctccaaggaggtggctgcatttcttttcttttytttttttttgccgtatgtatttattattattattattatcctttaagttttacagtacatgtgcacaatgtgcaggttagttacatatgttacacacgcgccatgcagccctcactaacccgggggtacaaccaggtgaagcaaggatgggaacttagcatgaaggagcccagctccaggcagccaggtcagaacaaggctaggtggggtgggccacagtgatgtgcagcgagtgtgaatgagggaaaaggcttgagtgtagaaagagcaatgggacaggcatgtggacaggagatgagaggagccaaccccagagagaggcagctggagagagaggaacagggcaggagcttcaggctcc

SEQ ID NO: 572253 - DNA, 532 bp, Homo sapiens
tgaggtgccccttcttaagaacatcacccaatcagtaatgcagcattaatgctgaaccctgatgaaagactgagcaaaagtatttttcattctttatgatggttttaaaaagttattataaaataagaaatcctcatttgaaactaaytttgaaattacataaaagtgtgaagaaaacaaatcatcaatagtctctctctacatatagctattattgttttgatgtctttcctgctagtctttttttctacccatatgtatcttaagtaattagaataatactcattttctccagatattatacaaagagcattttcattaaaattatttaacaattttcaaaaacatttcactacatagatcagatgtagcaagctgatgttatgggggccaagtatggcccatagacatattttctttggactttaaaatattaaaaatgtttgaattagttgacagtattttaaaatcaggagatttcacatcccctagccaacttcactagtctaggtgactggtttggccccccttg

SEQ ID NO: 572254 - DNA, 532 bp, Homo sapiens
tgaggtgccccttcttaagaacatcacccaatcagtaatgcagcattaatgctgaaccctgatgaaagactgagcaaaagtatttttcattctttatgatggttttaaaaagttattataaaataagaaatcctcatttgaaactaactttgaaattacataaaagtgtgaagaaaacaaatcatcaatagtctctctctacatatagctattattgttttgatgtctttcctgctagtctttttttctacccatatgtatcttaagtaattagaataatactcattttctccagatattatacaaagagcattttcattaaaattatttaacaattttcaaaaacatttcactacatagatcagatgtagcaagctgatgwtatgggggccaagtatggcccatagacatattttctttggactttaaaatattaaaaatgtttgaattagttgacagtattttaaaatcaggagatttcacatcccctagccaacttcactagtctaggtgactggtttggccccccttg

SEQ ID NO: 572255 - DNA, 505 bp, Homo sapiens
tagaacttcaatagctagagagaagtcaatacctggcttcaatgaaggacagactgaatttcttgttatgggataatgcagctagtgacttaaattagaaggcaatacttatttaccatgccaaaaatcctaggrcccttaagaaatttgctaaatctactctacttatgctctataaatggaacaaaaaagtctgatggcaccacatctgtttacagtatggtttactgaatcttttaagcccacctttgaaacctactgctcagaaaattttttttttccaagtatcactgcttatgggcaatgctcatagccacccaagagctctgatggggatgtacaaggagattaatgttgttttcatgcctgccaatacaatatttattctgcagcccatggagtaaggactaatttcaacttttcagtgttgtgattttagaaatacttttcatacagctgccgtagatagtgatttctttgatggatctaggcaaagtgaactgaa

SEQ ID NO: 572256 - DNA, 575 bp, Homo sapiens
caaaaaaaaagggctacaacaggccagccaactttcttgtctgaattctaaataactaaaacccatggagaatgctctacaatagaaagtagtgggttcattgccagaggcacttcayaagagcaggattacagaggaaggactcctaagactgagtccccaagtcactagtaaccatctgcttggttaatgaacctgataccaacagaaaaaactccctgaagtcatcaaacaacagggacagctactcctgaacttgtggtcacataaaaccaaggtgttgactacatcaggttcttaagaattttgtagggtggaaggatgtctaaatgtatgcgtgtttgtcttctgcatctcattgtaatacagccccgggccctgtcacatgggccagtctcaatatgtgggcctcagaagaaagtggatgagaatcagcacatccactagaaagcggaaaattcatggcagcaagaaacaaaccaacaaaacagatcagcagtggggaggggaaagatttgctcctttcttagtcttgatctgaagaacagtagtatttgataagaaaattaaatgga

SEQ ID NO: 572257 - DNA, 575 bp, Homo sapiens
caaaaaaaaagggctacaacaggccagccaactttcttgtctgaattctaaataactaaaacccatggagaatgctctacaatagaaagtagtgggttcattgccagaggcacttcacaagagcaggattacagaggaaggactcctaagactgagtccccaagtcactagtaaccatctgcttggttaatgaacctgataccaacagaaaaaactccctgaagtcatcaaacaacagggacagctactcctgaacttgtggtcacataaaaccaaggtgttgactacatcaggttcttaagaattttgtagggtggaaggatgtctaaatgtatgcgtgtttgtcttctgcatctcattgtaatacagccccgggccctgtcacatgggccagtctcaatatgtgggcctcagaagaaagtggatgagaatcagcacatccactagaaagcrgaaaattcatggcagcaagaaacaaaccaacaaaacagatcagcagtggggaggggaaagatttgctcctttcttagtcttgatctgaagaacagtagtatttgataagaaaattaaatgga

SEQ ID NO: 572258 - DNA, 494 bp, Homo sapiens
ctacttgtctcctctaaatgacttgactggtctatgtacaacctttctataaggtgctaaaattatgtacaatactctcttagtccattccaggtggctataacaaaacactttcaactgaataatgtattaaaaatataaatgtattgttcacagctctagagggtagaaattccaaaattagggtactagaagattcagtgtctgttgaggkcccgttactcacagatagtgccttccatgtgccctcacatggtggaaggggcaaacagtctctctcaagtcccttttcttttttttttttttattatactttttattatattttgttatcaccactttctcttttttttaattatactttaagttttagggtacatgtgcacattgtgcaggttagttacatatgtatacatgtgctatgctggtgcgctgcacccactaactcgtcatctagcattaggtatatctcccaatgctatccctccccgctc

SEQ ID NO: 572259 - DNA, 529 bp, Homo sapiens
tttctagtccacacaatgaaggaactaatataaacttcacaragttgttatacagataagattacatcacttcaccaaatcatttagctaccaagtgataatagaaggtgtattagttcgttctcccactgctgctataaagacatacctgagactgggtaatttattaagaaaagaggtttaattggctcactgtggactgcaaaggcttctgcttctaggaaggcctcaggaaacttacaatgatggcagaaggcaaacgggaagcaggcacggttttcacatgaccagagcaggagagagagagagagcaacggtggaagtgctacacagtcaaagaaccagattttgtgagaacttactcactgtcatgagaacagtaagaggaaaactcgcccccatgatccaatcaccttccaccaggtccctcctccaacactggggattaccattcaacatgagatatgggtggggacacagccaaaccatatcagcaggtttacgtattcagcacttatcttggtaatta

SEQ ID NO: 572260 - DNA, 543 bp, Homo sapiens
tttgaaaaagtgctcaatgtgatacctggcacaaaaaaaaaaaaaaaaaaaaaaagatgctgaatagtcacaagttggctgcaaggtcttcactgggttcctccaaatcagactaaattctccttaagcattttagacattcactcatggtaagaagtgtctgatctctttcagagaagctgtacttctcccttctaagattttttttttctaggaagctgctaggttctctttggcccctgtaaaactatagctaaatcatagccaattggttcaaacatttcttatcaggaaagaatttcaaacatagcttttgaggatgcaggaaagcagtgtttttctatctgattccacatctcagtcaagctaaaraaaagctctctttaaagtgctaatcaaagggcaaacagcctttcatgaaatagtggaccaaagaggcccaagtgctgcaacagccacaggcatctcatcatctggagagccactgcctgagactgcaataggccctccagcttgtcagtcagcctgtcctcagccttaagt

SEQ ID NO: 572261 - DNA, 593 bp, Homo sapiens
ataataagctcatactttttttacaattctatttataaactaaagatgttgaatagccttagagccaaaacaaagcaaactctgtttaattttttgaaacaagcagttctcacacttatatttaataagtacttgatgaaatacctatttctgcacaactagcattcactggaacatactttgttcattkctaatgcaagggaacctttgtatgcccctttcttgaaacctagaagagattaattaatacatagggaagacagggtggctgtttgattcacttaagatgtcatgtgccaaagtttttaattgaatttaatcctcctcgtgctttgactgaaacaaaatattctgagctgtattttcggtcttaagaatggaatttagtaggattattgccgcagcaaaatccagtcaacttgatatttaccaactcaatctctattaattatcatgtcaccaaatttactatgcacactcttgatagctccacaagaagttacttatgagttctgttatgaatggtacagattattaaccattaatttattttaaatagattaatttcaaagaaggtaatgattgtacaaaaa

SEQ ID NO: 572262 - DNA, 604 bp, Homo sapiens
atgtatctgattattctgatataatgtgtgacrctttgaagtttttaagttcatctgtaactgtacagttttaccaataatttttgtatttgtgtttgtccataacattgttaagacggttttacttaaaatgtatttttggtaaaggacatgaatagacaattttaaagggaagacatacacatggccaacaagtatatcaaaaaatgctaaacatcaatactatctagagaaatgcaaattaaaaccacaatgagatgtgatcttatacatgtcagaatggctattactaaaaagtcaaaaaataacagacgttagcgaggatgtggacaagaaggaacacttaaacactgttggtgggaatgtaaattagtacaacctcttggaaaagcaatattgggccttctcaaaaaactaaaactagaactgccattctatccagcaatcacactactgggtatctatccaaagaaaaatacatctttatgtcagaaaagatacctgcactcatatgtttgtcatagcactgttcacaagagcaaagacatagaatcaacctaagcctaagcattcatcaatggatggttggatgaagctaatatac

SEQ ID NO: 572263 - DNA, 604 bp, Homo sapiens
atgtatctgattattctgatataatgtgtgacactttgaagtttttaagttcatctgtaactgtacagttttaccaataatttttgtatttgtgtttgtccataacattgttaagacggttttacttaaaatgtatttttggtaaaggacatgaatagacaattttaaagggaagacatacacatggccaacaagtatatcaaaaaatgctaaacatcaatactatctagagaaatgcaaattaaaaccacaatgagatgtgatcttatacatgtcagaatggctattactaaaaagtcaaaaaataacagacgttagcgaggatgtggacaagaaggaacacttaaacactgttggtgggaatgtaaattagtacaacctcttggaaaagcaatattgggccttctcaaaaaactaaaactagaactgccattctatccagcaatcacactactgggtatctatccaaagaaaaatacatctttatgtcagaaaagatacctgcactcatatgtttgtcatagcactgttcacaagagcaaagacatrgaatcaacctaagcctaagcattcatcaatggatggttggatgaagctaatatac

SEQ ID NO: 572264 - DNA, 386 bp, Homo sapiens
ccacaaaaaaagataagtatgtgaggtgatggatatgttaaatcagcgtgatttaatcattccaccatgtatacatatatccaagcatcttgtaatacactaaaaatatacaatttttattggtcagttataccttactaaagctgggtaaagraacaaacattgcaacagactacagataaagttcccttcaccacttcttccccaacattcatcatagttattgccccaaaagactgctattattagtttgatgtatagcttttcacaaacagaaaatttctgtgtttgtacagataagaggtttatgtgcacagacaaaccattttgagttcaggttactgtatataagtgggattataccatacatgtgattctgcagcaat

SEQ ID NO: 572265 - DNA, 386 bp, Homo sapiens
ccacaaaaaaagataagtatgtgaggtgatggatatgttaaatcagcgtgatttaatcattccaccatgtatacatatatccaagcatcttgtaatacactaaaaatatacaatttttattggtcagttataccttactaaagctgggtaaaggaacaaayattgcaacagactacagataaagttcccttcaccacttcttccccaacattcatcatagttattgccccaaaagactgctattattagtttgatgtatagcttttcacaaacagaaaatttctgtgtttgtacagataagaggtttatgtgcacagacaaaccattttgagttcaggttactgtatataagtgggattataccatacatgtgattctgcagcaat

SEQ ID NO: 572266 - DNA, 606 bp, Homo sapiens
ttcccactggttctgctttctctgtaatagattattcaatttatttctttataagaaatttgttctatttgttatctttttatagcatttggtaatttttcttgtattctcatcttttattcccttcccaccccttttttttgaggatcagttaattactgcagatttcactgcctaaggaagccccagaggtaaatagagttgatgagtttgccataaaccatscaaatatagagatactatatcacaaagatagccattcacatcagtgagtttatttaacaatgaaaacagcatatgtggccgggtgcggtggctcacgcttgtaatcccagcactttgggaggctgaggcaggcagatcacaaggtcaggagatcgagaccatcctggctaacatggtgaaaccccgtctctactaaaaatgcaaaaaaaattagccaggcgtggtggtgggtgcctctagtcccagctacttgggaggctgaggcaggagaatggagtgaacccgggaggtggaggttgcagtgagccaagatcgcgccactgcactccagcctgggtgacagagcgagactccgtctcaaaaaaaaaaaaaacaaacaaa

SEQ ID NO: 572267 - DNA, 642 bp, Homo sapiens
acattcaatgttaatatcctaaaaggctgtgtattatatttctctttcaacctctaataggcttttcttgcctgatttcaaataagcaagaaattattttataaagttaaaatactcaagagaatgagaagacaaatcacaggttgggagaaaatatttgcagaacacatacctgataaaggactgttatccaaagtatattaagaactcttaaaactcaacaataagaaaataaacaatacaatttaaaaaatgaaccaaagatctaaacagacattttaccaaagaagatatatgatgacaaacaggtatatgaaaagatgctctacattatatgttatcaggaaaatgcaaattcagataacaatgatttattattattcacctattagaatggcccagatccagaasgctgacagcaccaagtgctggtgagggcgtgaagccacaggaactttcattcattgctgatgggaatgcaaattagtagtcattttagaagacagtttggcagttccttacaaaactaaacatactctaaccatatgatccactaatctcactccttgatatttactcaaaggagtttaaacctgtgtcacagagaaacctgcacacagatgtttacatcagctttattta

SEQ ID NO: 572268 - DNA, 574 bp, Homo sapiens
agtaattttcaaatctctaaatttttttttagaattttcccacaacgtcatttttattttgagttccaggatacatgtgcaggtttgttacataagtaaatgtgtgccatggtgatytgctgtacctatcaacccatcacctagttactaagcccagcatgcattaactatttttcctgatgctctccctccttccatcctaccacccaaaacagagtgtgttgttcccctccctgtgtccatgtgttctcattgttcagctcccacttataagtgagaacatgcagtgtttcgttttctgttcctgcattagtttgctgaggataacggcttccagctccatcgatgtccaggcaaagaacatgatcttgtttttttttatggctgcatagtattccatggtgtatacgtaccacattttctttatccagtctatcattgatgggcatttgggttgattccatgtctttgctattgtgaatagtgctgcaatgaatgtacacgtgcatgtatctttaaaatagaatgatttatattttttggggtatatacccagtaatggattgctgggtta

SEQ ID NO: 572269 - DNA, 574 bp, Homo sapiens
agtaattttcaaatctctaaatttttttttagaattttcccacaacgtcatttttattttgagttccaggatacatgtgcaggtttgttacataagtaaatgtgtgccatggtgatctgctgtacctatcaacccatcacctagttactaagcccagcatgcattaactatttttcctgatgctctccctccttccatcctaccacccaaaacagagtgtgttgttcccctccctgtgtccatgtgttctcattgttcagctcccacttataagtgagaacatgcagtgtttcgttttctgttcctgcattagtttgctgagrataacggcttccagctccatcgatgtccaggcaaagaacatgatcttgtttttttttatggctgcatagtattccatggtgtatacgtaccacattttctttatccagtctatcattgatgggcatttgggttgattccatgtctttgctattgtgaatagtgctgcaatgaatgtacacgtgcatgtatctttaaaatagaatgatttatattttttggggtatatacccagtaatggattgctgggtta

SEQ ID NO: 572270 - DNA, 513 bp, Homo sapiens
actggtcattcaggagtacattrtttaatatccatgtatttatatagtttctaaaattccttttattaatttatagttttattccattgtggtcatggaagatgcttgatattatttcagtttttgaatattttaagacttgttttctgaactaacatatgatctatccttgagaatgatccatgggatgaggaaaataatgtttattctacagcgcttagatgaaatgttctgtcaatatctattagatccatttggtctgtaatgaagattaagtctgatgtttctttgttgattttgtgtctggaacatctgtccaatgctaaaagtggggtgttgaagtctccagctataatacagggggctacctttctctttggctcaaacaatattagcgttctatatctgggtgctccagtgatggaggcagatatatttaagattatgtcatcatcatgctgaattgactctctaattattatatagtgatcttctttgtctcttctaacagtt

SEQ ID NO: 572271 - DNA, 646 bp, Homo sapiens
cccattttatctaggaagtaactaacttgcttttgattttacaggctcataggtggaagggacttgcttcatcttagatgaaactttggactgtggacttttgggttaatgctgaaatgaattaagactttgaggaactgttgaaaagacatgactggttttgaaatgtgaggacatgagatgtgggaggggccaggggtggaatgatacagtttgkttctgtccccactgaaatcttatcttgaattttagctcccataattcacatgtgttgtgggagggaaccagtggtagataaatgaatcatggggtactttaccccattctgttcttgtggtaatgaataagtctcacaagctctgatggttttataaggggtttccccttttggttggctctcattctcttttgcctgctgccatgtaaaatgtccctttcctcttcctttgtctgctgccatgattgtaaggcctccccagccatatggaacttttgagtccattaaacttctttcctttgtaaattacccagtctctggtatgtctttattagcagcatgagaacagactaataaaaacattgaatgtaaatggactaaagtatccaatcaaaagatacagactggattgactgatgaacaaacaag

SEQ ID NO: 572272 - DNA, 546 bp, Homo sapiens
catttcagaactcaagtcagtgagaaatatattttactgtaaacagaataaaatccttatggagacattataataagtaataaataagaaataaactataattttataacttttaatttattgtaagactacatattcatggagggcatacttttgggatcatgaaactgagaaaaactggctataatttggcatacaaactagattaaaaataatcatttgtctttctaaatccttaaaagtattctcttttgcaatacatttgcttttcagggaggatgagaagttgtgtggctttgattgataccatcctcttcaagaagtcagttttctcttttatacctaattattcaaaaatgttgtaaagagactgtggagattagtaaagtcarccattttttagctctatttgcttggaatgttatttcatactttcctaatcccaaagctatggtaaagtagcattaatcaatgatgcatagacagtaatttgcctactcataaaataagcattgtagtttgaaaaatatagaaatatgacaaaaa

SEQ ID NO: 572273 - DNA, 464 bp, Homo sapiens
tattccctcacagataagatggtcaataacattagtccaacattacttggactcatatctttacatttttggaacatttttattygaaaacaacctttaaaaagatcagcactattcacaatagcaaagtcatggactcaatcttacagtccatcaatggtggattgaatgaagcaaatgtggtacatatacaccatggaataatatgcagtcataaagataagggaatcatgtgctttgcagcaatatggatgaaacttcaggtcattatcctaagtacattaacacagaaacagaaaaccaaataccacatgttctcacataggagagctaaataatgtgaacacatggacacaaagatgcaaaaaaaaaaaaaatagacactagggacttaaaagaggggcaggggcaggtcgtggtgtctccaattctgtaaatccagaactttgggaggccaaagtggg

SEQ ID NO: 572274 - DNA, 464 bp, Homo sapiens
tattccctcacagataagatggtcaataacattagtccaacattacttggactcatatctttacatttttggaacatttttattcgaaaacaacctttaaaaagatcagcactattcacaatagcaaagtcatggactcaatcttacagtccatcaatggtggattgaatgaagcaaatgtggtacatatacaccatggaataatatgcagtcataaagataagggaatcatgtgctttgcagcaatatggatgaaacttcaggtcattatcctaagtacattaacacagaaacagaaaaccaaataccacatgttctcacataggagagctaaataatgtgaacacatggacacaaagatgcaaaaaaaaaaaaaatagacactagggacttaaaagaggggcaggggcaggtcrtggtgtctccaattctgtaaatccagaactttgggaggccaaagtggg

SEQ ID NO: 572275 - DNA, 498 bp, Homo sapiens
tgtccagcaatagatccaaacaaaraatgaaatctttgaaataccagataaagaattcaaaaggttaattagaaagttattcaatgagattccaaagaaagttgaacaccaacatacagaaatataaaaaataattcaggatatgaataacaaatgtcctaaaaagatagattttaaaaaacaaacagacaaaacttctagaaataaaagattcatatagggaattaaaacatgcagagtaaggttttaaaaacagaatagacaaagcagaagaaaacaattatagagcttgaggacaaggctttcaaagtaatacaatcaaataagataaagaataaagaattatgaaataaagtattagacaaagatgggattatgtaaaatatccaaccctaagaatcacaggtgttcctgaggaagaaaaaaagaaaacagtttgaaaaccctgtttgaggaaacaattgttaaaaacttccctggtcttgctagaaatttaaa

SEQ ID NO: 572276 - DNA, 424 bp, Homo sapiens
gaatgatctttttgatgtgctattgaattcagtttgctagtactgagaatttttacttttatgtttgttcatcagggatattggcctgtagttttctttctctcttttttttttttatgttcttacttggttttgctattagggtaatgatggcttcaaagcacaaatgtgaaagtattttctcctcttcaaagtttttggagtttaagtagaattggtattagctctttaaaagtttagtggaattcactaataaatccagcaggtcctgggcttttgtttggtgagacaatttttattacagctttgatcttattatttgctattagtatgttcagattttctatttattcatggttcaatcatggtargttgtatgtgtccagaagtttatttgtttattctaggttttccaatttattgg

SEQ ID NO: 572277 - DNA, 605 bp, Homo sapiens
tacttggttttgctattagggtaatgatggcttcaaagcacaaatgtgaaagtattttctcctcttcaaagtttttggagtttaagtagaattggtattagctctttaaaagtttagtggaattcactaataaatccagcaggtcctgggcttttgtttggtgagacaatttttattacagctttgatcttattatttgctattagtatgttcagattttctatttattcatggttcaatcatggtaggttgtatgtgtccagaagtttatktgtttattctaggttttccaatttattggcatatttattgtttctttattgatttttttttttttttttttgcctggatggtatgcccattgctaaaagtggggtgttgaagttccctactgttattgtattgcagtctgtctctccctttagatctattaatgtttgatttacatatttggatgatccagtgttgggtgtatatatacttacaattgttatatttttattatgaattaacttttttgtcattatataatagtaatctctactgatcattttttatgtctgtgctatcagttgtaatgtctctttttcatctctgattttatt

SEQ ID NO: 572278 - DNA, 342 bp, Homo sapiens
cgacaaactcaccagccaattaaagctcttttcttataaagtacccagtctcaggtgtttaytcatagcaatgcaagaatggcctaatacagtattgttggaggaatttttgtcttagcgcacatgcattgggttgcaccattatttgtttttcttactatagactacagtaaaaaatatttgaaaatcattggcctaaagcaactaaagtctcttacagagtttacctcaaggagttgttagaaggttcacatgtaaatgtttacaatatgacaataactttttaatataaaaaatacttggtaagaaactcaaagatcagatagttgtagatatgcggca

SEQ ID NO: 572279 - DNA, 529 bp, Homo sapiens
acacaccacctgggtgccaccatgtttcccttgaggcaacatgcctggtttggctgcaggccccccatggagcttgctmttgtgtcaatgcccggagtggccagccagatcctgcactcactaacatacatgctttctcctacaaggggttgagcacagcaggctgagtaaatgaggtgccgctgccatgagtccggcaaacaagctgagaaaaatcctgcatcaacagggctcctgagccctctgcaaagctccttctcacagatttggccttccagagtcagtataccagtctcagccttcagtatgaatggactgaggttagtaaataattggattgagttgctggaaaattttggtctttaactggagataaagttatgaagaagagttgtgagttgaaaagtcatttttatgacccaatacatagtgcacagtagctctgtaataccagttgggattaaagctataaaacaaattattttgtccagacagccctgtctcttgttctcactcacataatagtcat

SEQ ID NO: 572280 - DNA, 529 bp, Homo sapiens
acacaccacctgggtgccaccatgtttcccttgaggcaacatgcctggtttggctgcaggccccccatggagcttgctcttgtgtcaatgcccggagtggccagccagatcctgcactcactaacayacatgctttctcctacaaggggttgagcacagcaggctgagtaaatgaggtgccgctgccatgagtccggcaaacaagctgagaaaaatcctgcatcaacagggctcctgagccctctgcaaagctccttctcacagatttggccttccagagtcagtataccagtctcagccttcagtatgaatggactgaggttagtaaataattggattgagttgctggaaaattttggtctttaactggagataaagttatgaagaagagttgtgagttgaaaagtcatttttatgacccaatacatagtgcacagtagctctgtaataccagttgggattaaagctataaaacaaattattttgtccagacagccctgtctcttgttctcactcacataatagtcat

SEQ ID NO: 572281 - DNA, 529 bp, Homo sapiens
acacaccacctgggtgccaccatgtttcccttgaggcaacatgcctggtttggctgcaggccccccatggagcttgctcttgtgtcaatgcccggagtggccagccagatcctgcactcactaacatacatgctttctcctacaaggggttgagcacagcaggctgagtaratgaggtgccgctgccatgagtccggcaaacaagctgagaaaaatcctgcatcaacagggctcctgagccctctgcaaagctccttctcacagatttggccttccagagtcagtataccagtctcagccttcagtatgaatggactgaggttagtaaataattggattgagttgctggaaaattttggtctttaactggagataaagttatgaagaagagttgtgagttgaaaagtcatttttatgacccaatacatagtgcacagtagctctgtaataccagttgggattaaagctataaaacaaattattttgtccagacagccctgtctcttgttctcactcacataatagtcat

SEQ ID NO: 572282 - DNA, 529 bp, Homo sapiens
acacaccacctgggtgccaccatgtttcccttgaggcaacatgcctggtttggctgcaggccccccatggagcttgctcttgtgtcaatgcccggagtggccagccagatcctgcactcactaacatacatgctttctcctacaaggggttgagcacagcaggctgagtaaatgaggtgccgctgccatgagtccggcaaacaagctgagaaaaatcctgcatcaacagggctcctgagccctctgcaaagctccttctcacagatttggccttccagagtcagtataccagtctcagccttcagtatgaatggactgrggttagtaaataattggattgagttgctggaaaattttggtctttaactggagataaagttatgaagaagagttgtgagttgaaaagtcatttttatgacccaatacatagtgcacagtagctctgtaataccagttgggattaaagctataaaacaaattattttgtccagacagccctgtctcttgttctcactcacataatagtcat

SEQ ID NO: 572283 - DNA, 623 bp, Homo sapiens
tgtgaattcaattggtgttcacaccaatgaatcagttcacaccttcctcgctttgacactgcttttgacattttaatctaaagttttcatttcctccttttcctctcccaccatctactttctcataaccaaagaccttctcataacaaaatcaccccaagtgacatttctcatggttaargctgagcctttttggaagatcagctcagcctctaaggacacctcatgaaaacgagatccacaaaactgcccatgtgtaaatgtgcactgaccacacccacatcacctggagtgaccctattatatattggaatcacaagggcaagaagacacagagctgcacctcacattctcccagaactcttcacttttcattgcccagttcacggagcaacatgggctatagccaaccaacaaataaactccacatagaactcaaaaggatctaaaaggagaagtacaacaaaaatgtattacatttttgttaacctacagcatcacttaaaagcatctttcaatttggttgtgtaaatataaccaaatctctgggaagagggggctggtcttatcttttaaaagtagacaccgacatatgaaataattaaggaattactttccttttg

SEQ ID NO: 572284 - DNA, 442 bp, Homo sapiens
gatggtggaggggagggctgtggaagagagtgtcacagatagacaagcttgcattttaattcatatcatatatgtagaaggagctgagacagaagctatggttcagctaaactgcagctgcctcayaataaaaggacaggaatttttacttcctggacactcatttctgagtgtaatccacaagcccttctgccccattgctggcattccaaatccccttcccctgctctatttttttccataatatttattcaccttctaacatcgtactcaatcttctcatttattaggtttttaatttgtctctcacccccccaccagaattgaaggcactgtgaagggagggggttttgtctgttgatacatccctagtgcttaattaaataagttccccgcacacagaaaatgctcattaaatttttgttgaatgaatgaaaccttc

SEQ ID NO: 572285 - DNA, 528 bp, Homo sapiens
gccaaaacctttcctaaatttaaatttaaatttattttttattttaattttaatttatttttattttaatttaatttcaagaaaggaaaaaataaaagagaaaagttggaactaaaccacaagacaatattgtcagagacttttaatgcccatttacagctgacagacttgtggtatttgagacttgctttaacaatatctgaaatgataatggcatagaactttatctgcaaatttgggaagactaattgaccctgacagtaattgtctcagtagaggagaaggaagtcaaaactaaaacttcagccacttaaccaccccttacagccaaatcccttgatgatcagtgtggaaaaataatgagacctgctgtttccaaaggaccatcttgctattgtcaacactccaaggtttctcatttgagactcaaatttatttcagttccttacatgctccrtgatatctgcctgtattaccataaattatttccactagaaatgttgaactgaaaaacaaagagcaccgggt

SEQ ID NO: 572286 - DNA, 427 bp, Homo sapiens
agaattcattcaaaatgaagcactcagaggaaaaagaatgaaattaataaagtttcattagctattggaataatacagagaaatcaaactatgtgttattcaagttccagtaggagagtaggacataaaaatactggaaggaataatgtacaaatatattccaaatttgattaaagcagtgcacctactcatccaaatgtgcaatgagaatcaggaaaaaagaaatacatacatatacagattcacccgcaggcacgtcataattgaattgtaaaaacaaaataaagagggaaacaaaccttaaaagcaactagaaaaaaagcataccttatgtaaaaaggaataaagataattaacacatatttttcattagaaaccgtggaaagcaaaacacaatggracatctttaaagccctaaaaagaaaaa

SEQ ID NO: 572287 - DNA, 599 bp, Homo sapiens
  misc_feature 1, 2, 3, 4, 5, 6, 7, 8, 9, 10, 11, 12, 13, 14, 15, 16, 17,18, 19, 20, 21, 22, 23: n = A,T,C or G
nnnnnnnnnnnnnnnnnnnnnnnctaccaacattctgttcatgaccagttaaataatctctaaaactgtggatttttttctatggttctcctgagctctctcaagaattactttttatgctccattcatggcaatctaggctttttctaccatgcagttcacaactgttccagcstctaaccactacccagttccaaagctgcttctacatttttcaggtatttgttacagcaacagtaacaaacagtaacaacagtccacttctctggtaccaatttctgttttagtccatttatgcttctataaaaataccacaaactggttaatttataaacagtagaaattgatttatcatgattctggaagctgggaaatccaagatcaaggcactggcaggattgagggctgctttctgcttccaagaaggggcttgttactgtgtactcccaaggtgagggatgctatttcaccacaagggagttggacagaatagatgaaaaggggagaaatctgttcatcaggcccttttataagggcacctaattccattcatgaagatggaccttctttaggccatatattttctgtatttgttcatt

SEQ ID NO: 572288 - DNA, 585 bp, Homo sapiens
gataaacagttgggttgtttccagtatgtggttatcattaataaagctgctatggacatttttgtacaagtctttttgtagacatatgtttccatttttcttgggtaaatacctaggagtggaattgttgggtggtaaagtgaattttaatttttcaagaaactgccaaattgttttytaaagtggctatactattttataccccctccaacaatgtattagagtttaatttttccacattccgccgacatttggtattatcagtcctcttaactttagtcatttagggatgtgtagtaatctgttgttttggttttacttacattcctgatgattagcaatctcgagcatattttcacatgctttagtggatatttatgtatcttctttttgtgtctgttcaaatattttgtccttttttattggtttatttatcttcctattattgctttgtatgagttcttttcatagtctggaaacaagttttttagtcacatgtaggtactgtgaactatacctttatagaactacactgaattatggctttccttttttttttttttttttttttttgagacggaggag

SEQ ID NO: 572289 - DNA, 624 bp, Homo sapiens
tattgtatttatacagcatttytatttttttaatgggcatggcttaaattattaattgttttcatgccaacataaagaacagggaggcccacctctgaaaaggagctgaagtttccaagcaggtgaaatacccatgggccgggctgggggaccttgagaagccaactctgttaggctagaatcttgcagtaaaaatttaccacttactcaaccttgaaatagaaactctgaactcagaaatgtaacttctacttcctgccactcaaatttcatcagcatcctctaatctaattgttcaccaagagcagacagtccctgaaggaatctgataactacatatcaggtaagtggcttgaatgtgggggttagtgtgaactgttccaaagattctacactgatataatatcagaaaacttttaacaaggaaacaatccagcttctctctctcccaggaaacaagagactgcatccatgctgggggagggctttgctataagagcaacccaaggtcttttgctaagtgatttgaaacagatgtctgcatttttagggaaggcacaaagcccagtggaggggcgaggtggtctccagaatcgggggactttctttacaattgccagtcca

SEQ ID NO: 572290 - DNA, 549 bp, Homo sapiens
gataggcatggctgctcaatgctgtgtgcatgctttgaaccacgggctcagcctccagccccaagttctccctgcactgcatggagcagcggtggagcggcasgctgtgtgcatggatatagagccatctcaagacagatgccgctacctgcaggaaaaggcaaggggccatgcaaagctgctgttctcccatttgcgttaaatgtaaatttcaaatacatgtatgtttttacacagattatctctggaaggacattccaacaaaaatacctgtggtggatactccctgggagcgagactaaattttcattccattactttgtgtatcttttgaattttgtgccgtatgcacaaattaacttttcaaaattagatcatttttagagctctactctgcagtcagactctgtgggttcacatgaatggccttagcctctctgtacctcagtttcctcatctataaaaaaataaaggtgtgttaggagaatgcatgaggctgggcatggcagcttatgcctgtaatcccagcactgtgggagactgaggcgg

SEQ ID NO: 572291 - DNA, 549 bp, Homo sapiens
gataggcatggctgctcaatgctgtgtgcatgctttgaaccacgggctcagcctccagccccaagttctccctgcactgcatggagcagcggtggagcggcacsctgtgtgcatggatatagagccatctcaagacagatgccgctacctgcaggaaaaggcaaggggccatgcaaagctgctgttctcccatttgcgttaaatgtaaatttcaaatacatgtatgtttttacacagattatctctggaaggacattccaacaaaaatacctgtggtggatactccctgggagcgagactaaattttcattccattactttgtgtatcttttgaattttgtgccgtatgcacaaattaacttttcaaaattagatcatttttagagctctactctgcagtcagactctgtgggttcacatgaatggccttagcctctctgtacctcagtttcctcatctataaaaaaataaaggtgtgttaggagaatgcatgaggctgggcatggcagcttatgcctgtaatcccagcactgtgggagactgaggcgg

SEQ ID NO: 572292 - DNA, 506 bp, Homo sapiens
ttgcagccgggcatggtggctcccgcctgtaatcccagcactttgggaggctgaggtgggtggatcacctgaggtaaggagttcaagaccagcctagccaacatggtgaaacaccgtctctactaaaaatacaaaaaaattagctgtggtggtgggcacctgtaatcctagctactcgggaggctgaggcaggagaattacttgaaccctgggcgcagatgttgcagtgagctgagatcgcaccattgcactctggcctgggcaacaagagtgaaactccatctcaataaataaataaataaawaataaaataaatcaataaaagtgatttgcattctcttttctaagaactctgttcatttcctttgaccatttaaaaaatcggattgttgggctttatttcttattgacttagagaagctatgtattatagaaattaacctttatgtgtaatataaagatacttttgtcatttgtctttctattttacttctgttcatgtattt

SEQ ID NO: 572293 - DNA, 601 bp, Homo sapiens
ttgtgccaaatagcaggatgccattcttttttctggctgaataatattccattctttctttatatatagacacacacatatacatatacacacacatatatatacacacatacatctatataatatgtatattatatgttatatatatgcatacacacatatatacatattccacattttctttatccatttgtccatctacagacatgtaygttgtatccatattttgggtattgtgaaaaataccactataaatatgggattgcagatatctttatgaggtagtgatttcattccctttgggtataggctcaaaagagggattgtgggatcatatatagttctatttttaatttctttaggaacctccatactgttttccataatgactgcaacaccctacattttcaccaacaatgtacttttctccacatcattgccaacatctattatctcttgacttttcaataatagtcatcctaatggatatgaagtgatatctcatagtggttttggtttgcatctcctggatgattattgatgttgagcacattttcatatacctactgtccatttttatattttctttggataaatattt

SEQ ID NO: 572294 - DNA, 448 bp, Homo sapiens
ttttgtccaacttgaattattgaaatatatcaatttctttctttctctcttccttccttcctttctctccctctttcttcctttcttcccttcctttcccttcccttccctcccctcccctccccttcccttccttttctctctctccttctctctctctctttttctttctttttctttcctcgctctattgcccagactagggtgcaggggtgtgatctcggctcacygcaacctccgcctcggctaactgcaacttctgcctcccgagttcaagtgattctcctgcctcagacccatgaggagctggaattacagacatgtgccaccatgctcagcttatttatttatttatttttgagacagagtctccctctcttgcccactgcgctctggagtgcagtggcatgatctcggctcacagcaacctccgcctcctgggttcaag

SEQ ID NO: 572295 - DNA, 371 bp, Homo sapiens
gctgttctggccataaacagcagtctgagatcatgggggttgtgggtgcacaggatttaatctccgccaggttttcttcccataaacatcctttcagctgtcctggcccaagacatctttccctttctgaggctgacacctggttctcaatggagtggcctgctgcagtgctctcaatggacccagctacctggtctgacccttcatgcttggaaaatttcagctcattcatgcttgagatatttggacccaagacagtctctmacttggcagttaaatataatttgacggaacagtgaagcctggcatagtagaaagaccatggctttggggagtcagacaatctaagtttgaatcccagtccctctgct

SEQ ID NO: 572296 - DNA, 641 bp, Homo sapiens
tatgatccaatattacattatttattttgttgctcacatagtttgtgaccttcagtgatctttcatttggcttctatgttcattttcttactttctaacctaaataatgaaaattaagttattttttaaaattgtkttttttttcccacaaaataaaaagtggagaattagcacagatacctagcctagtgtgataaaccacttactgatatcaaaagggcctagattccttccatggctgtgctcagggtcaatttcatcctaaggacaattttcttcctcatcacaatatggcttccagtggcaacaggagctttcacttctttatttctctccaataagaatattaaaataatcctcccctgagccaatagttaagccttccctctgtaactgaagagagataggtggaaatagatgttggatttgcaactaacagtgtctgtttcattccacaattgaactaaactcaacagttaagtctcatctgtgtgagcatttaatccaagacaaaatgtattgacaataagttcaaataaatctatgaagacttacatggaattctatatctgtgagtaaagggacactaaacagagacactaaactaagaatagctaggagatcccagaaaagaaacatca

SEQ ID NO: 572297 - DNA, 563 bp, Homo sapiens
tgtgtaaacattcttctagcagccaaatttttgcaaatggagaaccaatggtaaggaaagacagaataaaacaactacttcataagccaagttggacatagatttaagaaagtataattctcagtagtatctatgaataccaagatggcttctgcatacagaaattggtctgtatcattctttgaggatgagaaatctaaaaccaygattctaatgattttaaattttttaataactggaattaagttgccagttttgttattcggtcacatgaatatttttttaaataatcagatctaccatctgttatcatcactgtttcataatcaaaacagtgacttatcaaaaagaattttaaaaaaacattgaaagtcctttatatgtttattggccacttgtatgtcttcttcactaattatcagagaaagccaaatcaaaaccacaatgagataccatctcacaccagccaaaatggctgttattaaaaagtcaaaaacaaaaaacaaaaaacaaaaaaacagatgctggagttgctttggagaaaagggaaggcttattcactt

SEQ ID NO: 572298 - DNA, 563 bp, Homo sapiens
tgtgtaaacattcttctagcagccaaatttttgcaaatggagaaccaatggtaaggaaagacagaataaaacaactacttcataagccaagttggacatagatttaagaaagtataattctcagtagtatctatgaataccaagatggcttctgcatacagaaattggtctgtatcattctttgaggatgagaaatctaaaaccatgattctaatgattttaaattttttaataactggaattaagttgccagttttgttattcggtcacatgaatatttttttaaataatcagatctacmatctgttatcatcactgtttcataatcaaaacagtgacttatcaaaaagaattttaaaaaaacattgaaagtcctttatatgtttattggccacttgtatgtcttcttcactaattatcagagaaagccaaatcaaaaccacaatgagataccatctcacaccagccaaaatggctgttattaaaaagtcaaaaacaaaaaacaaaaaacaaaaaaacagatgctggagttgctttggagaaaagggaaggcttattcactt

SEQ ID NO: 572299 - DNA, 594 bp, Homo sapiens
ttgtaaccaatactcaaacgaagatataaagaaaattaacttcttatgattttttccatttacactgatgtgcctgttcatattcctttctgcatcaggtcacagcctaattaatcaaaagataaattgccacaagagaggtgatggttgtctataagacactaaatattactgtagggggcttttgctctgtttcatttttttttttttttcctcccagaaagcgkcgtggagcttttaacagcaagcaacttttgtatttggagaagtatcgtcctaaaatgcggctgcgtttcaaagattccaacggtcatagaaacaactgttgcattcaataaaattggggtgcctaatgctactggaagtggaacttgagatagggcctaatttgttatacatattagccaacatgttggcttagtaagtctaatgaagcttccataggagtattgaaaggcagttttaccaggcctcaagctagacagatttggcaacctctgtatttgggttacagtcaacctatttggatacttggcaaaagattcttgctgtcagcatataaaatgtgcttgtcatttgtatcaattgaccttt

SEQ ID NO: 572300 - DNA, 594 bp, Homo sapiens
ttgtaaccaatactcaaacgaagatataaagaaaattaacttcttatgattttttccatttacactgatgtgcctgttcatattcctttctgcatcaggtcacagcctaattaatcaaaagataaattgccacaagagaggtgatggttgtctataagacactaaatattactgtagggggcttttgctctgtttcatttttttttttttttcctcccagaaagcgtcgtggagcttttaacagcaagcaacttytgtatttggagaagtatcgtcctaaaatgcggctgcgtttcaaagattccaacggtcatagaaacaactgttgcattcaataaaattggggtgcctaatgctactggaagtggaacttgagatagggcctaatttgttatacatattagccaacatgttggcttagtaagtctaatgaagcttccataggagtattgaaaggcagttttaccaggcctcaagctagacagatttggcaacctctgtatttgggttacagtcaacctatttggatacttggcaaaagattcttgctgtcagcatataaaatgtgcttgtcatttgtatcaattgaccttt

SEQ ID NO: 572301 - DNA, 582 bp, Homo sapiens
ctgaactccttgacactgtgtggtgaaatatgtattggtaatacacaaacctaaatgttgaccaaaaaatctcaytatctcactaaaaaacagaaaagttattatctccagaaaaaacatatgtaaaaaggattttatgagaaatttaaatggatcttaagaaggcaaaatgtatcaaaaaagcaaacaccatcccaccatgttaaggaagataaacatcatctatttcagtaactgaaacacagaattgtatgtataattttcattcaccagtttttccaagtaggccttatactatgaaaaaaatctaagctcttgattttgcaatactccaaattgccacttgctgcctcccaacttttataagtaatacattacataagtcaaagactgtcaactttcctagtggattccaatactcaataaaatttaaattttaataacatagtttgaaatgattaaagacaaattcctttcgatttttctatcttgaaatgtgcatctgaccaaaccaattttttacctacatttacatagaccacttctcagaggtgacttttctgattatgcaacatataagta

SEQ ID NO: 572302 - DNA, 621 bp, Homo sapiens
tcgcactgtcacccaggctggagtgcaatcggtgggatctcggatctctgcaacctccacctcccaggttcaagtgattctcctgcctcagcctcccaagatagctcgggattacacggtgcccaccaccacgcccggctaattttttgtgtttttagcagagacgaggtttcactgtgttggccaggctggtctcgaactcctgacctcgtgatccaccctccttggcctcccaaagtgctgggattacaggcatgagccactgtgcccagctcttcttgttttgttgatgacacaatttccttattcattctgttcacaaacaggtttctatctctgattgctaacccagttattttataaatggttaacctagtagaaggattttaagagaamgggcatacatgaaagttatcaaaaataatttgaacaagcttctcttcattttcttcccaaaataagaaaaatggtcataaaaacagcttgagctaccactgaacatatattgttgctctggtaaagcatgtgtaatttggttagggagtctggtttgcccacaaatatctcactgaacatctcagagaagttgatttccctcaaaacagagcctgagacaaaagt

SEQ ID NO: 572303 - DNA, 576 bp, Homo sapiens
acatgtctacaaagtgtttgccagaaaaaagttcattagataaatttaatatttttattgactttctgctcataggggttaattcttccaattttttttttccatatttagtttactgattactgtagggaccaatgtttcagtgatgacaagcatttttcatatcaaaattgacttttgtrtctacattgtttactgtcttccatggtcttaatctctgccaggctcagttttcttgggtcaatgttttgcaagatccaaattttatcacttttccttctttgataattttttagttaaatacaaatacactgtcagttttagtcattatcaattactctgtcttgttttcctaccaaatttaattttcccaagttaatttggagttttcaatgttactgatacaatctgatcttccaataagtcctgtgtgcagttatagctgttgccagtattattatgctggttctttcttctactaacctttctatgaattgggtataagataaacagttcgtgtttacatctggaagcaaaaagcaaagaccattagtggacaaatgtgaatctgggcac

SEQ ID NO: 572304 - DNA, 604 bp, Homo sapiens
aagcttgttgactttttaaggatcagaaatctttgctttgtaaatgtgacagtcttatgattcttacattttctcttaatctccattttgttttatcttaaatttattaaaacttctctgagaaggtaagttttcctcagcccttctaagggattttccagctagtggtctccgtcatcaagttctactctgttgaattccttcggggttggattttgtttataacaataattttactttttctgaacgcccttttaaaacgtcacactgagatccaccagaagagtaagaataacattaggcttgtttttataattcatcccagacatcccaagtgagaattaaaaaaaaaaattactcatttstattttcctttctcaaaaacacattacaaaaagattgtaaaacaaagtcttgagggattgattagtcaagacagggggtgaaactcttaagaatccagtggaatcaggacaacccaaacttcctttgtagaagagcatttgctattaagagtgcttaaaatatcagaagactagagagaggaaagaacagatcttcaccacatgcctgtgacttattcttccaccctgcactaatctta

SEQ ID NO: 572305 - DNA, 552 bp, Homo sapiens
ttgtttttataattcatcccagacatcccaagtgagaattaaaaaaaaaaattactcatttctattttcctttctcaaaaacacattacaaaaagattgtaaaacaaagtcttgagggattgattagtcaagacagggggtgaaactcttaagaatccagtggaatcaggacaacccaaacttcctttgtagaagagcatttgctattaagagtgcttaaaatatcagaagactagagagaggaaagaacagatcttcaccacatgcctgtgacttattcttccaccctgcactaatcttacaatgtgggctgcggttggtctaaagcttaaatcaacaagtactgtaaaggttttagaacagtgcagaccacacagtaaggtgctcagcaggtactggctgaatactgtaatagtccctgtagataaaagccacaaaccctgtccctaagtagctccttttggttggagtgactgacaagcaacaattacttcacagygcttattaagggctgagataggggttagctcaagtgtctgtggaagcagacca

SEQ ID NO: 572306 - DNA, 516 bp, Homo sapiens
atatttcctcttcttacattcaattgcctattcaatcattccatattttagtttgccttatatttaactcatcagttttttttatttacaacagtattagttgtttatacaagttcctactttatacgattttttgtttaggcagcttttcagtaacatttctattacaagttattcatgaagcrtcccaggagaaagttgagaagcttcaaagagccacatgcaagggacaggtgacagaagggcaaagggggaatagcaatcactccgtaaaccaccatttcttataaaacctttattgcttagtggtacttctgattgcttttctttcgcctcgctgacaaaagaaaccctttactctatgtgaagattatccagcctgtagaaattactatctgttgcaggactgttccaggatccctctaatttcctgcttccatctggacaaactttgtcctaattttcccctggcttagcttcattgtttccatactttcctctttttcacatttattc

SEQ ID NO: 572307 - DNA, 518 bp, Homo sapiens
caacattggagccagtcatatagaaatcaaatggctggctttaaccattaaaaatgcamccaaatgggcttgctgatgtgctctgctccctcctttacagtcttgactatgggaatggcattttaaaagcagatgcactcatctaggattgtggcattattctggtcctaaaaagaggagaagaaaagagatcaaattcttagggttcctaagaattaattctctcctaactacgaaatgtagaccaatagctttcaccttcaattgatgtgaaccatttgtgagtaaggctcgtgagaccaggactattactctgatagttatctctctacatgctaatgcaggattgaagttcatgtctacaaaccagtcagtccatgtctacatgccacacatggtctaaggggcacaatatgcatttcttttggaagtcactttgccaccatggcctttccatgattacttttaaactattagaaccctgcccgccccccgccccctgccccagtttggaattc

SEQ ID NO: 572308 - DNA, 518 bp, Homo sapiens
caacattggagccagtcatatagaaatcaaatggctggctttaaccattaaaaatgcaaccaaatgggcttgctgatgtgctctgctccctccttyacagtcttgactatgggaatggcattttaaaagcagatgcactcatctaggattgtggcattattctggtcctaaaaagaggagaagaaaagagatcaaattcttagggttcctaagaattaattctctcctaactacgaaatgtagaccaatagctttcaccttcaattgatgtgaaccatttgtgagtaaggctcgtgagaccaggactattactctgatagttatctctctacatgctaatgcaggattgaagttcatgtctacaaaccagtcagtccatgtctacatgccacacatggtctaaggggcacaatatgcatttcttttggaagtcactttgccaccatggcctttccatgattacttttaaactattagaaccctgcccgccccccgccccctgccccagtttggaattc

SEQ ID NO: 572309 - DNA, 518 bp, Homo sapiens
caacattggagccagtcatatagaaatcaaatggctggctttaaccattaaaaatgcaaccaaatgggcttgctgatgtgctctgctccctcctttacagtcttgactatgggaatggcattttaaaagcagatgcactcatctaggattgtggcattattctggtcctaaaaagaggagaagaaaagagatcaaattcttagggttcctaagaattaattctctcctaactacgaaatgtagaccaatagctttcaccttcaattgatgtgaaccatttgtgagtaaggctcgtgagaccaggactattactctgatagttatctctctacatgctaatgcaggattgaagttcatgtctacaaaccagtcagtccatgtctacatgccacacatggtctaaggggcacaatatgcatttcttttggaagtcactttgccaccatggcctttccatgattacttttaaactattagaaccctgcccgcccsccgccccctgccccagtttggaattc

SEQ ID NO: 572310 - DNA, 561 bp, Homo sapiens
gaatccctagaacagccctagaaggtagttcttaccacacagaagagggactgaggtttagcgatcttatagaactctccctttgtcacacagctggtggattatagagcctggactttgacaccctctaatgaccctaaagcctgttcatgggactgcgtcattgtgtgtccatgtggatgatggcttctagataaaatgagcatcacaattcgttttctcaatttttctgttaatttctaggcctcataytttagaatatatatgctcgatcatgactagtagaatgtgaaggaacagttttaaggacaagagttgtagaaattcatacaattaaagattagtccagttagaactccttgtatgtacataaataaaggtaattttaaagactcagttcttcctcatcccccaggagattttccccacagaaaggacccttagaggttccatgtttctacatttgcagaattcttcacttactctggctttctttggaagggatctgacatagccacatatatttagtattttacacaggatcctgctttgacagggaag

SEQ ID NO: 572311 - DNA, 580 bp, Homo sapiens
tcttcatttcttggtacttggtcaactcatcaaagaaactwtttaatatagttggcttgatttgtactttgttttttaggtacaaatcccaaatcgtgttagtactatattaggtattttttgctaaatttctacagacataagctccccaaggacaaggatatgtttcatgtatctgtgtctctgctcagcatacagcatggaccccagaggagccactgacacagaaccaattgttggcttctgaactagatatacaggcacagagcccaaaagtgaagaaattgcctaccaagcctataggtatgcccactgaccagcacaagctacaccaagctccacccatcatggaattttgcattccaggattttcttcagatataacagtcctaaaagtaacagcaaaacctcacatatctatacttacattgcagtttaaagagtacctctatttcacatgttagtcaggaaaatagaaaccattattcgttctacaaacagaagaaagttaatacagaaaaatcagttacatcagtgagggaaaagttagaaatacaatcagggttattgagggtgaacc

SEQ ID NO: 572312 - DNA, 559 bp, Homo sapiens
aaatcaccatagcatttagccatatgccccttcataccaatgggatttgtcctagaagtttgagaggaaaatttgttgccaaagattctcataaatcacaatcatgtgggygcaaaaatgcctagcatctcacatcaaaatatcttttctttttgaaacaagagatgtattccttggcctatttcatattaaatagggcaaataagataaaatctttctcccacagggtgaaaaaagaggaaatttaggtgatattgggtttatatcaaagtcacaggttaagaggccagtgactccagaaagattacctgttgagttcataaagatgtctccctgagataaaatactgtgtcagtggctgtgtgttactaacacactggatgcttgagttcatgaagcatgtgtttcccagattgcttagacctgtggctcccttttctgtgggaactggaacaaacaatatgagaaccaaagcttagctgtagtaatatgccatggcacaaacagttacttatattcaatgaaaaggttttttataactctcataatcagctaaatg

SEQ ID NO: 572313 - DNA, 559 bp, Homo sapiens
aaatcaccatagcatttagccatatgccccttcataccaatgggatttgtcctagaagtttgagaggaaaatttgttgccaaagattctcataaatcacaatcatgtgggcgcaaaaatgcctagcatctcacatcaaaatatcttttctttttgaaacaagagatgtattccttggcctatttcatattaaatagggcaaataagataaaatctttctcccacagggtraaaaaagaggaaatttaggtgatattgggtttatatcaaagtcacaggttaagaggccagtgactccagaaagattacctgttgagttcataaagatgtctccctgagataaaatactgtgtcagtggctgtgtgttactaacacactggatgcttgagttcatgaagcatgtgtttcccagattgcttagacctgtggctcccttttctgtgggaactggaacaaacaatatgagaaccaaagcttagctgtagtaatatgccatggcacaaacagttacttatattcaatgaaaaggttttttataactctcataatcagctaaatg

SEQ ID NO: 572314 - DNA, 559 bp, Homo sapiens
aaatcaccatagcatttagccatatgccccttcataccaatgggatttgtcctagaagtttgagaggaaaatttgttgccaaagattctcataaatcacaatcatgtgggcgcaaaaatgcctagcatctcacatcaaaatatcttttctttttgaaacaagagatgtattccttggcctatttcatattaaatagggcaaataagataaaatctttctcccacagggtgaaaaaagaggaaatttaggtgatattgggtttatatcaaagtcacaggttaagaggccagtgactccagaaagattacctgttgagttcataaagatgtctccctgagataaaatactgtgtcagtggctgtgtgttactaacacactggatgcttgagttcatgaagcatgtgtttcccagrttgcttagacctgtggctcccttttctgtgggaactggaacaaacaatatgagaaccaaagcttagctgtagtaatatgccatggcacaaacagttacttatattcaatgaaaaggttttttataactctcataatcagctaaatg

SEQ ID NO: 572315 - DNA, 608 bp, Homo sapiens
ggttcaccttttgtttttaggtccacatttgctgaaatgtaactcttatctcatgcactgggagtgatgaacttcactaggaaatcatcgttctttctggtaagtcaccacagcacaaaactgcaaccattgtttagtaacaactagactctgatagatgctgtggagaatttgactagaagtaggaggatcatttactacatggcaaaaaaacaaatcagtctatcttagaaaggttaaaatttacatggataataaagaaaggaaggtagaagaagagtgataaattagtgagaaaagaacagtargtgtaattatagcaatatgcttaaatgaaagagaaaaatatggcagaagcatttattgatttgagattgtaatttttttaaataaaaaagcttagtctggattccaacttgtatataaaattaggagcaaaggtatgattaatatgttcatggaatataattatcaagaaaccacagacatttgtgtatggaggacacagaaaggtgagaacttgctaacaggaatcccattaaagaagcttcagaatttgaagatcagcaaagagaaggaagagatgagaatgaaaggctttatgaagg

SEQ ID NO: 572316 - DNA, 356 bp, Homo sapiens
aatgcattttattacatatgcttttatatataatatatatataaattccaaattaataacatacattacatttaataatacaagcagacttctatttataagaaactgtagatactattatgttattttatgacctcttatatataagcacttatatatgcttatatattagtgaatgatagcaatgataaaagtgacgagggaagaattatgattactttattattttaaggtactcacacactacctgtgaagtggtataatgttgtttgaacatggatttkaattagttataaatgtatcttggaaactctagtgcaaccactgagaaatgtaaaaaagaagcataactgata

SEQ ID NO: 572317 - DNA, 326 bp, Homo sapiens
acaaagaaaaagggtaacaaatataaaactaacaaatatgataggtattaattcaactaaatcattagttactttaaacatcaatgttctaaatatatcagttaaaaggcaaagattgtaaaaatggatttaaaaaaaccttcccaattgtatgttgcctacaagaaacatgcattaactataggagcacatactgaaagatatactatgctgatgctaatttttaaaatgggaacagctatattaaytttaaacagactagacttcagagcaaagaaagttatcagggctaaagatgggtattacataatgataaaggggtcagt

SEQ ID NO: 572318 - DNA, 479 bp, Homo sapiens
aaacggcatggtactggtataaaaacaggcatatagaccaatggaacagaatagagaacccagaaataaacccaaatacttacagycaactgatctttgacaaagcaaacaaaaacataaaatagggaaaggaaccctattcaacaaatggttgccaggataattgcaagccacatgtagaagaatgaaactgaatcctcacctctcaccttataaaaaaatcaaattaagatggatcaaagatttaaatctaagacttgaaaccataaaaattctagaagataacattggaaaaacccttctagacattgacttaagaaaacacttcatgaccaggaacccaaaaccaaacacaacaaaaacaaagatgaatagatgggaattgattaaactaaaaagcttctgcacagcagaagaaatgatcagcagagtaaacaggcaacccacagagtgggagaaaatattcacaacctgtgcat

SEQ ID NO: 572319 - DNA, 479 bp, Homo sapiens
aaacggcatggtactggtataaaaacaggcatatagaccaatggaacagaatagagaacccagaaataaacccaaatacttacagccaactgatctttgacaaagcaaacaaaaacataaaatagggaaaggaaccctattcaacaaatggttgccaggataattgcaagccacatgyagaagaatgaaactgaatcctcacctctcaccttataaaaaaatcaaattaagatggatcaaagatttaaatctaagacttgaaaccataaaaattctagaagataacattggaaaaacccttctagacattgacttaagaaaacacttcatgaccaggaacccaaaaccaaacacaacaaaaacaaagatgaatagatgggaattgattaaactaaaaagcttctgcacagcagaagaaatgatcagcagagtaaacaggcaacccacagagtgggagaaaatattcacaacctgtgcat

SEQ ID NO: 572320 - DNA, 479 bp, Homo sapiens
aaacggcatggtactggtataaaaacaggcatatagaccaatggaacagaatagagaacccagaaataaacccaaatacttacagccaactgatctttgacaaagcaaacaaaaacataaaatagggaaaggaaccctattcaacaaatggttgccaggataattgcaagccacatgtagaagaatgaaactgaatcctcacctctcaccttataaaaaaatcaaattaagatggatcaaagatttaaatctaagacttgaaaccataaaaattctagaagataacattggaaaaacccttctagacattgacttaagaaaacacttcatgaccaggaacccaaaascaaacacaacaaaaacaaagatgaatagatgggaattgattaaactaaaaagcttctgcacagcagaagaaatgatcagcagagtaaacaggcaacccacagagtgggagaaaatattcacaacctgtgcat

SEQ ID NO: 572321 - DNA, 558 bp, Homo sapiens
ttacctaacttcataatttgttggtatttttattaggtttgaatgaattataagtcaacttatggagaatttatgtccttatagtgttgagtcattttatccaaaatacagggtattttcctaatttttaaagtcttctttagagtcctttgtgagtgttaaaattttcctttcacaaactttgtacatttttattaaatttatttctaagtatttagtgttcttattgcttattcttattatagtgttcttattcttattcttattatacatggacttactcttaagttctctaaatgttcgttgttaaagagtatataaaggctactaatttgttaatgttaattcagcattcagctaattcactagaatatttgatttcttgagatggttttatcattgaccctctggaattttcaaggtttattatcttaacaactgcaaatagaagtagttttacttcttctttaccaatttttatgcttttcaagaatttatctcatctaattgggttggctctcatcgaagaactgtrgaataatatgggatcgtattaat

SEQ ID NO: 572322 - DNA, 552 bp, Homo sapiens
acatttctgaatgaaggggaaaagtaagctgrggcaagacaacgtttctcatccctgattgaaatgttcctatttaccccctaacttataccttgggatgttatgttgcttgtaaagaattgtgcagagacagatggaaatattaaaatatttatcctaaataaatgtttgagttaaacggtaatatcctgtgctgctctagattcaattctattaataagctattttgagattctgacctcagtttcttgtcttcttttaagttatctctgggccctaaagagacacagctatgaaactggagaatgactgcagaataaccaaaagaagttatccaacagaatttataagatataggatttcgtttcaagagagaaaacaggagtaaaaatataaattttgggattgtccacattagagagaaaaatcatatcttcatatgaagaaatatagaatttcttcaaaaaagaaaatataagggaaggagattggaatattaaagaaaatctcagagaacatccacaactgaattccaaaaacagaggaagaatt

SEQ ID NO: 572323 - DNA, 601 bp, Homo sapiens
actcagcttttcaaacaaatgtgactgcattttttcctcrtaacacttcttcatattacacagaactaatactccaaggtatacagtgtggaaaacacacactactatacaggttaatgtgtaacttaatatgtaaatacaccaatagtaaaatgggacaattgaacttttgcagagctgttccgtgaaatctatttgcattatatccattactttaatgaggctggagactaatgggaactaatgagacactctgaggtcaatgagaagacacccagtagcctcacctattaagtactgaattgtctttccattctaaaaatgtgtacactcttaggagactcttatccatgtttaatgtatgataaaagaaacaaaggtggatgaaattgcattggaaatcaattctattcgtaaaagaaagcaagtatcaggatacttaggcaatacggaaaattgtaccaattttccaattcaaagggagagacataatctatgactttctttatttggatcctgctgagtctgcaacatttgtaaaagttcactgtgaattccctttatgacccagattcaaagtcagtgctccttgttaagccat

SEQ ID NO: 572324 - DNA, 475 bp, Homo sapiens
attggttcacccaacttgatttttttctgtaaaactgggttctaaataaagttctcagtacataaatgaacacagagtgctgtgcaggtgggcttgcccttggtaacagacacagctgtgcctatcaaacacaaaatatggtatttaattttggaaaattgctaacrgcaggcagaactgtacaaaggaaagttaccttcaactgtcatttaggaagaaacaaggatatcaggaacagtaccatttttcctaatgtttccaggcttcagttgcattcggtgcctttccagaacaactgaacaatgaaatggatagtaatctgccaaatgcatacagctgtatgcctgtttgcctggggtttatattagggcctggggaaacaaagttaaggaagtaaggctgcagggtagcatcagtccatccactatagtccgattcagattcagatggtcagattggagtctaaggtggaatt

SEQ ID NO: 572325 - DNA, 475 bp, Homo sapiens
attggttcacccaacttgatttttttctgtaaaactgggttctaaataaagttctcagtacataaatgaacacagagtgctgtgcaggtgggcttgcccttggtaacagacacagctgtgcctatcaaacacaaaatatggtatttaattttggaaaattgctaacggcaggcagaactgtacaaaggaaagttaccttcaactgtcatttaggaagaaacaaggatatcaggaacagtaccatttttcctaatgtttccaggctwcagttgcattcggtgcctttccagaacaactgaacaatgaaatggatagtaatctgccaaatgcatacagctgtatgcctgtttgcctggggtttatattagggcctggggaaacaaagttaaggaagtaaggctgcagggtagcatcagtccatccactatagtccgattcagattcagatggtcagattggagtctaaggtggaatt

SEQ ID NO: 572326 - DNA, 608 bp, Homo sapiens
ggttcaccttttgtttttaggtccacatttgctgaaatgtaactcttayctcatgcactgggagtgatgaacttcactaggaaatcatcgttctttctggtaagtcaccacagcacaaaactgcaaccattgtttagtaacaactagactctgatagatgctgtggagaatttgactagaagtaggaggatcatttactacatggcaaaaaaacaaatcagtctatcttagaaaggttaaaatttacatggataataaagaaaggaaggtagaagaagagtgataaattagtgagaaaagaacagtaggtgtaattatagcaatatgcttaaatgaaagagaaaaatatggcagaagcatttattgatttgagattgtaatttttttaaataaaaaagcttagtctggattccaacttgtatataaaattaggagcaaaggtatgattaatatgttcatggaatataattatcaagaaaccacagacatttgtgtatggaggacacagaaaggtgagaacttgctaacaggaatcccattaaagaagcttcagaatttgaagatcagcaaagagaaggaagagatgagaatgaaaggctttatgaagg

SEQ ID NO: 572327 - DNA, 601 bp, Homo sapiens
acatgtttctaaaaatttccaatccaaattgatcatctcaaaatagtatggcacttaggtcaatcaatttcttgggaaaagaagctaactagattataaaatgggatccctcctcaaaaggcagctcattcatgataactctctaaatggttgtatgaaaagataaaaataattaagtttcatcctggaccttttgatgctaacattaaaaggacagcaytgtcttctcacaaaaatcccttatttttcttcttaccaatagaaatccatgatgagtgagcttgtctcattgtggcaattcctataataacagataacaactagtaacaaatgtctctgagtcaaatctctcttctgaccagccacactgaatgagataatttgtcatttcaatttaagtgtttgtgtgatgatgagaatactgaaaatgtgacttttaaagcacttgatgatactttgaattctttagtttttgtagttttggtccaaatttgcttgctttatttcctcataggtaatgaaaatataaatccttagcctaacacttttgcaaattatttcaaaatgagaataaatgaagtttaaattcattgtgtcttac

SEQ ID NO: 572328 - DNA, 601 bp, Homo sapiens
acatgtttctaaaaatttccaatccaaattgatcatctcaaaatagtatggcacttaggtcaatcaatttcttgggaaaagaagctaactagattataaaatgggatccctcctcaaaaggcagctcattcatgataactctctaaatggttgtatgaaaagataaaaataattaagtttcatcctggaccttttgatgctaacattaaaaggacagcactgtcttctcacaaaaatcccttatttttcttcttaccaatagaaatccatgatgagtgagcttgtctcattgtggcaattcctataataacagataacaactagtaacaaatgtctctgagtcaaatctctcttctgaccagccayactgaatgagataatttgtcatttcaatttaagtgtttgtgtgatgatgagaatactgaaaatgtgacttttaaagcacttgatgatactttgaattctttagtttttgtagttttggtccaaatttgcttgctttatttcctcataggtaatgaaaatataaatccttagcctaacacttttgcaaattatttcaaaatgagaataaatgaagtttaaattcattgtgtcttac

SEQ ID NO: 572329 - DNA, 601 bp, Homo sapiens
acatgtttctaaaaatttccaatccaaattgatcatctcaaaatagtatggcacttaggtcaatcaatttcttgggaaaagaagctaactagattataaaatgggatccctcctcaaaaggcagctcattcatgataactctctaaatggttgtatgaaaagataaaaataattaagtttcatcctggaccttttgatgctaacattaaaaggacagcactgtcttctcacaaaaatcccttatttttcttcttaccaatagaaatccatgatgagtgagcttgtctcattgtggcaattcctataataacagataacaactagtaacaaatgtctctgagtcaaatctctcttctgaccagccacactgaatgagataatttgtcatttcaatttaagtgtttgtgtgatgatgagaatactgaaaatgtgacttttaaagcacttgatgatactttgaattctttagtttttgtagttttggtccaaatttgyttgctttatttcctcataggtaatgaaaatataaatccttagcctaacacttttgcaaattatttcaaaatgagaataaatgaagtttaaattcattgtgtcttac

SEQ ID NO: 572330 - DNA, 528 bp, Homo sapiens
atgagatttggtttctgtgccactcactactgagtagctttttgttttgaagaacgtagtcttttctctctgttattatttttgtaatgtgagagatgtctacaaacacaagaaccaactgagcacaaaacaaataaacaaaagctctgaatctataactaattgaaccactgaaatttttcatctaaactttccttacattctgacatccagaaaagaatttctgctcaaatgggcaagtcataaagacaaatacttttaactgtcttggtgtttcaccccatttgttttattatctcttacttctttttatgtaagttatatttwgtagacatttgtccactattaatggacttctttctagaggtggcattatgttgaatttaattttttaaggtcattgcaagtaaatgaaaaatttctgtctattatggtcattactattgaaaatagatgtgggagaatattctgtttatcattactgggaagatatgtaccaggtactgttctaaatttagtacatttttc

SEQ ID NO: 572331 - DNA, 528 bp, Homo sapiens
atgagatttggtttctgtgccactcactactgagtagctttttgttttgaagaacgtagtcttttctctctgttattatttttgtaatgtgagagatgtctacaaacacaagaaccaactgagcacaaaacaaataaacaaaagctctgaatctataactaattgaaccactgaaatttttcatctaaactttccttacattctgacatccagaaaagaatttctgctcaaatgggcaagtcataaagacaaatacttttaactgtcttggtgtttcaccccatttgttttattatctcttacttctttttatgtaagttatatttagtagacatttgtccactattaatggacttctttctagaggtggcattatgttgaatttarttttttaaggtcattgcaagtaaatgaaaaatttctgtctattatggtcattactattgaaaatagatgtgggagaatattctgtttatcattactgggaagatatgtaccaggtactgttctaaatttagtacatttttc

SEQ ID NO: 572332 - DNA, 528 bp, Homo sapiens
atgagatttggtttctgtgccactcactactgagtagctttttgttttgaagaacgtagtcttttctctctgttattatttttgtaatgtgagagatgtctacaaacacaagaaccaactgagcacaaaacaaataaacaaaagctctgaatctataactaattgaaccactgaaatttttcatctaaactttccttacattctgacatccagaaaagaatttctgctcaaatgggcaagtcataaagacaaatacttttaactgtcttggtgtttcaccccatttgttttattatctcttacttctttttatgtaagttatatttagtagacatttgtccactattaatggacttctttctagaggtggcattatgttgaatttaattttttaaggtcattgcaagtaaatgaaaaatttctgtctattatggtcattaytattgaaaatagatgtgggagaatattctgtttatcattactgggaagatatgtaccaggtactgttctaaatttagtacatttttc

SEQ ID NO: 572333 - DNA, 608 bp, Homo sapiens
ggttcaccttttgtttttaggtccacatttgctgaaatgtaactcttatctcatgcactgggagtgatgaacttcactaggaaatcatcgttctttctggtaagtcaccacagcacaaaactgcaaccattgtttagtaacaactagactctgatagatgctgtggagaatttgactagaagtaggaggatcatttactacayggcaaaaaaacaaatcagtctatcttagaaaggttaaaatttacatggataataaagaaaggaaggtagaagaagagtgataaattagtgagaaaagaacagtaggtgtaattatagcaatatgcttaaatgaaagagaaaaatatggcagaagcatttattgatttgagattgtaatttttttaaataaaaaagcttagtctggattccaacttgtatataaaattaggagcaaaggtatgattaatatgttcatggaatataattatcaagaaaccacagacatttgtgtatggaggacacagaaaggtgagaacttgctaacaggaatcccattaaagaagcttcagaatttgaagatcagcaaagagaaggaagagatgagaatgaaaggctttatgaagg

SEQ ID NO: 572334 - DNA, 608 bp, Homo sapiens
ggttcaccttttgtttttaggtccacatttgctgaaatgtaactcttatctcatgcactgggagtgatgaacttcactaggaaatcatcgttctttctggtaagtcaccacagcacaaaactgcaaccattgtttagtaacaactagactctgatagatgctgtggagaatttgactagaagtaggaggatcatttactacatggcaaaaaaacaaatcagtytatcttagaaaggttaaaatttacatggataataaagaaaggaaggtagaagaagagtgataaattagtgagaaaagaacagtaggtgtaattatagcaatatgcttaaatgaaagagaaaaatatggcagaagcatttattgatttgagattgtaatttttttaaataaaaaagcttagtctggattccaacttgtatataaaattaggagcaaaggtatgattaatatgttcatggaatataattatcaagaaaccacagacatttgtgtatggaggacacagaaaggtgagaacttgctaacaggaatcccattaaagaagcttcagaatttgaagatcagcaaagagaaggaagagatgagaatgaaaggctttatgaagg

SEQ ID NO: 572335 - DNA, 625 bp, Homo sapiens
tccaacaatgatagactagattaagaaaatgtagcttcacttcttaatgggttaacatgtcaagtctttttctgggtcacaccaagttggctggaagttgggtaactctccagggcaactatctttcatgtggtgatccagtaatgcaaactgcttcaatctcgtggctccaccatttcaacatcagacgtcttcagaaagcrtggagttcatactcctgtctaactatttggccagaaagtctatgtcacttctgttcacagccatgatcagaacgtgtggccctgcctaacttggagaagcctgggaagtgtagtcctctttgcacccaggaaggaaaggggaaccagatattggggagcataaatactgtataccacactttacatacctgacaataccttgattctaatttcacagtgaaatgagagattggccagggagtaaagccttggtagaaagtaattgttttccttgggatctttaagtcatttctacattgctttttagcttctactgttactgttaagaagtccagtacattttgaatcaactttatgtggaaactatttgtttctttggagttttaaagagttttattttttattcctagtattttgaaatt

SEQ ID NO: 572336 - DNA, 558 bp, Homo sapiens
ttaggctccctttttcatttctataccaattaatctcatgggttctagagtggttagttctacgggaattgtttttgtttttgtttttaaagatgctgaaaactactctcaatcaaattagtaccatcatttaagctttgaatacttggcagtaattgcctgggctcgtcaataaatgttagcaaattcttgatgttcctcacttttgtggtttcttttgccattgtggcttcataaacagtgctatttatattcagttatactttatagagttatatcttcaggcagtgcaggaaggaaggagaatgagtagggacttttttttttttttattggtgataagctttctaatggagtaattgtttaaatctagacagcacataaaagaaaattgtctcccttgggacattcttacactgtaatctgtagtgaaasgtacttctcccacagacttgcctacagctgtgtggcttctgtaattatgtgtgtattatgattgcctccttcgggataagccttttctgtaagtttggcctttatgatatctcttaagctctg

SEQ ID NO: 572337 - DNA, 551 bp, Homo sapiens
ggtttcactgtgttagcttggatggtcttgatctcctgatttcatgatccacatgcctcrgccttccaaagtgttgggattacaggtgtgagccaccgcgcccagccctggggtcccttttataatggcaataatcccactcattagggcaccatcttcatgacctattacctcccaaaggcctcacctcctgttggcatcacattgggggttagcattttaatatgcaaatttttgggggacattcagttcattcagaccaacctttttaatggttagagggtagtttgtcatatggttttatcataatttatttaattaaatctattggtgggtaattgtttccattgtttaatcaatatcagtaataagtgaagaacaaccttttggttaggagtgtgaattatggaaccctactgccttgaatcaacccctgactctgctacttagtagcttacccttttgtgccttagttttttcaactttatgatgaaaatattattaggtatctcacagggctggtgtgaagattaaaagagttaataacatgt

SEQ ID NO: 572338 - DNA, 551 bp, Homo sapiens
ggtttcactgtgttagcttggatggtcttgatctcctgatttcatgatccacatgcctcggccttccaaagtgttgggattacaggtgtgagccaccgcgcccagccctggggtcccttttataatggcaataatcccactcattagggcaccatcttcatgacctattacctcccaaaggcctcacctcctrttggcatcacattgggggttagcattttaatatgcaaatttttgggggacattcagttcattcagaccaacctttttaatggttagagggtagtttgtcatatggttttatcataatttatttaattaaatctattggtgggtaattgtttccattgtttaatcaatatcagtaataagtgaagaacaaccttttggttaggagtgtgaattatggaaccctactgccttgaatcaacccctgactctgctacttagtagcttacccttttgtgccttagttttttcaactttatgatgaaaatattattaggtatctcacagggctggtgtgaagattaaaagagttaataacatgt

SEQ ID NO: 572339 - DNA, 551 bp, Homo sapiens
ggtttcactgtgttagcttggatggtcttgatctcctgatttcatgatccacatgcctcggccttccaaagtgttgggattacaggtgtgagccaccgcgcccagccctggggtcccttttataatggcaataatcccactcattagggcaccatcttcatgacctattacctcccaaaggcctcacctcctgttggcatcacattgggggttagcattttaatatgcaaattttkgggggacattcagttcattcagaccaacctttttaatggttagagggtagtttgtcatatggttttatcataatttatttaattaaatctattggtgggtaattgtttccattgtttaatcaatatcagtaataagtgaagaacaaccttttggttaggagtgtgaattatggaaccctactgccttgaatcaacccctgactctgctacttagtagcttacccttttgtgccttagttttttcaactttatgatgaaaatattattaggtatctcacagggctggtgtgaagattaaaagagttaataacatgt

SEQ ID NO: 572340 - DNA, 618 bp, Homo sapiens
gagttttctattcctatgttcttaatagaagcaacattaaatctgattttatatttgaggtggtgtctaattttcatggggagttttccagattcaaataataaagaattaagaattttcagatgatttataagtaatctcttttttttttttttgagatggagtttcgctcttgttgcccasgttggagtgtgcaatggcaccatctcggctcactgcaacctccacctcctgggttcaatccattctcctgcctcagcctctcaagtagctgggattacaggtgcccgccaccatgcccagctaatttttatatttttagtagagatggggtttcattatgttggccaggctggtctcaatctcctgacctcaggcgatccaccctcctcggccttccaaagtgttgggattataggggtgagccaccgtgccaggccagtagtctcttttgatattactgaacaattgacaaaaaagggggaaaaaggatgaataatcctctgaaagaaatagactcatctggtctcatccaagaagtgcacgtttccatttttggccatcatgttgacaactaatttttaaaatattaattacttatgttggagaggatgtgaa

SEQ ID NO: 572341 - DNA, 627 bp, Homo sapiens
aatgcttccagcttttgcccattcactatgatattggctgtgggtgtgtcataaatatcttattattttgagatacatcccatcaatacctagtttattgagagttttcagcatgaaggggtgttaagttttatcaaaggctaggggagggagttccccaccccyttgtgcttcctgggtgagacattgcctcaccctgctttgagttaccctcagtgggctgcatccactgtctaaccagtcccaatgagatgagccaggtacctcagttggaaatggagaaatcacccaccttctgcattcatcttgctgggagctgcagaccggggctgttcttatttggccatcttgcaagttatgccaacattggatatctttcaatttatttggatctttaattttttttaaccatgctttgcaattacagtgtacaagtctttactttattggttaaatttattcctaagtattttattgtttttgtgctattgtatcttagacaactagaaaccaataattaaaagagctcatgattatcatcataaaatagattaatgaattatttcattaatatatttacagattgtttattgcttgtgcatagaaatataatttatttctatgtgt

SEQ ID NO: 572342 - DNA, 627 bp, Homo sapiens
aatgcttccagcttttgcccattcactatgatattggctgtgggtgtgtcataaatatcttattattttgagatacatcccatcaatacctagtttattgagagttttcagcatgaaggggtgttaagttttatcaaaggctaggggagggagttccccacccccttgtgcttcctgggtgagacattgcctcaccctgctttgagttaccctcagtgggctgcatccactgtctaaccagtcccaatgagatgagccaggtacctcagttggaaatggagaaatcacccaccttctgcattcatcttrctgggagctgcagaccggggctgttcttatttggccatcttgcaagttatgccaacattggatatctttcaatttatttggatctttaattttttttaaccatgctttgcaattacagtgtacaagtctttactttattggttaaatttattcctaagtattttattgtttttgtgctattgtatcttagacaactagaaaccaataattaaaagagctcatgattatcatcataaaatagattaatgaattatttcattaatatatttacagattgtttattgcttgtgcatagaaatataatttatttctatgtgt

SEQ ID NO: 572343 - DNA, 590 bp, Homo sapiens
ttgggtatcgctttcttatggagtcataaatttctttatatattatggatactaacctttgcctgtkatccatgctggaaaaatgcgctatgtggtgctgtgactcacctcttacacaaaatactaagttgtgtgtactcacacatatgaatataattttatgtgtacagggggttctaccttacacagatggatctttctctgtgcacacatcacaataatattactcctggagagagttgtggtgtgtgtatattacatatagctctttgctccacctcaaacttatatgtaggtgtagtatgaattaaaaatccattttttctaaatcaatatctaaatatctcagcatccgtttcaaatattttatacttcctcatctaatattaataaaaattttataatatgctaatttcccatttttttctctttacaaatcccttattctgtttcatacattcatttgtatacaaatacagaaagaatattagttttaaagcatatgttaatatgtactgaggaaagcgccctgtggttatacttctttccaaatctttctagcttattcttactcagtcaccttttaaaat

SEQ ID NO: 572344 - DNA, 590 bp, Homo sapiens
ttgggtatcgctttcttatggagtcataaatttctttatatattatggatactaacctttgcctgtgatccatgctggaaaaatgcgctatgtggtgctgtgactcacctcttacacaaaatactaagttgtgtgtactyacacatatgaatataattttatgtgtacagggggttctaccttacacagatggatctttctctgtgcacacatcacaataatattactcctggagagagttgtggtgtgtgtatattacatatagctctttgctccacctcaaacttatatgtaggtgtagtatgaattaaaaatccattttttctaaatcaatatctaaatatctcagcatccgtttcaaatattttatacttcctcatctaatattaataaaaattttataatatgctaatttcccatttttttctctttacaaatcccttattctgtttcatacattcatttgtatacaaatacagaaagaatattagttttaaagcatatgttaatatgtactgaggaaagcgccctgtggttatacttctttccaaatctttctagcttattcttactcagtcaccttttaaaat

SEQ ID NO: 572345 - DNA, 590 bp, Homo sapiens
ttgggtatcgctttcttatggagtcataaatttctttatatattatggatactaacctttgcctgtgatccatgctggaaaaatgcgctatgtggtgctgtgactcacctcttacacaaaatactaagttgtgtgtactcacacatatgaatataattttatgtgtacagggggttctaccttacacagatggatctttctctgtgcacacatcacaataatattactcctggagagagttgtggtgtgtktatattacatatagctctttgctccacctcaaacttatatgtaggtgtagtatgaattaaaaatccattttttctaaatcaatatctaaatatctcagcatccgtttcaaatattttatacttcctcatctaatattaataaaaattttataatatgctaatttcccatttttttctctttacaaatcccttattctgtttcatacattcatttgtatacaaatacagaaagaatattagttttaaagcatatgttaatatgtactgaggaaagcgccctgtggttatacttctttccaaatctttctagcttattcttactcagtcaccttttaaaat

SEQ ID NO: 572346 - DNA, 339 bp, Homo sapiens
agatggtacatatacaccatgggwtattatacagccataaaaaagaatgagatcatatcctttgaagcaacacggatggagctggaggccatcatcattctaagagaactaatgcaggaacagaaaccaaatatttcatgttctcacatataagtgggagctaaacattgagaacatatggacacaaagagggaaacaatggactccggggcctacttgaaggtggagggtgggagcagggtgaggatccaaaaactacctattgcgtactaagcttattaccttggcaatgaaatgatttgtacaccaaacccccatgacatgcaatttacctgtata

SEQ ID NO: 572347 - DNA, 574 bp, Homo sapiens
gttttatctattcctgtgaaaaatgtcaccaaaattttgatagggattcaataaatctgtagattgctttgggtagtgtgaacattttaatattaattcttcgaatccctgaacacagaatatatttccatttattttgtatcttcttcaatttctttaatcaatgtcttataggttttagtatataaatctttcacctacttggttaaatttatttctaagtattttattttttccatactattgtaaatgggattgttttcttaatctattttgaaggtagtttattgttgctgtataraaatgcagctgatttttgtgtcttaattttgtatcgtacaattttactgaatttgcttattacttctaacaatttttggtggaatctttagggttttctacatgcaggatcatgtcatctacaaacagaaaacaatttaacttcttccttttcaatttagatgccttttatttctttttctggactgattgacctaggtaggacatccagtactatactgaatagtagcagcaagagtggccatacttgtcttattcctgatcttagcagaag

SEQ ID NO: 572348 - DNA, 446 bp, Homo sapiens
gggtttcttttacacttaaaataacacacgatgaaatgaattgggccaattttttgcttcattagacacaatttagtggcatctctttgggatgatttatgaccctatggggaattgaagtgaacatcgtgagcatccacatttttatggaaagtaagagaaagggaatcaattgtggtgactccacaatatgatgtgcaggtgtattagtttcctgtggcaactgcagcaaattaccacaaacgaggaggcttaaaacaacasaattgcattctctcacacttctggagtccacaagttcaaagtcaaagtgttggcagggccacctctttctggaggcctcgggggagaattgtgccatgcctctgatccacctttggtggctgctggcaattcttggggccccttgtcttgtaggtgcattgctccaatctctgcctctgtgc

SEQ ID NO: 572349 - DNA, 446 bp, Homo sapiens
gggtttcttttacacttaaaataacacacgatgaaatgaattgggccaattttttgcttcattagacacaatttagtggcatctctttgggatgatttatgaccctatggggaattgaagtgaacatcgtgagcatccacatttttatggaaagtaagagaaagggaatcaattgtggtgactccacaatatgatgtgcaggtgtattagtttcctgtggcaactgcagcaaattaccacaaacgaggaggcttaaaacaacacaattgcattctctcacasttctggagtccacaagttcaaagtcaaagtgttggcagggccacctctttctggaggcctcgggggagaattgtgccatgcctctgatccacctttggtggctgctggcaattcttggggccccttgtcttgtaggtgcattgctccaatctctgcctctgtgc

SEQ ID NO: 572350 - DNA, 477 bp, Homo sapiens
ttttatattttaacacttctctcaaattaggatgcatcttacaattgatagtggcttaagtcactgtcagccaggtgtgaaaatctttaatttataactcctgataaaaatcaagaaagcatcaacttcacagcatagtcaatttgataacatatgggtgattaataaatgattaaaaggttaacttcctagagttgtttattataatattgattcaaacatattttaaaaggggatgtcatgagtgtgacattagcattttgtaatttcacagcttcataaattatacagtttaaatcaaaatctacttattgtcatccttttaactaattcaaacaaaaatgcaactgtrcaaatggaacttattttaaccaaattgatttcctttattctttttgttacaatgtaattaagaaagaggcccttctcttgtgcttttcttttcttttttttttttttttttttttttttggagac

SEQ ID NO: 572351 - DNA, 477 bp, Homo sapiens
ttttatattttaacacttctctcaaattaggatgcatcttacaattgatagtggcttaagtcactgtcagccaggtgtgaaaatctttaatttataactcctgataaaaatcaagaaagcatcaacttcacagcatagtcaatttgataacatatgggtgattaataaatgattaaaaggttaacttcctagagttgtttattataatattgattcaaacatattttaaaaggggatgtcatgagtgtgacattagcattttgtaatttcacagcttcataaattatacagtttaaatcaaaatctacttattgtcatccttttaactaattcaaacaaaaatgcaactgtgcaaatggaacttattttaaccaaattgatttcctttattctttttgttacaatgtaattaagaaagaggcccttctcttgtkcttttcttttcttttttttttttttttttttttttttggagac

SEQ ID NO: 572352 - DNA, 486 bp, Homo sapiens
ttgtattatatctgatactatttattgtcccaggataaataatgaacactagaaataataaatgccctgaggtgctgtagaccaaaatggagtcaacatggaaaagcaacagcaggcttaatataaaaataattttgttcagacagacaagtttttaggaaggactaatatctcatatctaactgaagtaaaccacagtcataaaccacagtaccygaagttcagtgagttttcaaaaatacatcacccaccaaagattaatctccaagatcaacaagcactatttgcaacatatgagagtgagtccgctgacaaatggctcggagaaaggaagcatttgaaggtgaagatcactgacaagtgaggctccatggggattaaaatatgaagaccattttgattcactattttttgtatttccaatgctggaatggaagcaaccagtaaaaatgatgaaggttgcaaatgtgaataaacaaaacacat

SEQ ID NO: 572353 - DNA, 511 bp, Homo sapiens
tagaggttgctgtgaactgagattgcaccactgcactccagcctgggcaacaagagtgaaactgcatttcaaaaaaaaaaaaaaaaaaaacctcagcagcaaaaaaaattatgaagtgccacacgccggtgtccaggtatgtacagtgtggcacctggaatagcaaggcaagtgcctggatcaaggaaacttcaaatgagggatctcccatgaggggagtgtccacttggaagacctccaggcctggagagcatcagtgtagattagcgctaagtaagttacggctaccatttttgttgcttctgtctgttccttcttacctctccttccctgaagggkgacgagccaaaattattaaaagctgagaaagaagtggcgaggagaagtaagctgaacatgccctctttttcggcttcatgaaaaaaaaatatgtttaaatgaacctagaattgttattacattggattgaatattctaattactgaactgattgttttgagacaaaagtgac

SEQ ID NO: 572354 - DNA, 517 bp, Homo sapiens
ttattaaaacttgtggtacaataactgctttaggtcacttaaaatgaatcaactaacctcacaaaacaccaagctaatgcaattattggagattagaataatatggtgaaacgtcagtcttagtctggaaatctaacacaattcagaataatttatttgtttttaaagagtctaacattaagaaggagtgccaccttgtggcattttttttatgccggagtgcaacccagccttcttttaaaggtttcataagtgtcctaatgaatttgcattttaatcactgtatatctttgaaatttgtaaatatacaacttataataacattctattaaagatagagaaaacatctaaagtcttggaatggtaattataacccataattaccattccattaaraatttcctttttttttaagacggagtttcactcttgttgcccaggctggagtgcaatggtgcaatctctgctcacctcatcctccacctcacaggttaaagagattctttcgccacagcct

SEQ ID NO: 572355 - DNA, 517 bp, Homo sapiens
ttattaaaacttgtggtacaataactgctttaggtcacttaaaatgaatcaactaacctcacaaaacaccaagctaatgcaattattggagattagaataatatggtgaaacgtcagtcttagtctggaaatctaacacaattcagaataatttatttgtttttaaagagtctaacattaagaaggagtgccaccttgtggcattttttttatgccggagtgcaacccagccttcttttaaaggtttcataagtgtcctaatgaatttgcattttaatcactgtatatctttgaaatttgtaaatatacaacttataataacattctattaaagatagagaaaacatctaaagtcttggaatggtaattataacccataattaccattccattaagaatttcctttttttttaagacggagtttcaytcttgttgcccaggctggagtgcaatggtgcaatctctgctcacctcatcctccacctcacaggttaaagagattctttcgccacagcct

SEQ ID NO: 572356 - DNA, 579 bp, Homo sapiens
atattttctaatttcttcatgtataaaatgcaaagggggctgggcgcagtggctcacgcctgtaatcccagcactttgggaggccaaggcgggtggatcatttgaggtcaggagttcaagaccagcctggccaacatggtgaaaccctatctctacaaaaaaaaaaaaaaattagccgggtgtggtgacaagtgcctgtaatctcagctccttgggaagctgaggcaggagagtagcttgaatccgggaggtggaggttgcagtgagccgagatcgtgccattgcactctagtctgggcaacaagagtgagattccatctcaaaaaaaaaagcaaagggaaggcacagatggaaggaataaggaattctgtgggaaagcatcttagggcatcttaccactaaagtgaattagctctctcctaatcctgtcctgtgcttggatgtgataactattgaatgacagtggtaaggtttcatacaatttagtcatatgtaacaaaattcagcttttctyttaaacacttcactgtgtatgtgtttaaggagtgaaacctacatagataaggtgtggagctggcg

SEQ ID NO: 572357 - DNA, 615 bp, Homo sapiens
gtcaattcctgcaatctgcagaatgaaaaagaagggaaagaaaaagaatgaaaattggaggaagacagctaataattcagccacagacggcaattaaaaacaaactgtggagcctggtaatatgtaaaagtgggtggtaaaacatgatgggaaatgagtaagccccaaaagacgtaaatccraaactgtaaagctgcaagagagaagaaaatatttgccctcccattttctcaactaacaattactggatacatatagttcaatcaagtccatattttaaataaagcttacttctcaaccgcttaaagttgaaccattttcacaattgaacagtgaattaaaaaatgactggaaagatgtatagtttttgaggaaaccaaataccctaagtacataacctttcataagtatgttcctagtctgtattaaccaattctaggcataattggcattctcgtgcaattgcattttctgggtcaccaagcaaggagaaagcatggaaatattccaaaaacacaagccagaattcctgtgtctaaacttagtttttaccagtttctttagaatttagattgaagtaggctggaggaatatcaatccatcttgactaaaatt

SEQ ID NO: 572358 - DNA, 615 bp, Homo sapiens
gtcaattcctgcaatctgcagaatgaaaaagaagggaaagaaaaagaatgaaaattggaggaagacagctaataattcagccacagacggcaattaaaaacaaactgtggagcctggtaatatgtaaaagtgggtggtaaaacatgatgggaaatgagtaagccccaaaagacgtaaatccaaaactgtaaagctgcaagagagaagaaaatatttgccctcccattttctcaactaacrattactggatacatatagttcaatcaagtccatattttaaataaagcttacttctcaaccgcttaaagttgaaccattttcacaattgaacagtgaattaaaaaatgactggaaagatgtatagtttttgaggaaaccaaataccctaagtacataacctttcataagtatgttcctagtctgtattaaccaattctaggcataattggcattctcgtgcaattgcattttctgggtcaccaagcaaggagaaagcatggaaatattccaaaaacacaagccagaattcctgtgtctaaacttagtttttaccagtttctttagaatttagattgaagtaggctggaggaatatcaatccatcttgactaaaatt

SEQ ID NO: 572359 - DNA, 419 bp, Homo sapiens
aacataccaggaaagctgagagaacccacagaccctctgaagaaagtggattgctcctgcaggaccaaggagacagcccaaatactgtgagtgcccaaagcataaaagtgggaaaggggatcattcaccctcaagcacacaccctcatgggggaacgtgaaggtccagatcatgggaaaagcatttgaccttacctggacctaagataatttagagagccgggagaaatacaggagtagaggaagcagcgggaagagccctgtcagctctttyggtccccagggaagccatttctgactttgtctcacagggaaagtgccacctcttggcaggaggccaaccagcacaaaattagtgcaataaacaacaataatacaactaatgaccgtcacagagtccatttcactcccctgctacct

SEQ ID NO: 572360 - DNA, 359 bp, Homo sapiens
gtatatttgttcataaatttacccatttcctctagattttgtagtttatgtgcatagaggtgttcataatattatctgatggttatttgtatttctgtggggtcagtagtaatatcccctttgttgtttctaattatgtttacttgaatgttcttttttcttctttattaktctagctagtggtctatttaaaaaaaaaaacaactcctggattcattgatcttttgatggtttattgtatctcagtctccttcagttcagctctaattttggttatttcttgtcttctgctagctttggggttggttttctcttggttctctaattcttgtagttgtgatgttaggttgttaaattga

SEQ ID NO: 572361 - DNA, 554 bp, Homo sapiens
tactggcttcatcactctagggtttaaatctgggctttgctgcctaccagctgtgtggcccttccagygtgaacctgtccagacctgagttttagtatacccacagtggggaaaaaagacctacatcacagggttattgttaggcttaaaggacgagacagatgcaaagtactaagcatgtggcctggcacaggggaagtgctcaggaaatggtagtgactgttaagactgtgatacttggaggctgaaccttaacaggatattatcctgacctgtcagtttagctctttggatcctatggtttttttttgttgttgttcttttgtttgttttttgagatggagtctcgctctgtcgcccaggctggagtgcagtgtcacaatctcggctcactgtgacctctgtctcctgggttcaagtgattctcgtttctcagcctcctgagtagctgggattacaggcacctgccaccatgcctggctaatttttgtatttttagtagagaaggggtttcaccaccttggccagcctggtctcccaactcctgacctcag

SEQ ID NO: 572362 - DNA, 245 bp, Homo sapiens
cttaattttttccttcttcttcacaccaaccagttcaagctgcataaaacctgccctacttagcgcttctatggaaggttgggcctttgcacagggtaaatcaaattcagcagtgcttggggactcatcacccaagtacctaatgaagataatccatcagcactgcagcaactttattgtgccattcctgcccaaggaaacagcaaaaacagccagggggttgsgggatagccaccaggaattaa

SEQ ID NO: 572363 - DNA, 623 bp, Homo sapiens
gatcattatttttgctttccccaaagtgtcaagaatgtaacacaggatcaacaagtgttgactaattgataaccgagattccagattaaagacaaattttagtctgatgatcttaaaagtaattatgctrggtggaaaataccctcactttgggtatggttaaaatgactatcttgaatatctcattaagaggataatgtctcattgacatttatactgacagcccctagcatggagccttacgtactggctagtgtgttgaatgaatacctgacttatttaagcttttcactttgaagatgtttggtagcatttccatccagtccttgtacataggtaatcattgtcacggaggaccaaagggtcttcaaaacctgtgatgccaagggggcattttactttctccttttgtgtgggtagccacaactctattcgccgtttttaatatttacttttggctttatcactccatcaagttgtttattttttattcattccttacaatagatgtagcagaatgggataaggcagcatcattttcttccattccattttatcttttatcagcatttagttctcatgtatagcttttcctgagtcatcagtattgggctaatggactg

SEQ ID NO: 572364 - DNA, 623 bp, Homo sapiens
gatcattatttttgctttccccaaagtgtcaagaatgtaacacaggatcaacaagtgttgactaattgataaccgagattccagattaaagacaaattttagtctgatgatcttaaaagtaattatgctgggtggaaaataccctcactttgggtatggttaaaatgactatcttgaatatctcattaagaggataatgtctcattgacatttatactgacagcccctagcatggagccttacgtactggctagtgtgttgaatgaatacctgacttatttaagcttttcactttgaagatgtttggtagcatttccatccagtccttgtacataggtaatcattgtcackgaggaccaaagggtcttcaaaacctgtgatgccaagggggcattttactttctccttttgtgtgggtagccacaactctattcgccgtttttaatatttacttttggctttatcactccatcaagttgtttattttttattcattccttacaatagatgtagcagaatgggataaggcagcatcattttcttccattccattttatcttttatcagcatttagttctcatgtatagcttttcctgagtcatcagtattgggctaatggactg

SEQ ID NO: 572365 - DNA, 623 bp, Homo sapiens
gatcattatttttgctttccccaaagtgtcaagaatgtaacacaggatcaacaagtgttgactaattgataaccgagattccagattaaagacaaattttagtctgatgatcttaaaagtaattatgctgggtggaaaataccctcactttgggtatggttaaaatgactatcttgaatatctcattaagaggataatgtctcattgacatttatactgacagcccctagcatggagccttacgtactggctagtgtgttgaatgaatacctgacttatttaagcttttcactttgaagatgtttggtagcatttccatccagtccttgtacataggtaatcattgtcacggaggaccaaagggtcttcaaaacctgtgatgccaagggggcattttactttctccttttgtgtgggtagccacarctctattcgccgtttttaatatttacttttggctttatcactccatcaagttgtttattttttattcattccttacaatagatgtagcagaatgggataaggcagcatcattttcttccattccattttatcttttatcagcatttagttctcatgtatagcttttcctgagtcatcagtattgggctaatggactg

SEQ ID NO: 572366 - DNA, 623 bp, Homo sapiens
gatcattatttttgctttccccaaagtgtcaagaatgtaacacaggatcaacaagtgttgactaattgataaccgagattccagattaaagacaaattttagtctgatgatcttaaaagtaattatgctgggtggaaaataccctcactttgggtatggttaaaatgactatcttgaatatctcattaagaggataatgtctcattgacatttatactgacagcccctagcatggagccttacgtactggctagtgtgttgaatgaatacctgacttatttaagcttttcactttgaagatgtttggtagcatttccatccagtccttgtacataggtaatcattgtcacggaggaccaaagggtcttcaaaacctgtgatgccaagggggcattttactttctccttttgtgtgggtagccacaactctattcrccgtttttaatatttacttttggctttatcactccatcaagttgtttattttttattcattccttacaatagatgtagcagaatgggataaggcagcatcattttcttccattccattttatcttttatcagcatttagttctcatgtatagcttttcctgagtcatcagtattgggctaatggactg

SEQ ID NO: 572367 - DNA, 640 bp, Homo sapiens
ccagagtaatatgttaattgttttttggtttttttcctcactctgtggaaatgaggaggcagaagtgcattagcatgatcttggctcaccgcaacctctgcctcccaggttcaagccattttcctgcctcagcctcccaagtagctgggattacaggtggctgccaccacacctggctagtttttgtacttttagtagagacaggtttcaccatgttgamcaggctggcctcaaactcctgacctcaagtgatccacctgtctcggcttcccaaagtgctgggattacaggcaggagccatggaggctagccttaattatcttctttttaagggggggaaggattttaagaggatcaagcatgcaaaattttggatagaaataaaagattattcaaaaatgaagtatttgtgggttcaccccttttttactttggaggagagagggggagagtgagactcgtacagcagcaagtattttgcctttctggaacttggtgctgtttgaattattgctccatccctcttccctctcatcctttctgttactctctctcttgcaatttttcttccataacagaagagtatcttaaaatctattttatatgttcacattctgaattctaaaagctgttggaatgt

SEQ ID NO: 572368 - DNA, 640 bp, Homo sapiens
ccagagtaatatgttaattgttttttggtttttttcctcactctgtggaaatgaggaggcagaagtgcattagcatgatcttggctcaccgcaacctctgcctcccaggttcaagccattttcctgcctcagcctcccaagtagctgggattacaggtggctgccaccacacctggctagtttttgtacttttagtagagacaggtttcaccatgttgaacaggctggcctcaaactcctgacctcaagtgatccacctgtctcggcttcccaaagtgctgggattacaggcaggagccatggaggctagccttaattatcttctttttaagggggggaaggattttaagaggatcaascatgcaaaattttggatagaaataaaagattattcaaaaatgaagtatttgtgggttcaccccttttttactttggaggagagagggggagagtgagactcgtacagcagcaagtattttgcctttctggaacttggtgctgtttgaattattgctccatccctcttccctctcatcctttctgttactctctctcttgcaatttttcttccataacagaagagtatcttaaaatctattttatatgttcacattctgaattctaaaagctgttggaatgt

SEQ ID NO: 572369 - DNA, 543 bp, Homo sapiens
gtcattccctagggatgatccatttccccagcagcgaggtgtccctttgagctgaggaaccaacctccacctcccgaggagcacccatgtctccattgtcatctcaaggtgcatctctcttaccttggaatcgtcttcccccatcagccgttagcagtcagaaaccatcaagtcatccctgagcaaatattaaaacatcaaacccaccataccactcagcatgcacactgaaaacatcaaccytaattatgttttatgtttgcgcacatcttacacatttgttttatgttttcatgtgtatatttgcttcaatgttatctcttttaaattgttaactagagagcggagaagtatatttttaatgatgtttgcacaaggcttagcattaaatctcaactagaagaacaaggtcaaatcaagtaattcatgggtgttcaaacatgtacatttttccaaatcaacaatttaaaatgtgtattatggtgtatctcttgtccatgtaggtatcagaagctaacatttattcagtgcttactacacgtg

SEQ ID NO: 572370 - DNA, 634 bp, Homo sapiens
tgaattcctaaggactgcccattgaaactgacaaaattgcccttgtttgatgagaggaatgagcagagcattgatgtggtgaacaaggatctagtgagactttcccagcatgtttctaccaaagctttatctaagcttctcagaacactctcctaataagcagatgtttggcctttcagaaagtcaacaagcaaaatgccttgagtgtcccaaaacactgatgccatgatgtgggctcctgactggcctccttttcctttgactggaccactgccacctcttggtagccatcgctttcatgatgctttgccttggagatcatattggtgaagccatgttccaactgccgcttacaatttgtcagagggatgcgtcaggatcgtgatccctcctgtttaaaatttccactgatagctctcgtcgtaactgcagctgatctgggcacagtggttttcacagccactgcaggattcatcttccacatcttctcacctcttcttgaaacaagctatayattcgtaaagagttcatttctttggggtagtgtccttacaagcttttcttaaaacgtcaatgatttcttcaatcttccacccaagcttcaccataaatttgatgtttcctcttgctgcaa

SEQ ID NO: 572371 - DNA, 633 bp, Homo sapiens
gaattcctaaggactgcccattgaaactgacaaaattgcccttgtttgatgagaggaatgagcagagcattgatgtggtgaacaaggatctagtgagactttcccagcatgtttctaccaaagctttatctaagcttctcagaacactctcctaataagcagatgtttggcctttcagaaagtcaacaagcaaaatgccttgagtgtcccaaaacactgatgccatgatgtgggctcctgactggcctccttttcctttgactggaccactgccacctcttggtagccatcgctttcatgatgctttgccttggagatcatattggtgaagccatgttccaactgccgcttacaatttgtcagagggatgcgtcaggatcgtgatccctcctgtttaaaatttccactgatagctctcgtcgtaactgcagctgatctgggcacagtggttttcacagccactgcaggattcatcttccacatcttctcacctcttcttgaaacaagctatacattcgtaaagagttcatttctttggggtagtgtccttacaagcttttcttaaaacgtcaatgatktcttcaatcttccacccaagcttcaccataaatttgatgtttcctcttgctgcaa

SEQ ID NO: 572372 - DNA, 616 bp, Homo sapiens
catgaattccacgaaaattgcagcaagaggaaacatcaaatttatggtgaagcttgggtggaagattgaagaaatcattgacgttttaagaaaagcttgtaaggacactaccccaaagaaatgaactctttacgaatgtatagcttgtttcaagaagaggtgagaagatgtggaagatgaatcctgcagtggctgcgaaaaccactgtgcccagatcagctgcakttacgacgagagctatcagtggaaattttaaacaggagggatcacgatcctgacgcatccctctgacaaattgtaagcggcagttggaacatggcttcaccaatatgatcgccaaggcaaagcatcatgaaagcgatggctaccaagaggtggcagtggtccagtcaaaggaaaaggaggccagtcaggagcccacatcatggcatcagtgttttgggacactcaaagcattttgcttgttgactttctgaaagccaaacatctgcttattaggagagtgttctgagaagcttagataaagctttggtagacacatgctgggagagtctcaatagatctgtgttccccacatcaatgctgtgctcattcctctcatcaaacaagggcaatt

SEQ ID NO: 572373 - DNA, 616 bp, Homo sapiens
catgaattccacgaaaattgcagcaagaggaaacatcaaatttatggtgaagcttgggtggaagattgaagaaatcattgacgttttaagaaaagcttgtaaggacactaccccaaagaaatgaactctttacgaatgtatagcttgtttcaagaagaggtgagaagatgtggaagatgaatcctgcagtggctgcgaaaaccactgtgcccagatcagctgcagttacgacgagagcwatcagtggaaattttaaacaggagggatcacgatcctgacgcatccctctgacaaattgtaagcggcagttggaacatggcttcaccaatatgatcgccaaggcaaagcatcatgaaagcgatggctaccaagaggtggcagtggtccagtcaaaggaaaaggaggccagtcaggagcccacatcatggcatcagtgttttgggacactcaaagcattttgcttgttgactttctgaaagccaaacatctgcttattaggagagtgttctgagaagcttagataaagctttggtagacacatgctgggagagtctcaatagatctgtgttccccacatcaatgctgtgctcattcctctcatcaaacaagggcaatt

SEQ ID NO: 572374 - DNA, 572 bp, Homo sapiens
cagcaagaggaaacatcaaatttatggtgaagcttgggtggaagattgaagaaatcattgacgttttaagaaaagcttgtaaggacactaccccaaagaaatgaactctttacgaatgtatagcttgtttcaagaagaggtgagaagatgtggaagatgaatcctgcagtggctgcgaaaaccactgtgcccagatcagctgcagttacgacgagagctatcagtggaaattttaaacaggagggatcacgatcctgacgcatccctctgacaaattgtaagcggcagttggaacatggcttcaccaatatgatcgccaaggcaaagcatcatgaaagcgatggctaccaagaggtggcagyggtccagtcaaaggaaaaggaggccagtcaggagcccacatcatggcatcagtgttttgggacactcaaagcattttgcttgttgactttctgaaagccaaacatctgcttattaggagagtgttctgagaagcttagataaagctttggtagacacatgctgggagagtctcaatagatctgtgttccccacatcaatgctgtgctcat

SEQ ID NO: 572375 - DNA, 565 bp, Homo sapiens
tttgataagaaaggttaaaaagacaataattttgtatgagatagaatcttgtgtagtaaatttttgttctggagtaaaatgactggttatttaagaaagaggaagtatagggcaaagcagaaattctaaacatgttaccaagggcctatgcagrttgtaaaaggtctgtaaagaatgaatttataaaataaattttttgtgtgtgatgaagttggctattattagaacaaaattatttataagcctttttaaagattgaactttaatattaaaaatacattaattcaaaactaaaaaatgtgttccactatgttagaacaaggtttattttgtttttaaaaaaatgtattttagagatgaggtctcactaagctgctgaagctgaagttgaactatttggctcaagcaatcctcctgcctcagcgtctcaagtagctgggactacatgtgcacaccactatgcctggtttgtttcttttctttccttttttttttaatgaagtatcaatctgttcttagtaaacaagttaaacagtatgtttgtttctttctctcctttttttaa

SEQ ID NO: 572376 - DNA, 541 bp, Homo sapiens
ggtgtgaagtgggaaatcaggggtctcacagccttcagagctgagatcccagaacagagatttatccatgtatttattaacagcaagccagtcattagcattgtttctatagatattaaattaaytaaaagtatcccttatgggaaaggaagggatgggccgaattaaaggaataggttgggctagttaactgcagcagaagcatgtgcttaaggcacagatcactcaggctattgtttgtggcttaagaatgcctttaagcggtttttcaccctgggcgggccacgtatttcttgccctcattccagtaaacccataagctttcaccatgggcattatggccatcatgaacatgtcacagtgctgcagagattttgtttatggccagttttggggccagtttatggccagattctgggggggctgttcccaacaatttggtaagactttgtttgtttttaattgcacatttgtttttaattcacttcatatatattatgaagtgaagtgaattgaaaatcactctggtcctaccacacag

SEQ ID NO: 572377 - DNA, 237 bp, Homo sapiens
aagaaacgggctctgagccacgccctttyaccctcctctaccccgccctgggctggtgaaagtgcgcgccacgatgtggactactgagccctgaagaaataaatccttccactctgaccccatggaggattgcctgtgaggaacttaaacgagtctaccagtgtctagacacgggggcaggtctgtccggcacagcagctccctcaaggaggagaagagtgaggagaaaggaaactc

SEQ ID NO: 572378 - DNA, 539 bp, Homo sapiens
caacctctgcctcccaggttgaagtgattctcctgcctcacctgagattagagagcatgtaccggcatgtccggctaattttgtgtttctagtagagatggggtttcaccatgttggccaggctggtcttgaactccaacaattctaattcaactaatttattttatagaaatatttatgtgtgagaaacaatatttycaagagtcaaagatttaaaactgcttaattgtacatcactaagtggctggctaataaattatagtacgttcatccttacggaagaatactttgcagctaaaacagaacgaaagagaggaaactcttcaaaatgttaactgggaatgacgttcaagacttattgttaaataaaacaaattgagaagaagagtcgtttattggtactaaatttgtgtcagtaaaaatggattctatacgtgggatggtttataagtatgtggaaaaattctttgatggtttttccttgaaaaagtgaaacctaaatccactccgtttggatgtgggacgatttacggttgttg

SEQ ID NO: 572379 - DNA, 553 bp, Homo sapiens
taggctgctgatattttggaaatcctttattatctttgccagattttcctaaatcttattctaaccaaggtagcagctcagttggcagggagttcaagcccactgctaagagcgtcactcaggttagagacatagtacctactaatgacaaattcaccattagatttatcaggggatagttggacaatgtagtgcaaaatgaagatcctagctaagaagttggtcataaataattcattaactagatatacttaaaaaatttatgcaagttaaaattcaggaatatttgaatgataataccagcagagaaaattcagtgacaattgttttgtttaaaaagatgaagtcacataaaaaggaaaaataagagagatagaaagaataagattaaaacataaggtttaraggagcctaacaaactgagcagaatgtacaaattatagcaaaacagaaaatcagttaccaaatctgatgaatataaaaatagaaatcttagatatgaaaaacaaatatggctttgaatgcaggaatggtgccaggagagtactagcat

SEQ ID NO: 572380 - DNA, 599 bp, Homo sapiens
tatattgtcaaaaccactcacaggtgattattaagtgagagaatattgcgtctactttctcagatgctgctgggtcccaggttttaaaaccacagtctgacccaggatcctttccccagctttgcgattcatttgctgtgaaaccaagtgtaagttacttgattttactatctttggttttctgatctataaatgagggtagcagtgcacacccatcacaggcatggagaggaaattaacataaatgacttcgacctctttgcaaatatgaaatcctggtgatctgtgctaaaaagactaactctgtcttcatgctccatttccctttctcactcccccagggagacttatgcttgtctcagggcagtggaaaaaaaaaagtcaacatacagaaaggtcagtgtgtgtggccaaccaaacgtgatatccagctagaagtccagcttattctaactgagcattaagtagaaacaaggtctctcagatggctgttcccttgtctcatctctcaaatagctatccacttttctacagatttcaattaggtttcaaagtttgtctgcagtgatgataatttytgtcatctcaacacctttgtg

SEQ ID NO: 572381 - DNA, 464 bp, Homo sapiens
tttcccatctagctggagatgtgaatatacttccaaccgcctaagagactgtgtctattctgtgatttwaaaaaaaaaaaaactgttttaagaaaaatttctgcaacaggatttggaggtaaagtttttctatcacctggtattggcaaccaagtatcaccaagtgtcacaaaacgctaaaagaagaaatgaactggccaggcgtggtggctcatgcctgtaatcccagcactttgggaggcggaggcaggcagactgcttgaggctgtgagttcgagaccaggctggccaacatggtgaaaccccgtctctactaataatacaaaaatgagccaggcatggtgacacacacctgtaatcccagctactcgggaggctgaggcaggagaaccacttcaactcaagaggtggaggttgcagtgagccaagatcgcgccactgcacaccagcctgggcaacagagt

SEQ ID NO: 572382 - DNA, 621 bp, Homo sapiens
taatggtaagaaaaaagatgtaaccaaagggttgcaaattaatgattcaggagtttgctaaagggtgctaacttcagataatacatacggtcatgcatcatttaatgactgggatacattctgagaaatgcatcgttaggtgattacactgttgtgtgaacatcatagactgtgcttacatgaatctagatggtatagcttactacccacctaggatatgtggtataacctatttgctcctaggctacaaacctaggctgtcgcctagactggagtgcaatggcgcacatggagtgcaatggagtgtatagtatgccatgttactgaatagtgtaggcaactgtaacacaatgacatttgtgtatctaaacataaaaaaggtatagtaaaaatattaattttaatcttgtgggaccactgttatatatgcagttcrtcgttgatcaaaatgttgaattatgtggcatatgactgtatatattttacctaaaacatcaagtcattatgtggcatatgactgtatatattttacctaaagcatcaaatatatgttcattctgctaaatataatccaattttccattttaatggagaaaaccaataaccacaatgacaaggtga

SEQ ID NO: 572383 - DNA, 460 bp, Homo sapiens
tgcagtttaactcaacataattcaaccattcatatgaattaatgatatccatatgtgaatgggattataaataaagaacaaatctttcttacttataatgataactgagtggaagataaaggactgcctttagatgatcccagcctcattgatgaacacaaaacaccagaatagagaaaaagacaataatgagtataagttaagtggtcttccaggcatccagagtagataaagaaaatgaagttctagagaatacaatactttttaaagtcacagtgacatatgtgtaattaataatttatacactkgaaaaaattagatgcaatgatattgacttaacatgaaaaccatcctgaatgcaatgcactcttgatgactcaaactcacttatatcttacaacagctcatcttaatctcttacgaatgaagaaactctaggaaactaaaaaataatatataa

SEQ ID NO: 572384 - DNA, 609 bp, Homo sapiens
catcactttttaatactatgtgagtgacagagtatttgattggtttgatatagattcgcttaatggaaatctatgtattaatttaaaattagaaattttctttagaaaatattaactgaaattatggcagctattgcaaatatcatgaagtattttaagtgatacattcttattcattgtacttattaagaaaatgataaatgcctaatggtttgagccattgctgagtattatttactgtcaaaactcttccaactgacagactcagagtatagtagagaarcattttgcatattaaagtatttttaagaaatttaaattattatatgtaagcaaagggtaaaaatgacaaaatacactctaacacaataaaataaaatggagggggacttattttatctgttttaaaggctggcaaaagataaaatataattagaactttatgtgtaattgatagtattgcctttaaacatctgctgaataaccttgtctcttaatcctatttaaattatcactgtgggccctgtgcagtggctcatgcctgtaatcccaacactttgggaggttgaggtgggtagatcacctgaggtcagtagttcgtgaccagcc

SEQ ID NO: 572385 - DNA, 581 bp, Homo sapiens
ggtcctaggtagaaaaaagaagagtccagaaacagaaaaatgagagataataaggcataatgatactagtatcaataggaacatgttcaagtgggaacacgtggagtctcttcttgggttacttttattgttcttgctgaacggaagagcaaaatcatcagtggaacgtgaggaagtggaagaaatcttaatgacggatgagacaaaagtgtgaagtagataactaagggaagagaaaggatcacagaaacatcctagaacctctggcagcaggaagagctcaacacttattgaacttattgaccatgtccagaaatcaactaaaattgtccctacacttccatatccctacacagtacatgtactatttaagcaaaggcgtgtattgaccttctartttctgatttactaaattatcaacctgcttacatgcacagacacatacacacacacacatagacacacacacatacacacacccatacacacacccatacacacacacatacacacacatcttaaggtgaatttttcagaagtcattaggaaagaccacctggcaccaccatgtctagccacta

SEQ ID NO: 572386 - DNA, 429 bp, Homo sapiens
gcctgacccaaaaagcaattaatgcaaatgtaccatcctttgactaacagtagaggaggggaaaaaggtcaaaatcatgtaagttaacacaagaaaaataagtttgggggaggtgrgagaaatcctttttaaaaaaatctaatctccctttccttaaaatttaccattagaattaatatatttgtatttaacagattccaaagagttaccagtttgattggtttggtatgaggcagaagatagtgcaggaacttccgaaggaagaagaaaaagtccatccagaatgccatcaatttcagcctgcagatttggctccacattagaccgaagcttagataagaactctactgcaccaacgtcaaccaaatgttggactgctgggggatactaaaataagaagaggatgatcttgagaataactgtatcaaa

SEQ ID NO: 572387 - DNA, 488 bp, Homo sapiens
tctctgggagacgttcagtgtgtaattcacgttatttctgtcattactgtgttctctgtcctcatgcacagtgcatgctgccttatccgggcagacgttgcagaaacatttgttgaaatgaattcaacattatttattttgctaccggaagactgagtcccgccacatattcccacctggcccttcattccaaacagtggggatgggaaccccaatttcacattccaactgaacgttaagttggcacacacactactgcacatatcccaagttttgtgccaggatctgcccctgagaaacgtccataattctgctccgtgagccacaagggtgtacctgaagttgccaactcccgaagcaaactgaaaattcaggcccgtgtcggtcccaggagcggtttaaattccacaatcgtccggtccctacacccgggtgagtgcgcagccggccggcsgcaccttcagccgcagagcagccccggcctgcac

SEQ ID NO: 572388 - DNA, 544 bp, Homo sapiens
aaaattctcagcccctaaatgactgattggaccccctcttggccacagggaccccagaaatgccttagaagctgaatttccagccatgacaggatggaggtcagacacaccttattatacccactccctcaaaaactgccattagggtctcttccctaaggggaaacagaagctagacttttcaaaagatttcacattgataatgtcagttaccagcttatcttcccaggcacagaacaaagacaagatgagattaattgttccttcacccttagctgagacacctgcctcttctattctctttttcttcaaatgttcacrtatgtaaaatacacatttgttggggactaactaaagtctcactagtatgtaacaatttgtctcactttccttttaatgaaaatgcataaatactatactttctaaaaaactctttggagaaaacagccacagagggcatctgtgactcatgcttttcctatacacaccctcaagctggttcaataaacctcaattgattgagaaacctgccttcatcagccat

SEQ ID NO: 572389 - DNA, 544 bp, Homo sapiens
aaaattctcagcccctaaatgactgattggaccccctcttggccacagggaccccagaaatgccttagaagctgaatttccagccatgacaggatggaggtcagacacaccttattatacccactccctcaaaaactgccattagggtctcttccctaaggggaaacagaagctagacttttcaaaagatttcacattgataatgtcagttaccagcttatcttcccaggcacagaacaaagacaagatgagattaattgttccttcacccttagctgagacacctgcctcttctattctctttttcttcaaatgttcacatatgtaaaatacacatttgttggggactaactaaagtctcactagtatgtaacaatttgtctcacttyccttttaatgaaaatgcataaatactatactttctaaaaaactctttggagaaaacagccacagagggcatctgtgactcatgcttttcctatacacaccctcaagctggttcaataaacctcaattgattgagaaacctgccttcatcagccat

SEQ ID NO: 572390 - DNA, 577 bp, Homo sapiens
  misc_feature 62: n = A,T,C or G
tccctgtaattccagctactcgggaggctgaggcaggagaattgcttgaacccaggaggtgnggggttgctgtgagccgagaccgcaccattgcaccccagcctaggcaacaagagcgaaactccatctcgaaaaaaaaagaaaagaaaagagaagaaaaatgttcctttttctaacttttaaaagtmtgagttcaagaaaaagttattgattaatcttactgttttataaatgctttttattaattttattgaaaattgctttcttgtgacactaatcttaattcaagtttaaaattttaatttttcttttctaccactgaatagaataaaaaaaatttaaatcacctttgttcccattccctccacacacatataatgacgcacatttatttttgtatccagatttttatttagtattatcctcagcatttttcctgtgatatatggtattcacaactgctcttttaaatatctgcatgtgccatcgtcactccttaaatttaggttgtttttagctttttattattttaaaaatgctatagaaatctttgagtaggctggctgcagtggctcat

SEQ ID NO: 572391 - DNA, 577 bp, Homo sapiens
  misc_feature 62: n = A,T,C or G
tccctgtaattccagctactcgggaggctgaggcaggagaattgcttgaacccaggaggtgnggggttgctgtgagccgagaccgcaccattgcaccccagcctaggcaacaagagcgaaactccatctcgaaaaaaaaagaaaagaaaagagaagaaaaatgttcctttttctaacttttaaaagtatgagttcaagaaaaagttattgattaatcttactrttttataaatgctttttattaattttattgaaaattgctttcttgtgacactaatcttaattcaagtttaaaattttaatttttcttttctaccactgaatagaataaaaaaaatttaaatcacctttgttcccattccctccacacacatataatgacgcacatttatttttgtatccagatttttatttagtattatcctcagcatttttcctgtgatatatggtattcacaactgctcttttaaatatctgcatgtgccatcgtcactccttaaatttaggttgtttttagctttttattattttaaaaatgctatagaaatctttgagtaggctggctgcagtggctcat

SEQ ID NO: 572392 - DNA, 577 bp, Homo sapiens
  misc_feature 62: n = A,T,C or G
tccctgtaattccagctactcgggaggctgaggcaggagaattgcttgaacccaggaggtgnggggttgctgtgagccgagaccgcaccattgcaccccagcctaggcaacaagagcgaaactccatctcgaaaaaaaaagaaaagaaaagagaagaaaaatgttcctttttctaacttttaaaagtatgagttcaagaaaaagttattgattaatcttactgttttataaatgctttttattaattttattgaaaattgctttcttgtgacactaatcttaattcaagtttaaaattttaatttttcttttctaccactgaatagaataaaaaaaatttaaatcacctttgttcccattccctccacacacatataatgacgcacatttatttttgtatccagatttttatttagtattatcctcagcatttttcctgtgatatatggtattcacaactgctcttttaaatatctgcatgtgccatcgtcactccttaaatttaggttgtttttagctttttattattttaaaaatgctatagaaatctttgagtrggctggctgcagtggctcat

SEQ ID NO: 572393 - DNA, 308 bp, Homo sapiens
ctcacacctgtaatcccaacactttgaaaggccaggatgggaggatcactggagctcaggagttcaagaccagcctgggmaaaattcctacaaataaaaataaaaaatttagctcggtgtgtggtacacatctgtggttcctgctactcagtaagctgagttgggagaaccacttgagtccgagttgttgaggctgcagtgagctctgatcacaccactgcactctagtctaggtaacagagtgagacctgtctcaaaataaataaaaaatttaaaaaattaaaaggcacagttcagggctaaagagg

SEQ ID NO: 572394 - DNA, 570 bp, Homo sapiens
ccctcttctcctgtcctcttcagygccagcggcttccggctccccgaggacccctcccatcctcgtgtcctcatcgggcctggcacaggcatcgctcccttcctcagtttctggcagcagcggctccatgactcccagcaaaagggtgtggctggaggcttcccaggtgggagggtaccagaggccagcgcctgcctaggagcagaaccgtagccccacaaacggttcctggacctctctggagggaaggcctcccaagtttgtctccctgtgtggggcctatgtgggtgagaacggccgccttcctgtctccggcattggaaccggggctccctctctcgggagtggaggtaacgggaaagtccctgcttttgacctccgatgggctgagggaatcctgcatctgcactttcagttgtgtgactatgtatgagtgattggaatgccctgggcctcagtttcttcatctgtaaagtggggataatgctattaactagctaggatacttgtgggagtgaagtgagaattccagttcggctttgagccatagcgccctgctggccaacatgg

SEQ ID NO: 572395 - DNA, 597 bp, Homo sapiens
gagctctgcagaccagaacataggcagcctcattctggactcagtatcaccagagggcacccaagcccaaccctggcctctgctgaggtggcccctggcagcttccctgccctcagcaccctgcctctgcccaccctccccattctgcctccccactcaggaagggcccatcagcccacccactccagcccctcgggaagctctttgccaaggcagggtgagatcctgtgacagracccagcccaggacacagtcacccctgaaggctcctgggctcctggggctgccactcccatctgggggcatttggcaactggcctttgcctccctgaaccttggattttccgtgaatgaaggggactcataaacctcacagagtttcagcaaggcacctgcagccctctgaccccacactgcagggacagtccctgcctccgtcacctctgagactgtccgtctacagatgccctgacatgcctatgcctggttaactccgcctcacccttcagagcacagacacctcctcgggaggccttccctgctgcacccagactcccaataacatgaaacactcccaaagcacctacagtgtgtcag

SEQ ID NO: 572396 - DNA, 597 bp, Homo sapiens
gagctctgcagaccagaacataggcagcctcattctggactcagtatcaccagagggcacccaagcccaaccctggcctctgctgaggtggcccctggcagcttccctgccctcagcaccctgcctctgcccaccctccccattctgcctccccactcaggaagggcccatcagcccacccactccagcccctcgggaagctctttgccaaggcagggtgagatcctgtgacagaacccagcccaggacacagtcacccctgaaggctcctgggctcctggggctgccactcccatctgggggcatttggcaactggcctttgcctccctgaaccttggattttccgtgaatgaaggggactcataaacctcacagagtttcagcaaggcacctgcagccctctgaccccacactgcagggacagtccctgcctccgtcacctctgagactgtccgtctacagatgccctgacatgcctatgcctggttaactccgcctcacccttcagagcacagacacctcctcgggaggccttccctgctgcmcccagactcccaataacatgaaacactcccaaagcacctacagtgtgtcag

SEQ ID NO: 572397 - DNA, 566 bp, Homo sapiens
cagtgtgctctccagagcttyaggcaagcactgcaggaagaaacaaatctggaagaatctcccacacacaccagaagtgagtgctagacctccttggagagggtgaggatgtagcctgctagagagcagagaattttgctgagtttctacactgacaaaacactggaaaactgctcccctaagtgctgcttgtgacctgctctgtccccagagaggtgatggccagggttggctgctgtcccccacaagagcaaggtaagaggagcactcagaactagaaagagccccaaccttctccagcgtccctttagcagatgctgcagatgaagtttcacaccgtgccacagaaaaggcaaagccggcaagcaaggtaaaggggggaggtttggaactgatggcaatcagctcaacagtgcaagaaaaatgagttttcttttgaaaagacgttcaacatcactgatcattagagaaatgcaaatcaaaaccacaacgagctaccacctcacactagtcagaatggctattactaaaaagtcaaaaaataacagatgctggcaaggttgtgg

SEQ ID NO: 572398 - DNA, 607 bp, Homo sapiens
gtatgtagtcattgcggaaaacagtttggcgatttctcaaagaaattagaattcccatttgacccagcagtcccagtgctttccccaktgtttttttaaagtggagttgttaaaggttgtatggttgtaggtgtgccgcattatttcagagctctatattgtgtcccagtggtatatgtgtctgctgttgtcacagtcccatgctatttgtgttacagcaggtttgtagtatagtttgaagtcagctaccaaactaccaatgacattcttcacagaattaggataaactattttaaaatttatatcacacccccacacagctggaatagataaggcaattctagcttacttttataagaatatagtgtataatacatagaatatacagcatatatattaatcaactttgttatgggtaaggtttctggtcaacagtagttaatcaggtcagtcagcagttacattacagggaagtcaaaatttaggcaaattttcggctgtgtggggttcagcccctctaacttccacattgttcaaaggtcaagagtactgaaagggaaaaaaaacctaaaatgagccatgtgtgattcaactggaattagaatca

SEQ ID NO: 572399 - DNA, 607 bp, Homo sapiens
gtatgtagtcattgcggaaaacagtttggcgatttctcaaagaaattagaattcccatttgacccagcagtcccagtgctttccccagtgtttttttaaagtggagttgttaaaggttgtatggttgtaggtgtgccgcattatttcagagctctmtattgtgtcccagtggtatatgtgtctgctgttgtcacagtcccatgctatttgtgttacagcaggtttgtagtatagtttgaagtcagctaccaaactaccaatgacattcttcacagaattaggataaactattttaaaatttatatcacacccccacacagctggaatagataaggcaattctagcttacttttataagaatatagtgtataatacatagaatatacagcatatatattaatcaactttgttatgggtaaggtttctggtcaacagtagttaatcaggtcagtcagcagttacattacagggaagtcaaaatttaggcaaattttcggctgtgtggggttcagcccctctaacttccacattgttcaaaggtcaagagtactgaaagggaaaaaaaacctaaaatgagccatgtgtgattcaactggaattagaatca

SEQ ID NO: 572400 - DNA, 607 bp, Homo sapiens
gtatgtagtcattgcggaaaacagtttggcgatttctcaaagaaattagaattcccatttgacccagcagtcccagtgctttccccagtgtttttttaaagtggagttgttaaaggttgtatggttgtaggtgtgccgcattatttcagagctctatattgtgtcccagtggtatatgtgtctgctgttgtcacagtmccatgctatttgtgttacagcaggtttgtagtatagtttgaagtcagctaccaaactaccaatgacattcttcacagaattaggataaactattttaaaatttatatcacacccccacacagctggaatagataaggcaattctagcttacttttataagaatatagtgtataatacatagaatatacagcatatatattaatcaactttgttatgggtaaggtttctggtcaacagtagttaatcaggtcagtcagcagttacattacagggaagtcaaaatttaggcaaattttcggctgtgtggggttcagcccctctaacttccacattgttcaaaggtcaagagtactgaaagggaaaaaaaacctaaaatgagccatgtgtgattcaactggaattagaatca

SEQ ID NO: 572401 - DNA, 614 bp, Homo sapiens
aatgttttgtagttttcttactatttttctataagtctaaaattgtcaaaataaaacatttctaaaaagaaaaaaattgttaaaamaattgtcaaattataacctattaaatgaaataaaccacaagtaaatatcaaatcaagtaaatgaataaattgagtttgatgaagaacagagatatctacatagtctcgaattacctccccacaaaatattaatactaattaattacaaggtgaaaaagtaacattacagaggagaaagctagcagacaacactgtttgtgatcaatgccaacatcaccagtaaaagggcaaatcaaaattgtaggtcactcatgttctatggggctaacagagctctaatttcttcccgggatggagtgcctgaggggtggggcaggctgccacctaggcctttcaagcttctcagccagttcagcctgtgggcctttggacagcccaaactgaatgggaactgaagggatccccaacacagcacagctggtctaccaaaaagtagccagaatcattctttaagcaggtcccttatcccatttctcctgactggaggagacctcccaactggggtctccagccacctcctacaggcac

SEQ ID NO: 572402 - DNA, 614 bp, Homo sapiens
aatgttttgtagttttcttactatttttctataagtctaaaattgtcaaaataaaacatttctaaaaagaaaaaaattgttaaaacaattgtcaaattataacctattaaatgaaataaaccacaagtaaatatcaaatcaagtaaatgaataaattgagtttgatgaagaacagagatatctacatagtctcraattacctccccacaaaatattaatactaattaattacaaggtgaaaaagtaacattacagaggagaaagctagcagacaacactgtttgtgatcaatgccaacatcaccagtaaaagggcaaatcaaaattgtaggtcactcatgttctatggggctaacagagctctaatttcttcccgggatggagtgcctgaggggtggggcaggctgccacctaggcctttcaagcttctcagccagttcagcctgtgggcctttggacagcccaaactgaatgggaactgaagggatccccaacacagcacagctggtctaccaaaaagtagccagaatcattctttaagcaggtcccttatcccatttctcctgactggaggagacctcccaactggggtctccagccacctcctacaggcac

SEQ ID NO: 572403 - DNA, 614 bp, Homo sapiens
aatgttttgtagttttcttactatttttctataagtctaaaattgtcaaaataaaacatttctaaaaagaaaaaaattgttaaaacaattgtcaaattataacctattaaatgaaataaaccacaagtaaatatcaaatcaagtaaatgaataaattgagtttgatgaagaacagagatatctacatagtctcgaattacctccccacaaaatattaataytaattaattacaaggtgaaaaagtaacattacagaggagaaagctagcagacaacactgtttgtgatcaatgccaacatcaccagtaaaagggcaaatcaaaattgtaggtcactcatgttctatggggctaacagagctctaatttcttcccgggatggagtgcctgaggggtggggcaggctgccacctaggcctttcaagcttctcagccagttcagcctgtgggcctttggacagcccaaactgaatgggaactgaagggatccccaacacagcacagctggtctaccaaaaagtagccagaatcattctttaagcaggtcccttatcccatttctcctgactggaggagacctcccaactggggtctccagccacctcctacaggcac

SEQ ID NO: 572404 - DNA, 614 bp, Homo sapiens
aatgttttgtagttttcttactatttttctataagtctaaaattgtcaaaataaaacatttctaaaaagaaaaaaattgttaaaacaattgtcaaattataacctattaaatgaaataaaccacaagtaaatatcaaatcaagtaaatgaataaattgagtttgatgaagaacagagatatctacatagtctcgaattacctccccacaaaatattaatactaattaattacaaggtgaaaaagtaacattacagaggagaaagctagcagacamcactgtttgtgatcaatgccaacatcaccagtaaaagggcaaatcaaaattgtaggtcactcatgttctatggggctaacagagctctaatttcttcccgggatggagtgcctgaggggtggggcaggctgccacctaggcctttcaagcttctcagccagttcagcctgtgggcctttggacagcccaaactgaatgggaactgaagggatccccaacacagcacagctggtctaccaaaaagtagccagaatcattctttaagcaggtcccttatcccatttctcctgactggaggagacctcccaactggggtctccagccacctcctacaggcac

SEQ ID NO: 572405 - DNA, 602 bp, Homo sapiens
gggcaatcttgtcttcttccagttttcaggaggaatgctttcaacttttccctgttcagtataatgctggctgtgggtttgtcatagatggcttttattaccttaatgtatgtcccttctatgctgattttgctgagggtcttaataaaataaggatgctggattttctcaagtggtttttctgcatctattgagatgatcatgtgacttttgttttttaattctgtttatgtagtgtatcgcatttattgacytgcagatgttaaaccatccctgcatccctggtatgaaacccacttgatcatgatggattatctttttgatatgttgttagattcagctagctagtatttttttgaggattactgcatctctgttcatcagggatgttggtctgtagctttcttttctcattatgtccttccttgcttttggtattagggtgtctattagtctgtttcagtattagggtgtgtattagtccattttcacactgctgataaagacatacctgagactgggcaatttacaaaagaaagaggtttatttgacttacagttccacatatttggggaggcctcaaagtcatggtggagtcaagg

SEQ ID NO: 572406 - DNA, 602 bp, Homo sapiens
gggcaatcttgtcttcttccagttttcaggaggaatgctttcaacttttccctgttcagtataatgctggctgtgggtttgtcatagatggcttttattaccttaatgtatgtcccttctatgctgattttgctgagggtcttaataaaataaggatgctggattttctcaagtggtttttctgcatctattgagatgatcatgtgacttttgttttttaattctgtttatgtagtgtatcgcatttattgacctgyagatgttaaaccatccctgcatccctggtatgaaacccacttgatcatgatggattatctttttgatatgttgttagattcagctagctagtatttttttgaggattactgcatctctgttcatcagggatgttggtctgtagctttcttttctcattatgtccttccttgcttttggtattagggtgtctattagtctgtttcagtattagggtgtgtattagtccattttcacactgctgataaagacatacctgagactgggcaatttacaaaagaaagaggtttatttgacttacagttccacatatttggggaggcctcaaagtcatggtggagtcaagg

SEQ ID NO: 572407 - DNA, 631 bp, Homo sapiens
gaaacaaaatatcatgtgaatagcccaaataaaattgccttatctttcagagtatgtattttcttcttaaaatctgtgcatactcttttgytacttccaaaactggatcttgattcagattttccttgtgtgtaaatcctagaggagaagctatataggatccaggttcatatttagtagcagctgaaaaaaaaaagcaagaattatattattattattattattattgttattgttattattttaagatagggtctcactctttcacctatgctggagtgccgtggtgtgatcacaggtcactgcagtctcgtcctcccaggcttaagcaattctcctgcctcagccccaagtacttggaactgcaggcatgagccactgtgcctggcaagcttttgtattttttataggggcagggtttcgtcatgttggcacaggctgctctcaaactcctgggctccagtgatctgcctgtctcaggctcccaaagtgctgggactacaaacgtgagccaacatgcctggccaaagaattatattctacatatttcatagttaactaagtgcaaatcagtaaaaaagagttgagagctttttcagtgttaacaagaatgaaacgtatgtatgactac

SEQ ID NO: 572408 - DNA, 582 bp, Homo sapiens
gagtatgtattttcttcttaaaatctgtgcatactcttttgttacttccaaaactggatcttgattcagattttccttgtgtgtaaatcctagaggagaagctatataggatccaggttcatatttagtagcagctgaaaaaaaaaagcaagaattatattattattattattattattgttattgttattattttaagatagggtctcactctttcacctatgctggagtgccgtggtgtgatcacaggtcactgcagtctcgtcctcccaggcttaagcaattctcctgcctcagccccaagtacttggaactgcaggcatgagccactgtgcctggcaagcttttgtattttttataggggcagggtttcgtcatgttggcacaggctgctctcaaactcctgggctccagtgatctgcctgyctcaggctcccaaagtgctgggactacaaacgtgagccaacatgcctggccaaagaattatattctacatatttcatagttaactaagtgcaaatcagtaaaaaagagttgagagctttttcagtgttaacaagaatgaaacgtatgtatgactac

SEQ ID NO: 572409 - DNA, 582 bp, Homo sapiens
gagtatgtattttcttcttaaaatctgtgcatactcttttgttacttccaaaactggatcttgattcagattttccttgtgtgtaaatcctagaggagaagctatataggatccaggttcatatttagtagcagctgaaaaaaaaaagcaagaattatattattattattattattattgttattgttattattttaagatagggtctcactctttcacctatgctggagtgccgtggtgtgatcacaggtcactgcagtctcgtcctcccaggcttaagcaattctcctgcctcagccccaagtacttggaactgcaggcatgagccactgtgcctggcaagcttttgtattttttataggggcagggtttcgtcatgttggcacaggctgctctcaaactcctgggctccagtgatctgcctgtctcaggctcccaaagtgctgggactacaaacgtgagccaacatgcctggccaaagaattatattctayatatttcatagttaactaagtgcaaatcagtaaaaaagagttgagagctttttcagtgttaacaagaatgaaacgtatgtatgactac

SEQ ID NO: 572410 - DNA, 560 bp, Homo sapiens
gcatacacccaaacaataggggagtgagcacctaccacgtacagagctctctgctaggttctctgggggcagcagttcccaacctggcaattcatcggcatcgtcggaatcagccagcagcttgttggatatgctgagtccagagtcccgcccatattacacctaacgttctgtgcctattacacccagatttatgagatcctcctctcccatgcagtcaaagaatctgcattctaataagttcctcagaggaagctcttttgcagccagtttgcactggtctgtgggttggtcacttatggaaaccactgctccagggaatgaatcatgatttccagtctcattagggaaagatgatatgcatatgcacacatgtaaagaggagtgacagtaattagccaaaagctctgtggacataattgcctctgatgaagtgctgactgatgacatcagacagtaggctattgacagtgtaccccggggaaagctaaatgcaaaagagaagcgaactgcctcatgaagtgagatcaggattacasggtcagaaatgtggagagggt

SEQ ID NO: 572411 - DNA, 534 bp, Homo sapiens
caccagccacctgggaccaaataagaattcaattgtgcttgtccagatatgaacaaatatgtagtgagtatagagtttatcaataatcataacaaatattaaagatttccttggagtcaaagtaaaaaacaaaaaattgtaatgttgtctagggatgacatgatatgctacctcctttttcctgaagttttattccattctgttgacaagatggwgaaagcaagatcatgaaggtgtgcaaatgattcttacggcatgggcgaggatttttcaatttattttttaaagtttccataccctttctttgtctttcttgctttttgtttttgccgttgtgtttatgtttgagatacaaccagtcattggtggcaggggcatagagtggtcagtctgaaagggaggctctcttaagagctatgtgccttccacccagagggagacccagtagaaagaaaaacatcctgggaaatccagctaccatggccctcccagtggaggcatcttacatttaggatacttcaggtatcctcagaa

SEQ ID NO: 572412 - DNA, 534 bp, Homo sapiens
caccagccacctgggaccaaataagaattcaattgtgcttgtccagatatgaacaaatatgtagtgagtatagagtttatcaataatcataacaaatattaaagatttccttggagtcaaagtaaaaaacaaaaaattgtaatgttgtctagggatgacatgatatgctacctcctttttcctgaagttttattccattctgttgacaagatggagaaagcaagatcatgaaggtgtgcaaatgattcttacggcatgggcgaggatttttcaatttattttttaaagtttccataccctttctttgtctttcttgctttttgtttttgccgttgtgtttawgtttgagatacaaccagtcattggtggcaggggcatagagtggtcagtctgaaagggaggctctcttaagagctatgtgccttccacccagagggagacccagtagaaagaaaaacatcctgggaaatccagctaccatggccctcccagtggaggcatcttacatttaggatacttcaggtatcctcagaa

SEQ ID NO: 572413 - DNA, 534 bp, Homo sapiens
caccagccacctgggaccaaataagaattcaattgtgcttgtccagatatgaacaaatatgtagtgagtatagagtttatcaataatcataacaaatattaaagatttccttggagtcaaagtaaaaaacaaaaaattgtaatgttgtctagggatgacatgatatgctacctcctttttcctgaagttttattccattctgttgacaagatggagaaagcaagatcatgaaggtgtgcaaatgattcttacggcatgggcgaggatttttcaatttattttttaaagtttccataccctttctttgtctttcttgctttttgtttttgccgttgtgtttatgtttgagayacaaccagtcattggtggcaggggcatagagtggtcagtctgaaagggaggctctcttaagagctatgtgccttccacccagagggagacccagtagaaagaaaaacatcctgggaaatccagctaccatggccctcccagtggaggcatcttacatttaggatacttcaggtatcctcagaa

SEQ ID NO: 572414 - DNA, 540 bp, Homo sapiens
agaactaaggcagaaagtccattcattcattcattcatttgatgaatatgtattgagctccatattagcagcagcaaatccatacaggcctgcagcaaccccagttcttgcctcctcagagaaagaattagacagaggaggtataaggcagagtgagaaactgaggcaagttttagagcaggagtgaaagtgtattaacaactatcagggcaggaatgaaatggagtgaagcacgcttgtaagagagcccggtgggaggcctgtgagagagtcaagtgtacggtttgacctttgacctggggtcttatgttggcatcttcctgttgcgttatttcctcctgattcttccctttgggtgggctgtccacatgcacagtggcctgccagcacttgggaagggcaaatgctgtacctgcaccgtgggtttactgaagttgtgtgcatgctcatttgaggaattctccacttacctgtctcgttcctagaggaaggtaatataccagktataccattttgcctcttagtgcgcatgcttgaacc

SEQ ID NO: 572415 - DNA, 554 bp, Homo sapiens
  misc_feature 1, 2, 3, 4, 5, 6, 7, 8, 9, 10, 11, 12, 13, 14, 15, 16, 17,18, 19, 20, 21, 22, 23, 24, 25, 26, 27, 28, 29, 30: n = A,T,C or G
nnnnnnnnnnnnnnnnnnnnnnnnnnnnnnctacggcctgtgttaaaagtcgctttccgtttatagtcctggagtcacccttattaactggattctacggttactctgtgccttgttgtctatatgcctttgagaaagtcacatatcctgttttttgttgttgtctgtttgtttttgagacagggtctcactatcttgctccacgctgtagtggagtggtgtgatatcccagctcactgcagccttgactttgacttcctgggcttgagcaattctcccaacctcagcctccggagtacctgggactacaggtgcgtgccaccatgaccagctaatttttctgttttttatakagatggggtcttgctgtgttgccctggctgggctcaaactcctgaactcaagcgagcctcccacctcagctttctgagtagctgggactacaggtgcgtgccaccatgaccagctaatttttctgttttttatatagatggggtcttgctctgttgccctggctgggctcaaactcctgagctcaagcgatcctcccacct

SEQ ID NO: 572416 - DNA, 554 bp, Homo sapiens
  misc_feature 1, 2, 3, 4, 5, 6, 7, 8, 9, 10, 11, 12, 13, 14, 15, 16, 17,18, 19, 20, 21, 22, 23, 24, 25, 26, 27, 28, 29, 30: n = A,T,C or G
nnnnnnnnnnnnnnnnnnnnnnnnnnnnnnctacggcctgtgttaaaagtcgctttccgtttatagtcctggagtcacccttattaactggattctacggttactctgtgccttgttgtctatatgcctttgagaaagtcacatatcctgttttttgttgttgtctgtttgtttttgagacagggtctcactatcttgctccacgctgtagtggagtggtgtgatatcccagctcactgcagccttgactttgacttcctgggcttgagcaattctcccaacctcagcctccggagtacctgggactacaggtgcgtgccaccatgaccagctaatttttctgttttttatatagatggggtcttgctgtgttgccctggctggkctcaaactcctgaactcaagcgagcctcccacctcagctttctgagtagctgggactacaggtgcgtgccaccatgaccagctaatttttctgttttttatatagatggggtcttgctctgttgccctggctgggctcaaactcctgagctcaagcgatcctcccacct

SEQ ID NO: 572417 - DNA, 554 bp, Homo sapiens
  misc_feature 1, 2, 3, 4, 5, 6, 7, 8, 9, 10, 11, 12, 13, 14, 15, 16, 17,18, 19, 20, 21, 22, 23, 24, 25, 26, 27, 28, 29, 30: n = A,T,C or G
nnnnnnnnnnnnnnnnnnnnnnnnnnnnnnctacggcctgtgttaaaagtcgctttccgtttatagtcctggagtcacccttattaactggattctacggttactctgtgccttgttgtctatatgcctttgagaaagtcacatatcctgttttttgttgttgtctgtttgtttttgagacagggtctcactatcttgctccacgctgtagtggagtggtgtgatatcccagctcactgcagccttgactttgacttcctgggcttgagcaattctcccaacctcagcctccggagtacctgggactacaggtgcgtgccaccatgaccagctaatttttctgttttttatatagatggggtcttgctgtgttgccctggctgggctcaaactcctgaactcaagcgagcctcccacctcagcttyctgagtagctgggactacaggtgcgtgccaccatgaccagctaatttttctgttttttatatagatggggtcttgctctgttgccctggctgggctcaaactcctgagctcaagcgatcctcccacct

SEQ ID NO: 572418 - DNA, 647 bp, Homo sapiens
ggttggttaattcttacccattctgccattctgtatcttttattggagcatttaggctatttacattcartgttaatattggggtgtgaggtactattctattcattatgctagttgttgcctgaataccttggtttttctttgtgttactgtttataggccctgtgagatttatgctttaaggaggttctattttggcatattttgaggttttgtttcaagatttagaactcctttttgtacttcttgtactgctggcttggtagtggcaaattctctttgcatttgtttgtctgaaaaatacctttccttcatttatgaagcttagttttgccggatacaaaattcttggctgatatttgtttcgtttaaggaggctaaaggtaggaaggaccccaatcccttctagcttgtagggtttctgctgagaaatctgctgttaatctgataggtttccctttgtaggttacctgatgctttttgcctcacagcacttaagattatttccttcatcgtgactttagataacctgatgattatgtgcctaggtgatctttttgcgatgaatttctcaagtgttctttgagcttcttgtatttggatgtttagatccctggcaaggccagggaagttttccttgattattc

SEQ ID NO: 572419 - DNA, 451 bp, Homo sapiens
ttttctttttataattatactcagagacatataataaatcaaagagaagagctaataaatgagaacatttgaagaagatagatagggaaagaaatggccatggtaactcctgtagttggaaaacctatgtcggtatttttaagcctttcgatggcaattcaagatttcaaatgttgaggaaaatctcatatttttataaacatttctgtctcagaaaaaagtgtgtatatctcagtaaggtaaacacagtagaaccactctgaaactattattttactgtgatagtgctttagaaaataactttcctaattgacacattgtaactcttttcttctctcatggttatgtgttggtatgcagaatgcatcctactgattgtagtgaagaaaatacttgtgtttctcacattgrtaaaatgatagactatggttacataaatgagcttgcatgc

SEQ ID NO: 572420 - DNA, 462 bp, Homo sapiens
tctatgcagctcctgcatagtctttctgttctttaatgtactgtgcccagtgtcaaccacaattctgggtatgctctcttttctctgcttaaaacatattatctttcccacccaactttcactcagttcctgcttggttattcactaagcttcagcatagatagccttcttccaggaagccaccacagtctggaataagttatcctcagaaatagtttttctatcatcatgcttactgcactctatcatcccagctgttttcttgttcatctcctcactagacgagacctcctgatggacaggcagaaagtctcattgttaaggcattcccagctcttagaacggtgtctagtccatgtaaacagacaataatacgtgtcaaatgaatgggtggcatagctgaagatttattatgtataaatgtrtatttatttcttatgcataaacaggctaaaaaccaaa

SEQ ID NO: 572421 - DNA, 515 bp, Homo sapiens
gttttgtcatattgctgatttattagaacaagtaaattagattcctcataagatttttaaatgattatattaagatttgtatagatgcattacttaaatgcatgctatatctagcttgttcatagttgcaaaatcaaatcaatatattaaagaggcatcttgacatttttgcccaacatgtaagtagctatcttgagtaattttcaagtaattttagttttcattcttcaatcccacagtttgcctcttatagggaatcaatatcccagtcagtgctttrtttatttatttatgagaagttaatttattttttattgaattttggattcccatgcttatttgtaaggataatatctataactatttcagactttgctaaagtaccagattgtcatttctggagtcctctgcatccttattctatatggcctgcatgctatttgactggggactgatttttatatagcatgttgatctcacttagattgtataatttaattttagttgtcatgctt

SEQ ID NO: 572422 - DNA, 515 bp, Homo sapiens
gttttgtcatattgctgatttattagaacaagtaaattagattcctcataagatttttaaatgattatattaagatttgtatagatgcattacttaaatgcatgctatatctagcttgttcatagttgcaaaatcaaatcaatatattaaagaggcatcttgacatttttgcccaacatgtaagtagctatcttgagtaattttcaagtaattttagttttcattcttcaatcccacagtttgcctcttatagggaatcaatatcccagtcagtgctttawttatttatttatgagaagttaatttattttttattgaattttggattcccatgcttatttgtaaggataatatctataactatttcagactttgctaaagtaccagattgtcatttctggagtcctctgcatccttattctatatggcctgcatgctatttgactggggactgatttttatatagcatgttgatctcacttagattgtataatttaattttagttgtcatgctt

SEQ ID NO: 572423 - DNA, 553 bp, Homo sapiens
tttaaaatttttcactcagctcatgargcacccacttatcaagctttttcacctttccaatttgcttcaaatgccaaaggaccatagagtggtcaacgttgagttccttggcaacttcttgtatagttgtaaggggacaacttagatgattgctctcatttagtcattgtcaacttctgatggccagccactatgttcatcaccttcaaggctcttgtctcctttgcaaagcttcttgaaccaccactgcactgtatgttcattagcagtttctcagccaaatgcattgttgatgatgcaagttgtctctcctgatttataacccattttgaacttgaataagaaaattgcttgaatttgctttttgtctaacataatttctgtagtctaaaataaacataaaataaacagaaagtaataagtcattagcaaaataacataaagtgagaaatgtccattaaaatgatgtataacaaaccacatttatttaagaatgtattccaatatcaaacagcaaattccaccaatacaaaaaaaatgcaatgagtttgca

SEQ ID NO: 572424 - DNA, 461 bp, Homo sapiens
aactaaaagacctgaaacataacatatgaagtaaatttaaccaatgtatttaaatgaatccaccaagcacttaacaacagcagaagtcacattcttctcaagtgtacatagaatattttccaataagaactatatgttcagccgtaaaacaagtatcactacatgtaaaaaaactaaaatgatacaaactatatcttctctaaccacaatgaaataaaagtagaaaaaatttacaaatatgtcataattaacacacccctaaatamcaaaaaaaaaaaaaaaaaaaagaagaggaaatcgcaagggaaattagaaaacaatttgagataaatttaaagaaaaatgtcatattaaaacttatgaaattcagctaaaacagtatttagaaagcagtttattgctgtaaacatatgtactgaaaactagaaacatcttacattggtaacataaacttccagctt

SEQ ID NO: 572425 - DNA, 603 bp, Homo sapiens
acacacgacctcgcttggagtaatcaagtttacacaaaagtttagtaaaattatatataggggaaaatgtgtctgcagcactcccaatcccacatttacacatggttttcatattgtgttaacctcatcttaaacttgcagattcacagtgatagtgtcccattttctcttattagagtgtatccaacagactgaggcattaggaacgtgatgtgatggctttcccagaagcatttgcattttaacagagagatgtttcaaaaattatttgacccaagaggaaaaattacacatgtataattcgaaggaaagtacctacagacttttccatcatctctgactgcacagagatgcctgtgtaaccaaagccatttccctcttttcctgmtaagtaaagcccaattttcatagaaagggaatgtgctcagccacaggcaatgagtaacaatttatctaaaccagtcatgccaatcccattccagttcaccaattaaagttataagagtagacatataacgcagtttccacaaatataaggagaagtctcatagtgattttgggggaaaatatctcccctagaaatgagggggaaggtattttttc

SEQ ID NO: 572426 - DNA, 603 bp, Homo sapiens
acacacgacctcgcttggagtaatcaagtttacacaaaagtttagtaaaattatatataggggaaaatgtgtctgcagcactcccaatcccacatttacacatggttttcatattgtgttaacctcatcttaaacttgcagattcacagtgatagtgtcccattttctcttattagagtgtatccaacagactgaggcattaggaacgtgatgtgatggctttcccagaagcatttgcattttaacagagagatgtttcaaaaattatttgacccaagaggaaaaattacacatgtataattcgaaggaaagtacctacagacttttccatcatctctgactgcacagagatgcctgtgtaaccaaagccatttccctcttttcctgataagtaaagcccaattttcatagaaagggaatgtgctcagccacaggcaatgagtaacaatttatctaaaccagtcatgccaatcccattccagttcaccaattaaagttmtaagagtagacatataacgcagtttccacaaatataaggagaagtctcatagtgattttgggggaaaatatctcccctagaaatgagggggaaggtattttttc

SEQ ID NO: 572427 - DNA, 650 bp, Homo sapiens
aaaaaaaccaaacaccacatgttctcactcataggtggaaattgaacaatgagagcacatggacacaggaagyggaacatcacactctggggcctgttgtggggaggggggagggatagcattaggagatatacctaatgttaaatgacgagttgatgggtgcagcacaccaacatggcacatatatacatatgtaactaacctgcgcgttgtgcacatgtaccctaaaacttaaagtataataaaaaaaaagaaaaagaaagaaaaaaatttacatgattgaaatgttaattgtggtatcatttattaaaataaaaaattaggaaaaaatctaattatcctataatagcagtctaggtacaaaaatcattacatatctattgaacataatattctgaatccattaaaaatccaatttttaaaactttaacaaaatggagatattaatgatatcttatgagctaaaatgtgagaagtaaaaatgtaacaattcttagtactccatagagctcccaaaatatttgcttggtagctcagatttgacctcatttctgtgggtttgactgcaaacaggacagggtttatgtttgtaattgaatgctgttttctgggcaactttcacagatgcaactgaagctagtttttaaggg

SEQ ID NO: 572428 - DNA, 556 bp, Homo sapiens
tcaaggtaagaaaagaaaagcttatgaactattgcagattaaaggaaactaaacaggcatgacaattaaatgcaacgggtaatgtaacttagatcttggactgaggaaatacaactataaaagacattatggagacaactgctgaaatgagtttggactgctcattagataataatattgtagcaatgttaaatttcctgattttgataactgcactatttatataagagaatattcttggttttagaaaatgtgtaagtatttagtgatcaatgtgcctaatgcccccaactattctcaaatgagtgaayggcatcaggcacttcattaataagatgcatgcaaagctgggcatggtggctaatacctgtaattccaacactttgggacgccgaagtgggaagattggttgaagccaggagtttaagaccagcctggtcaacatgatgagaacccgtatctacaaaaataaaaataaactgatatgcatatatatgtatatatgtgtatatgtgtgtatagagatacagagatatatagagacatgcatatatag

SEQ ID NO: 572429 - DNA, 598 bp, Homo sapiens
ggcaatactagtgtgaattttgtgtgattactcaagaaatggagtctcataatggtaagagcatcagctttgaggtcagagtgtcaagcacagagataaatacawatatacatagatataaatcccaatttcatcacttacaagctgggagactttaactgttttgaccttcagtttcctcatatgtaaaatgaaaatgattatacctattttctagttaccaaattagataagacttggtatatagcacttcatttaattacagccattaaacttataatcatccttagctgttaaatatatatatagatagatgtgtgtgtgcaagaagaaaaaaatgaactatcttttcaaaatctaactgatttttatacaagaaaaactactacttcagctattttacattaaatcaccacttaggaaataaaatagacaacacctcctaaattcctttgtaggcagatcaatatttaatacatgccattaaaatattttgcagtttagtactaaaaccacaccaaaatggcaaaccaaattacaagtttattctcaatacttacaagatttcatacataacaaaagtttgaatacatctttc

SEQ ID NO: 572430 - DNA, 583 bp, Homo sapiens
tttagcctccacaaacaaaacaattatcagccaagaattttgtatatccagagaaactaagcttcataaatgaaggaaagatacagtctttttcagacgaacaaatgctgagagaattctccactaccaagccagcmctataagaattactaaaaggagctctaaatcttgaaacaaatccttgaaatacaccaaaataggatctccttaaggcatgaatctcacaggacctataaagcaacaacacaatgaaaaaagtactcaggcaacaaacagtatgatgaatagaatagtacctcacatctccatactaacactgaatgtaaatggcctaaatgctccacttaaaagatacaaaatggcagaataataactcaccaaccaagtatctgctgtcttcaagaaactcacctgacacataaccactcacataaacttaaggtaaagggatggaaaaagatattccatgcaaatgaacaccaaaagggagcagaagtagctattcttacatcagacaaaacacacttaaagcaacagcagttgaaaaaaaaaggagagacattatattatgataaaaggacta

SEQ ID NO: 572431 - DNA, 577 bp, Homo sapiens
cagccctccccagcttccggtcttactcaaaggaaaatccaaatctgctggcatggcccacaagcccctcccatgtctgtcccctctgaccttgtcccccttcctcttcgctactcaccaacctacagccatactgacttcctgctgttcctcaagcaagtgaagcccgctacagcctcagggcctttgcacatgctcttccctctggtggctggtttgcacctggctgatgtctgtgcctctgcacgggctgtgagctgagggcactgggagcctgggaagggtttccagctgggagggaaccagccagctttgtgctgctgaggggcattctggggtggaccggagggtgggctggaggggatgagcttgagggcagagagagtgctcagtgtgcagagctggggcatgaggtgggctcagctgaagggccagggaggtcacamatggtcaggatgggccccaggtcaggtggggagaagcagccaggccagtggttttgatgtggaaatgtctgaactgcagaacaagcctcctttcaactcccaattaacatgggagcctccccagccaggca

SEQ ID NO: 572432 - DNA, 404 bp, Homo sapiens
gataaatcaagtaaagttacaagataaaaaattgacatacaaaaattagtagcatttatgtatgccaasagtgaaaaatctgaaaaaaaaaatcatgaaagcaattccatctacaatagctacaaaaaatgtaaaatacctagaactaaatttaacaaagaagtgaaagatctttacaaggaaaactaaaaaacactgatgaaagaaattcattattgaggatgaaaaacatgaaaagttatcccatgctcatggattgaaagaattaattgttaaaatgtcaatactattcaaagtgatctacaaactcattgcaatcactaccaaaataccaataacattcttcacagaaatagaaaaaaattactaaaatttgtataggaccacaaaagactccaaataac

SEQ ID NO: 572433 - DNA, 612 bp, Homo sapiens
ccccacatttgagggagagggaggaacctggtgggaggtgactggatcgtgggggcagttttccccaggctgttctcttgatagtgagtaaatcccatgatatctgatggatttataaagggaagttatcctgtgctcactcttctctctcctgccaccttgtaaagaaggtgactgtttccctttttgccttgattgtaagtttcctgaggcctccccagccacgcagaactgtgagtcaattaaacctctttccttcataaattacccagtctcaggggagttctttatagcagtgtgaaaatggactaacacagtatgaaaacttgtgatttggttgccacaggctctgcaatttgtrtccacatcattccttaagacagaaactatcaaaataagctgggaggatgtggctactttctcgacatgaacttcaaaggatagagggccctccatccacactcctgcccccttagtgacccaagacaacctgagggccgtcctggaagcctttctgacactgcccactgcatccctcagtcccataaggtttctgtcctcagggtcaaagaggtttatgcctgccttgttttcagcctctcttgggctttc

SEQ ID NO: 572434 - DNA, 500 bp, Homo sapiens
ttttttaattgcttgtttttctttgtaattaacattcagtctactttctaaaaaataaataaataataagcagtccagatgtggcaagttgctaaagaaaggaaccatcaggccatagacgtaaatatattctcttcttggattttaggtctcacctaagaaaataaacacatgctatgtcagagaagcctcagggyttccacacctgctcgaaaagggagttgagcttcagcagctgacccaggactctgttcccctttggtgagaagggtttttgttcagcaagacaatggagagctctcactgtggtggacgttcggccaagggaccaaggtggaaatcaaacgtgagtagaatttaaactttgcttcctcagttgtctgtgtcttctgttccctgtgtctatgaagtgatctataaggtgactctgcaatcagcctctgatatccttcagggaaaagataaagataagtctgtagtcaaactcgagaattgattgc

SEQ ID NO: 572435 - DNA, 500 bp, Homo sapiens
ttttttaattgcttgtttttctttgtaattaacattcagtctactttctaaaaaataaataaataataagcagtccagatgtggcaagttgctaaagaaaggaaccatcaggccatagacgtaaatatattctcttcttggattttaggtctcacctaagaaaataaacacatgctatgtcagagaagcctcagggtttccacacctgctcgaaaagggagttgagcttcagcagctgacccaggactctgttcccctttggtgagaagggtttttgttcagcaagacaatggagagctctcactgtggtggacgttcggccaagggaccaaggtggaaatcaaacgtgagtagaatttaaactttgcttcctcagttgtctgtgtcttctgttccctgtgtctatgaagtgatctataagstgactctgcaatcagcctctgatatccttcagggaaaagataaagataagtctgtagtcaaactcgagaattgattgc

SEQ ID NO: 572436 - DNA, 512 bp, Homo sapiens
tacttccaatatgtactctaaaaagaaataatagatctataaaaattctagggtttatgtaaaatattggtatgattttactcttgagttatgacttctatagataagagaaagagtctcagaatcactgagaaatgtgttgttttgacaagggccctaacagtgcagggcacagttgaggacatacaagcacacagatatcacaacatctatcctcaaggagccagttaaaaagaaaaaaatacaatccttgcccaaaaaaagaaaaattttgaagggtacaaacaagggaaaattytaacagtgcaaattgggcactaatgctctaagaagagccaactaaaagtggcagagtgaagaagctagattctaatgaatcaaaaatttgcattaaaaagctaaaaatgaattcatagtctaggaggacaggagagaaggggccagaaaaaccagactaccctctttattttaacaaatatggagactgagacttcgagaagctgactgacgtc

SEQ ID NO: 572437 - DNA, 598 bp, Homo sapiens
tctggcttgcctcaccatgccaatagagaaatcattaaaaatagactgtttaacaggaaaaaaaactctctcaacttmtgtgagaaatgatgcataattctcaactttcctaaggttaaatatttaagaaaaaaacatatgtataaaaaacggcagaatgaaagccagagattaaggtataggtggcattataataaaattgtaataaaattaataataaggaaaatacaaaagaaagccatccactataaaattttaataaaattaattataataaaaatacaaaagaaagccatccactaaaattagtaccccaaaacactttatattagttaaccagctacagattaacagttgttggcgtgcaaagttgcatacatacttgacttctcatctggtctaatttcttccttgaatcctgcatctcattttctaaatagatgcagtgacgcgatgaagcatccagcaaagcttttgttgctgattgtttgtttaagacatcatctcatttttgttaaagctgtctcacagctacctgatgttatttttgttactgattttacaaatcaccttattattaaaccattaataatattta

SEQ ID NO: 572438 - DNA, 598 bp, Homo sapiens
tctggcttgcctcaccatgccaatagagaaatcattaaaaatagactgtttaacaggaaaaaaaactctctcaacttatgtgagaaatgatgcataattctcaactttcctaaggttaaatatttaagaaaaaaayatatgtataaaaaacggcagaatgaaagccagagattaaggtataggtggcattataataaaattgtaataaaattaataataaggaaaatacaaaagaaagccatccactataaaattttaataaaattaattataataaaaatacaaaagaaagccatccactaaaattagtaccccaaaacactttatattagttaaccagctacagattaacagttgttggcgtgcaaagttgcatacatacttgacttctcatctggtctaatttcttccttgaatcctgcatctcattttctaaatagatgcagtgacgcgatgaagcatccagcaaagcttttgttgctgattgtttgtttaagacatcatctcatttttgttaaagctgtctcacagctacctgatgttatttttgttactgattttacaaatcaccttattattaaaccattaataatattta

SEQ ID NO: 572439 - DNA, 598 bp, Homo sapiens
tctggcttgcctcaccatgccaatagagaaatcattaaaaatagactgtttaacaggaaaaaaaactctctcaacttatgtgagaaatgatgcataattctcaactttcctaaggttaaatatttaagaaaaaaacatatgtataaaaaayggcagaatgaaagccagagattaaggtataggtggcattataataaaattgtaataaaattaataataaggaaaatacaaaagaaagccatccactataaaattttaataaaattaattataataaaaatacaaaagaaagccatccactaaaattagtaccccaaaacactttatattagttaaccagctacagattaacagttgttggcgtgcaaagttgcatacatacttgacttctcatctggtctaatttcttccttgaatcctgcatctcattttctaaatagatgcagtgacgcgatgaagcatccagcaaagcttttgttgctgattgtttgtttaagacatcatctcatttttgttaaagctgtctcacagctacctgatgttatttttgttactgattttacaaatcaccttattattaaaccattaataatattta

SEQ ID NO: 572440 - DNA, 430 bp, Homo sapiens
tttccaggatagaccttatgaatttatagacacagaaaatgtttcttgaattactgactgattgagtagtaaatataacattttctgaagatttctttttgttgttttttttttttttaaataggaaaagcactaccagcaactggacaaaaagcaaatggtattggtattataaaaagtgctccatgagagmaatcaaataatgataatgctattttttgtgtacaaaaaaaaggtggtgaggtagtgaatatagctgaataattttctatgctttaataaaatttttgaaaataaatataactaatttaaatataatttaaaataaatttgaaattaaattaattgttaaattacattaaattataagcctaattttaattaaattatacacctaattttaattaaattatacatataatttattaat

SEQ ID NO: 572441 - DNA, 430 bp, Homo sapiens
tttccaggatagaccttatgaatttatagacacagaaaatgtttcttgaattactgactgattgagtagtaaatataacattttctgaagatttctttttgttgttttttttttttttaaataggaaaagcactaccagcaactggacaaaaagcaaatggtattggtattataaaaagtgctccatgagagcaatcaaataatgataatgctattttttgtgtacaaaaaaaagrtggtgaggtagtgaatatagctgaataattttctatgctttaataaaatttttgaaaataaatataactaatttaaatataatttaaaataaatttgaaattaaattaattgttaaattacattaaattataagcctaattttaattaaattatacacctaattttaattaaattatacatataatttattaat

SEQ ID NO: 572442 - DNA, 430 bp, Homo sapiens
tttccaggatagaccttatgaatttatagacacagaaaatgtttcttgaattactgactgattgagtagtaaatataacattttctgaagatttctttttgttgttttttttttttttaaataggaaaagcactaccagcaactggacaaaaagcaaatggtattggtattataaaaagtgctccatgagagcaatcaaataatgataatgctattttttgtgtacaaaaaaaaggtggtgaggtagtgaatatagctgaataattttctatgctttaataaaatttttgaaaataaatataactaatttaaatataatttaaaataaatttgaaattaaattaattgttaaattacattaaattataagcytaattttaattaaattatacacctaattttaattaaattatacatataatttattaat

SEQ ID NO: 572443 - DNA, 377 bp, Homo sapiens
tttttttgtttttttttggatggagtcttgctctgtcacccaggttggagtgcagtggtgccatctcgattcactgcaacctctgcctcctgggttcaagcgattctcctgcctcagcctcctgagtagctgggattacagggcacctgcccagctatctgtcaatatttttatagtttgaggtcttacatttaaatatttaatctactttaacttagttttcatatatggtgacaggtagagatccagtttcattcttctgcatacggcaggcaaactattayagtaccatttattgaatagagagtcctttcctccattgcttacttttgctcattttgttgaagatcagatggttgtaggtggcaggtttattt

SEQ ID NO: 572444 - DNA, 377 bp, Homo sapiens
tttttttgtttttttttggatggagtcttgctctgtcacccaggttggagtgcagtggtgccatctcgattcactgcaacctctgcctcctgggttcaagcgattctcctgcctcagcctcctgagtagctgggattacagggcacctgcccagctatctgtcaatatttttatagtttgaggtcttacatttaaatatttaatctactttaacttagttttcatatatggtgacaggtagagatccagtttcattcttctgcatacggcaggcaaactattatagtrccatttattgaatagagagtcctttcctccattgcttacttttgctcattttgttgaagatcagatggttgtaggtggcaggtttattt

SEQ ID NO: 572445 - DNA, 593 bp, Homo sapiens
taaatttaatgcttgacagcagagaagtgtaactgtagtttaaaaaaaattgtacttgagtgacaccctaaataccctgactcgatcactacacattatatacatgtaacaaaatttcacatgtaacttataaatttttacaaataaaaaaattttaaaaataaatcttatcaagtatctcctcagcccacaattgaataaaactaggaatcaataacaagaggaaatttagaaactgtacagaaatatggaaattaagcaaaatgctcactgggcgtggtggctcatgcctgtaatcccagcactttgggaggccgaggttggtgcatcacttgaggtcaggagttcaagaccagactgatcaacatggtgaaaccccctctctactaaaaatacaaaaaagctagccgggcatggtggtgggtgactgtaatcccagctactcaggaggctgaggcaggagactcatttgaacccgggaggcagaagttgcagtgagccgagatcatggccactgcacttcagcctgggtgaggaarcaagactctgtctcaaaataaataaacaaacaaacaaaatgttcatgaatgacc

SEQ ID NO: 572446 - DNA, 532 bp, Homo sapiens
caaattctcttaaagaccctttgctacgtagtctcayggtctagcatgcatcctgtagaaacaaggcatgctggcagattgcagggctgagatgtgttttatctgttttatattttaaaagattctgccagaaaataaaaccagaccttgttcaaaaaaaaatttaaagatacaatttacaaaagtataaaaaacatcaaatatctgtggctcacacctgtaatgccagcacattgggaggccgaggcaagcagatcacttgaggtcaggagttcaagaccaacctggccaacatggtgaaaccccatctctaataaaaatacaaaaattagtctggcatggtggcgcacaaccgtaatcccagctacttgggaggctgaggcaggagaattgcttgaacccaggaggcggaggttgcagtgagccaagatcacgccactgcactccagcctgggcaacagagtgagactccgtctcaaaaaacaaacaaacaaacaaacaaacaaacatcaaatatcttggaaagagatct

SEQ ID NO: 572447 - DNA, 394 bp, Homo sapiens
attccaacatggcaaggttaacttcttagaacatgcagaatagcatttaaactccttacccatctctctactgcctgaattcacttttgattggggttcttggacaatggccctgaagatgctcagacacacccacatgaatacatcactcacagcayaagcatgaacaattaaaatcgctaatgtttattagctacttaatatgtgctaggcactgcactaagcaacttgcatgcattatttcttctgaaacaatcttatgaggtaggcactattattgtcctcacctcacagatgggatgagaaaaccaagacacagagaggttgtggggcttccccaaggatgcacagctaagtaggtgggtggtagggtttggctctgtgtccccaccca

SEQ ID NO: 572448 - DNA, 610 bp, Homo sapiens
agacaagggtgtgtgtgtgtgtgtttgtgtgtgtgtgtgtgtgtgtgtgttatcaggaaaggtgctggcagctatgtgactgcccaatattcattgagcgaactgacttttttctaagcattattattaaaggaatcatctaaattaagcatatcctcagagcaccaggagggaggggcccagtaacaccaccaacttcaaatgcaaaatcagtctgtttcaccgccaggtctgccattgcctcaggactccatgggtacaacgggatgctggtgggactgctgatggccgtgttctcggagaagttagactactactggtggcttctgtttcctgtgaccttcacagccatgtcctggtgaggcacctcattttttctgctcacagctccatggggcccccaagacacttgtgtcttatactggccagagacaggacatacacatgtgggacccagccccttcatagccaagttagcttgtctgacaccatgaaagcccatgagttctcttgtaacacaagggggtcatttggagatatggaataaggaggattcttttgttttttgtttgtktgacacagagtcttgctctgtcgtccaggctggagt

SEQ ID NO: 572449 - DNA, 474 bp, Homo sapiens
gcagcattattaaaaacagtcaagatatggaaacaacctaagtgtctttttttaattaaaaaatttttatttagagacagggtcttgttttgtcacccaggctagagtgcagtggcatgatcatagctcactgcagccttgaactcctggacttatgctaacctcccaccttgcccttgcaaaatgctgcgattacagacacccagcygataagtgccctttgatagataaaagaataaacaaaatattgtatatacatgcattttattttatttattattatatattttctgaggcagagtctcactttgttacccaggctggagtggagtggcacgatctcagctcactgcaacctctgcctcctgggttcaagcaattctcccgcctcaacctccctagtagctgggattacaggcgtgcaccaccacacctggttaatttcttgtattttcagcagagacagggtttcac

SEQ ID NO: 572450 - DNA, 572 bp, Homo sapiens
ctttgtgttacaaacaatctgattatagtcttttcattattttaaagtgtacaattaaattaytactgatgataggcactctgttgtgctatcaaatagtaggtcttattcattctttctaactaaattttttgtacctattaaccatccccacccccactacccccactacctgcccccctcccacccccaactagccttcccagcctctggtaaccatccttctactctgtctccatgagttcagttgctatgattttagatcctacaaataagtgagaatatgccatacttgtctttctatgcctggtttatttcacttaacatgaaagtgtggtctgtggatccctgagggtccttgaaactagggagaacacaaggtcaaaattatttatatactgaagttaagtttctaactcaagcatacatatttttaacattctgtgtggtaaagtggaaagtacacataaagcacttttgcaaagcaaagagcaatggctgtcctaaggaaaagtacttgtataaccgaactgctggctgagccagccacttgtattcatggagcacaattt

SEQ ID NO: 572451 - DNA, 572 bp, Homo sapiens
ctttgtgttacaaacaatctgattatagtcttttcattattttaaagtgtacaattaaattactactgatgataggcactctgttgtgctatcaaatastaggtcttattcattctttctaactaaattttttgtacctattaaccatccccacccccactacccccactacctgcccccctcccacccccaactagccttcccagcctctggtaaccatccttctactctgtctccatgagttcagttgctatgattttagatcctacaaataagtgagaatatgccatacttgtctttctatgcctggtttatttcacttaacatgaaagtgtggtctgtggatccctgagggtccttgaaactagggagaacacaaggtcaaaattatttatatactgaagttaagtttctaactcaagcatacatatttttaacattctgtgtggtaaagtggaaagtacacataaagcacttttgcaaagcaaagagcaatggctgtcctaaggaaaagtacttgtataaccgaactgctggctgagccagccacttgtattcatggagcacaattt

SEQ ID NO: 572452 - DNA, 572 bp, Homo sapiens
ctttgtgttacaaacaatctgattatagtcttttcattattttaaagtgtacaattaaattactactgatgataggcactctgttgtgctatcaaatagtaggtcttattcattctttctaactaaattttttgtacctattaaccatccccacccccactacccccactacctgccccyctcccacccccaactagccttcccagcctctggtaaccatccttctactctgtctccatgagttcagttgctatgattttagatcctacaaataagtgagaatatgccatacttgtctttctatgcctggtttatttcacttaacatgaaagtgtggtctgtggatccctgagggtccttgaaactagggagaacacaaggtcaaaattatttatatactgaagttaagtttctaactcaagcatacatatttttaacattctgtgtggtaaagtggaaagtacacataaagcacttttgcaaagcaaagagcaatggctgtcctaaggaaaagtacttgtataaccgaactgctggctgagccagccacttgtattcatggagcacaattt

SEQ ID NO: 572453 - DNA, 517 bp, Homo sapiens
aaaatcatgccaacaagaaaggaagccgacagaggaaccgaacacaattaaaaagggatttcagttgactgaaaaaaaattcccagaaacagaatccaaaagagaaaaacagaaagacctcgaaaaaaamccccacaaaaacagcctgaatatcagcttttaatttggttgatttctgactgtagagttctttaaaaaaaaatcttatcatatctcttattttcagatttcagcagggataagtagccaatatttctggcttttgacctgttttttcttttttcttttttttttttttgagacagggtctaactctgtttgcccaggctggagtgcagtggcacaaacatagctcaccgcagccttgaccttttgggctcaagcaatcccccgcctcagcctcctgagtagctgggacataggtgtgcaccgctatgcctggctaattttttttttaatctttttaatttatagagacaaggtttgccatgttgcccaggctggtctcaaactcctg

SEQ ID NO: 572454 - DNA, 223 bp, Homo sapiens
gttgagggctatccctaacccttagggcaagaccgtccatgtaagttgggatgtgtggtctgtgggatyctcaaaggcaaagagaaactgggagtcagagtgcaggggaatatagaagaaggcatccttgaggtccagaacagtgaaccattctgtttcctctggtatttgagagagcagggtataggggttgggtacaactggatatagaggaattactgcc

SEQ ID NO: 572455 - DNA, 223 bp, Homo sapiens
gttgagggctatccctaacccttagggcaagaccgtccatgtaagttgggatgtgtggtctgtgggattytcaaaggcaaagagaaactgggagtcagagtgcaggggaatatagaagaaggcatccttgaggtccagaacagtgaaccattctgtttcctctggtatttgagagagcagggtataggggttgggtacaactggatatagaggaattactgcc

SEQ ID NO: 572456 - DNA, 223 bp, Homo sapiens
gttgagggctatccctaacccttagggcaagaccgtccatgtaagttgggatgtgtggtctgtgggattctcaaaggcaaagagaaactgggagtcagagtgcaggggaatatagaagaaggcatccttgaggtccagaacagtgaaccattctgyttcctctggtatttgagagagcagggtataggggttgggtacaactggatatagaggaattactgcc

SEQ ID NO: 572457 - DNA, 223 bp, Homo sapiens
gttgagggctatccctaacccttagggcaagaccgtccatgtaagttgggatgtgtggtctgtgggattctcaaaggcaaagagaaactgggagtcagagtgcaggggaatatagaagaaggcatccttgaggtccagaacagtgaaccattctgtttcctctggtatttgagagakcagggtataggggttgggtacaactggatatagaggaattactgcc

SEQ ID NO: 572458 - DNA, 584 bp, Homo sapiens
gaatgaaacttaatcctataagaaaaatttgggaaatgatgtcaaacttaaagttatgctacttggaagatgagagagctggaatacttatatgtgaacttattgtttgatgactgctgaacaatggttgtcaattctgtagcatatcggacttggtgaatcctaasaggtacagcacagtatacagtatctgccaccattctatacaaatgtataggtcttcctttgcctttcttctgctaacatattcaactttgattctgattctagtgcttttatttccccaaaaagcgttttcaaaaatctgaaaacattcatgtgttttgaagaaatcagataaaaatttgtttgaatttttatttatttatttattttgacctttctagtcttatccttacagtttttttaaaaaaatcatcttgtgtaaaccctaaaacaaagtgttaccatcattactgaaatggaaaaggccataaatgtttgcatttgcaaattttggctccctttcttactactttgaatttgggaacaatagaagccagtggatgtatttataaatatctatcaactgaaaatgttttaaa

SEQ ID NO: 572459 - DNA, 491 bp, Homo sapiens
ttggaatagtgcctggcctacatatgtatacagatccttaataaatggtaaaacattattattttaaaaattataaaatatagaaatgacatgaagatctaatttagcaaaggactatccagggggctaaatacatttaattcctagttgtgtctttacgccaatataaagctgtttatggaatcttagcttactcaaagcagaacattctctaagctttattattctacaacttgaacagaacagtcatgagcaagaagtattgaacagagaaagcyttagggtaggcatttattgttcattttgatgctattcgcagactctttctaagtcaaaaaatgatgtgaccaaattccaatcagtaatcttactcatttttcatagctaaaaacatgcttttagtccttcagattgaaaattggcaaagatacaagcatataagcagttttaccatttaatgagtttaagcaaaatctttttatagcccagat

SEQ ID NO: 572460 - DNA, 536 bp, Homo sapiens
ccagggaattccatcaaatcagctcaggctcactctggctgggggaagcaatctgccatggtcctggggcatctttgtgtgtccttgctgcaaggatagcgtcccctgatactgagcactgtctgcagatggtatggaggcaaccaaggaggctgaggtgcccacagagtgactgccacgcacctgcgaactccacagggacgrggactggttcgttggccgcgcgctaccacaggcctgcagccctgggcttcccagctgcggggcatcctgctttgtgggtagccactgcaccgtggcatttgggagagagaagcgggctctgtgatgctgaggctctctccatttcctgtaccctgtgagtgacaaacgccttgctctgattccagcttgttgtctatttttggcaacttgctggccagcctccacattgacattggggcctagttcccgctcctctcctctgtgaggctggggcccttccccgacggccagtgtctcagcaacagcacagggtgggggagtctggacatgtg

SEQ ID NO: 572461 - DNA, 619 bp, Homo sapiens
tcagcctcccgagtagctgggactacaggcgtgtgccaccacgcctggcaaaatttttttgtatttttagtaragtcatggttttgccatgttggccaggctagtctcgaactcctgatctcaggtgatccaccgcctcagcctcccaaaatgcttgggattacaggcatgagccactgcgcatgggctaactctttcttaggtactatttgcatggtttatcttttcaattcttttactttcagtctatttatgtctttaaatctaaagtgtgtctatcatacatagcatacagttggatcatgttttttcaccccttctaccaactctgccttgtgattacatttataagttgtgattgctctgagaatacaatgaacaccttaaaataatcaaattaataccaacttaatttcagtaatacataaaaactttgctctaatatgtctcttccctcctccctcatatgtataactattgtcatacaaattacatatctacatgtcataagcccattgacacagtcttctaattatctcttcatgcagtcatctttcaaaatcagatagcaggtaaaaagagttacaaacaaaaataatttgtacttttatatttactt

SEQ ID NO: 572462 - DNA, 598 bp, Homo sapiens
tttccaactgtgtctcattcactcatttactgtttgattcattattcaaatatgtgttgagctctactatgtgccaggtactgatattctggactctagggatagagtgtaataagacaaagtcctatcttttatggagcttgcaatctaggaggagagacaggcaaacagctaaacaaataatacgtactatgatagcaggtaggtgagggccagatcatgtagggccgttctattaaaaatgtggtctggatcagcagcatcagcatcatctgggaatgccctagaagtgcagaatctcaggccttgcccttgacctgctgactcagaatccgcactttaacaagttctctagttaacaatcccctctaggggattcttctgcactgtgaatctggaggagtgctaatgcagagcagtcattcccaaccctaggtctatattaagatctcctagggagaagttaaattactgctaccctggcctcattgccagagattctgatttaagtgtcctggggaaggttctaggtggtggaatgttttagaattcccccaggagattatcatatttagycagtttgaggactactaaagta

SEQ ID NO: 572463 - DNA, 649 bp, Homo sapiens
gacaaatagaaacctccatggcagatggagagatcgcagaaggaagaaagcttttttccctgcttttagacttaagggcctgaatttgcattttgccgtcggctctccacatatgtagccagccatgaatgctrcaaggacacatgtgggagccaacctatgcaattaaaaggcatttttgaaaaccactcctaccatgctttatgtttgcagagaaatatgagtgggaagaggggatccacagtgcttttggacaggaagtttcttcctctttcgtcacactgccccagattcactggatgctcagcttctcctatgtatttgaaatggtgaaatgtcagcaaatggctggggcatcaaggaattgagacatgaaatccataccactgtctgtgcattcgccagccattctataagtgatcaaagactctaatcaaaagttatgagccacacagctgcttctgaaactccttacctgagccattcaagagaggtgaggcacaattgaacacacaggattgagggagatgagaatacctgctaggaaagaggtctggatataaagatgactcatcaggtctttagaatgacttgcataggaattaggtcattctgtgagattatgagaaatacatgtagaagctggtgc

SEQ ID NO: 572464 - DNA, 649 bp, Homo sapiens
gacaaatagaaacctccatggcagatggagagatcgcagaaggaagaaagcttttttccctgcttttagacttaagggcctgaatttgcattttgccgtcggctctccacatatgtagccagccatgaatgctgcaaggacacatgtgggagccaacctatgcaattaaaaggcatttttgaaaaccactcctaccatgctttatgtttgcagagaaatatgagtgggaagaggggatccacagtgcttttggacaggaagtttcttcctctttcgycacactgccccagattcactggatgctcagcttctcctatgtatttgaaatggtgaaatgtcagcaaatggctggggcatcaaggaattgagacatgaaatccataccactgtctgtgcattcgccagccattctataagtgatcaaagactctaatcaaaagttatgagccacacagctgcttctgaaactccttacctgagccattcaagagaggtgaggcacaattgaacacacaggattgagggagatgagaatacctgctaggaaagaggtctggatataaagatgactcatcaggtctttagaatgacttgcataggaattaggtcattctgtgagattatgagaaatacatgtagaagctggtgc

SEQ ID NO: 572465 - DNA, 584 bp, Homo sapiens
tggtttcatttggggtcagtagggctaagaaaaaggaagaaaacagttatccttccttatataatatttattatgaatgatttacttaaatcacaatataattatttccattaaaataaatagtataaagcaatattttaaggaaattaatttgaaatgtactttgtagtacttttaatattttggtatctactctcatttaaaattcctgagccttccagaataaaagtccataagtgggcttttgaaaataaactggggaataaatacatatatttataccatataattcaatgatagtagaattctatattcattttttaaatataatattaactgcttactaaaaaaaggtaatgatggctgaaaattgctataaaaaactgsatcctgtaactgtaaatgatataactggaaaaagcagtcaaatttacataaagcctatagtgaaattaatagtgtggtaacaattttgatttttttagttgtgataattataatatagttgttcaaggtatcaatctgaggaaaagctaggtgaagggtaaagtgcagctttttgttttatttttaactctgataac

SEQ ID NO: 572466 - DNA, 584 bp, Homo sapiens
tggtttcatttggggtcagtagggctaagaaaaaggaagaaaacagttatccttccttatataatatttattatgaatgatttacttaaatcacaatataattatttccattaaaataaatagtataaagcaatattttaaggaaattaatttgaaatgtactttgtagtacttttaatattttggtatctactctcatttaaaattcctgagccttccagaataaaagtccataagtgggcttttgaaaataaactggggaataaatacatatatttataccatataattcaatgatagtagaattctatattcattttttaaatataatattaactgcttactaaaaaaaggtaatgatggctgaaaattgctataaaaaactggatcctgtaactgtaaatgatataactggaaaaagcrgtcaaatttacataaagcctatagtgaaattaatagtgtggtaacaattttgatttttttagttgtgataattataatatagttgttcaaggtatcaatctgaggaaaagctaggtgaagggtaaagtgcagctttttgttttatttttaactctgataac

SEQ ID NO: 572467 - DNA, 584 bp, Homo sapiens
tggtttcatttggggtcagtagggctaagaaaaaggaagaaaacagttatccttccttatataatatttattatgaatgatttacttaaatcacaatataattatttccattaaaataaatagtataaagcaatattttaaggaaattaatttgaaatgtactttgtagtacttttaatattttggtatctactctcatttaaaattcctgagccttccagaataaaagtccataagtgggcttttgaaaataaactggggaataaatacatatatttataccatataattcaatgatagtagaattctatattcattttttaaatataatattaactgcttactaaaaaaaggtaatgatggctgaaaattgctataaaaaactggatcctgtaactgtaaatgatataactggaaaaagcagtcaaatttacataaagcctatagtkaaattaatagtgtggtaacaattttgatttttttagttgtgataattataatatagttgttcaaggtatcaatctgaggaaaagctaggtgaagggtaaagtgcagctttttgttttatttttaactctgataac

SEQ ID NO: 572468 - DNA, 584 bp, Homo sapiens
gtaatctcttagaccacagtaaaataaaattgaaaatcaactccaaaaggaaccctcaaaactatgcaaatatatgaaaattaaataacctgcttctaagtaatggttggatcaacaatgatatcaagatttcattggaacttcattggaatttaaatttcaaggaaatttaaaaattatttgaacttaatgataatagtgacacaacttatcaaaacctgtgagacacagcaaaagcagtactaggaggaaaagttcatagcctaaaatgtctaaatcaaaaagtctgaaagagcacatataggcaatctagggtcatgcctcatggaactggagaaacaagaacaatccaaacccaaacccagaagaagaaaagaaataacaaagatcagagcagaactaaatgaaattgaaacaaaaaaaatactaaagataaatgaaacaaaaagatggatctttgaaaagacaaataaaattgatcaaccattagcaagattaaccaagaaaagagagaagatcaaaaaargctcaattaaaaatgaaacaggagatattactactggtactacagaaatataaaagat

SEQ ID NO: 572469 - DNA, 444 bp, Homo sapiens
tagagaaatacagacaaggaaaatattacattgagcatggagtacatgacctttagtaacagcatgggaaatttcctggttacatgaaactattyagacatatcaagaaaagccacgaatatagaatcaagttatactggagaaaagcattccatttctaggcctttaagataaacatttcattatctgaccacaacaaaagttggcaccagagaaaaatagttacaggagctgatgaaaaggttgaagaagagagttagcaccccaaccaagcaaaaagatacatgatttcaagagaagaaaaagaagacaataatgtataatttgcaaattacatgcagtaaagtagaacaaaagttgaatttctgagatacatgtgagaaatttcaaaaagaaacatttccaaattaaaaattaatacctcgtgcaatataactaaaagta

SEQ ID NO: 572470 - DNA, 444 bp, Homo sapiens
tagagaaatacagacaaggaaaatattacattgagcatggagtacatgacctttagtaacagcatgggaaatttcctggttacatgaaactattcagacatatcaagaaaagccacgaatatagaatcaagttatactggagaaaagcattccatttctaggcctttaagataaacatttcattatctgaccacaacaaaagttggmaccagagaaaaatagttacaggagctgatgaaaaggttgaagaagagagttagcaccccaaccaagcaaaaagatacatgatttcaagagaagaaaaagaagacaataatgtataatttgcaaattacatgcagtaaagtagaacaaaagttgaatttctgagatacatgtgagaaatttcaaaaagaaacatttccaaattaaaaattaatacctcgtgcaatataactaaaagta

SEQ ID NO: 572471 - DNA, 444 bp, Homo sapiens
tagagaaatacagacaaggaaaatattacattgagcatggagtacatgacctttagtaacagcatgggaaatttcctggttacatgaaactattcagacatatcaagaaaagccacgaatatagaatcaagttatactggagaaaagcattccatttctaggcctttaagataaacatttcattatctgaccacaacaaaagttggcaccagagaaaaatagttacaggagctgatgaaaaggttgaagaagagagttagcaccccaaccaagcaaaaagatacatgatttcaagagaagaaaaagaagacaayaatgtataatttgcaaattacatgcagtaaagtagaacaaaagttgaatttctgagatacatgtgagaaatttcaaaaagaaacatttccaaattaaaaattaatacctcgtgcaatataactaaaagta

SEQ ID NO: 572472 - DNA, 587 bp, Homo sapiens
atcccattccattccattccattccgttccattccattcgggttgattccattccattccattccattccattccattccattccattccactccattccattcctctaaattccattccattccactctattccattccattccactccaaccggatttattccgttccattccattccattccattccattccagttgattccattggattccattccgatccaatagatttcawtccattccattccattccactaaattccattacattccattacattccattccactccacccggatttattccattccattccattccattgcattccattccattccattccattccattccattccattccattccagttgattccattggattccattccgatccattccattccattccattccattccattccactcgggttgattccactccatcccattgcattacattccatttcattccactcgggttgattccattccgttccattccattccactcgtgttgatgcctttatgttcctttccttttcattccattccattccgttccattccattcgtg

SEQ ID NO: 572473 - DNA, 587 bp, Homo sapiens
atcccattccattccattccattccgttccattccattcgggttgattccattccattccattccattccattccattccattccattccactccattccattcctctaaattccattccattccactctattccattccattccactccaaccggatttattccgttccattccattccattccattccattccagttgattccattggattccattccgatccaatagatttcattccattccattccattccactaaattccattacattccattacattccattccactccacccggatttattccattccattccattccattgcattccattccattccattccattccattccattccattccattccagttgattccattggattccattccgatccattccattccattccattccattccattccactcgggttgattccactccatcccattgcattacattccatttcattccactcgkgttgattccattccgttccattccattccactcgtgttgatgcctttatgttcctttccttttcattccattccattccgttccattccattcgtg

SEQ ID NO: 572474 - DNA, 587 bp, Homo sapiens
atcccattccattccattccattccgttccattccattcgggttgattccattccattccattccattccattccattccattccattccactccattccattcctctaaattccattccattccactctattccattccattccactccaaccggatttattccgttccattccattccattccattccattccagttgattccattggattccattccgatccaatagatttcattccattccattccattccactaaattccattacattccattacattccattccactccacccggatttattccattccattccattccattgcattccattccattccattccattccattccattccattccattccagttgattccattggattccattccgatccattccattccattccattccattccattccactcgggttgattccactccatcccattgcattacattccatttcattccactcgggttgattccattccgttccattccattccactcgtgttgatgccwttatgttcctttccttttcattccattccattccgttccattccattcgtg

SEQ ID NO: 572475 - DNA, 548 bp, Homo sapiens
aacaaaaacacaacgtaccaaaacttacaggatacagcaaaagcaatactaagagggaagtttagagcaataaatccctacattaaaaaagaaaaaagttcccaagtaaacaacctcaaggagctagaaaaaggaaaacaaactaaatgtaagattagaaaatgraaagaaataatacagattagaggagaaataagtgatatagaccaaaaaagcaatagaaaaaaatttgacaaaactaaagtttgttctttgaaaagaaaattaacaaactattagaataagaagaaagagatgaaactaaataaaattagaaataaaagaggagacatcacaaccaatgctacagaaatgttaagtttataatggactattgtgaataataataaaccaacaaatgggataacttagaagaaatgaataaattcctagagacatacaactactatgattgaatcaagaagaaatagaaaacctcaacagatcaataacaaataaggagaatgagccagtaatcaaacacctcctaaagaaaggcccagaaccag

SEQ ID NO: 572476 - DNA, 536 bp, Homo sapiens
atgtatcgtcactttgttttcttgctgtgcagaagcttcttaatttgatgtaatccaatttgtctatgtttacttttgttgcctgtatttttgaggtcttttcaaaaaaatctgtgcataggtcaatgtcatgaagcattttccctatgttttattccagtgatatcataggttttggtcttacattaaatctttaactcatttttgcatttatttgtgtatctgctgggagataagggtctaattttattcttctataagtggatattcagttttcytagcataatttattgaataaattgatctttcctcaatgtgtatttttgcatttttgtcaaaagtcaattggccatagatgtgtgaatttatttctgggctctctattctgttccactggtctgtttttatgccagtaccatgctgttttagttactatagctttgtagtgtattttgaagtcaggcagtgtgatacgtccagctttgttccttttgctcaagattgctttggctattcagggccttttgagattctat

SEQ ID NO: 572477 - DNA, 559 bp, Homo sapiens
gtgttttccaggctggaatgcagtgatgttctctctaagtgcacagtttttgcagtcagaaagatgtggggtcaaatttcttgctaatcatgttatctgggacaattcaytttgtgtctttgtgtctctgtttcctcatctggtaagtatggctgccaatagggagggttggatgagagcatacatgcaaagaacttagaactcaataaattagtgctcaataaattaagctattatttgaaatattttgacaaggttagcactctcactgtaaaattttatggagaatcatgagtccagtcagagctgttttacttaatcaagcagggccctgtctatcctaaatctcttccctgaggtgataccagtaggctgtgtacttgacagccagtgcttaaagacatatgtcatgcctttcttgaagctttgtgtttttcctctgtgtgactaaggggtccctatttttttcagactttttttcacataacttgctttaacaatgcttaacactctgagttgatgatactaaatgagggaaaggagtgaaagaattttgagt

SEQ ID NO: 572478 - DNA, 588 bp, Homo sapiens
ttctgtgttctttgagaaatctacagactgctctgcacaataacggaataatttacattcccaccaacaatatatgagcattccctcaccaacagtatataagcattccctgttttccacagcctcgccagcatttattttttgactttttaaataataaccattctgactagtataagatgatatctaattatggttttgatttccatttctctaatgaatagtgatgttaaacattctttcatatgcttgttgaccatgtgtttgtcttcttaaaaatgtgtctgttccggttgggtgtggtggctcgcgcctacaatcccaacactttgggaggctgtggcaggaggattgttttaggccaggagtttgacatcagcctggacaatatagcaagaccctgtttctacaaaaaatgaaaaagttagcrgtgcatagtggcatcccctgtggtcccagcttctcagaagactgaggcaagaggatcacttgagcctgggaggtcgagactgcagtgagctgtgattgtaccactatactccagcctgggcaacagagcaagaccctgactttaaaaaaaaagtgtgt

SEQ ID NO: 572479 - DNA, 553 bp, Homo sapiens
taatgggttattttctttgttgatttgtttaagttctctgtagattctagatattaggcctttgttggatgcatagtttctgaatatcttctcccattctgtttgttgtctctttgctcggctgatagtttattttgatgtgcagaatctctttagtttaattatgtcccactwgttgcttattcttgtttttgttgcaattgcttttagggacttagccagaaattatttgccagtggtgatgttgggaaaaatatttgctaggttgtcttctagaatttttgtagcttgaggtacttttcaatctttaattcacttgagtcaatttttgtatctggtgaaaagtaggggtccagcttcaatcttctgcatatggctattcagttattccaccaccatttatcgaatggggaattcttttccaattgcttgtttttatctcccttgttgaagatgagatggttgcagatgtgtggctttatttctgagttttctgttcagttggtctatgtgtcagtttttgtaccaataccaagttattttgtttactgtg

SEQ ID NO: 572480 - DNA, 566 bp, Homo sapiens
taactgctgtttatttttattctttttttttttttttttttttttttttaggaaaagacacctgtttcttattccttgggctgggggtcctatttttgtcccctttgctgctcttggaattgttttttttatcagttaaattcttgkgcctggtcctttgctttcttcctctagattacctacttttgtacacctgttttatagattacctattttgtacttttgtaaatccccaaatttctgaaaaatagtggcctgagcttgtttctaataccgatcacccatgtcttccttaattccttatatgattttcccctttctgcaactatatttgcctgtgagaatatttctctgttttcactgagtttaaaagacttttctgagtcacttcatatgaacaccatcaggcatctttttctaaaaaacttctgcactatcttaattttctctctactctctaaccaatcctttactggcttcccttctttattttgttagttaaacgtaactgaaaaatgaagtttcacttcacttactcttcttttttagtatcacagtccctacca

SEQ ID NO: 572481 - DNA, 522 bp, Homo sapiens
  misc_feature 1, 2, 3, 4, 5, 6, 7, 8, 9, 10, 11, 12, 13, 14, 15, 16, 17,18, 19, 20, 21, 22, 23, 24, 25, 26, 27, 28, 29, 30, 31,32, 33, 34, 35, 36, 37, 38, 39, 40, 41: n = A,T,C or G
nnnnnnnnnnnnnnnnnnnnnnnnnnnnnnnnnnnnnnnnnccaaacaaagaaagctaccatgactgcactttatataacacgaaattatgcatctgtgcgcctataggttctaaaacattcattgagtataaaggagctgctccatctcaagcggcactcccaaggagcacatataaaggggtggatcctccatatagcatcacacagcttyctttggaactcacacagtggctcttcagcatcacattgggcacatattatgcactgagtaaacattgcctgttacgtaaacgagttaaagatggcccctggacattggtccctatgctgtgtacttattcacagcaggctgggaccattagctcataacccactggcataaaacacaaattctcacacatacaattggttaaaatagagttcaaataagcatatttttagccatttagactctgtgtgcaaccaacatctgctagccatagataatacaaaccctgtggctatagaaataattctaaac

SEQ ID NO: 572482 - DNA, 522 bp, Homo sapiens
  misc_feature 1, 2, 3, 4, 5, 6, 7, 8, 9, 10, 11, 12, 13, 14, 15, 16, 17,18, 19, 20, 21, 22, 23, 24, 25, 26, 27, 28, 29, 30, 31,32, 33, 34, 35, 36, 37, 38, 39, 40, 41: n = A,T,C or G
nnnnnnnnnnnnnnnnnnnnnnnnnnnnnnnnnnnnnnnnnccaaacaaagaaagctaccatgactgcactttatataacacgaaattatgcatctgtgcgcctataggttctaaaacattcattgagtataaaggagctgctccatctcaagcggcactcccaaggagcacatataaaggggtggatcctccatatagcatcacacagctttctttggaactcacacagtggctcttcagcatcacattgggcacataktatgcactgagtaaacattgcctgttacgtaaacgagttaaagatggcccctggacattggtccctatgctgtgtacttattcacagcaggctgggaccattagctcataacccactggcataaaacacaaattctcacacatacaattggttaaaatagagttcaaataagcatatttttagccatttagactctgtgtgcaaccaacatctgctagccatagataatacaaaccctgtggctatagaaataattctaaac

SEQ ID NO: 572483 - DNA, 522 bp, Homo sapiens
  misc_feature 1, 2, 3, 4, 5, 6, 7, 8, 9, 10, 11, 12, 13, 14, 15, 16, 17,18, 19, 20, 21, 22, 23, 24, 25, 26, 27, 28, 29, 30, 31,32, 33, 34, 35, 36, 37, 38, 39, 40, 41: n = A,T,C or G
nnnnnnnnnnnnnnnnnnnnnnnnnnnnnnnnnnnnnnnnnccaaacaaagaaagctaccatgactgcactttatataacacgaaattatgcatctgtgcgcctataggttctaaaacattcattgagtataaaggagctgctccatctcaagcggcactcccaaggagcacatataaaggggtggatcctccatatagcatcacacagctttctttggaactcacacagtggctcttcagcatcacattgggcacatattakgcactgagtaaacattgcctgttacgtaaacgagttaaagatggcccctggacattggtccctatgctgtgtacttattcacagcaggctgggaccattagctcataacccactggcataaaacacaaattctcacacatacaattggttaaaatagagttcaaataagcatatttttagccatttagactctgtgtgcaaccaacatctgctagccatagataatacaaaccctgtggctatagaaataattctaaac

SEQ ID NO: 572484 - DNA, 475 bp, Homo sapiens
gagtagggcaccccaaatcctctggctcctggggttctcaattctaggcctaggctcctggatggcatttctggacttgccctaggccagagcagagcccactgccttgaagggagagacttaggtctggcagcattcaccacaagcagactgaagagcccttggggcttgaatgaacatcagcagtagccaggcagtacttgctgtgagcctggggtggtggtagccatggggagagactcctctgcttgaggaaaagggaggaaagagggaaaaatactttgtcttgcagcttgggtgctagctcagccacagtagaatagagcaccagttagattcttaaggtttccccctccaggccmtggatcccagaccagcatatatgaacgtgagtggggatagagcaactcactgcaatgaagggggaagaacacaagattggttggatttgccagtgatgtaggcagagccttgg

SEQ ID NO: 572485 - DNA, 414 bp, Homo sapiens
gcaccccaaatcctctggctcctggggttctcaattctaggcctaggctcctggatggcatttctggacttgccctaggccagagcagagcccactgccttgaagggagagacttaggtctggcagcattcaccacaagcagactgaagagcccttggggcttgaatgaacatcagcagtagccaggcagtacttgctgtgagcctggggtggtggtagccatggggagagactcctctgcttgaggaaaagggaggaaagagggaaaaatactttgtcttgcagcttgggtgctagctcagccacagtagaatagagcaccagttagattcttaaggtttccccctccaggccatggmtcccagaccagcatatatgaacgtgagtggggatagagcaactcactgcaatgaa

SEQ ID NO: 572486 - DNA, 475 bp, Homo sapiens
gagtagggcaccccaaatcctctggctcctggggttctcaattctaggcctaggctcctggatggcatttctggacttgccctaggccagagcagagcccactgccttgaagggagagacttaggtctggcagcattcaccacaagcagactgaagagcccttggggcttgaatgaacatcagcagtagccaggcagtacttgctgtgagcctggggtggtggtagccatggggagagactcctctgcttgaggaaaagggaggaaagagggaaaaatactttgtcttgcagcttgggtgctagctcagccacagtagaatagagcaccagttagattcttaaggtttccccctccaggccatggatcccagaccagcatatatgaacstgagtggggatagagcaactcactgcaatgaagggggaagaacacaagattggttggatttgccagtgatgtaggcagagccttgg

SEQ ID NO: 572487 - DNA, 414 bp, Homo sapiens
gcaccccaaatcctctggctcctggggttctcaattctaggcctaggctcctggatggcatttctggacttgccctaggccagagcagagcccactgccttgaagggagagacttaggtctggcagcattcaccacaagcagactgaagagcccttggggcttgaatgaacatcagcagtagccaggcagtacttgctgtgagcctggggtggtggtagccatggggagagactcctctgcttgaggaaaagggaggaaagagggaaaaatactttgtcttgcagcttgggtgctagctcagccacagtagaatagagcaccagttagattcttaaggtttccccctccaggccatggatcccagaccagcatatatgaacgtgagtggggmtagagcaactcactgcaatgaa

SEQ ID NO: 572488 - DNA, 595 bp, Homo sapiens
gagaagaaataaacctctgtttccaacagatggtgctgcatatcataaatattttgatgaatataatgaccccagggggttctgggcccgtcaattaacactctaatgggagatttcaacaatccatatgacaggatttacagagagtgaccagtcatgattactaaaaaaaaaatctatgctatagcgagcataaaataggttcaaccacagaataataaatacaaaatatggcaaatatataatacacaatattattaattacaaaatattgctaaagaattcagatatcaagttagagaattagaaaccacatggcaataaatggatatatggatatcatgtkccttgacactaccacactaacattaaaaagcaaaggagggggtggaattcagacaacatacaggtgacagacaaaagatagtcattatttcaatatctgaaaatatcagagaaatattcagtcattatctgaagtggatgtttgcaggggggaaaattagatggggaaatccaaacaagagcttaacagctaaactgtggaagggggtcagaaaagtaaaacaatactgataaaactgggagagagagc

SEQ ID NO: 572489 - DNA, 595 bp, Homo sapiens
gagaagaaataaacctctgtttccaacagatggtgctgcatatcataaatattttgatgaatataatgaccccagggggttctgggcccgtcaattaacactctaatgggagatttcaacaatccatatgacaggatttacagagagtgaccagtcatgattactaaaaaaaaaatctatgctatagcgagcataaaataggttcaaccacagaataataaatacaaaatatggcaaatatataatacacaatattattaattacaaaatattgctaaagaattcagatatcaagttagagaattagaaaccacatggcaataaatggatatatggatatcatgtgccttgacactaccacactaacattaaaaagcaaaggagggggtggaattcagacaacatacaggtsacagacaaaagatagtcattatttcaatatctgaaaatatcagagaaatattcagtcattatctgaagtggatgtttgcaggggggaaaattagatggggaaatccaaacaagagcttaacagctaaactgtggaagggggtcagaaaagtaaaacaatactgataaaactgggagagagagc

SEQ ID NO: 572490 - DNA, 595 bp, Homo sapiens
gagaagaaataaacctctgtttccaacagatggtgctgcatatcataaatattttgatgaatataatgaccccagggggttctgggcccgtcaattaacactctaatgggagatttcaacaatccatatgacaggatttacagagagtgaccagtcatgattactaaaaaaaaaatctatgctatagcgagcataaaataggttcaaccacagaataataaatacaaaatatggcaaatatataatacacaatattattaattacaaaatattgctaaagaattcagatatcaagttagagaattagaaaccacatggcaataaatggatatatggatatcatgtgccttgacactaccacactaacattaaaaagcaaaggagggggtggaattcagacaacatacaggtgacagacaaaagatagtcattatttcaatatctgaaaatatcagwgaaatattcagtcattatctgaagtggatgtttgcaggggggaaaattagatggggaaatccaaacaagagcttaacagctaaactgtggaagggggtcagaaaagtaaaacaatactgataaaactgggagagagagc

SEQ ID NO: 572491 - DNA, 490 bp, Homo sapiens
gagagaagtcaatgcctgtcttcaaagcttctaaggacasggtgattctcttgttatgggttaatgcagctggtggctttaaattgaagcccctgctcatttactatttgaaaatactctggtgcctataattatgctaaatttactctgcctatgctgcataaatggaataactctgcctatatgacactacatggtcaatgggtcactgcatattttgatcccactattgagaactactgctgataaaaaaggattcctttcaaaatatactgcttattgacactgtgcctattcacccacgagctccactgagatgtacgaggagattaatattgtttttatgcctgttaacactacattcattctgcagcccatggatcaaggagtcattttgactttcaagttatattacataaaacatatattttgtaaggctacacctgccatatataggaattctgatgtatctgggcaaagtaagatgaaa

SEQ ID NO: 572492 - DNA, 490 bp, Homo sapiens
gagagaagtcaatgcctgtcttcaaagcttctaaggacacggtgattctcttgttatgggttaatgcagctggtggctttaaattgaagcccctgctcatttactatttgaaaatactctggtgcctataattatgctaaatttactctgcctatgctgcataaatggaataactctgcctatatgacactacatggtcaatggktcactgcatattttgatcccactattgagaactactgctgataaaaaaggattcctttcaaaatatactgcttattgacactgtgcctattcacccacgagctccactgagatgtacgaggagattaatattgtttttatgcctgttaacactacattcattctgcagcccatggatcaaggagtcattttgactttcaagttatattacataaaacatatattttgtaaggctacacctgccatatataggaattctgatgtatctgggcaaagtaagatgaaa

SEQ ID NO: 572493 - DNA, 490 bp, Homo sapiens
gagagaagtcaatgcctgtcttcaaagcttctaaggacacggtgattctcttgttatgggttaatgcagctggtggctttaaattgaagcccctgctcatttactatttgaaaatactctggtgcctataattatgctaaatttactctgcctatgctgcataaatggaataactctgcctatatgacactacatggtcaatgggtcactgcatattttgatcccactattgagaactactgctgataaaaaaggattcctttcaaaatatactgcttattgacamtgtgcctattcacccacgagctccactgagatgtacgaggagattaatattgtttttatgcctgttaacactacattcattctgcagcccatggatcaaggagtcattttgactttcaagttatattacataaaacatatattttgtaaggctacacctgccatatataggaattctgatgtatctgggcaaagtaagatgaaa

SEQ ID NO: 572494 - DNA, 490 bp, Homo sapiens
gagagaagtcaatgcctgtcttcaaagcttctaaggacacggtgattctcttgttatgggttaatgcagctggtggctttaaattgaagcccctgctcatttactatttgaaaatactctggtgcctataattatgctaaatttactctgcctatgctgcataaatggaataactctgcctatatgacactacatggtcaatgggtcactgcatattttgatcccactattgagaactactgctgataaaaaaggattcctttcaaaatatactgcttattgacactgtgcctattcacccacgagctccactgagatgtacgaggagattaatattgtttttatgcctgttaacactacattcattctgcagcccatggatcaaggagtcattttgactttcaagttatattacataaaacatatattttgtaaggctacasctgccatatataggaattctgatgtatctgggcaaagtaagatgaaa

SEQ ID NO: 572495 - DNA, 566 bp, Homo sapiens
tgatctcacttaaccataattatcttctttaaagaccctatcttcaaatgcattgtgaggtactgggggttagggcgtcaacacctaaatttggggaaacacaattcagctcattaaatgaatggaagtcatacctgaaatcaatgacggatcgtatgactacaaaaaaaggagacaaacattatacacctgctgtttaaagtatacaacacaaaattattgacaaatattaagctgaattaggtcaatcttctagatttaccaatttgcaaataatgcaatccacagagcaagatgtggatatgggggattcagacagcayaatctagctcgggaaactacagaaaaaaaaaatgacccattttgtgacatataattgaaggaacaaatgaagatagatgaatggagaacccataaataaagcaattcaagatacacatgaactcataaaacataggtcctaatttgagtaaagaaagaaaattttaatactgactggttatttgatgacactgagaaactattctaactgtgcagctatgaaaaggaatgagatcatgtccttt

SEQ ID NO: 572496 - DNA, 566 bp, Homo sapiens
tgatctcacttaaccataattatcttctttaaagaccctatcttcaaatgcattgtgaggtactgggggttagggcgtcaacacctaaatttggggaaacacaattcagctcattaaatgaatggaagtcatacctgaaatcaatgacggatcgtatgactacaaaaaaaggagacaaacattatacacctgctgtttaaagtatacaacacaaaattattgacaaatattaagctgaattaggtcaatcttctagatttaccaatttgcaaataatgcaatccacagagcaagatgtggatatgggggattcagacagcacaatctagctcgggaaactacagaaaaaaaaaatgacccattttgtgacatataattgaaggaacaaatgaagatagatgaatggagaacccrtaaataaagcaattcaagatacacatgaactcataaaacataggtcctaatttgagtaaagaaagaaaattttaatactgactggttatttgatgacactgagaaactattctaactgtgcagctatgaaaaggaatgagatcatgtccttt

SEQ ID NO: 572497 - DNA, 566 bp, Homo sapiens
tgatctcacttaaccataattatcttctttaaagaccctatcttcaaatgcattgtgaggtactgggggttagggcgtcaacacctaaatttggggaaacacaattcagctcattaaatgaatggaagtcatacctgaaatcaatgacggatcgtatgactacaaaaaaaggagacaaacattatacacctgctgtttaaagtatacaacacaaaattattgacaaatattaagctgaattaggtcaatcttctagatttaccaatttgcaaataatgcaatccacagagcaagatgtggatatgggggattcagacagcacaatctagctcgggaaactacagaaaaaaaaaatgacccattttgtgacatataattgaaggaacaaatgaagatagatgaatggagaacccataaataaagcaattcaagatacacatgaactcataaaacataggtcctaatttgagtaaagaaagaaaattttaatactgactggwtatttgatgacactgagaaactattctaactgtgcagctatgaaaaggaatgagatcatgtccttt

SEQ ID NO: 572498 - DNA, 547 bp, Homo sapiens
tttaaaagaaaacatcattctgaggaaactggaaattatatatttataaatgtttgtccatagcattgttgaaacaaatggctcaggtttcactgttaatccagttgctgatatttttgactactcaatacaccaaaatggtacagtcaagttggtgctaatagatgtcatttatttacacaaactgacaataggttcaccaaagttaagagacgaatttaagggggacagaaaagaaattcctgtgtgtgctttggcagcttagacatacttaccacgaacaagattatatcttaaaagctattcgttaagcttaaaattaagttatatggttgtaatatgtggagawagcacattggaatagctcttcacttaatgttatagatcactttttccaccaatattatttggtctaggaaagtaaaatcctcttgaggaagtaattagaaaaagcacacatcagggaatgtaattgaagatagacttttgttgacctcagaagagaaaagctcaaaagaaatttcgtaaagttttaaatatggcaaga

SEQ ID NO: 572499 - DNA, 577 bp, Homo sapiens
tccaattaacctcagtcagttttaagcaaatagttatttcgcaattactatatgatagactcagtaatggatataagagaaataatatacagaccttgtcctcaaagtattcatagaatcttgttaggttgatgcacatagagaaaaacagctcagattgattaaatatggttgacccttggtgtctgtgaggcattggttccaggaaacccccacaccaaaatctgcaaattcttaagtttctgatataaaatgatatagtatttgcatataacctatgtacctcctctcatatgctttaaagcattttagattactcttaatacctaatacagtgtaaatgctatgtaagtagtggctctaccgaattatatatttatttttgttatttttattgggtttttttcctaatatttttgagcctcagtttgttgaatctatggagttgagtctagatgmagaacctgtggatatggagtgttaactgtacttactatgtgcaagctactctactaagtcttttgcatgtattgtcttattttgtcctcacaatattctcaagaaataggtaatattc

SEQ ID NO: 572500 - DNA, 592 bp, Homo sapiens
agctaatgtatacagtagcaaggttaatgtagtttttcatgtggtaaaacaatcacatcaaaatgaaaatctggtcaagaggattttccttaaaacagaggggtcctttggaaaataaaaatttttcatgctttagcagagcactttaaacttatcargggctataggaatccaaatacccaacttcagagtcagacctttgcacactctgaagtgtcatgaagtatcagcctaatttttgcaatacttttttagcaaggtgagattatgttttttttttaatttggcacataattattttgtcctttacctaattctctcttctggcatcctgactctatgaaaatgcatattttttttctaattgtggataaaaaaaggagaaagaaaacaaatatcattattaaattcactattctctctccttattttcttcttttatttagtttttaattgtgaagtattatttgcctacagaaaagtacgtaacatattgtgcagctcaatgaattaccagcaatggtccacctgtataattgccacctaggaaaagatagaacattaccagtgacccagcccccatttccttttc

SEQ ID NO: 572501 - DNA, 485 bp, Homo sapiens
aagtagttcagtagtagagtcaaagatgtcatctttgaattgggtgtcagcagtagacaggatgagatgaggtaggatttgggatgtaatttgaatgtaatggtgacaggacttgctattgaagaagatgtttgaaaattcctatttttggtctaagaaataaagtaaatagtggtgctattccctgacatggtgtggactggcttgaaggagagttaatttgggagtaaaataaaatgagttctgttttagatgtcataagttagagatgcatattgaattgcaagtgagaatcatgtaggcttttatctatakctctctataaagagtcaaggtagggggctataaatgtaaattctattgttatcaaagtatactgtagatcatattcaaagtcaggggactcgttgatattgtccatggtgagactatggacagagaaaagaagcagtctaaggactgagcccaagaacactccaacattt

SEQ ID NO: 572502 - DNA, 485 bp, Homo sapiens
aagtagttcagtagtagagtcaaagatgtcatctttgaattgggtgtcagcagtagacaggatgagatgaggtaggatttgggatgtaatttgaatgtaatggtgacaggacttgctattgaagaagatgtttgaaaattcctatttttggtctaagaaataaagtaaatagtggtgctattccctgacatggtgtggactggcttgaaggagagttaatttgggagtaaaataaaatgagttctgttttagatgtcataagttagagatgcatattgaattgcaagtgagaatcatgtaggcttttatctatatctctctataaagagtcaaggtagggggctataaatgtaaattctaktgttatcaaagtatactgtagatcatattcaaagtcaggggactcgttgatattgtccatggtgagactatggacagagaaaagaagcagtctaaggactgagcccaagaacactccaacattt

SEQ ID NO: 572503 - DNA, 485 bp, Homo sapiens
aagtagttcagtagtagagtcaaagatgtcatctttgaattgggtgtcagcagtagacaggatgagatgaggtaggatttgggatgtaatttgaatgtaatggtgacaggacttgctattgaagaagatgtttgaaaattcctatttttggtctaagaaataaagtaaatagtggtgctattccctgacatggtgtggactggcttgaaggagagttaatttgggagtaaaataaaatgagttctgttttagatgtcataagttagagatgcatattgaattgcaagtgagaatcatgtaggcttttatctatatctctctataaagagtcaaggtagggggctataaatgtaaattctattgttatcaaagtatactgtagatcatattcaaagtcaggggactcgttgatattgtccatggtgagactatggacagagaamagaagcagtctaaggactgagcccaagaacactccaacattt

SEQ ID NO: 572504 - DNA, 653 bp, Homo sapiens
ttgaaactcccatattcaactagtaatgctaataagtagtcaattattttatccattcataaaawtgatgtttctagtttctctcatgaaatcatgctgctcaagttgttttccaattattcctttgatacagaaccttcatattcccccaatttattgtccatgtaaatagatctatgtgtgacataaattacaaatcatacagagtgaaacttataccattgatggaaagcttatactggtgaccccataagcatcatactttaagcaatatgaaaatgattacaacagcccagccaaaagatcaatgaaatgagtaaaattatgaaaataataataaacatttattgatcacttacaaaaagccagattttgtgatgcattagcttatttaaaacttactatcatcttcaaaaatacatactatgaataactcattttataaatgacaaaactaaagttgagaggataagtaactcacccaaagcctgcagctagtaagtgactgagtaaagaccaaatcttaaatctggttcctgagcctacattctaactgcatcatgttagttcccacaccacacttgaacttgaatttctgtatgaatcttaggttttagagaacacaagaagaaactcgtcatagcattttccat

SEQ ID NO: 572505 - DNA, 653 bp, Homo sapiens
ttgaaactcccatattcaactagtaatgctaataagtagtcaattattttatccattcataaaattgatgtttctagtttctctcatgaaatcatgctgctcaagttgttttccaattattcctttgatacagaaccttcatattcccccaatttattgtccatgtaaatagatctatgtgtgacataaattacaaatcatacagagtgaaacttataccattgatggaaagcttatactggtgaccccataagcatcatactttaagcaatatgaaaatgattacaacagcccagccaaaagatcaatgaaatgagtaaaattatgaaaataataataaacatttattgatcacttacaaaaagccagattttgtgatgcattagcttatttaaaacttactatcatcttcaaaaatacatactatgaataactcattttataaatgacaaaactaaagttgagaggataagtaactcacccaaagcctgcagctagtaagtgactgagtaaagaccaaatcttaaatctggttcctgagcctacattctaactgcatcatgttagttcccacaccacacttgaacttgaatttctgtrtgaatcttaggttttagagaacacaagaagaaactcgtcatagcattttccat

SEQ ID NO: 572506 - DNA, 256 bp, Homo sapiens
attttgcagaaaagttgcatctcaaggtctactattcgtgggccccatctgcctctcacttttagctttgagccatcaacaaagaagttagacttattyttattccatttgaatgcatttttttcctgattgtaaaaaaaaaaaaaaacaggctgttttgagaaaataggaaagtacaaaaagatgtcgaaggacaaagcattaataatccataaactgtcatggggcagtaagttctgttaatatttggacaaac

SEQ ID NO: 572507 - DNA, 256 bp, Homo sapiens
attttgcagaaaagttgcatctcaaggtctactattcgtgggccccatctgcctctcacttttagctttgagccatcaacaaagaagttagacttatttttattccrtttgaatgcatttttttcctgattgtaaaaaaaaaaaaaaacaggctgttttgagaaaataggaaagtacaaaaagatgtcgaaggacaaagcattaataatccataaactgtcatggggcagtaagttctgttaatatttggacaaac

SEQ ID NO: 572508 - DNA, 534 bp, Homo sapiens
tacagtcaagctagactcttatgggaccttgcatgcctctctggagctttacatgctcttctctctccctgaaatcactcaaaacccccttctcttccggtatcttccattttcccaggcagaattagccattactacacatgtgccttctctttgcgattttaagttcttcaaaagcaaagactatgttatatccatcttgagaggcactgctagagtgcctctcagagtacctaacaatagtatgaataagagcagctaatatttcttgagtgcttgctatgtgacagctagttttctaaatactttgcatgggttttctcatttagtcttcgtaatagccccatgagagatatgttattatcatctctattttatagatgatgaaactgaagctagggtagtaaacccaggcaatctagcactataactttttaccaggggaacrtattgtatgctaattacaaatacgctaaacctttattgtatgaaataaataaatgaataaatggcatccataagggttactataaa

SEQ ID NO: 572509 - DNA, 627 bp, Homo sapiens
tctctggctacttctggaaagttctctggctctctcacattctcttgcccctctgccctccaccatgggatgatgcagcatgaaggccctcacaagatatcagcaccttgatattggacttcccagcctccagaactataaaataaatttcatttattatatcatgcccactctgtgatattttcttatagtgaaacaaaatggattaagacagccagtctgccacatgtcttccttaaatttcccattatttttatatgcaacaaaaatgtatttgtttatttctttttctgttctcatttccagtatctgtcaaaactacctttgtaaatgttaatgataaaaataagactatatcttcasaacattgatataagtttcaaaaacaatggaggaatatgtcccaaacacttattgactcccagaatacttcccatcacatgtattgtttctactacgtagcattttgtcaaaaccacacacatatatttagaaatatcttcagcttttgtattcacgctcttatatctgttccattttgatattttagaagttttgttaaaaaataaaaaggagaaaccaagtagcctcattctttctttcctggtttggctttagatatgctag

SEQ ID NO: 572510 - DNA, 599 bp, Homo sapiens
actcacatatatttaacatttttctgcttttggctgtccgtgaactctttttttagaaatctgtctgataacacatgaaatgcctctttatccctattcaatctggtatagtggctcaatgaagactgcaattctgaaataacagctgtacttcctcttaaaagactgtatttttattggaaatatcaccagttccaagtcaattgcctatacatggacactgtcattgatttattctctttttcatarggtttataagccttttcttcatttatttttaatcagagcataaagatgctctcagtgtcttttaatgaattcaccttttcattgttagcaagtggaagaatagcagcttttcaaagatgaagtagctaatcatatgcgattcagcattatctgtcattataaatttgtataaatgtacaatcaacctgcaggctgtgcaactcatttaagggagcagtgggatagaaaggtatttaacatatttataacttttgttatctgttgcatgtttatagaactagaaaagcatgctaaccatatgggtaattctatttatcttttttcctgggtgtgctccaaaacttattgaa

SEQ ID NO: 572511 - DNA, 599 bp, Homo sapiens
actcacatatatttaacatttttctgcttttggctgtccgtgaactctttttttagaaatctgtctgataacacatgaaatgcctctttatccctattcaatctggtatagtggctcaatgaagactgcaattctgaaataacagctgtacttcctcttaaaagactgtatttttattggaaatatcaccagttccaagtcaattgcctatacatggacactgtcattgatttattctctttttcatagggtttataagccttttcttcatttatttttaatcagagcataaagatgctctcagtrtcttttaatgaattcaccttttcattgttagcaagtggaagaatagcagcttttcaaagatgaagtagctaatcatatgcgattcagcattatctgtcattataaatttgtataaatgtacaatcaacctgcaggctgtgcaactcatttaagggagcagtgggatagaaaggtatttaacatatttataacttttgttatctgttgcatgtttatagaactagaaaagcatgctaaccatatgggtaattctatttatcttttttcctgggtgtgctccaaaacttattgaa

SEQ ID NO: 572512 - DNA, 599 bp, Homo sapiens
actcacatatatttaacatttttctgcttttggctgtccgtgaactctttttttagaaatctgtctgataacacatgaaatgcctctttatccctattcaatctggtatagtggctcaatgaagactgcaattctgaaataacagctgtacttcctcttaaaagactgtatttttattggaaatatcaccagttccaagtcaattgcctatacatggacactgtcattgatttattctctttttcatagggtttataagccttttcttcatttatttttaatcagagcataaagatgctctcagtgtcttttaatgaattcaccttttcattgttagcaagtggaakaatagcagcttttcaaagatgaagtagctaatcatatgcgattcagcattatctgtcattataaatttgtataaatgtacaatcaacctgcaggctgtgcaactcatttaagggagcagtgggatagaaaggtatttaacatatttataacttttgttatctgttgcatgtttatagaactagaaaagcatgctaaccatatgggtaattctatttatcttttttcctgggtgtgctccaaaacttattgaa

SEQ ID NO: 572513 - DNA, 403 bp, Homo sapiens
tataaactcctcttagtttcttacaacaactcagtggggacattacagataaatttctttttggtttagtgagttttaagtcatttgtggataattttagtgttttatttgagactataatytaataaacaaaatattgcagctaacctccatgctttatttagttaagtatttagcatccattcattaaatttatcaatatgaatttattaaatgcctaacatgtacaaggcacttaactataagcaaagagactacacagattaaatagtacactatcttatattcaaaggactcaggtggagacatgtttaaaaaaaggaattacactatggttggtaagtactatgacaaatacatgttgaggagtatagaagatggttctcaatcccaggaaagactt

SEQ ID NO: 572514 - DNA, 403 bp, Homo sapiens
tataaactcctcttagtttcttacaacaactcagtggggacattacagataaatttctttttggtttagtgagttttaagtcatttgtggataattttagtgttttatttgagactataatctaataaacaaaatattgcagctaacctccatgctttatttagttaagtatttagcatcyattcattaaatttatcaatatgaatttattaaatgcctaacatgtacaaggcacttaactataagcaaagagactacacagattaaatagtacactatcttatattcaaaggactcaggtggagacatgtttaaaaaaaggaattacactatggttggtaagtactatgacaaatacatgttgaggagtatagaagatggttctcaatcccaggaaagactt

SEQ ID NO: 572515 - DNA, 520 bp, Homo sapiens
acccttactcttctttacattcgcattcttggtccttctctttctagttctccatataccccatgatctactatttcaatcaatatstacatcaaaatgatctacaatcatttgtcttgttatccctttttttacatatgtcaattatctgccgctgagtctaattcattgttttatttatttagtaaacacttatgtgacacttatataagttatatctaagaacttcacaattttaaccattcattaataaattctcataaaaacccatgaggtgggtacatccaggatgttctctgcaagaggaattcacaccatcacacaagtttatgactcccaacctggaacataaaattctttaattgggatgttctctgtggagaaagcaactaccatgctgtgagaaagtcaaactatcccatgcaaagtgacctcatggagaggcccaaatggagaaaaagctgaggccactagcccacagaccgcatcaaccaccagacatgtgagtgaaatgaacaag

SEQ ID NO: 572516 - DNA, 489 bp, Homo sapiens
gatattaaagctatgttttacttattccgaaggctgtgctcataatcattttaccatattgcagctatcattcattttccaaatgaaccatatagtaggcactcagggtaattggttctaggaaattttttatattaaaacagtgtgaaattttgctgtttaaactgtactatttacattataacaagaccatattagtatacgtaycatggatctacaattattaactgaatggtattaaacttaataacgctatatgaaaatgaacttgcagaaaaatattgctttcaaactcatatatgtatttaatttttatagcaagatattgggaattgggtcttttcagatggaaaatctaacctggatgtttaactcccttgtcccgtcttttctgagctttagtttaatctatttgtgaaatgaatgtaactgttcagtttcattattgtgagctgactcatttatcttgattttaatgatgaataaata

SEQ ID NO: 572517 - DNA, 503 bp, Homo sapiens
aagtgatattgaatgttttttctttttttgtatgtgatttcattttcagccattcttttgggaattactctagctcttcagaattaattggrtaacttttatgaaatgtcttaatcatttggcctactctttcctgaaattaagaaaacaggcaggagataacattattaatttgtttgtaaacaaataacattttttgtcatattggacatatatttaattgtcttctatttcttcttgggtcaattttaatgatgggatgttttccttgataataattcatgccatacgtttctttcaaataattacgataaagttgtacttactgttccatcatgcttgtgaaaatttttcttaattgtggtgtacacatgtttttgatacttttatttatgcatttcattttccaaaaccagacatgcccaaggcttgtttttgttttatatcttttcaaagaactgttttttcccttcaattaaccctattgatttatgaattctaaa

SEQ ID NO: 572518 - DNA, 578 bp, Homo sapiens
ctgtctctctcttctctatagagctgcttagctcttgaagaacaagaactctgtgttctatactttatgtattctccaaaattccacctacacattaggccccaataaatgcttattgaatgctaagtgggggaaaaagttaccagttataaattacagtagcattagaagaggcttaacaatatatattgtttctataattcccaagaggtaatgctatatctttgaagaaacagaccatcagaaagagttttccagtcatgtagagacttcttcaattttctaagaggccatctgaaggctgcttatgggcaaagaatacaggagcaatcgctgactgaaatgcccaaactgcaaatacacatttcartcaaatgcaaatcaaggataaaagaactagaattgagtgaatttttatcttcattatagtaaaattttcaatcattgtagaattcacttaatgtagctattatatagatgttttaggagctctggaggggaggggaatgtaagctctttgttaataagaagataactagctcccagaaacagtttgtctctatgagaagtaaatcaat

SEQ ID NO: 572519 - DNA, 510 bp, Homo sapiens
ataaacctaaacccaactattcaataatttatcaggaaaatgtaataattataaatgtctatgtgcctaataacagagcctcaaaaaactgaagcagattctgacaggactaaagaargacatagaggttttaaacacctttctgagaattgaaagaacaaagaaaaatatatacatatgtacatacctatcttgattagattacagaatgaaatgattagtttctaagcagtgaatgttttaattttttccaataacatcacatttttaaaaagaaaacaatagtccatcctggctaacatggtgaaaccccgtctctactaaaaatacaaaaaaattagctgggcgtgggggcgggcgcctgtagtccagctactcgggaggctgaggcaggagaatggcgcgaacctaggaggcggagcttgcagtgagccgagatccagccactgcactccagcctggaggacagagtgagactctgtctcaaaaaaaaaaaaaaaaaaaaaaaaa

SEQ ID NO: 572520 - DNA, 510 bp, Homo sapiens
ataaacctaaacccaactattcaataatttatcaggaaaatgtaataattataaatgtctatgtgcctaataacagagcctcaaaaaactgaagcagattctgacaggactaaagaaggacatagaggttttaaacacctttctgagaattgaaagaacaaagaaaaatatatacatatgtacatmcctatcttgattagattacagaatgaaatgattagtttctaagcagtgaatgttttaattttttccaataacatcacatttttaaaaagaaaacaatagtccatcctggctaacatggtgaaaccccgtctctactaaaaatacaaaaaaattagctgggcgtgggggcgggcgcctgtagtccagctactcgggaggctgaggcaggagaatggcgcgaacctaggaggcggagcttgcagtgagccgagatccagccactgcactccagcctggaggacagagtgagactctgtctcaaaaaaaaaaaaaaaaaaaaaaaaa

SEQ ID NO: 572521 - DNA, 520 bp, Homo sapiens
agtgtaaaagtaattgtggtgtttgccattaaaagtaatggtagaaacctmagttacttttgcaccaacataataattcttcaataatagaacctgcagaagaaacaaggaacagaaattgatcctcaagaatttagatactagaattttcagatgcatattggaaatattatgtttattgtgtttgaagaaatgaagggcaatgcttttttaattggcaggaaactggaaactacaaaggagtgttgttacgcagttgaaaaagaactaaacaaatttgagaattagaaaagacaattaccaaagttaacatatgactgagtcattaatagattagaaacagatgaagaaagaattcatgaattgcaataggtcagaattaatatccagggtgaaggaagaataaacaagaggatagaaaatcctaaagcaagaataaatagaggaggaacagaaagtgaggtagtctgataatcccaagtactgtcaagcatataaagaaatagaagtgctcctattt

SEQ ID NO: 572522 - DNA, 588 bp, Homo sapiens
ttaagagacagaagagacactagcgtggctaggaccaaggaagctagagccacatattaggaaatatctgagaggcaatgtatttggatggggcagagcttcactagagtctttaggccactatgatgatgtcagctgttactttgactaagataggaagccagatgggctctgagcagaggagagacatgatcagatatattttcacagtttactagacagttgacagttactattgacaatagactggaagaggcaagtgaagaagctgggagatcaattaggagccttttgcaataaatcagaagtgacttggcagtaaaatggatttaataagacataattggattctaggtaatttttgaaggtagagctgatgaaatttgttgatatattggatgtggggttataagaacttagtgagaagtgatgcaacaccatctcatacttcctagaggtgctcagtggaggcatcagtctttggaagagtattaacttctgggactgtccttgactgatttttagytggagtatgtgtcataataattctattagatgaactaaagctttcaatcaatagactaaagt

SEQ ID NO: 572523 - DNA, 565 bp, Homo sapiens
aattcctttgtagtaatacacttggaccacttggtaagaagtaaagatcagtgggcaaattatggaaacaaagagattagaagagacaccaagtagtagagactgcttttattatcattctttcttttcctccatttctaagacatatttctgtggctttggtgatggttgaatacaaagaaatctatatatgaagaaatttaggaaaattctcctaagttatcaatccaacatatgcaatcctcacatctcaataattatatcaaatttcatttatacctaacatgagtccattctgattcagaaggmagattatcagagtggctaaggacatggtttgtggaaccaggatctctgatcttgaaatttatgtctggctcctgctagctatatggaggcagaaatttagttaactcttatgtaccctatttttatccttataatgtaattagtgccactcatatgaaattttataaggattaaataagttaatatatataaccttcttataataggtcctatcaaatggtagatgctcgtgttggtttttctctacttttcttct

SEQ ID NO: 572524 - DNA, 568 bp, Homo sapiens
agctgggcatttgaatctcagagatytatgggtctgagaaaccctgacattctttagtcactctgaagatgtgtgttgagtaagagagagagagattttctatatgatgagatttttctatgtattttctacagagggaaaacatactgttgcttagaagagaaaaatccatgaatacatttaacaaatgtgcattcctcacctgtgaaataaatcatgctatttagtaaactaccaccaaatatatctcaatatgttaaaatatgaaaacaaatgactattcataaaaattgaaaggaaaatattttgaacaaaagatctataaggaaaagatttcacttaactttaataaatgggatttggaagatgagttatgttcttatgcactttcttgcatttataaaataataggcttatgaatcttcttttgcctgacagggtcaagtagcatacggattttctttcctctttatttccactattgaggtgcaacaatcaagattcactcaaattgtgctggtggctctgatggagagggttatatctcatgtgcagtgggaccatgaga

SEQ ID NO: 572525 - DNA, 614 bp, Homo sapiens
gtgcacagaagtcaagaattgaggtttggaaacaacctagatttcagaagatgtatggaaaagcatggatgtgcaggcagaagattgatgaaggggtgaggtcgtcatggagagcctctgctaagacagtacagaagggaaatgtgggatgggagcccccacacagagtccctactggggcactgcctagtggagctgtgagaagagggccaccatcctccagatcccagaatggtagatccactgacggcttgcactatgtgcctggaaaagccacagacactcaatgccagcccatgaaagcagctgggagggaggctgtacccttcaaagccacaggggtggagcttccaaagactatgggaacctacctcttgtatcagtgtgacttggatgtgagacatggagtcaaaggagatcattttggagctttaagatttgactgccccactggattttggacttgtatggggcctgtagcccctttgttttgaccaatttctcccatttggaatggctgtayttacccaaagcctgtactctcattgtatctaggaagtaactaacttgcttttgattttaaaggctcatgggcagaagggtcttggatgaga

SEQ ID NO: 572526 - DNA, 583 bp, Homo sapiens
gttaatgttggtataaggcataagaaagggatccagtttcagttttctgcatatggctagccagttttcccaataccatttattaaaaagggagtcctttacccattgtttttgtcaggtttgtcaaagatcagatggttgtagatgtgtggtgttatttctgaggcctctgttctgttccattggtctatatatctgttttggtaccagtaccatgctgttttggttactgtagccttatattatagtttgaagtcaggtagcgtgatgcctccaagtttttttcttttcttttttttttttgagacaaaattttgctcttgttrcccaggctggagtgcaatggtgcgatctcagttcactgcaacctccatttcccaggtacaagcaattctcctgtctcagcctcctaagtagcttggattacaggcatgcaccaccacgcctggctaattttttttgtatttagtagagacggggtttcaccatgttagtcaggctggtcacgaactcctgacctcaggtgatccacccgcctcagcctcccaaagtgctgggattacaggcgtgcactgtcgcatcc

SEQ ID NO: 572527 - DNA, 529 bp, Homo sapiens
aattggagcatttgctgatcaagagttagtggcttcctcccatgtgtttctttcagtattgcatttcagggggtacttaattgccttgttgaaatattgcaaaatgatttcatgctgcaattaaaatatgttcacaactgttggcagagaaatggaaatagatttttcagtgtgttcaactaggtaaccctgatgctaaatgatgtgttcctgacatagagcaggttagygtgaaatttaatgtggggtcacctgcctcagaccaatgaaggacaaactaatctctagctagaatttgaccagtttctaggacacaataactcaaacatggcatgtctccagaatgatgcctccctccacaagaaagcagaaagtgttatgtatccctataaaaacattcaccaggctaggtgcggtggctcacgcctgtaatcccagcactttgaaaggccaaggtgggcagatcatgaggtcaggagttcaagaccagcctgatcaatatggtgaaaccccgtctctattaaaaatg

SEQ ID NO: 572528 - DNA, 663 bp, Homo sapiens
cacagtgttagccaggatggtctcgatcttctgaccttgtgatccgcccgccttggcctcccaaagtgctgggattacaggcgtgagccaccgcgccctgcctatgcttccattttatacactattaagaattctgttgataagatcctcctgtactatacaaattttaatgtcttttcttccatgagcaatctctagtttcaccacatagtctagccatggagcaagactcaatatgttgttccatttccccaaatcaaatacatttcacaaatcattagtgaacattatagattcaaatgcaaaatttggggaaaagaaggaaaatgagaatgttacgatgcttaccacacaagaaaataatcattagatgtgtctgttttcctcaaagtcctaattcattgccaaacaacagttgtgttttttttaattgattcttctttcttcccatcatcagttcttttcacttcactgcctttaatatccrtctttaattatgtagaaatttcaaccaaaagtcatttccttagggaaaatatttgattataacagctgctaagaaaatattttctccgtaatttatacaatatgacataggtcagggtgcctaaaatacgtcctaagagatataactagggaacaaacttgatctgtggtcaactt

SEQ ID NO: 572529 - DNA, 663 bp, Homo sapiens
cacagtgttagccaggatggtctcgatcttctgaccttgtgatccgcccgccttggcctcccaaagtgctgggattacaggcgtgagccaccgcgccctgcctatgcttccattttatacactattaagaattctgttgataagatcctcctgtactatacaaattttaatgtcttttcttccatgagcaatctctagtttcaccacatagtctagccatggagcaagactcaatatgttgttccatttccccaaatcaaatacatttcacaaatcattagtgaacattatagattcaaatgcaaaatttggggaaaagaaggaaaatgagaatgttacgatgcttaccacacaagaaaataatcattagatgtgtctgttttcctcaaagtcctaattcattgccaaacaacagttgtgttttttttaattgattcttctttcttcccatcatcagttcttttcacttcactgcctttaatatccatctttaattatgtagaaatttcaaccaaaagtcatttccttagggaaaatatttgattataacagctgctaagaaaatattttctcsgtaatttatacaatatgacataggtcagggtgcctaaaatacgtcctaagagatataactagggaacaaacttgatctgtggtcaactt

SEQ ID NO: 572530 - DNA, 659 bp, Homo sapiens
agattccatctctaaaaacagttcttacaagtagtaggcatgggggtgaatgcctatagtcccaggtactcaggaggctaagatggaagggtcacttgatcccaggagtttgaggctgcagggagttataatcaagccactacactccagcctgaccaacagagcaagaacctatctttaaaaaaagaaaagaatgaaccccaagtgatatcaggtgttagataaaggatgaaagggtgggagaatccaggtgataaatatcattaatattcctagagaactatcttcatttaaagatcttagaggtgaattaatgggcaattgacaagtaatttattattcacattttacaatacaaattttacagataaaactctagagttcaaacacaaatgtaatactttgatctgctttaaaaactttaacagacattttaacaatattaattcctacaattcataaacataaaatatctttccttaatgtgtgtcttcttcatttctctcaaggttttatggttttcatggtatagatatttcacttctttggtwaatttacaccaaagtattttatttttatgctattgtaagtgggattgtttccataatttcttttttggatactttattaatatggtgtaaaaatgtcattaattttta

SEQ ID NO: 572531 - DNA, 435 bp, Homo sapiens
cttgtctctactaaaaatacaaaaattagctgggtgtggtggtgggcgcctgtaattccagctactcgggaggttgaggcagagaatttcttgaacccgggaggcagaggttgcagtgagcccagatcatrccactgcaatccagcctgtgcaacagagcgagactccgtctcaataacaataaaataaagagtaattttgctggattggagctacttcacccatacagcataactccaacaactagcaagttgattggccccaagtgcccctgcctaatgtcttggtcctacctttgataggatctgcttacttgctctagttcccaaaggggaattatcagctaaagccatttttttcaatttatttctcaatgactgcagttaacttttatgggtgaagaaataatctactttctcattgctccttcctgat

SEQ ID NO: 572532 - DNA, 638 bp, Homo sapiens
ctttcttctactcagtctattttactattagtgctcgtgattaaggctgggtgcygtggctcacacctgtaatcccagcaatttgggaagctgaggcaaggagatcacttgattccaggagcttgaaaccagcctggctgacatggcaaaacccagtctctactaaaaatacgaaacattagccaggcatggtggcacgtgcctctggtcccagctacttgggacactgaggcatgagaatcactggaaccagggaagtggaggttgcagtgaaccaggattgcaccacagcactcctgcctaagcaacagagtgaggtcctgtctcaaaaacaaacgaacaaacaaacaaacaaacaaaacttccgattgcattataaaatttttataatgtcttttttggctctatctggtgagttctgttcttttctatactggctattttgtctgtcagcttctctatcattttattctgattcttagcttccttggactgggtttcaacatactccaaatctcaataatctttgtttctattgatattcctaattctgtttctgtcattttagtcatctcagcctggttcccaacccttactggagaggtagggcagttgtttggagaaaaaaaaccaagaac

SEQ ID NO: 572533 - DNA, 605 bp, Homo sapiens
cagctcactgcaaactccgccttctgggttcaagtgatcctcctgcctcagcctcccgagtagctagggttacaggtgcctgccatcacacccggctaattttttgtatttttagtagagactgggtttcaccatgtcagccaggctggtcttgaactcctgacctcgtgatctgcccgcctcagccttccgaagtgctgggattataggygtgagccactgcactcagcctcaactcctttttcataaactcttgagatgtttttccattccaagcccccaccacttcctgatggtgagagcctgatggtctttctaagaaatcatgttggaatatgccaaataaaaatagatagagatatatagtatagctatctatagatacaccaattaagtgccatgtagcttaaatgtaaatttttgcaaatggtgcattttttatttgttaaaaagtgatgtttaaatttgctatagagtttataagacttgtttttgatttcaacaaaaaccataatgcataaatttgtcagtctgaatgttgtcttttggtgacttatgttctcaagtttgtccttgatattaatagaacctagtttttttggtat

SEQ ID NO: 572534 - DNA, 500 bp, Homo sapiens
atcccaattccttcacttacctgttaggtgacttgggggaagtaacttcactttgtctcggtttcctcttctgtgaaatggagaaataatagcacttgaatcaaaaatattttggttagagtttcaaagagatgtgtgtgaagttcttagtaaatatactgcatggtagacgcacctgacagcaataacttgacttaagcacactgagaatgaccctgcgtggctgacgcacctgaatgtgttcccagtcctgagctaaggaatctgggaggggccaaccaggagatccattccttacctatgaggaacatctgagccccaggcccctgccctaaccgtggaatgtaggccatactggggatccaggccctttgttttgggttaaatgaaggttgccaggtggaggttgtttgagggagggtgttaagtgaaaatgctatataaactatatgctttttacaaggggttgctrttcttctgcccagcccagtgccactgga

SEQ ID NO: 572535 - DNA, 596 bp, Homo sapiens
aatctctccttctgttttgaaagtaccagcagctatttcactaagtccagagagtattaccattctctgtgattttgacatgacatcaaatctatgctgttgaattctgaccaattctttgacttggtcagatatctcagaaacttctgaggaggttttccccaaaagtgcttkggttaacagtaacaatggaagcagtgatgctggcatgatgtagcaccatgtattgctatagacctgacatcaggtttctcctttattagctcagttggtttgagtttactataatgagacctaggtcatgggttcaaacccctggtagaacaattagcttacatttgttccttggacataggattaactctgagctccagttagttccctttactttggttctgtgcttcagaaagaccaggagaaatcttcacacaaagcaaaatggatgcctactaagagaacagcaggagaatcatctctctatgaaatctccctagctcacattcacactctacaaagagttatattactgattcacactttgtggacaattggtttaacacatttcctaattaggactataaacagcaaaacaatcc

SEQ ID NO: 572536 - DNA, 508 bp, Homo sapiens
ctagatattaccctctcttaaccccacttccctgaccacctaccaccctatttctttgctcttctatcttttcccaatgtcttcaagttttcttcccccattccccattaaatccagtccaaaaaggattctgaccatctcactcaaacagatctgctcttatgaggtcaccagtgatctctactggtccatattcaggccttatcttacttaacccatgactagtttatgaagtttatgatgaaactgattcactgccatctttgacattgacttcacctgtctcagggataccaaagtctccaagttttcctccttcatcactcaatcattcctttttccattttttttattttttccatttttattatttttgtcttctctttatcccccctcccttccccagttattaagatgtcccagggcattgactccattggctatcactatcttacttagtctcgtggttttaaacaygttatgtgtgctagcaacaaccagattaaca

SEQ ID NO: 572537 - DNA, 400 bp, Homo sapiens
agtaattaaaagtctcccatcaaagaccaatccaggaactgaagttttcactgctgaattcgaccaaacatttraagaagaactaaaaccaattattcttaaattcttccaaaaaactgaagaaaaaggagatcttccaaactcattttatgaggtcagcattaccttgatactaaaaccagacaaagaaaaaacaaccaaaaagaaaactatgggccaatatctccaatgaacacagatgcaaaaatcttcaccaaaatactaacaaaccaaatccagcacattaaaaagatcatgcatcataatcaagtagaatttatcataggaatgaaaggatggttcaacatacaaaaataaataaatgtgatatatcaacagaatcaagggaaaaaatatatgg

SEQ ID NO: 572538 - DNA, 357 bp, Homo sapiens
tactaatcattgttattttaaatacccttttagagaactacagcatctgtgtcaaatctgagtatggtcctgatgattgctttgtctcttggcaatgggttgtttttgtttacmtttttctttcaagaaaaacctctactttttttttttggagagtctaagtgagacagcttactgaagagaatagggctatggtatatgctttttgtgagtagaaatggacatgtctttacttttcctaagcctttagtgcaggaggttgaattaatctggtcagaaattatgcttcagtttgttgttgctatggttacccgcagtgcaccacaagcctcaaatttctctgatgatactctgggt

SEQ ID NO: 572539 - DNA, 562 bp, Homo sapiens
aaccctctctctacaaaaaattagccaggtgtggtggcatgtgtctgtggtcccagmtactcagggggctgagaggattgctcaagcccaggaggcgaaggctgcagtgagccgtgattgcaacactgtgctccagcctgggtgacagagcaagatcttgtcacccccaccaaaaaaattcggaatacataaataacttctattaaaaattaatgagaataaaacagaaaaccccaaggaaaaatagtcaaaagacttaaacagtaaatccataaaagaggaaattcagaaagtcaataaacatatacaaagtgcttagcctcattggtcatccagcaagtataaattataccccagtgagacaccactacacaaccacaagaataacaaaaattatatatatatatatatatatatatatatatatatatatatataaaatttgtgtgtgtgtatgtgtgtatgtgtgtgtacatacttcaagtattaggaagaatgtggaacaactaagacttacgttatgggtggcaaaataaattggcacaataagttttgaaaacag

SEQ ID NO: 572540 - DNA, 562 bp, Homo sapiens
aaccctctctctacaaaaaattagccaggtgtggtggcatgtgtctgtggtcccagatactcagggggctgagaggattgctcaagcccaggaggygaaggctgcagtgagccgtgattgcaacactgtgctccagcctgggtgacagagcaagatcttgtcacccccaccaaaaaaattcggaatacataaataacttctattaaaaattaatgagaataaaacagaaaaccccaaggaaaaatagtcaaaagacttaaacagtaaatccataaaagaggaaattcagaaagtcaataaacatatacaaagtgcttagcctcattggtcatccagcaagtataaattataccccagtgagacaccactacacaaccacaagaataacaaaaattatatatatatatatatatatatatatatatatatatatatataaaatttgtgtgtgtgtatgtgtgtatgtgtgtgtacatacttcaagtattaggaagaatgtggaacaactaagacttacgttatgggtggcaaaataaattggcacaataagttttgaaaacag

SEQ ID NO: 572541 - DNA, 562 bp, Homo sapiens
aaccctctctctacaaaaaattagccaggtgtggtggcatgtgtctgtggtcccagatactcagggggctgagaggattgctcaagcccaggaggcgaaggctgcagtgagccgtgattgcaacactgtgctccagcstgggtgacagagcaagatcttgtcacccccaccaaaaaaattcggaatacataaataacttctattaaaaattaatgagaataaaacagaaaaccccaaggaaaaatagtcaaaagacttaaacagtaaatccataaaagaggaaattcagaaagtcaataaacatatacaaagtgcttagcctcattggtcatccagcaagtataaattataccccagtgagacaccactacacaaccacaagaataacaaaaattatatatatatatatatatatatatatatatatatatatatataaaatttgtgtgtgtgtatgtgtgtatgtgtgtgtacatacttcaagtattaggaagaatgtggaacaactaagacttacgttatgggtggcaaaataaattggcacaataagttttgaaaacag

SEQ ID NO: 572542 - DNA, 562 bp, Homo sapiens
aaccctctctctacaaaaaattagccaggtgtggtggcatgtgtctgtggtcccagatactcagggggctgagaggattgctcaagcccaggaggcgaaggctgcagtgagccgtgattgcaacactgtgctccagcctgggtgacagagcaagatcttgtcacccccaccaaaaaaattcggaatacataaataacttctattaaaaattaatgagaataaaacagaaaaccccaaggaaaaatagtcaaaagacttaaacagtaaatccataaaagaggaaattcagaaagtcaataaacatatacaaagtgcttagcctcattggtcatccagcaagtataaattatacccsagtgagacaccactacacaaccacaagaataacaaaaattatatatatatatatatatatatatatatatatatatatatataaaatttgtgtgtgtgtatgtgtgtatgtgtgtgtacatacttcaagtattaggaagaatgtggaacaactaagacttacgttatgggtggcaaaataaattggcacaataagttttgaaaacag

SEQ ID NO: 572543 - DNA, 587 bp, Homo sapiens
gtggacaaacaaaataagtggagaaactatatgtctattactattatgttacttatagaagcagagaaatcgttttcaaaaacatatatttggtttataaatatgctttctaggaagggctccaattgcaagtttataagcacttaatgtgttagcagatataaaactgctggaattctcaaggttttgttgtgcattaaggaggagatgaatagactttgatatcagtctttcagtgaggaaaattatattcaatactatgcagggataatcaaatccttagtgaagaactttgaggaccttgaaaacgtataaaactgtgaacccaagctcttactggcatttctgatacagcatattcttccttatccttgaaagccatactccctctccaagtaatatcttaagttcattccttttgtatggccctgtatcagctattgctctgatcagggagaaaatattgatttctttactttgtgaccctggtgggagctcaggagttatactaaaaatgaaatattggtggccctagatgaaatgtgtctcrtggtctgcttttgaaaattgcagttaatccatttgcc

SEQ ID NO: 572544 - DNA, 519 bp, Homo sapiens
gactatggtaggtgcaaagacggtcacagagatgaggaacacatgattcttgttcccaaggaatctacaatttttggcttttcattagtytcttttcactaataactatattagagaataagttaattactgccagggaagtgagtttgaatttaactcaattcagagttaggaaattaaaatgccaatttaccatcagtttgctcttgtgccttgagcaaaattgtttgtatctctagtctttatttctcttacttctaagataaagcggttaggccatacaattataaaatatttttgtacttctaaaattcaatgttaaaaactttatgttaaaaaagccaatgagtcaggtgcagtggctcacgccggtaatcccaacactttgggaggctgaggcaggtggatcgcctgaggtcaggagttcgagaccagcctggccaacatagtgaaaccttgtctcgataaaaatacaaaaaattagctggtcgtggttgcgggcgcctgtaatcccagcta

SEQ ID NO: 572545 - DNA, 537 bp, Homo sapiens
cactctgttacatccttggctttcttctctctcctgctagaaaaaaaaaaagtttctttggatgcaaccaaagagaacctctggcatcggcctgtccgttatttacccttagttgttaattctttttcttttgtgtaaaattaaagtcggcaaactgcagcccttgtgtcaaatttggtccttggcctgcttttgtaaagagttttgtttgtttttcatattgtctatggttgcttttgcattacaacagtggagctgagttgctgccacagaaatcttrtggatggcaaagcctaaaatatttgctattggtcctttaaggaaaccatttgctgacccctgtagcttggcaatagtcatccaatcccatgcacccttgtggccagtattttctgcacccacgtcaaacacccagtgcagcatgctgctagtgcattcccttccagaggtacaccctaccaatcccctgctggttaaatgtttaacttttgggctgtctctgcttaacagccaccaatgatggggaccttctcccca

SEQ ID NO: 572546 - DNA, 537 bp, Homo sapiens
cactctgttacatccttggctttcttctctctcctgctagaaaaaaaaaaagtttctttggatgcaaccaaagagaacctctggcatcggcctgtccgttatttacccttagttgttaattctttttcttttgtgtaaaattaaagtcggcaaactgcagcccttgtgtcaaatttggtccttggcctgcttttgtaaagagttttgtttgtttttcatattgtctatggttgcttttgcattacaacagtggagctgagttgctgccacagaaatcttatggatggcaaagcctaaaatatttgctattggtcctttaaggaaaccatttgcygacccctgtagcttggcaatagtcatccaatcccatgcacccttgtggccagtattttctgcacccacgtcaaacacccagtgcagcatgctgctagtgcattcccttccagaggtacaccctaccaatcccctgctggttaaatgtttaacttttgggctgtctctgcttaacagccaccaatgatggggaccttctcccca

SEQ ID NO: 572547 - DNA, 537 bp, Homo sapiens
cactctgttacatccttggctttcttctctctcctgctagaaaaaaaaaaagtttctttggatgcaaccaaagagaacctctggcatcggcctgtccgttatttacccttagttgttaattctttttcttttgtgtaaaattaaagtcggcaaactgcagcccttgtgtcaaatttggtccttggcctgcttttgtaaagagttttgtttgtttttcatattgtctatggttgcttttgcattacaacagtggagctgagttgctgccacagaaatcttatggatggcaaagcctaaaatatttgctattggtcctttaaggaaaccatttgctsacccctgtagcttggcaatagtcatccaatcccatgcacccttgtggccagtattttctgcacccacgtcaaacacccagtgcagcatgctgctagtgcattcccttccagaggtacaccctaccaatcccctgctggttaaatgtttaacttttgggctgtctctgcttaacagccaccaatgatggggaccttctcccca

SEQ ID NO: 572548 - DNA, 401 bp, Homo sapiens
gtgtgagctggtcagagtcactcttgcagagacatagggacatgctgaattgcatgctcaccaggtatcaggtgccgcactgagcagtcaatgtggataatccccacgtcagcccctgaggtaggtgctgctattatcccattttacagatgggaaatggaggcttaggagaggctgagcaatctgttgaaagcaagacataggtctgtttaatgactggacacaacttcctcctttcctgggtggaagaaagtctacctccaacaaaagcaattactgtgtttttttcccttgtgtcttcaagtggggatctgcataatcttaaactctttgaaatatttaaagtaccccaagcagtctccatcgccttyacaggcctgcaggaccctgggcacacagga

SEQ ID NO: 572549 - DNA, 548 bp, Homo sapiens
gccaccacacccagctaatttttgtatttttagtagagatggggtttcaccatgttggccaggctggtctcaaactcctgacgtcaggtaatccacccaccttggcctcccaaagtgctgggattacaggcatgagccaccatgcctggcccactgccaattaagtgtaaggggtggaggcccgagggagaacccaaggtctatttgccctaagccatcaatrccagggatggctccttgcccagaacaccttcccagatggaccagttaatgcttctggtgatgatgccatccgaatgctatactgaaagcccttcagccgaggatcaaggttctgcttgtatgcacggttgttgaaatgctatttaaaagtgccgtgccgtggtgtggtgtggggacctagagacctgggctttggggccaacagtaagaatttgaatcctgctgcttccacttgttagtcttgggcttgttgcttaaatctctctgcaattcactgtccttgtctgcaaaatgggaataattgttgttacagcactacttagtag

SEQ ID NO: 572550 - DNA, 548 bp, Homo sapiens
gccaccacacccagctaatttttgtatttttagtagagatggggtttcaccatgttggccaggctggtctcaaactcctgacgtcaggtaatccacccaccttggcctcccaaagtgctgggattacaggcatgagccaccatgcctggcccactgccaattaagtgtaaggggtggaggcccgagggagaacccaaggtctatttgccctaagccatcaatgccagggatggctccttgcccagaacaccttcccagatggaccagttaatgcttctggtgatgatgccatccgaatgctatactgaaagcccttcagccgaggatcaaggttctgcttgtatgcacggttgttgaaatgctatttaaaagtgccgtgccrtggtgtggtgtggggacctagagacctgggctttggggccaacagtaagaatttgaatcctgctgcttccacttgttagtcttgggcttgttgcttaaatctctctgcaattcactgtccttgtctgcaaaatgggaataattgttgttacagcactacttagtag

SEQ ID NO: 572551 - DNA, 394 bp, Homo sapiens
  misc_feature 378, 384, 385, 386, 387, 388, 389, 390, 391, 392, 393, 394: n = A,T,C or G
gcagcacaatcatagctcactgcagcttcgacctcctgggctcaagccatcctcccacctcagcctcctgagcagctgggactacagatgtgccaccctgcccagaggaagttttaaacttgaccactatctcctagctaagagaggggcatgaagcccaggccccagagacacggttcctctggccgcaacctttgcttccaagcatctgagtaactaactgcccatcagggatcaggggaaagaggcccttccsacaccagcgcaatattcttctgcttggccacatgagggcagcacacgcctgtataaagcacagctctggctacagctccgcctggggatgagtatgtcaacagcttcagggtacatcctgtnccccgnnnnnnnnnnn

SEQ ID NO: 572552 - DNA, 593 bp, Homo sapiens
aatataataagaaaaaccaaacaacacaataaaaaatgggcaaaagacttgaatagacaattctctaaagcagaaatacaaatggccaataaggacaggaaaagatgttcaacattactaatcattaaggaaatgccaaccaaaaccacaagaagacactgcttcacatgcattaggatggctgttatgaaaaacaaagcaaaacaaatatggttaactataatctactgtaaatttcagaatagctagaagaggataattctatgtttctagcataaacacaagataaatattgaaagtgatagatatcccaattaccatgattcgaactttacacattatatgaatgtatgaaattatcacatgtgccctgaagatatgtacatctattatgtatcaataagaaagagtaataaatgcacacaaaaaagaaaacaaagtaacacgtgttgatgaggatgtggatacattggaacycttgcgcaccgttggtggaaatgtaagctggtgctacccctgggaaaaatattatggaatttcttcaaacatattaaacctagaattaccacatgatccagaatttccacttctag

SEQ ID NO: 572553 - DNA, 569 bp, Homo sapiens
tttttttttggtggctgtggtacagcatattgctataatactcagacaacttgcaggcactcagtgatgtttactgatttgaatacaattttactaatattttaaaactgccaacatctctataagctttcaccaaaaaagacttctgattacattaaaccttgatgtttttcatccttgtgaaaagagagagttttgctgatgcagattccctggcctggtatggttgtttgtagcccaggagcaggaacagctaaagcaggccatagacaaagtcrtgagtatcaaaatacagtaacgggccgaacattgtggctcatgcccgtaatcccagcactttgggaggctgaggcgtgcagatcacctgaggtctggagtttgagaccaggctggccaacatggtgaaactccatctctactaaaaaaatacaaaaattagctgggcgtggttgcgcactcttgtaatcccagcttctcaggaggctgaggcaggagaatcacttgaatctgggaggtagaggttgcagtgagctgaaattgtgtcattgcactccagcctgggcaacaaa

SEQ ID NO: 572554 - DNA, 569 bp, Homo sapiens
tttttttttggtggctgtggtacagcatattgctataatactcagacaacttgcaggcactcagtgatgtttactgatttgaatacaattttactaatattttaaaactgccaacatctctataagctttcaccaaaaaagacttctgattacattaaaccttgatgtttttcatccttgtgaaaagagagagttttgctgatgcagattccctggcctggtatggttgtttgtagcccaggagcaggaacagctaaagcaggccatagacaaagtcatgagtatcaaaatacagtaacgggccgaacatkgtggctcatgcccgtaatcccagcactttgggaggctgaggcgtgcagatcacctgaggtctggagtttgagaccaggctggccaacatggtgaaactccatctctactaaaaaaatacaaaaattagctgggcgtggttgcgcactcttgtaatcccagcttctcaggaggctgaggcaggagaatcacttgaatctgggaggtagaggttgcagtgagctgaaattgtgtcattgcactccagcctgggcaacaaa

SEQ ID NO: 572555 - DNA, 579 bp, Homo sapiens
ctcactctgtcacccaggctggagtgctgtggcatgatctgggctcactgcaacctctgcctcccgggttcaagcaattctcatgcctcagccttccccagtagctgggattacaggcatgctccatcatgcccagctaatttttgtatttttaggagagatgggtttcaccatgttggccaggctggtctcraactcctggcctcatgcaatccacccaccttggcctctcaaagtgctaggattacaggcatgagctcctgcccctggccaagtttgggtcttaaaacatttgctgaaacttctcctcacttggtgcccagcaatacacatcttactttctatgcaaatcacaatgtcattgtttggctttgctgcactgggtggaaagccccaagtttggttcagtaacactgcctctttttaaaagtctgaatggggcacctaaaatgcttagttatactctattatgatttaatgggaacatacaatattgtagtggaattacaacttttcacagtcaggagggtctctaggcttaagtttcataatgttattggttaaacaacttaaaatgcc

SEQ ID NO: 572556 - DNA, 557 bp, Homo sapiens
atagaacaaaccattcttttttttcctgtaatatctatctctcaacattctgtggaatctgtattctttcaataacactgtagaaaacagtgatgttgcttaactaatactttggttgggattctagcatcaactttcaggctttctttgttcttgggctagaagaactcgtagggtcattgcaaaacttayagaacatgaactgggttgcaaacgctctcaattctggctagatcatcttgatcgactcacttaacttctgtgaggtcaattaatggagttacagaaaaaccaaatatgactctatatttgagagtattttagaggggtaatagtcaattaaaactagtattttttttttctttttaaaaaaatataagggggaaagtgaactattacttcacttgggttttagctttttttcctggcacatcgtgtccatgcctttgttcatgcacctcctgctgactggcatactgtttctccagctcaagttagcaagactgagccaaatacttcctcctggtgaatagctggcaagaaaaactaaaaagtca

SEQ ID NO: 572557 - DNA, 520 bp, Homo sapiens
tttaaagtactgttggtttaaacttatttgtttaaagtctatattatctgatacaggaacagtgacttctgctcttttttgttttccatttgcatgataggtcttttgccatttctttactttgagcctactgatatcattgcatgtgaggtgagtctcttgaagacagcagaaggatgggtcttatttttttttttaatcaaatttgccactctgtatctttaaagtggagcattttggccatktacattcaaggctgatattgatatgtgaagttttgttcctgtcatagagttgttgcctattgctttgtagtttgattgtgcagttgctttatagtgtttgtgggctacgtgcttgcatgtgtttttgtggtagcattgttctcgtttccatatttagaactcccttcagcatcacttgtagggctgatctggtgttgatgcattcccttagcaattgcatctctgggaaagactatatttctcctttgttcatgcagcttattttggaaaggtat

SEQ ID NO: 572558 - DNA, 624 bp, Homo sapiens
gcactaatcccatgcatgagggatttcctctcatgacctaatcacttctgaaggtccccaactcttaatatgattgcattagatattaggtttcaacctataaattttggggaaacacaaacattcagaccatagcactgctgctccactaaaactcttctaaccacygcttctgtcttcctatcacatcccacccttctatcctgttgatcaatgttcttcccttgtccaacccaccacagccacctttttctacctaccgttacagtcactgcacacatgacttaccataggactgtttagaccatgtcagattgcctaggtactttttctttcggaatctgtaactagatttgttaaaatgcttatagatgcatgtaattaaataaccaactgacacagattaaactctgaggaattattacctaatttaatagctctgggagaagtagtccctgagttgattgactaatgcagaggttctataaatgatgtcaggactcagagatggcttatctgagattttctttagcttccctcagtgttattgaagatggcagctgcatttccaagcaccctgctctcacaagacaacatctaagggcaagagagaaaatgcatttc

SEQ ID NO: 572559 - DNA, 624 bp, Homo sapiens
gcactaatcccatgcatgagggatttcctctcatgacctaatcacttctgaaggtccccaactcttaatatgattgcattagatattaggtttcaacctataaattttggggaaacacaaacattcagaccatagcactgctgctccactaaaactcttctaaccaccgcttctgtcttcctatcacatcccacccttctatcctgttgatcaatgtycttcccttgtccaacccaccacagccacctttttctacctaccgttacagtcactgcacacatgacttaccataggactgtttagaccatgtcagattgcctaggtactttttctttcggaatctgtaactagatttgttaaaatgcttatagatgcatgtaattaaataaccaactgacacagattaaactctgaggaattattacctaatttaatagctctgggagaagtagtccctgagttgattgactaatgcagaggttctataaatgatgtcaggactcagagatggcttatctgagattttctttagcttccctcagtgttattgaagatggcagctgcatttccaagcaccctgctctcacaagacaacatctaagggcaagagagaaaatgcatttc

SEQ ID NO: 572560 - DNA, 624 bp, Homo sapiens
gcactaatcccatgcatgagggatttcctctcatgacctaatcacttctgaaggtccccaactcttaatatgattgcattagatattaggtttcaacctataaattttggggaaacacaaacattcagaccatagcactgctgctccactaaaactcttctaaccaccgcttctgtcttcctatcacatcccacccttctatcctgttgatcaatgttcttcccttgtccaacccaccacagccacctttttctacctaccgttacartcactgcacacatgacttaccataggactgtttagaccatgtcagattgcctaggtactttttctttcggaatctgtaactagatttgttaaaatgcttatagatgcatgtaattaaataaccaactgacacagattaaactctgaggaattattacctaatttaatagctctgggagaagtagtccctgagttgattgactaatgcagaggttctataaatgatgtcaggactcagagatggcttatctgagattttctttagcttccctcagtgttattgaagatggcagctgcatttccaagcaccctgctctcacaagacaacatctaagggcaagagagaaaatgcatttc

SEQ ID NO: 572561 - DNA, 565 bp, Homo sapiens
  misc_feature 441: n = A,T,C or G
ctttttcctgggtatcaccagcagaggctgcagaacagcaaatactgctgcctgatccttcctctggaagcttcgtctcagagggggaaccgcctatatgaggtgtctgttggcccctactgggaggtgtctcccagttaggctacacgggggtcagggacccacttgaggaagcagtatgtccattctcagkgctcaaatgccttgctgggagaaccactgctcttttcagatctgtcagatagggatgtttaagtctgcagaagttgtctgctgccttttgttcagctatgccctgcccacagaggtggagtctagaggcagtgggccttgttgagctgcagtggtctccacccagtttgagcttcccagccgctttgtttacctactcaagccacagcaatggtggacgcccctcccgcagccaaggctgggttcggncccctcgcagtttgatctcagactgctgcgctagcagtgagcaaggctccatgggtgtgggacctgccaagtcaggcacagtagagaatctccttgtctgccagttgctaagacctcgggaaaa

SEQ ID NO: 572562 - DNA, 565 bp, Homo sapiens
  misc_feature 441: n = A,T,C or G
ctttttcctgggtatcaccagcagaggctgcagaacagcaaatactgctgcctgatccttcctctggaagcttcgtctcagagggggaaccgcctatatgaggtgtctgttggcccctactgggaggtgtctcccagttaggctacacgggggtcagggacccacttgaggaagcagtatgtccattctcagtgctcaaatgccttgctgggagaaccactgctcttttcagatctgtcagatagggatgtttaagtctgcagaagttgtctgctgccttttgttcagctatgccctgcccacagaggtggagtctagaggcagtgggccttgttgagctgcagtggtctccacccagtttgagcttcccagccrctttgtttacctactcaagccacagcaatggtggacgcccctcccgcagccaaggctgggttcggncccctcgcagtttgatctcagactgctgcgctagcagtgagcaaggctccatgggtgtgggacctgccaagtcaggcacagtagagaatctccttgtctgccagttgctaagacctcgggaaaa

SEQ ID NO: 572563 - DNA, 596 bp, Homo sapiens
ggcctaacttctaactcccataaaggtttttctgttatgtttttgataaaatgcctcctcaaagaaaaaagttactgtaatgaatatgagaggaaagctccagtctttaaagatattcattcacttatttacttattaactcaagaaatatattttgggaacttcacatgtgccaaacactctcatgaagaatataacggtgaatgaacagctcagaggaagttccttccctcatttgcttaaactctaatgaaagacagaccagcacaagtgatacacgttaaacrtgtattaaaagaactgaaaattatgctatatgttcctaaggaaatgaacccagggctgagatacctcatagagtgtgcaggaagtgaggagagggagagggcttctttaggaaagttaaggaaaggtctcagacaggtaagctgagactgtcttagagaatgagtaggagaagccttgtaaaaataaagatattacagaaagtattcctggcagagtgtagcatgtgcaaaggccctaaggcagatacaagtttagaatttccaggaattgaaagaagatgtacagttacaacagagggagtaatagca

SEQ ID NO: 572564 - DNA, 539 bp, Homo sapiens
attacaggtttttttctcagcacttggcagatatttgtattttagcttcctatgtttttctgctgagaagtcagttatcaatacaactgtcattcttctgaacataatctgtcctatattttctgggtgcttttaagttattttctttcctcattttttgtaatggctcagtatatttcttttaatgttttcttcttgagtttttctatctgtaaatcratgtatttcataagtttgaggatattcttagctggatattatcaaattgttgccttctaccctctttttatgtctcatttttgaagctatagttaaatgtatatcagacttttggaccgaatcttctgtctcttaacctctcttctgtattttgtatctttttgtctcccagttgcttcataataagtatttccttctgatttgccttttatttcactaattctctcttcattgaagtctaatctatgaaatatttccactgaattattaatttcagtagtttttcattctagaatttttatttgattttttaatattat

SEQ ID NO: 572565 - DNA, 553 bp, Homo sapiens
tcctttctctatattctgctattatctgtgaccttggtcctaattctttcaactgagtaacatctcagttgcaaatttcataaagcttaaaaatgtaaataaaagtcataccatccacacacttttcacccttaagacactgggaacacaaaagggcaaactaaacctaaagcaaacagaggaaagaaaataataaagattaagcagaaagtaatgaaatagaaaacagaaaagcaacacagaaaatcaatacatctaaaagttggttgtttaaaatgatcaataaaactgacaaacctttagctacackaaccaagaaaaaagagaaaagactcaaattactaaaatcagaaatgaaagaagagacattaccactgattttacagaaataattttttgtttgtttgtttttgagacggagtcttgctctgtcgcccaggctagagtgcagtggcacaatctcagttcactgccacctctgccacccaggctcaagcaattcttccacttcaccctcccaagtagctaggattacaggcaagcaccaccaaac

SEQ ID NO: 572566 - DNA, 501 bp, Homo sapiens
ttccctgccctgtcagcaatttcccagtcatctcccggtcctcaaggctgcaaaaaattgggaagacattccttagcacagaaagagagacttgagagtcctgctctaggctttttattcaccctgacaaatgtaacaacctgcttttgtctttaaagcatttgtgtgtctggtgtctggaaagtagccactctgagaaggcctgttttttttttttttttttttttttttttttttttttttaatttcaaagtgaacttgtggtcttttttgggttttgatttttatcttttggaaaagtcggcgtctgcagctgtgttgcacttgaggcttggaatctttcatccctgacagcaggaggataaaagggggcttaccatggtctactaaggagcctttctttagcttcaggcagcagtggatgtaagcaaaggcaaaatgaccacaaggatcttgctttttsttggggctggggttgaggaaagcatagagcccattttg

SEQ ID NO: 572567 - DNA, 501 bp, Homo sapiens
ttccctgccctgtcagcaatttcccagtcatctcccggtcctcaaggctgcaaaaaattgggaagacattccttagcacagaaagagagacttgagagtcctgctctaggctttttattcaccctgacaaatgtaacaacctgcttttgtctttaaagcatttgtgtgtctggtgtctggaaagtagccactctgagaaggcctgttttttttttttttttttttttttttttttttttttttaatttcaaagtgaacttgtggtcttttttgggttttgatttttatcttttggaaaagtcggcgtctgcagctgtgttgcacttgaggcttggaatctttcatccctgacagcaggaggataaaagggggcttaccatggtctactaaggagcctttctttagcttcaggcagcagtggatgtaagcaaaggcaaaatgaccacaaggatcttgctttttgytggggctggggttgaggaaagcatagagcccattttg

SEQ ID NO: 572568 - DNA, 489 bp, Homo sapiens
gtgagcctgtttccttgcactgtaatcttcacaagtgctactcggtcccttttcctccccttacgtagggcagataggatgcctagagggagttggagttggatatcccttccycatataaatgttttgtagttttgggtttggcatttttgcttatcttttaatagatttatttctaaatacttgattttttgagccactatgtaagtggtctttttaaaacaattctttctctaatattattttttctcatatatgaaagtgcaatagattttttactactaatcttgtttccagtgaactttctgaattcacatattagtattaaaaatgtacagatacatttggactttctacatacatgatcatgtcatctgcatgtaacagttttatttcttccttttcagtgactacaccttcttttccttgccttgttgcactagctaacatgtacagtttaatggtggtagaaattgtaatagtagagat

SEQ ID NO: 572569 - DNA, 489 bp, Homo sapiens
gtgagcctgtttccttgcactgtaatcttcacaagtgctactcggtcccttttcctccccttacgtagggcagataggatgcctagagggagttggagttggatatcccttccccatataawtgttttgtagttttgggtttggcatttttgcttatcttttaatagatttatttctaaatacttgattttttgagccactatgtaagtggtctttttaaaacaattctttctctaatattattttttctcatatatgaaagtgcaatagattttttactactaatcttgtttccagtgaactttctgaattcacatattagtattaaaaatgtacagatacatttggactttctacatacatgatcatgtcatctgcatgtaacagttttatttcttccttttcagtgactacaccttcttttccttgccttgttgcactagctaacatgtacagtttaatggtggtagaaattgtaatagtagagat

SEQ ID NO: 572570 - DNA, 489 bp, Homo sapiens
gtgagcctgtttccttgcactgtaatcttcacaagtgctactcggtcccttttcctccccttacgtagggcagataggatgcctagagggagttggagttggatatcccttccccatataaatgttttgtagttttgggtttggcatttttgcttatcttttaatagatttatttctaaatacttgattttttgagccactatgtaagtggtctttttaaaacaattctttctctaataktattttttctcatatatgaaagtgcaatagattttttactactaatcttgtttccagtgaactttctgaattcacatattagtattaaaaatgtacagatacatttggactttctacatacatgatcatgtcatctgcatgtaacagttttatttcttccttttcagtgactacaccttcttttccttgccttgttgcactagctaacatgtacagtttaatggtggtagaaattgtaatagtagagat

SEQ ID NO: 572571 - DNA, 534 bp, Homo sapiens
ctctgtcatctcatcgtgttgttgtgaatatcaaatgaaatcaatatatgtgaaagcattattgaaatataggttttaaaagtaatagccaatctctttatgctattattgctaagagtcatgcttttaattcaaatgaattacacaaataatttttaggttttatttttgaattgtaggatggcatctgccaatggatagatttgactgcaaggcatcctgagacatccttggcctggaggatgccttgttgggagctgaagtgcaggaactgatgcagctgtaagggcgaagccatgaaagggtatggctggtatctacagggtttattgagaatattcactttattctcaataaatactaatactgagcttaaacctatcagacctaatatcccctcttcccaacagacattttgtagtgcccttcttactctcacagataatataayttgtaggtaatacaatatctctacatacttaatttcatatagaaaataaattaatataatgccctaatttttatataaaggtt

SEQ ID NO: 572572 - DNA, 416 bp, Homo sapiens
atttttgaactgacttcactgtaatatcagaatttatctgatattacagctatccatccrccctgacaatttgacccttctctcctggtttaaaatcattaatctttatttcatgaatcaaaccagagaattaaatgacatcttggtgatatgaatagtatagattcattttcaataggttgctttgatcttcttttttatgaaagtgtctttatcttgccaacatgaccttcttttcagcctgctattatctgaaaaatagcctttgctattctttggaacttttccactctctgtggcctccaatgaatttatcattgttcagacatttagttttgctcccacagaagtatagaagtatttttttttacaagtctcaacatactttccaaaacacaatagcgattgttagctaa

SEQ ID NO: 572573 - DNA, 589 bp, Homo sapiens
agggagtacagccctgccaatgccttgattgggtgccataagagttagtttgaatccactgcctccataaggaaggaagccaaaattattacttgtgagagaatacattttttgagcctctaagtttgttgcaatttgttacagttgccatagaaaactaataaagaactaaaacggtcaataacctgtgaggacaaaacaatgaagaagaaaggcatatactacaatggaaaggaagttaaatcaggaattaaacaccccaggcatcctcaagtccagacattgccacttataattacgataattatgtgaccttgaacaagacacaatatcagaggctcctcctcttacctgtaaaatgggatgataatacctgactcacttcattcccttggttgttttgaatttaaatagaaaaaaatagaattattaacgtcttataaatttaaaagtgtaaataaaatctataatggttatttttaatagatagaccatccaaaactttatcactcaattattaagtactacaaatataggttacctagactttttattttaaaaatatrgaacaatcaaacccacagaattc

SEQ ID NO: 572574 - DNA, 568 bp, Homo sapiens
gtgcttttgttcccatggagttgggatgagctaccctcccagcacatggatgtgttcactaacttggaagcaccctcaaacctcaaaagcttctccacttcaaaaacctgcttggcacacatcttccccacctaagtcaagggctacattctcctacttggtgcagcccggaaatcactaagtctttctttcatctctcttttatattaccaattcatcagtgaccccaatggctctacttttcagacatasagagccggtggtgaggcatggtggctcattgctgtaatcccagaagtttgggaggccatgacaagaagatggcttcagctcaggaatttcagaccagcctggacaacacagcaaaacctcctctctattaaaaaaaaaaaagatagccaggcatggcggtgcatgcctatggtcccaactatttgggaggttgaggtgagaggatcatttgcaccctggagatagaggctgcagtgagctatgatcacgccactactctccagcctgggtgacagagtgagaccctgtctcaaaaacaacacaacagtattgaaga

SEQ ID NO: 572575 - DNA, 583 bp, Homo sapiens
gcagtgtttgtctttctgtgtctggcttatttcacttagtagaatgtcctctagattaatccattttgtcacaaatggcaggatctccttcaattttaaggctgaatagtgttccattgtgtatatgtaccgcattttctttacacattcattcattggtggacacttaggttgttttcatatctatggctgtttttaaaaatcctgctgaacatgggagtggagatatcttttcaagatagattttagttcctttggatacaggcctagcagtgggattgagggatcatatagtaattctatttttagtttttctgaggaagctccatagtgttttcaataatggctgtatcaatttacaatcccactaacattgccaggttcccttttctccacatccttgccagtacttgttattatttgactgataatagccatcctaacaagtgtaaggtgacatctcattatggtttcratttgccttttcttgataattatccatgttgagcacttttatatacttgttggccatttgtctatcttgttttgaaaaatgtttgttcagatcctttgtccaattttt

SEQ ID NO: 572576 - DNA, 549 bp, Homo sapiens
tgaggcaggagaatcgcttgaacccaggaggtggaggttacagtgagctgagatcgaaccactgtgctccaggctggcaacagagcgagactctgtttcaaaaaaaaaaaaaaaaaaaaatccccgactaaaatgcaaactccgtgaatgtagacatttttgtctcatattcaatgctgtgtcctcagcacctggaacactggacaacccatagtaggcactcaaraaatatatattcaacgagtaaagaaaaaagaagttcaattgcagataggagaaaagcagagagaatagcaggatgataagaaatagcctatatttcaagccagatgcagcggctattgcctgcagttccagcagtttgggaggccaaggcaggaagattgtttgaggccagaagttcaagaccagcctaggcaaaacaatgagaccctatctctacaaaaaatgaaaaaactagcagggcatgctggcacatgcctgcagttctaactacttgggaggctgaggcgggagtatcgcttgaggccaggagttcaagaaatagtc

SEQ ID NO: 572577 - DNA, 593 bp, Homo sapiens
tttgttgatgacagtgatgtagaataattgttaacatattggagttactatctttcccctgctagctaaaatagatactggtttagtccctttcctttctgtatcctgcaaaaagatgcttcaactgccacaagtcttcttcccaatctttgagggattggaagaaagattaaaagacaaaaatttaaaaaaaaatcccccacatgcatgctaattcctgtgaagaaaaaaattgagagttaatgaactataccactcctacccctaacctctgctctatgtgggtggtgtgtggtaggagtaggatatctagaatgaggaaaagagctctttctaggtatgagttagcagtcycagaatgttactggactcacaggctaggaaatgacaggactagcatgtgctcccaagttgtatacaaggtccaggttgaaatcagaatcatagtttggattatgtctccgtgattatgtgatgaaaacactagctttccttggactcagggttcagaccctgtgactagttctcgtcaatgaactgtaaatggacatggtacatgtcccttctaggctgatgcaaataagagctggtga

SEQ ID NO: 572578 - DNA, 613 bp, Homo sapiens
ctgactgatcaaaagttttgggtaaaaatgtgatagtttttgttgtttatcttggtttttagagcaggaagagagggtatgtgtgtgtgagagagaaagacagagatagagacagaggtgacagagacagactactataaatgcaactgtctttggcttctataatcattgccaggaaaatagtcacattagggaggttatctccctctggaataaggagcactaggtttggaattaggcaaccctatgctcaaatttgacctttaatgatgacccaaagtgcaccttgagtaaccttttttaagcctcagtttcttcacttattaattagtgatgctgctttcacagggcaaatgttaggttaaataagtgaatttcatgtaagtgaaaatacttgctaggctatagagcatgtcaatgtcctccagcagaatgtcctccaccaggaacacacctgccattgaacaactggggttcagttctcacaggagggaaggagaactgttccacagggaactatagggtrtctcagtaagggggtgtcaggaaggacttctataagatttggctttgtgtcaaggttttgaggaggcttctctctggattggaggct

SEQ ID NO: 572579 - DNA, 461 bp, Homo sapiens
gttacgcacctgtagtcctggctacacaggaggccaaggcaggaggaattcgaggctactgtgagctatgatcatgccactgcaactccagcctgggtgacagagtgaggctctgtctccaaaatatatacatatatataaatatrtatacacacatatatatatacatatatatatacacacacatatatatatatatagaatttaccatatggtccagtaattccactcctagatggaagagaagtaaaaacatgtttgtccacacaaacacatacacagttatgttcataatagcatttttcataatgggcaaaaaatggaaacattccaagttctatcaatttgtgaatggacaaacaaaatgtgttatgcctatagaatgaaatagtatttggcaataaaaaggaacaaagtactgatacatgctacaacatgaatgaacttcaaaatatgcttta

SEQ ID NO: 572580 - DNA, 613 bp, Homo sapiens
ttcagagaatttttcactgtagtgtatatcaaataaagaaggataagaaaatctagcaaaccattgtgtagttcaggatctagcctatacattgtgcccagggttcgtatgatgaaaagcattaatttcccttagttcctaagagggtttgtgaacataggtgtctattcccagctctgtggggatgcatttttatgtatttattatattcgtaaaagccatgaaaacctggtcccatttagcctcaggatgtgctaatgtcatttaaaaatatgcagaattaataaccatttaaaaatttctattgtttttgtatcttaaagaaaaaagaaattcaggaaggcaggatggaaggaaagaaaaataggaaactaaaaacatatcaaactcgctggccagtgggatagcttgagagctgagtccctcttccctcacttcataaatgacyttgtgtggcacagtgacatctttgcaacacagtggctgctcattcaatatttgtctttctttggaactgttggaagaagaaacctacaaattgagtagtaatggccataacattaactattatttgtatatagtcctttagagattacaaggcaaatgccacacc

SEQ ID NO: 572581 - DNA, 631 bp, Homo sapiens
ccatgttacagtattattacctatagtctccatgctgtacattagatctcaagaacttattcatattgcacaaatacagatttatacccattgagcaatgtctcccgatttgccccacctccttagccctggtagccaccatgctactctctgattctatgaatttcacttgtttttaaacaccacatataagcgaaatagtgcagaatttttctttctgtgtctggcttatttcacttagcacaatgtcctctgggttcacttatgttgttgaaaatggcaagatctccttctttttaaagactgaatgatgttacattgtatgtatattaacaatttcttgtttctatttttctaaattttcattggagstagactacatgattctttcaggtttctccaaattagggctatattagaattgtcaactgaacaatgatgaggtttctaaatttggaaaggacagctttctttctttttcttttttttttttttttctgagatagagtctcactcttattgcccaggctaaagtgcagtggtgtgatcttggctcactgcaacctctgtgtcctgaattcaagtgattctcctgcctcagcctcccgagtagctgggattacaggtgccc

SEQ ID NO: 572582 - DNA, 631 bp, Homo sapiens
ccatgttacagtattattacctatagtctccatgctgtacattagatctcaagaacttattcatattgcacaaatacagatttatacccattgagcaatgtctcccgatttgccccacctccttagccctggtagccaccatgctactctctgattctatgaatttcacttgtttttaaacaccacatataagcgaaatagtgcagaatttttctttctgtgtctggcttatttcacttagcacaatgtcctctgggttcacttatgttgttgaaaatggcaagatctccttctttttaaagactgaatgatgttacattgtatgtatattaacaatttcttgtttctatttttctaaattttcattggagctagactacatgattctttcaggtttctccaaattagggctatattagaattgtcaactgaacaatgatgaggtttctaaatttggaaaggacagctttctttctttttcttttttttttttttttctgagatagagtctcactcttattgcccaggctaaagtgcagtggtgtgatcttggctcactgcaacctctgygtcctgaattcaagtgattctcctgcctcagcctcccgagtagctgggattacaggtgccc

SEQ ID NO: 572583 - DNA, 375 bp, Homo sapiens
aggcgtggtggctcacgcatgtaaccccagcactttgggaagctgaggtgggcagatcacttgmgctcaggagtttgagaccagcctaggcaacatggcgaaaccctgtctctactaaaaatacaaaaattagccgggtgtggtggtgtgccatgtgcctgtaatctcagctactcgggaggctgaggtgggaaggtcacctgagcctggggaggttgagggtctggtgagctgagatgatgcccccgcactccagccaaggcaacagagtgacaccttgtctcaaaaaaaagcaacccacaaaattagctgggcgtagtgctatgcacttgtagttccagctactcaggaggtggagctggaaggattgtttga

SEQ ID NO: 572584 - DNA, 525 bp, Homo sapiens
tggtgacattgtccagctttgccattcaagtgaagcatggtgctagggtgacactgataaattggttccagagactttcctttatggtgtatcaaagtccccccaacccacgcacatttctttgggagctttcacttttgtctagagtatattttcacacttgctgccacactgcatccctcaacttcccattggacatatgggcctctttcttttggttgtcctgtcrtttggtcacccagtatgtggtctgatgagagaaagatgactttttcacaacttttggctctgactggcaaaatctttttctaaatcctgtttcatttcaggccaggcagaaccacactatcaaaactatttttgactgcactcaatgctacaatgtcttgcacatacacttatccctgggcagcatcaaataaatgaccttcaaaatctataagctcttgaatgcagataacaataagagttatctgtttaaagaattttgtgttggctgggcatggtggctcacgcctgtaatcc

SEQ ID NO: 572585 - DNA, 525 bp, Homo sapiens
tggtgacattgtccagctttgccattcaagtgaagcatggtgctagggtgacactgataaattggttccagagactttcctttatggtgtatcaaagtccccccaacccacgcacatttctttgggagctttcacttttgtctagagtatattttcacacttgctgccacactgcatccctcaacttcccattggacatatgggcctctttcttttggttgtcctgtcatttggtcacccagtatgtggtctgatgagagaaagatgactttttcacaacttttggctctgactggcaaaatctttttctaaatcctgtttcatttcaggccaggcagaaccacactatcaaaactatttttgactgcactcaatgctacaatgtcttgcacatacacttatccctgggcagcatcaaataaatgaccttcaaaatctataagctcttgaatgcagataayaataagagttatctgtttaaagaattttgtgttggctgggcatggtggctcacgcctgtaatcc

SEQ ID NO: 572586 - DNA, 596 bp, Homo sapiens
ttctaatcataattttatgtaactaggtcaatatgactgagttctagccaggcaaatgtaggcagtggtgatataaacaatgtataaaactctagtcttaaaactgtatacagaattttccattcttcctctagttatacctatgcaagctggaagtggaggactcaaagatggcttaactataagctggaaacagctgtttactggttcatgacttggaaaacagttccctaggaatatcgccaaaccacgttagactgaaaaactttgtgttaagtcactgagatatcaggctttatttctactttgatatagcctggcataccataactaataaatcccagaaacagatagggaattcctctatgttctactggactttggatagaacctacattaaatcaataaatatttaactgtagttgtctcattttatttccatcaattttactgtaatctctttcaatttcccagtgctggcactacatgacaaatttactgattggatagayggatagggaaggttcttctgtaaggttctaggaggaaaacgtttagaaattattgggatttacccattttggttgactaagtaa

SEQ ID NO: 572587 - DNA, 616 bp, Homo sapiens
gtactaatgcctttctctccagactaagttctctctctctctctttcacctccccatgagagctggttgttataagacaaggctcttctgcttggtctctttcttaggtgcttgcttccttttctgcttctctgccacgtaatgacacagcacaaggccctcaccagaagccaagcagatgccagtgccatgctttttggacttcccagcctccagagctgtaagaaataaatttcttcataaatcatccagtctcgggtaatctgtwacagcaacagaaaacgaactaagacaaatgtatagaagtgacagatttgttgggcagagcataaatggcagtctgattttttaattcctgctttattcctttgggagactgggtaaatcacctttgatctgctcatctatagattaaggattgaaatcacttcaagaagattatactttggctcccaatagttataataaaagagtgtaacaacttacccgcaattgaaagctcagctctttttttttaaaaaaatagactttatgttttagataaatttttggttcacagcaaaataaagtggaaagtatagaaatttcctgtcgaacttctgcccccacatcccat

SEQ ID NO: 572588 - DNA, 616 bp, Homo sapiens
gtactaatgcctttctctccagactaagttctctctctctctctttcacctccccatgagagctggttgttataagacaaggctcttctgcttggtctctttcttaggtgcttgcttccttttctgcttctctgccacgtaatgacacagcacaaggccctcaccagaagccaagcagatgccagtgccatgctttttggacttcccagcctccagagctgtaagaaataaatttcttcataaatcatccagtctcgggtaatctgttacagcaamagaaaacgaactaagacaaatgtatagaagtgacagatttgttgggcagagcataaatggcagtctgattttttaattcctgctttattcctttgggagactgggtaaatcacctttgatctgctcatctatagattaaggattgaaatcacttcaagaagattatactttggctcccaatagttataataaaagagtgtaacaacttacccgcaattgaaagctcagctctttttttttaaaaaaatagactttatgttttagataaatttttggttcacagcaaaataaagtggaaagtatagaaatttcctgtcgaacttctgcccccacatcccat

SEQ ID NO: 572589 - DNA, 358 bp, Homo sapiens
tttttctagttttctaaggtggaagcttagatgattgagtttagatctttcttcttttctattaagtgcattcaatactatyattttccttctaagcactgcttttgtggcattccatgaattgaattttgacaagttgtatttttattttcatttaatttaaaatatttttaaatctctataggtatctcttctttgacccatatgttatttagaagtgcgttgtttagtctccatatattttggatttttttcagttatctttctattgatttctagtttcattccactgtggtctgaaagcagacattgtatgatttctgctctttaaatgtggtaaagtgtattttatggcaca

SEQ ID NO: 572590 - DNA, 638 bp, Homo sapiens
caacaattatgtgttgagcatctactayatgttaatggtgctagatgcaagtaattcaaagatgaataaagggaaatgtggctccagctctcacaaaatctacagtcattagggagatgactgttacagcactgagcaaagacagtcaatggggtaagtcctctcacagggaatgtgcaacatgtaacaggggcacctcactagctgcggggagtcatgccacagtggttcagagcacagggttcccaaagggatttctaacctgtattaagcctttagactttatgcaagggtatgtgagagttgaagcaggaggaacttaattagtgcgggagtaacatcatcagattttcgttttgcaaaggccattctgacttcttcgtggatattagattataaaaaggcaaaagctgaagccagcacaatcatctgggagacgatcagcaatctggacaatcaagtcttcagtctctgaatctggatctccattcactatttctttgtctttcaaggcatgggtattatgctatatgaaaataggagataataggagtcaggaccgtaggtattatgataataaggactatgtgattatatacagacacacacacacacaaaacaataagtgtaaagaaacc

SEQ ID NO: 572591 - DNA, 638 bp, Homo sapiens
caacaattatgtgttgagcatctactatatgttaatggtgctagatgcaagtaattcaaagatgaataaagggaaatgtggctccagctctcacaaaatctacagtcattagggagatgactgttacagcactgagcaaagacagtcaatggggtaagtcctctcacagggaatgtgcaacatgtaacaggggcacctcactagctgcggggagtcatgccacagtggttcagagcacagggttcccaaagggatttctaacctgtattaagcctttagactttatgcaagggtatgtgagagttgaagcaggaggaacttaattagtgcgggagtaacatcatcagattttcgttttgcaaaggccattctgacttcttcgtggatattagattataaaaaggcaaaagctgaagccagcacaatcatctgggagacgatcagcaatctggacaatcaagtcttcagtctctgaatctggatctccattcactatttctttgtctttcaagrcatgggtattatgctatatgaaaataggagataataggagtcaggaccgtaggtattatgataataaggactatgtgattatatacagacacacacacacacaaaacaataagtgtaaagaaacc

SEQ ID NO: 572592 - DNA, 376 bp, Homo sapiens
tttgaagatattgtttaaatgttktcttgaactcagtgtttttaatgaggagtatgtaatcagtctttcttttttattttttgagacagattatcaccccgtttcccaggctgaactgcagtggtgcgatctcggctcactgcaacctcagcctcctgggttcaagagattttcatgcctcagcctcccaaatagctgggattacagccctgtaccaccacgtctggctaatgtttgtgttttcagtagagacagggttttgccctgttggccaggctggtctcaaacccctggcctcaagtgatctgcccacctcagcctctcaaagttctgggattacaggtgtgagccaccgcacccagcctggttatcaatc

SEQ ID NO: 572593 - DNA, 619 bp, Homo sapiens
gaacaatacttgaaatgacatttaactaatgtaatgatgacaatttccagctcttgaacactgggatgatggttgcctatttgtaatttgtggaatgattaaattctttataacaagcatatttacaaaatattagttttatgtttacaaacatatcagagtaatttgaaaaaaaactgaaaacaaatatgccacaatgttagcagctaattctaggtggaaagttattattattattattattgtttaccttactgtattttaataatgtcaaaaatttgtacatctataatastcactttctatttattaaaagaggaatttatggaatattggatgtcattacacgtaataaagttaaaataataaaataaatgtccaaaaagtagagagaacaaataaaggtctgagtttacataagggtttggtacttgatttaaagtgacagttctaagtggtggagcttcaatgagctgtttcataaatgcttaaaaaaataaccatttggaaaaaatatcaaatgatcttactttataccatataataaaatgcatttcaaatagattaaagatttaaatataaaggcaataaaataaatcacaaagccactaaaggaaaa

SEQ ID NO: 572594 - DNA, 572 bp, Homo sapiens
accatgcaatcctgttttctagctagcctgggtaaaccctactcatccttctaattagattcttttgtaaaacaatttaattgaccatatatgaacttgtagtggctagaaggcatttagtcattggaatagaacacccaagtattgtaaatgaaatgccatcattcagaaaatttgrcctagattatcctacttattctagttcattaagtaattggttgtaatatgttttaacagttgggtcctggccccgaatccagagttgttcaatttcttttgagggcaaatattatttaacactttaatggaagaataattcattcattcatagaatttaaaaattttaaagtttcttctagtaaaatgaaacctagcttttaataatccaaatgtgtttttatatatttcattagggaatgtttaaattaagtggtattagtgtgataaaaacatttcaagaagctatactaccacatttatgatgttttattaatactactactattttctaaatatttttctattacacttttgaagcatattttaaatgaaagttatccatagaaataaca

SEQ ID NO: 572595 - DNA, 572 bp, Homo sapiens
accatgcaatcctgttttctagctagcctgggtaaaccctactcatccttctaattagattcttttgtaaaacaatttaattgaccatatatgaacttgtagtggctagaaggcatttagtcattggaatagaacacccaagtattgtaaatgaaatgccatcattcagaaaatttgacctagattatcctacttattctagttcattaagtaattggttgtaatatgttttaacagttgggtcctggccccgaatccagagttgttcaatttcttttgagggcaaatattatttaacactttaatggaagaataattcattcattcatagaatttaaaaattttaaagtttcttctagtaaaatgaaacctagcttttaataatccaaaygtgtttttatatatttcattagggaatgtttaaattaagtggtattagtgtgataaaaacatttcaagaagctatactaccacatttatgatgttttattaatactactactattttctaaatatttttctattacacttttgaagcatattttaaatgaaagttatccatagaaataaca

SEQ ID NO: 572596 - DNA, 572 bp, Homo sapiens
accatgcaatcctgttttctagctagcctgggtaaaccctactcatccttctaattagattcttttgtaaaacaatttaattgaccatatatgaacttgtagtggctagaaggcatttagtcattggaatagaacacccaagtattgtaaatgaaatgccatcattcagaaaatttgacctagattatcctacttattctagttcattaagtaattggttgtaatatgttttaacagttgggtcctggccccgaatccagagttgttcaatttcttttgagggcaaatattatttaacactttaatggaagaataattcattcattcatagaatttaaaaattttaaagtttcttctagtaaaatgaaacctagcttttaataatccaaatgtgtttttatatatttcattagggaatgtttaaattaagtggtattagtgtgataaaaacatttcaagaarctatactaccacatttatgatgttttattaatactactactattttctaaatatttttctattacacttttgaagcatattttaaatgaaagttatccatagaaataaca

SEQ ID NO: 572597 - DNA, 600 bp, Homo sapiens
tcagtttatttgattttttatttatattatacctcctctccccttttcctccattcctcaaataattcatttattcattcaacaagcacttattgaaacaattgctatgttctgagaatatgactaagtggagttgaataagttaatgtaagcatgcatccaaaaacccattctgatttaaaatactcacagatcactgcaaaacaattggaggcataaaaggggagaaagagcaagaaaagactcaayagagaaacaggttggaaattgtgaggggcactggtaatggagaatgagaggaaagaataggtatgacgtgttggctggttacattgggagggggtggtgctaggaagcaatcgaagagcacatccatgaactctagccagtaggtatgtggtgttgccattaattactgacagcaggaagagccaataactatgaagaaagagaaggcatttggtttggaacatctatctgccttctatatgagactcaagtgatgatgtctggtagacaattaaaactatgtattgggaactcaggacagaaaagcagctgaagacacagctttcgtggttatgagcacataaattgctc

SEQ ID NO: 572598 - DNA, 600 bp, Homo sapiens
tcagtttatttgattttttatttatattatacctcctctccccttttcctccattcctcaaataattcatttattcattcaacaagcacttattgaaacaattgctatgttctgagaatatgactaagtggagttgaataagttaatgtaagcatgcatccaaaaacccattctgatttaaaatactcacagatcactgcaaaacaattggaggcataaaaggggagaaagagcaagaaaagactcaacagagaaacaggttggaaattgtgaggggcactggtaatggagaatgagaggaaagaataggtatgacgtgttggctggttacattgggagggggtggtgctaggaagcaatcgaagagcacatccatgaactctagccagtaggtatgtggtgttgccattaattactgacagcaggaagagccaataactatgaagaaagagaaggmatttggtttggaacatctatctgccttctatatgagactcaagtgatgatgtctggtagacaattaaaactatgtattgggaactcaggacagaaaagcagctgaagacacagctttcgtggttatgagcacataaattgctc

SEQ ID NO: 572599 - DNA, 504 bp, Homo sapiens
gggcatccaataaatgctaacacagtaaaaatcttagttgtaatagcgatgggctattaattagaatgatgaaatcaagtcaagcatttccaagttaatttttttttttttttttttttttttgagacggagtctcgttctgtcacccaggctggagtgcagtggcacgatcttggctcactgcaacctctgcctcccgggttcacgctcttctcctgcctcagcctctcaaatagatgggactacaggtgcctgccaccacgcctggctaatttttttttttttttgkatttttcagtagagacggggtttctccatattagccaggatggtcttgatctcctgacctcgtgatccacctgcctcggcctccaaaagagctgggattacaggcgtgagccaccgtgcctggccaagttcttaaatttttaccacaagatcacatgcacaagatggtaaaaaatcacttggcttttatgaacttctattcatgcgctatctcag

SEQ ID NO: 572600 - DNA, 575 bp, Homo sapiens
  misc_feature 514: n = A,T,C or G
gatcatgtctcactgcatcctcaaactcctaagctcaaacaatactcctgcctcagcttcctaagtagctgggactacaggcacacctcaccacacctggctaattttctcatttttttgtagggacagggtctcactgtattgggaggctgctcttgaatccctggcctcaagcaattctcccaccttggcctctcaaagtgcactacaggggtgagccaccacacccagcctgttttgttttgttttgttttgttttgtttgagacagaggagtctcactctgtcrcccagactagagtgctgtagcaagatctcggctcactgcatcctctgctccccaggctcaagcgattcttgtgcctcagcttcctgagtagcccaggattacaggtgcatgccaccaagcctatctaatttttttgtattttgacagagttttgccatattggccaggctggtcttgaactcatgacctcaggtgatccactcacttcagcctcccaaaatgctgngattgcagttgtgagccactgtgcccagccctgttttgtttttttgacttcagttttgttt

SEQ ID NO: 572601 - DNA, 575 bp, Homo sapiens
  misc_feature 514: n = A,T,C or G
gatcatgtctcactgcatcctcaaactcctaagctcaaacaatactcctgcctcagcttcctaagtagctgggactacaggcacacctcaccacacctggctaattttctcatttttttgtagggacagggtctcactgtattgggaggctgctcttgaatccctggcctcaagcaattctcccaccttggcctctcaaagtgcactacaggggtgagccaccacacccagcctgttttgttttgttttgttttgttttgtttgagacagaggagtctcactctgtcgcccagactagagtgctgtrgcaagatctcggctcactgcatcctctgctccccaggctcaagcgattcttgtgcctcagcttcctgagtagcccaggattacaggtgcatgccaccaagcctatctaatttttttgtattttgacagagttttgccatattggccaggctggtcttgaactcatgacctcaggtgatccactcacttcagcctcccaaaatgctgngattgcagttgtgagccactgtgcccagccctgttttgtttttttgacttcagttttgttt

SEQ ID NO: 572602 - DNA, 575 bp, Homo sapiens
  misc_feature 514: n = A,T,C or G
gatcatgtctcactgcatcctcaaactcctaagctcaaacaatactcctgcctcagcttcctaagtagctgggactacaggcacacctcaccacacctggctaattttctcatttttttgtagggacagggtctcactgtattgggaggctgctcttgaatccctggcctcaagcaattctcccaccttggcctctcaaagtgcactacaggggtgagccaccacacccagcctgttttgttttgttttgttttgttttgtttgagacagaggagtctcactctgtcgcccagactagagtgctgtagcragatctcggctcactgcatcctctgctccccaggctcaagcgattcttgtgcctcagcttcctgagtagcccaggattacaggtgcatgccaccaagcctatctaatttttttgtattttgacagagttttgccatattggccaggctggtcttgaactcatgacctcaggtgatccactcacttcagcctcccaaaatgctgngattgcagttgtgagccactgtgcccagccctgttttgtttttttgacttcagttttgttt

SEQ ID NO: 572603 - DNA, 402 bp, Homo sapiens
ccacttatgtgtgtcctctctgattcctttgaawagtggtttgtagttcttcttgaagaggtcattcatgtcccttgttagatgtattcctaggtattttattctttttgtggctattgttaatgggattacattcttgattgggctctcagcttgaatgttattggtgtatagaaatgcttctaattttgtgcattgattttgtatcctggaactttgctgaagtcatttatcagtttcaggagccttttggtggagtctttagtgttttctaggtatagaatcatatcatcagtgaagagagatgatttgacttcttttcctatttaaatgccttttatttctttgtcttgcctgttgctctgggtaggacttccagtaccatgttgaataggagtagtg

SEQ ID NO: 572604 - DNA, 402 bp, Homo sapiens
ccacttatgtgtgtcctctctgattcctttgaatagtggtttgtagttcttcttgaagaggtcwttcatgtcccttgttagatgtattcctaggtattttattctttttgtggctattgttaatgggattacattcttgattgggctctcagcttgaatgttattggtgtatagaaatgcttctaattttgtgcattgattttgtatcctggaactttgctgaagtcatttatcagtttcaggagccttttggtggagtctttagtgttttctaggtatagaatcatatcatcagtgaagagagatgatttgacttcttttcctatttaaatgccttttatttctttgtcttgcctgttgctctgggtaggacttccagtaccatgttgaataggagtagtg

SEQ ID NO: 572605 - DNA, 454 bp, Homo sapiens
tgatgttagaatacaactttcccaatctaatgttactcttttgtatgcttcccctccctccaacgtagacacacacatacacacacacacacagagagagagagagagaggggggggggatagagagaatgagagagagagagagcactattcaagagaactttcggcagtgtggaagatgttctctatttctgctggctaatatggtagccactattgacatgtagctattaagcatttgaaacgtcagaagtgcaaccaagaaactattttaaatttaaatagccacatttggttgatagmtactgtattggacagcacagttctagaatacaccagccaggtcaaggaaaataaaacctgtgattttgaataatttttagtaagctagaagaaagatctttaattacctgatagtaaccttccaggatgaaaatagcatagaaagaaagaa

SEQ ID NO: 572606 - DNA, 646 bp, Homo sapiens
ttttactacatgaaacaaaaaattaaaaacaggaatgcctttctttttctataggatcctacatagtgtcagtggttaactacaaaaaaaaggtaatcatacatatatcttattttcttggtgtgggcttaagtcctattaacttttctggacttcctaggtttatatctgatttgcctttaagtaaatttctgaagaatagaagtctttggcttactgttaatatagctgattattctcttttgtctggcttgagtttttaattatgtgaactagacaatttccagaaatagtagaaaaacacaggaaaatagcaatatatatattttaatctatatctctttgggtcttcctccttttatttattttttaatgtagtcagagaggcaatctaacagcaggaatgagataatgaactctggagtcaaactgcttgagtctatttcagctctacctcttactagctgttggattctatgtaacttcacctaagttgcctcactgatacctgcttcaaaagatcattgctagatgcatatcagtgtatctggtataccataaatytctataaagttttaaaattaaatttgatttatttggtgtaattaagattttgctcagaattgtaagatgttttctcacttct

SEQ ID NO: 572607 - DNA, 472 bp, Homo sapiens
tattgatctgtgaggtatctccaatcaaattttataataaaataaaagctagtatttgttgtttattcgatggcaaacactgttctgtgtgttttatgcttattaactcatctgatccttgaaagactctaatacrcacacataggcacacagtacatggggaaactcaagcagaatttcccagtgtaattattcgataaaattttactttaagtgctctccctgcaggataaaattgacttgtgctatgccctctccctctgcctttatactttgtccttttctttttcttaagaatacacttgaaattctaacttgaaagtaattttgaatatctaaaaaggtcttataaatttttttaagttatgtgtttagcataacagggtctagattaaagtgtcaagtgccaaatataggaaataaacagatgattatgtgataatgaggcttaagtactggcagaaaagtttca

SEQ ID NO: 572608 - DNA, 591 bp, Homo sapiens
gcatccatgaggcagtgaaagtaagccagggtttggcattagaagttgtagatttgagtccttttgtactgtacaagctttgtggcctttgtcaagtcactataactgctgaaagattagggctttttattacacaggaggcagcataatcctgaccatggctatcgggaagattgcagtgcagatcaataggacaatacgtgaatgagtggtttatggactgtacaatgttctaacaacaaaaagaggcattcataatattgatgtggaacatccagttacacaactgactccactaaactagggatagcgtgtctctcctctgtgctcaggtctttttcacaatggcagtgtgtgctgaagcagagctgatacaacccagygtgttctggagatataggagggatgaagctgatgtgagtaagccatttatgcttgtgacagttgctcaagatagaaatggaaagttctccatgttttaaggcattaaacaatcagtttatttacaaccagtgggcatgagataaacattgcagacccaagagcaactatctttgttatctttaatataaataataattattataacaa

SEQ ID NO: 572609 - DNA, 645 bp, Homo sapiens
aaaatggggctagtttcagagtgttgaatatatctgggttcccatatcatgacatttaaaatatattttttatttatatcatggaatatttgctatacacaaccattcatagcacacatccacatggtaatgcctaataaaagaagcacataaaaatctaccaccaaagaactagactattaccaatatcctcacatgatccttctctggctcagcttcctgactcctccctgaaggtaaccactatcttgcattttatatttgtcattctcttgctttttgttaaggatagattgatcatatatgtctgtatcaaacagttttgctcaactgtgctgtcayttgtatctatagttaatttattttttattaatgtgtaaaaatagtacagttaatgaatatatcacaatacatcagttatcttaccaatgaatgttggtttgcttttattgttttgccatcataaataatgcttctatgaacaatctcactagtaatgcatgagatttcccattatgctaaatcttcagccatccttgttattgtcagaccccataatttaaggaaagtaaaaaaatattttattgtgttcttaatttccatttctctgcttactacaaaggcttagcacattttcataaggta

SEQ ID NO: 572610 - DNA, 556 bp, Homo sapiens
ctcctcctccacttttttggaatagtttgagtaggattggtattagttctttaaatgtttggtagaatttagcagtgaagacattgggtcctgrgcttttcattactggtagattttttattaggactttgatcttgctacttgttattggtctgttcagcctaatattttttaattaattaatttttttctgtatggattcacatacatgaaccatgtatttgccttttctagcacagttctaacatcaaagagttggccatactggatgcaaaaatagacttttacttggtaaatatctgattattttaaatagcttccttattgcttgctcatttttatttcatcttttatttctttaaatatttcataaggtaattttgtattttgtttctgatattcccatgttaaataattaggtgtctaaatctgattgtttgcttgcttttgctgagtctcacccattgtggtttttggactcctattggttgacctcagtgaattgaaaccctaggcggttatactggggttacatttcattatgtgggatttactt

SEQ ID NO: 572611 - DNA, 556 bp, Homo sapiens
ctcctcctccacttttttggaatagtttgagtaggattggtattagttctttaaatgtttggtagaatttagcagtgaagacattgggtcctgagcttttcattactggtagaytttttattaggactttgatcttgctacttgttattggtctgttcagcctaatattttttaattaattaatttttttctgtatggattcacatacatgaaccatgtatttgccttttctagcacagttctaacatcaaagagttggccatactggatgcaaaaatagacttttacttggtaaatatctgattattttaaatagcttccttattgcttgctcatttttatttcatcttttatttctttaaatatttcataaggtaattttgtattttgtttctgatattcccatgttaaataattaggtgtctaaatctgattgtttgcttgcttttgctgagtctcacccattgtggtttttggactcctattggttgacctcagtgaattgaaaccctaggcggttatactggggttacatttcattatgtgggatttactt

SEQ ID NO: 572612 - DNA, 553 bp, Homo sapiens
ccatactaggaactacccaaatgctcatcccagtttagtggatgaatggtggtatattcactcatcagcaatgcaaatgaaccatctgcaatgacatgtagtctggtggaccaatctttgaaacttaatgctaaatgaaagacctcagacacacrcaggaagtacatactatataggattctattctatgaaatacaatacaggcaaaattaatctatacaattaaaaagcccaaatagtggttactctggggagtagggagatttgtgtctggaagggagcaggagtgggcttctaagatgcttgtttgtgagtgctagtcacacagttgtattcagtttgtgaaaacatattgaatggtccactttcatgtgcacatttctccatgtaaattatattttaataaaatttaaaccataaaaaataaaagcagaatgcttcggataagataattttgtttgctcacttcaatttatatactgttttccacattaactttataacaatcaacagcaaagaattcttaataacaaaactatcatcttccctgcag

SEQ ID NO: 572613 - DNA, 553 bp, Homo sapiens
ccatactaggaactacccaaatgctcatcccagtttagtggatgaatggtggtatattcactcatcagcaatgcaaatgaaccatctgcaatgacatgtagtctggtggaccaatctttgaaacttaatgctaaatgaaagacctcagacacacacaggaagtacatactatataggattctattctatgaaatacaatacaggcaaaattaatctatacaattaaaaagcccaaatagtggttactctggggagtagggagatttgtgtctggaagggagcaggagtgggcttctaagatgcttgtttgtgagtgctagtcacacagttgtattcagtttgtgaaaacatattgaatggtccactttcatgtgcacatttctccatgtaaattatattttaataaaatttaaaccataaaaaataaaagcagaatgcttcggataagataattttgtttgctcacttcaatttatatactgttttccacattaactttataayaatcaacagcaaagaattcttaataacaaaactatcatcttccctgcag

SEQ ID NO: 572614 - DNA, 560 bp, Homo sapiens
tatgttacataaccaaagaaaagtcatattacctaaatcacccattagaaaaactaacattgaataaagaccaccagttgagctyatggaattaccagagcactttataatgatcattcattcacatggggaactttttcaagcaaattcatatgtggaattcaactgggatgagagattgggttaaataagaccccaaacagagtcctgaggcaccgacatgtgtaaacatcaccagctaaggtatttaagtcttaggaaagtgtactcactaatgacttatttacttttatcttagacatacttttaacaatgttacctatttcattttcctgtgaatattattaacaaataaattataaatagaaagaaagctcttaaggcacgcttcctgaaagaagtgctgtctaatactgaggcaaagtatagaaaaataacatagcattgtatgcaagtattcaaaaagcatactcctcttgaatcagcaaaggtacctcaagatacctctgtttcccacatggttcgataacagtaaaaaggataacccctaggcatcttat

SEQ ID NO: 572615 - DNA, 649 bp, Homo sapiens
ttggggaatactgttttaaacaaaaccacattgttttgttcactgtagattcaggtcagttactgtaagcccttcaactttcttccttctcacaattattttggcaattccagatatcttgtatttccatatgtggatttttgtgggaattgcattggatttatatgttcattggakaatggacatgttaacaatatggagacttcagacagcaaacatggcatctttcttcacttatttaggtcttctttaatttatctcagcactgttttgtaataattactatacaggtctcacatatctttgttaaatttatttctaagggctatacttatttcaggttccattgtcaatgcaattgtatttttaattccattttccagttgttcattactgttcttagaaatgcagtcctttttttgtatattgccttcatgccttgtgaaggcactaatagctttttaaatatattccttaggattttctacatatatgacaatatcatctgcaaatagagatagtttttctccttttgtacaatcttattatttttcttcccttattggactgatttagacctctagaacaatactgaattgaaatggtgaaagcagacattcttcattattccatatttttggtataacaa

SEQ ID NO: 572616 - DNA, 449 bp, Homo sapiens
cagaccagttctctgctcttgaacactgtttcctgttaagatgtttatcaagacaatacctgcacagygggacatagaccctcatcagtaattctaattttgcctttgccttgtgatcttaattgtcctctgaagcatgtgatccttgtgacctactccctgttcatacaccccctccccttttaaaatccctaataaaaacttgctggttttgcagctccaggtcgtcatcacggtcctaccaatatgcgatgtcacccccggaggcccagctgtaaactttctctctttgtactctttctctttatttctcagaccggctgacatttagggaaaatagaaaagaacctacgttaaaatactgggggctgtttcccctgatactatgcaaatttttttatatcattactgattttttacctatttgttctaattactgagaaaggagt

SEQ ID NO: 572617 - DNA, 611 bp, Homo sapiens
cctagagtccagcaaatgacataccatgtccgactctgtccaatgtgcagcaactgacatgctgtctatgttacctttcagtatgaaacatttgtatatccatactctagtactttaattctcaagccatgaaagaaaattttccatagaaaacactagaaacttttaagttacaatttactacagatacaaaaatgtgcagttatacagcaacaagttggcttcaggaattctctgaattttgagagtctaactttgtgcaaagcaaygttcagttactgaaactggaaattgccagtgaaaaatgcatttcattatcaggtttataagttattcctgtgcatgttgaaacttgtagaattaactgttctattttggatgtgacaagatcctttcatgatattaaatacatacctctttgtttcctgtattctgacacaagaaatgaagcaggagggtttatcaagaactactgaaaagatgcttttcatacctcaaaaatgttcatgtgaaatgtaaacagctaataactgtttatactgaaagaacagtttccattttgtatagaataataaaagtattacattcatagctactatataaggttaaaa

SEQ ID NO: 572618 - DNA, 538 bp, Homo sapiens
taaagtggaagaattactttaagaaaaaaaagaaaaaaagctctgagatgttagaatatgatcctagagacaacttccttgaaagataaaagattatcctaccccgcaagagccagcttgcaaactcttggaaggatcacgtggagyggcactgttcacatctactaaagggtcatgttggagataaatgatcactctcatcactacctgcttagccatcacaaaaggaagaaccttccaagtgattttcattggaaagccaaatagcagtatatcacccgcaaacactcggcaagagttatgcctatttatggaaaacaacttggtagatctcacctgattggcccaagtgacacctcactaatacacaacctctcagggaacctgtaggcccctaaaatgataatgagactctggacactaattagggtaagtggagaagttgcctatctatacttgaggggtaggtgaggtgaggttaatctaaataatcccaagaccctcatgctgaaaccatgattatatattgcatattaat

SEQ ID NO: 572619 - DNA, 458 bp, Homo sapiens
ttttcatcattatcacagctgcagtgccttttaatgttatyggggcattaagaaacatgaacatgaaaagaaataagaaagtgggataaatggcagggtgtactctcaaacttggcaagagttaacctcctcatcaggaattgccagaaaataccaggcaatatcatgggatcattgcaagaaaagctgtcataaaattttacacttttgacctggacgtaatctaattcaaccataccttgctatagatgtgcaaacactgacaagattcaaaggtcccaaaagtgtgttttcaataaaaaattatctagaagtaatgttttacttggggcatgacatatacttctgactttcttcagcctaggcataagggctgtgctctcaagaatcaattccattgaaaagttttaaaaaatcaaagtgtagtaatcaatatgctttttgactgcaagtgaatc

SEQ ID NO: 572620 - DNA, 622 bp, Homo sapiens
ttcaagcaaaataaggtctgtgaagaagtacagtgcacatctcacagagctagaccaaaccagtatttgctgttttaatttttrcaattaattgggccattaacaatgccccatcagcctctagctcaggttgtcgttgatccatagtttaagtcttacactgtattgtaatcaaacgatttacatatcgtgtcctctgtcccagcatgttcttgagcatcctgagggcagggaccagccttgacgacccaccctggcagaggctccccagcagcagctgctctgacgagatgtgctcccaggagagagcaacactgtgtggggaaagcccagctctgagaggcggagaaaatgggaagatcaccacctaggtgggagggcggagaaagggataaagaggagtacaaaataaagatgaccttcttgcctaccagcaggctgagaacagatgggggaaatcaactgttagaaatattttagagtgcagcaaaccaccatggcgcatgtgtacctgtgtaacaaacctgcacgttctgcacatgtatcccagaacttaaaataaaataagtaaaaaaaaaagaataataaaagaaaaaagaaatcttttagaataacgcacaca

SEQ ID NO: 572621 - DNA, 658 bp, Homo sapiens
atatacatacatatacatatacagacatatatacacatacatatattcacacacacagacatatacatatttttttttggatggggcagggggcctttacttgggtgataaggtggtctgtgaagggctttaagggaaggtctcatctgatcacattggctttctggttgtgtcttgaagaatgggtcagagaatcaggaggctgtggctgctgcaggggaggggtgaggggggcccagggctaacagttgtggggtccagtaaagggtgcaagtggaggccggcaggtcatacatcccactgcgaagaccagccgcctctcgacctgacatcacccctggaaccaaaaaggggaaaacatgtccttcctgcctctgtctgtggtaagtgggccccttcaggaggcagggctgcaggcagcatccccgtgacccgggtagaagggcagaactgcgcctggggctcgctgctgtctgcaaggtccaggagggaggagggtgcagacacaggccctatttctgacccygcagggccgggagcgctggagccctaggagggtctgatctacctgtcgcccacccatgaggtgcatgagtgcaaaggtgtgggaaaccgccagactcctgaggccctgtggggtcgcaaggcaccaggaccc

SEQ ID NO: 572622 - DNA, 509 bp, Homo sapiens
gcagcccatggagggcaagccaaagcagagtggggtgttgcctcacccgggaagcacaaggggtcaggggatttccctttcttagctaagagaagctgtgatggactgtacctggaaaaatgggacactcccacccaaatactgcacttttcccatggtcttagcaaccggcagaccaggagattctctcccgtgcctgactggaygggtcccacacccacggagccttgctcactgctagtgcagcagtctgagatcgacctgcaaggctgcagcctggcggggggaggggcttctgtcattgctgaggcttgagtaggtaaacaaagtggctgggacgctcaaactgggcggagctcagcaaggcctactgcctctataaactccacctctgagggcagggcatagctgaacaaaaggcagcagaaacttttatagacttaaccgtccctgtctgacagctctgaagagagcagtggttctcccaccatggtgtttgagctctgaga

SEQ ID NO: 572623 - DNA, 593 bp, Homo sapiens
aatgagccgcatgggctgctgagcatttgaaacatggctagtccaaactgaaatgcactgtaagaaccacacactggatttcaaagactacacatctgtaatcccagcactttgggaggcaaagtcaggcagatcacttaagccaggagttcaagaccagcctaggcaacatgtcaagactctgtctctacaaaaaatacaaaaattaactgggtgtggtggtgtgacctgtagtcccagctacttgggagcctgaggtgggaggatcatcttagtccagggaggtggaggctgcagtgagccatgatagtgccactgcactccagcctgggtgacagagcaagamcctgtctcaaaaaaatatatatgtatattcatttagacatatgctgttgcacacttagactatagtatggtatcagcatacgttttatatttactgggaaaccaacaaaattcgtgtgacttgcttcattgggggctgggaccaaagctcgaatgcctcaaagttatgcctggatatttctattgcaaaatgggaatctcgaaaatataaaagcttcacctaggacaaaagcaccccaccaaaaagc

SEQ ID NO: 572624 - DNA, 426 bp, Homo sapiens
cagaccacagtggaatgaaacgagaataaactacaaaaggaaccctcaaacctatagaaatacatggaaattaagccacttgctcctgaatgatttttgggttaatgataaattcaggatcaaaatttaaaaattcattgaaatgaatamcaatagagatacaagctatcacaaatttacaacttaatgtcacacctgaagaaacttgagaaacaagaacaaactaaacctgaagctagcagaaggaaataaataacaaagagcagaaataaattgaaacaaaaaagtagaaaaagcaatgaaacaaaacttggttttttgaaaagacagacaaaattgttagacaattagctagattaaccaagaaaagaagagaagattcaaataaattcaattataaatgaaactagagacattacagtttat

SEQ ID NO: 572625 - DNA, 590 bp, Homo sapiens
atcttattgcatatctaggggcatcgtcaggaaacaggaagaatttttaaaaaggatctaatataagtggatggtgtagctgatcagttagcaaatgaccgtcaacagtactggctggaacccagcgaagtgcaggctggaggcagaagagagctgggccatttccttgtgtgacaaccaatctctgtccttgggatcactgctactatttatttggaatttattgagtcagcaactgttctaaattcattgccatcattattatgtttaaatcttgttacaacccttaggagatagcagatgaagaaagagattctgagacgttaggtggtcttaagttcccctaggtagggagactcgggcctggaactcggatttttttttcttttgagatggagtttcgctctgttgcccaggctggagtgcagtggcacgatctcggtgcactgcaagctccgcctcccgggttcataccattctcctgccttggcctcccgagtagctgggactacaggcrcccgccaccaccatgcccggctaatttttggtatttttagtagagacagggttacaccgtgttagccaggatg

SEQ ID NO: 572626 - DNA, 570 bp, Homo sapiens
tcttgctctgtcatccgggctggagtgcagtggtacaaacatgactcactgtggcctcgacctcctgggctcaagtgatcctcccacctcagcctcctgagtacctgggactacaggcatgcaccaccacatacagctaatttttatattttttttatagagacaggattttgccatgttccccagactgttctcaaactcctgggctcaagcaatctgcccgcctcatcctcccaaagtgctgggattacagatgagtgtgagccactatgcctggaccttaaatacattttagaaaagaatttaacacatacacatacacacaccccataaagcctgtctccaccatttgraaaatgttagttcaatcctcaggaaaaagaaggaagtttaaaaatacagtacaagatggtccctggtccagagatctctacatttaacaaagcatccattctttattggttagaaagagtttagatacagcactttcaagctaacatcagactatgaattcttaactctttaggtttactattaggccaagttattattgagttgactggaaaagat

SEQ ID NO: 572627 - DNA, 467 bp, Homo sapiens
gaaaataaatgcctaggctgggcacagtggctcacacctataatcccagcaccttgggaggctgaggcaggtggattacttgaggctaggagttcragaccagcctgggcaacatgacgataccccatctctacaaaaaataaaaaattagccaggcatggtggtgtgtgcctgtagtcccagctattcaggaggctgaaatgagaggatcaattgagcccagtaggtcacaggctgcagtgagccatgatcatgccaccacactccagcctgggtgacacagtgaaaccctctcaatcaatcaatcaatatctgctgttgaagccactcagactgtggtatttttttacagcagcctaaacagactaatatactatgtcatgaggtagacctgtggagaggcccatttggcaggggactacggcttttcaagaaccccatgagtgagtttggaagcagatctccct

SEQ ID NO: 572628 - DNA, 467 bp, Homo sapiens
gaaaataaatgcctaggctgggcacagtggctcacacctataatcccagcaccttgggaggctgaggcaggtggattacttgaggctaggagttcgagaccagcctgggcaacatgacgataccccatctctacaaaaaataaaaaattagccaggcatggtggtgtgtgcctgtagtcccagctattcaggaggctgaaatgagaggatcaattgagcccagtaggtcacaggctgcagtgagccatgatcatgccaccacactccagsctgggtgacacagtgaaaccctctcaatcaatcaatcaatatctgctgttgaagccactcagactgtggtatttttttacagcagcctaaacagactaatatactatgtcatgaggtagacctgtggagaggcccatttggcaggggactacggcttttcaagaaccccatgagtgagtttggaagcagatctccct

SEQ ID NO: 572629 - DNA, 515 bp, Homo sapiens
agacatatggaccaatggaacaaaatagaaagcccagaaataaatccataatttatagccatctgatttttgacaaggttgccaagaacacacaacagggcaaggattgcctcttcaataaatggtgttgggacaactgaatatccatatgcagaagaataaaactggacttttatcttaccataaacaaaatcaactcaaaatggattaaaaacctaaacattaagaccttaaactataaaactactagaataaaacacaggacaaaagcttcttgacactgctcttggcaataattttttggatatgactgctgacatggctgaattaataaagtcatatttgggagaaagtagatggcaaaaaggcataaacatttttgtttttgttttgagacagggatttgctctgacacccatgctggagcgcagtgaggcaatcatggctcactgcagcctcaacctsctgggctcaagtgatcctctcacttcagtctcccaggtagctgggaatac

SEQ ID NO: 572630 - DNA, 538 bp, Homo sapiens
gctgagctcgcttctccaggcatcacaggctgcactaggtgatgctggacattgaaaacacacagggacaaggacacacacacacacacacacacacacacacacacacacgactcatggggacccgggaatctgtgaccatggtccccatggcaataaggagtggaagatgtttcaagtgtttgtgcagcaactgctacttctgattttctcagtgagggtggctggcagtgaggaggtccaggagctcctaggcttctatggactatgctgatggagggcctcactggctcctaatacacatggaattgagagaaaacaaagttaagtagaacataaggattccaaaaaagaatagcygtaccctgccccaccactggtcctgatcccaggaagcaaccattgttatattttagctcttttttttccttcagatattggcctccgtgtttctagataatgtgattatattaaaatttcctgatttttcaattatagacattattaacttcctactaaaaagcataagacttaatct

SEQ ID NO: 572631 - DNA, 519 bp, Homo sapiens
acatcaaatcaaatacaacttacccttcttaacaatgtctgaaacagtagtgtttaatttagacaacttatttttaaaaaccaataaccagtggttagtcacaattacaatggctggagtcaattcyaaatgccagcatgaaattcttgcttctcatattgttctgccatgtgctcactgtgtctgttgtggatagagaggaacaaaacatatttagggacatcattacagaattaggataaagtatgtatttattgaataaaagcagcaaaagcgatttgactgtgacaacctggaagaaccgtgacaacatagtcactttcagtctttttacattttttcctgttacattgtttgacacaatgcaaggtattggatcacttgtcaaggagcagtttgatttctccatggtgagccagggcatttaggactgctgcagtgcaacatacacctgagcattgcaggtgaatttggtctctaccttgtaatatttaaggtcattcagaaaaataatagtcc

SEQ ID NO: 572632 - DNA, 571 bp, Homo sapiens
cgatttgactgtgacaacctggaagaaccgtgacaacatagtcactttcagtctttttacattttttcctgttacattgtttgacacaatgcaaggtattggatcacttgtcaaggagcagtttgatttctccatggtgagccagggcatttaggactgctgcagtgcaacatacacctgagcattgcaggtgaatttggtctctaccttgtaatatttaaggtcattcagaaaaataatagtccattactcattaaatatttgtaaaaatgctcaacatattccaactttagamagatgttagactagtactatagatgttagtctaacactgtagagggctcctatttatctttcagctgaattgtcaacattgttttctagacaacttacattattctgatgttggttaaaacctattaactgaggccaggcttggtggctcatgcttgtaatcctagcactttgggaggccgaggcaggcagatcacctgagatcaggagttcgggaccagcctggccaacatgttgaaatcccgtctctactaaaaatacaaaaattacccaggca

SEQ ID NO: 572633 - DNA, 405 bp, Homo sapiens
ttatctcacattccaaatttacaagctattctccctttgcctttataattaactgtcacacaaaggctatgcatacgatgagggcttggactatgtcttcttcaacttttgggtctccagaacccaccattcagcatgtacttaataaatatctgttggagaaacaaacaagtgaatttttatgctcaaaaccagkcatctgcagctatggactgaattgtgcccctctccaaaattcgtatgctgaagctctaaatcccaatgatgctgtatttggagatggggttcttaggaagtaattaatgttaaatgaagttttaagggtggtgtcctaatctgactaagttggtggctttataaggaaaaagaagaagagtgggcactctctctccacttgcatgccac

SEQ ID NO: 572634 - DNA, 405 bp, Homo sapiens
ttatctcacattccaaatttacaagctattctccctttgcctttataattaactgtcacacaaaggctatgcatacgatgagggcttggactatgtcttcttcaacttttgggtctccagaacccaccattcagcatgtacttaataaatatctgttggagaaacaaacaagtgaatttttatgctcaaaaccaggcatctgcagctatggactgaattgtgcccctctccaaaattcgtatgctgaagctctaaatcccaatgatgctgtatttggagatggggttcttaggaagtaattaatgttaaatgaagttttaakggtggtgtcctaatctgactaagttggtggctttataaggaaaaagaagaagagtgggcactctctctccacttgcatgccac

SEQ ID NO: 572635 - DNA, 405 bp, Homo sapiens
ttatctcacattccaaatttacaagctattctccctttgcctttataattaactgtcacacaaaggctatgcatacgatgagggcttggactatgtcttcttcaacttttgggtctccagaacccaccattcagcatgtacttaataaatatctgttggagaaacaaacaagtgaatttttatgctcaaaaccaggcatctgcagctatggactgaattgtgcccctctccaaaattcgtatgctgaagctctaaatcccaatgatgctgtatttggagatggggttcttaggaagtaattaatgttaaatgaagttttaagggtggtgtcctaatctgactaagttggtggctttataaggaaaaagaagaagagtgggcrctctctctccacttgcatgccac

SEQ ID NO: 572636 - DNA, 582 bp, Homo sapiens
ttttccaccagcagttaatggatcaccacggaatgaatcgaatggaagcacctcggaattgaaacgaatggaattatcatgaaattgaaatggatggactcatcatcgaatggattcgaatggaatcatcgaataaaattgattgaaatcatcatccaatggaatcgaatggtatcattgaatggaatcgaatggaatcatcatcagatggaaatgaatrgaatcgtcatagaatggaatcgaatggattcattgaatggaatcagatggaatcatcgaatggactggaatggaatcattgaatggactcgaaagggatcatgattgaatggaattgaatggaatcatcgaatggtctcgattggaatcattatcaaatggaatcgaatggaatcaccgaatagaatcgaatggaacaatcatcgaatggactcaaatggaattatcctcaaatggaatcgaatggaattatcgaatgcaatcgaatggaattatcgaatgcaatcgaatagaatcatcgaatggactcgaatggaatcatcgaatggaatggaatggaacagtcaatgaactcgaatggaa

SEQ ID NO: 572637 - DNA, 501 bp, Homo sapiens
tggaattatcatgaaattgaaatggatggactcatcatcgaatggattcgaatggaatcatcgaataaaattgattgaaatcatcatccaatggaatcgaatggtatcattgaatggaatcgaatggaatcatcatcagatggaaatgaatggaatcgtcatagaatggaatcgaatgsattcattgaatggaatcagatggaatcatcgaatggactggaatggaatcattgaatggactcgaaagggatcatgattgaatggaattgaatggaatcatcgaatggtctcgattggaatcattatcaaatggaatcgaatggaatcaccgaatagaatcgaatggaacaatcatcgaatggactcaaatggaattatcctcaaatggaatcgaatggaattatcgaatgcaatcgaatggaattatcgaatgcaatcgaatagaatcatcgaatggactcgaatggaatcatcgaatggaatggaatggaacagtcaatg

SEQ ID NO: 572638 - DNA, 407 bp, Homo sapiens
gaatcagatggaatcatygaatggactggaatggaatcattgaatggactcgaaagggatcatgattgaatggaattgaatggaatcatcgaatggtctcgattggaatcattatcaaatggaatcgaatggaatcaccgaatagaatcgaatggaacaatcatcgaatggactcaaatggaattatcctcaaatggaatcgaatggaattatcgaatgcaatcgaatggaattatcgaatgcaatcgaatagaatcatcgaatggactcgaatggaatcatcgaatggaatggaatggaacagtcaatgaactcgaatggaatcatcattgaatggaatcgaatggaatcatcgagtggaatcgaatggaattatgatcaaatggaatcgaatgtaatcatcatca

SEQ ID NO: 572639 - DNA, 443 bp, Homo sapiens
tcgtcatagaatggaatcgaatggattcattgaatggaatcagatggaatcatcgaatggactsgaatggaatcattgaatggactcgaaagggatcatgattgaatggaattgaatggaatcatcgaatggtctcgattggaatcattatcaaatggaatcgaatggaatcaccgaatagaatcgaatggaacaatcatcgaatggactcaaatggaattatcctcaaatggaatcgaatggaattatcgaatgcaatcgaatggaattatcgaatgcaatcgaatagaatcatcgaatggactcgaatggaatcatcgaatggaatggaatggaacagtcaatgaactcgaatggaatcatcattgaatggaatcgaatggaatcatcgagtggaatcgaatggaattatgatcaaatggaatcgaatgtaatcatcatca

SEQ ID NO: 572640 - DNA, 509 bp, Homo sapiens
gaatggaattatcatgaaattgaaatggatggactcatcatcgaatggattcgaatggaatcatcgaataaaattgattgaaatcatcatccaatggaatcgaatggtatcattgaatggaatcgaatggaatcatcatcagatggaaatgaatggaatcgtcatagaatggaatcgaatggattcattgaatggaatcagatggaatcatcgaatggactggaatggaatcattgaatggactcgaaagggatcatkattgaatggaattgaatggaatcatcgaatggtctcgattggaatcattatcaaatggaatcgaatggaatcaccgaatagaatcgaatggaacaatcatcgaatggactcaaatggaattatcctcaaatggaatcgaatggaattatcgaatgcaatcgaatggaattatcgaatgcaatcgaatagaatcatcgaatggactcgaatggaatcatcgaatggaatggaatggaacagtcaatgaactc

SEQ ID NO: 572641 - DNA, 460 bp, Homo sapiens
ggattcattgaatggaatcagatggaatcatcgaatggactggaatggaatcattgaatggactcgaaagggatcatgrttgaatggaattgaatggaatcatcgaatggtctcgattggaatcattatcaaatggaatcgaatggaatcaccgaatagaatcgaatggaacaatcatcgaatggactcaaatggaattatcctcaaatggaatcgaatggaattatcgaatgcaatcgaatggaattatcgaatgcaatcgaatagaatcatcgaatggactcgaatggaatcatcgaatggaatggaatggaacagtcaatgaactcgaatggaatcatcattgaatggaatcgaatggaatcatcgagtggaatcgaatggaattatgatcaaatggaatcgaatgtaatcatcatcaaatggaatcaaaaataaccatcatcaattggtattgaat

SEQ ID NO: 572642 - DNA, 509 bp, Homo sapiens
gaatggaattatcatgaaattgaaatggatggactcatcatcgaatggattcgaatggaatcatcgaataaaattgattgaaatcatcatccaatggaatcgaatggtatcattgaatggaatcgaatggaatcatcatcagatggaaatgaatggaatcgtcatagaatggaatcgaatggattcattgaatggaatcagatggaatcatcgaatggactggaatggaatcattgaatggactcgaaagggatcatgattgaatggaattgaatggaatcatcraatggtctcgattggaatcattatcaaatggaatcgaatggaatcaccgaatagaatcgaatggaacaatcatcgaatggactcaaatggaattatcctcaaatggaatcgaatggaattatcgaatgcaatcgaatggaattatcgaatgcaatcgaatagaatcatcgaatggactcgaatggaatcatcgaatggaatggaatggaacagtcaatgaactc

SEQ ID NO: 572643 - DNA, 438 bp, Homo sapiens
cgaatggattcattgaatggaatcagatggaatcatcgaatggactggaatggaatcattgaatggactcgaaagggatcatgattgaatggaattgaatggaatcatcgaatggtctcgawtggaatcattatcaaatggaatcgaatggaatcaccgaatagaatcgaatggaacaatcatcgaatggactcaaatggaattatcctcaaatggaatcgaatggaattatcgaatgcaatcgaatggaattatcgaatgcaatcgaatagaatcatcgaatggactcgaatggaatcatcgaatggaatggaatggaacagtcaatgaactcgaatggaatcatcattgaatggaatcgaatggaatcatcgagtggaatcgaatggaattatgatcaaatggaatcgaatgtaatcatcatcaaatggaatcaaa

SEQ ID NO: 572644 - DNA, 555 bp, Homo sapiens
ggattcgaatggaatcatcgaataaaattgattgaaatcatcatccaatggaatcgaatggtatcattgaatggaatcgaatggaatcatcatcagatggaaatgaatggaatcgtcatagaatggaatcgaatggattcattgaatggaatcagatggaatcatcgaatggactggaatggaatcattgaatggactcgaaagggatcatgattgaatggaattgaatggaatcatcgaatggtctcgattggaatcattatcaaatggaatcgaatggaatcaccgaatagaatsgaatggaacaatcatcgaatggactcaaatggaattatcctcaaatggaatcgaatggaattatcgaatgcaatcgaatggaattatcgaatgcaatcgaatagaatcatcgaatggactcgaatggaatcatcgaatggaatggaatggaacagtcaatgaactcgaatggaatcatcattgaatggaatcgaatggaatcatcgagtggaatcgaatggaattatgatcaaatggaatcgaatgtaatcatcatca

SEQ ID NO: 572645 - DNA, 460 bp, Homo sapiens
ggattcattgaatggaatcagatggaatcatcgaatggactggaatggaatcattgaatggactcgaaagggatcatgattgaatggaattgaatggaatcatcgaatggtctcgattggaatcattatcaaatggaatcgaatggaatcaccgaatagaatcraatggaacaatcatcgaatggactcaaatggaattatcctcaaatggaatcgaatggaattatcgaatgcaatcgaatggaattatcgaatgcaatcgaatagaatcatcgaatggactcgaatggaatcatcgaatggaatggaatggaacagtcaatgaactcgaatggaatcatcattgaatggaatcgaatggaatcatcgagtggaatcgaatggaattatgatcaaatggaatcgaatgtaatcatcatcaaatggaatcaaaaataaccatcatcaattggtattgaat

SEQ ID NO: 572646 - DNA, 509 bp, Homo sapiens
gaatggaattatcatgaaattgaaatggatggactcatcatcgaatggattcgaatggaatcatcgaataaaattgattgaaatcatcatccaatggaatcgaatggtatcattgaatggaatcgaatggaatcatcatcagatggaaatgaatggaatcgtcatagaatggaatcgaatggattcattgaatggaatcagatggaatcatcgaatggactggaatggaatcattgaatggactcgaaagggatcatgattgaatggaattgaatggaatcatcgaatggtctcgattggaatcattatcaaatggaatcgaatggaatcaccgaatagaatcgaatggaacaatcatcgaatggastcaaatggaattatcctcaaatggaatcgaatggaattatcgaatgcaatcgaatggaattatcgaatgcaatcgaatagaatcatcgaatggactcgaatggaatcatcgaatggaatggaatggaacagtcaatgaactc

SEQ ID NO: 572647 - DNA, 592 bp, Homo sapiens
attcgaatggaatcatcgaataaaattgattgaaatcatcatccaatggaatcgaatggtatcattgaatggaatcgaatggaatcatcatcagatggaaatgaatggaatcgtcatagaatggaatcgaatggattcattgaatggaatcagatggaatcatcgaatggactggaatggaatcattgaatggactcgaaagggatcatgattgaatggaattgaatggaatcatcgaatggtctcgattggaatcattatcaaatggaatcgaatggaatcaccgaatagaatcgaatggaacaatcatcgaatggactcaaatggamttatcctcaaatggaatcgaatggaattatcgaatgcaatcgaatggaattatcgaatgcaatcgaatagaatcatcgaatggactcgaatggaatcatcgaatggaatggaatggaacagtcaatgaactcgaatggaatcatcattgaatggaatcgaatggaatcatcgagtggaatcgaatggaattatgatcaaatggaatcgaatgtaatcatcatcaaatggaatcaaaaataaccatcatcaattggtattgaat

SEQ ID NO: 572648 - DNA, 578 bp, Homo sapiens
aatggatggactcatcatcgaatggattcgaatggaatcatcgaataaaattgattgaaatcatcatccaatggaatcgaatggtatcattgaatggaatcgaatggaatcatcatcagatggaaatgaatggaatcgtcatagaatggaatcgaatggattcattgaatggaatcagatggaatcatcgaatggactggaatggaatcattgaatggactcgaaagggatcatgattgaatggaattgaatggaatcatcgaatggtctcgattggaatcattatcaaatggaatcgaatggaatcaccgaatagaatcgaatggaacaatcatcgaatggactcaaatggaattatmctcaaatggaatcgaatggaattatcgaatgcaatcgaatggaattatcgaatgcaatcgaatagaatcatcgaatggactcgaatggaatcatcgaatggaatggaatggaacagtcaatgaactcgaatggaatcatcattgaatggaatcgaatggaatcatcgagtggaatcgaatggaattatgatcaaatggaatcgaatgtaatcatcatca

SEQ ID NO: 572649 - DNA, 425 bp, Homo sapiens
ggattcattgaatggaatcagatggaatcatcgaatggactggaatggaatcattgaatggactcgaaagggatcatgattgaatggaattgaatggaatcatcgaatggtctcgattggaatcattatcaaatggaatcgaatggaatcaccgaatagaatcgaatggaacaatcatcgaatggactcaaatggaattatcctcaaatggaatygaatggaattatcgaatgcaatcgaatggaattatcgaatgcaatcgaatagaatcatcgaatggactcgaatggaatcatcgaatggaatggaatggaacagtcaatgaactcgaatggaatcatcattgaatggaatcgaatggaatcatcgagtggaatcgaatggaattatgatcaaatggaatcgaatgtaatcatcatcaaatg

SEQ ID NO: 572650 - DNA, 523 bp, Homo sapiens
gaatcgaatggtatcattgaatggaatcgaatggaatcatcatcagatggaaatgaatggaatcgtcatagaatggaatcgaatggattcattgaatggaatcagatggaatcatcgaatggactggaatggaatcattgaatggactcgaaagggatcatgattgaatggaattgaatggaatcatcgaatggtctcgattggaatcattatcaaatggaatcgaatggaatcaccgaatagaatcgaatggaacaatcatcgaatggactcaaatggaattatcctcaaatggaatcgaatggaattatcraatgcaatcgaatggaattatcgaatgcaatcgaatagaatcatcgaatggactcgaatggaatcatcgaatggaatggaatggaacagtcaatgaactcgaatggaatcatcattgaatggaatcgaatggaatcatcgagtggaatcgaatggaattatgatcaaatggaatcgaatgtaatcatcatcaaatggaatcaaaaataac

SEQ ID NO: 572651 - DNA, 501 bp, Homo sapiens
tggaattatcatgaaattgaaatggatggactcatcatcgaatggattcgaatggaatcatcgaataaaattgattgaaatcatcatccaatggaatcgaatggtatcattgaatggaatcgaatggaatcatcatcagatggaaatgaatggaatcgtcatagaatggaatcgaatggattcattgaatggaatcagatggaatcatcgaatggactggaatggaatcattgaatggactcgaaagggatcatgattgaatggaattgaatggaatcatcgaatggtctcgattggaatcattatcaaatggaatcgaatggaatcaccgaatagaatcgaatggaacaatcatcgaatggactcaaatggaattatcctcaaatggaatcgaatggaattatcgaatgcaatcgaatggaattatcgaatgcwatcgaatagaatcatcgaatggactcgaatggaatcatcgaatggaatggaatggaacagtcaatg

SEQ ID NO: 572652 - DNA, 444 bp, Homo sapiens
ggattcattgaatggaatcagatggaatcatcgaatggactggaatggaatcattgaatggactcgaaagggatcatgattgaatggaattgaatggaatcatcgaatggtctcgattggaatcattatcaaatggaatcgaatggaatcaccgaatagaatcgaatggaacaatcatcgaatggactcaaatggaattatcctcaaatggaatcgaatggaattatcgaatgcaatcgaatggaattatcgaatgcaatcgaatagaatcatcgaatggactcraatggaatcatcgaatggaatggaatggaacagtcaatgaactcgaatggaatcatcattgaatggaatcgaatggaatcatcgagtggaatcgaatggaattatgatcaaatggaatcgaatgtaatcatcatcaaatggaatcaaaaataaccatca

SEQ ID NO: 572653 - DNA, 438 bp, Homo sapiens
cgaatggattcattgaatggaatcagatggaatcatcgaatggactggaatggaatcattgaatggactcgaaagggatcatgattgaatggaattgaatggaatcatcgaatggtctcgattggaatcattatcaaatggaatcgaatggaatcaccgaatagaatcgaatggaacaatcatcgaatggactcaaatggaattatcctcaaatggaatcgaatggaattatcgaatgcaatcgaatggaattatcgaatgcaatcgaatagaatcatcgaatggactcgaatggaatcatcgaatggaatggaatggaasagtcaatgaactcgaatggaatcatcattgaatggaatcgaatggaatcatcgagtggaatcgaatggaattatgatcaaatggaatcgaatgtaatcatcatcaaatggaatcaaa

SEQ ID NO: 572654 - DNA, 592 bp, Homo sapiens
attcgaatggaatcatcgaataaaattgattgaaatcatcatccaatggaatcgaatggtatcattgaatggaatcgaatggaatcatcatcagatggaaatgaatggaatcgtcatagaatggaatcgaatggattcattgaatggaatcagatggaatcatcgaatggactggaatggaatcattgaatggactcgaaagggatcatgattgaatggaattgaatggaatcatcgaatggtctcgattggaatcattatcaaatggaatcgaatggaatcaccgaatagaatcgaatggaacaatcatcgaatggactcaaatggaattatcctcaaatggaatcgaatggaattatcgaatgcaatcgaatggaattatcgaatgcaatcgaatagaatcatcgaatggactcgaatggaatcatcgaatggaatggaatggaacagtcaatgaactsgaatggaatcatcattgaatggaatcgaatggaatcatcgagtggaatcgaatggaattatgatcaaatggaatcgaatgtaatcatcatcaaatggaatcaaaaataaccatcatcaattggtattgaat

SEQ ID NO: 572655 - DNA, 592 bp, Homo sapiens
attcgaatggaatcatcgaataaaattgattgaaatcatcatccaatggaatcgaatggtatcattgaatggaatcgaatggaatcatcatcagatggaaatgaatggaatcgtcatagaatggaatcgaatggattcattgaatggaatcagatggaatcatcgaatggactggaatggaatcattgaatggactcgaaagggatcatgattgaatggaattgaatggaatcatcgaatggtctcgattggaatcattatcaaatggaatcgaatggaatcaccgaatagaatcgaatggaacaatcatcgaatggactcaaatggaattatcctcaaatggaatcgaatggaattatcgaatgcaatcgaatggaattatcgaatgcaatcgaatagaatcatcgaatggactcgaatggaatcatcgaatggaatggaatggaacagtcaatgaactcgaatggaatcatcattgaatggaatcgaatggaatcwtcgagtggaatcgaatggaattatgatcaaatggaatcgaatgtaatcatcatcaaatggaatcaaaaataaccatcatcaattggtattgaat

SEQ ID NO: 572656 - DNA, 523 bp, Homo sapiens
gaatcgaatggtatcattgaatggaatcgaatggaatcatcatcagatggaaatgaatggaatcgtcatagaatggaatcgaatggattcattgaatggaatcagatggaatcatcgaatggactggaatggaatcattgaatggactcgaaagggatcatgattgaatggaattgaatggaatcatcgaatggtctcgattggaatcattatcaaatggaatcgaatggaatcaccgaatagaatcgaatggaacaatcatcgaatggactcaaatggaattatcctcaaatggaatcgaatggaattatcgaatgcaatcgaatggaattatcgaatgcaatcgaatagaatcatcgaatggactcgaatggaatcatcgaatggaatggaatggaacagtcaatgaactcgaatggaatcatcattgaatggaatcgaatggaatcatcgagtggaatcgaatgkaattatgatcaaatggaatcgaatgtaatcatcatcaaatggaatcaaaaataac

SEQ ID NO: 572657 - DNA, 460 bp, Homo sapiens
ggattcattgaatggaatcagatggaatcatcgaatggactggaatggaatcattgaatggactcgaaagggatcatgattgaatggaattgaatggaatcatcgaatggtctcgattggaatcattatcaaatggaatcgaatggaatcaccgaatagaatcgaatggaacaatcatcgaatggactcaaatggaattatcctcaaatggaatcgaatggaattatcgaatgcaatcgaatggaattatcgaatgcaatcgaatagaatcatcgaatggactcgaatggaatcatcgaatggaatggaatggaacagtcaatgaactcgaatggaatcatcattgaatggaatcgaatggaatcatcgagtggaatcgaatggaattatsatcaaatggaatcgaatgtaatcatcatcaaatggaatcaaaaataaccatcatcaattggtattgaat

SEQ ID NO: 572658 - DNA, 444 bp, Homo sapiens
ggattcattgaatggaatcagatggaatcatcgaatggactggaatggaatcattgaatggactcgaaagggatcatgattgaatggaattgaatggaatcatcgaatggtctcgattggaatcattatcaaatggaatcgaatggaatcaccgaatagaatcgaatggaacaatcatcgaatggactcaaatggaattatcctcaaatggaatcgaatggaattatcgaatgcaatcgaatggaattatcgaatgcaatcgaatagaatcatcgaatggactcgaatggaatcatcgaatggaatggaatggaacagtcaatgaactcgaatggaatcatcattgaatggaatcgaatggaatcatcgagtggaatcgaatggaattatgatcaaatggaatcgaatgtaatcaycatcaaatggaatcaaaaataaccatca

SEQ ID NO: 572659 - DNA, 629 bp, Homo sapiens
tttactgaaattcaaaaatagtaaaatgtcacatctaaatttttgggggggctattaaaaatggcatttaaatttatacaygaactgaaaaatgaagcaagttctgtcatagtttgacaggtataatcacttatcctgtaatgcaaacagtaacctaatagcaagatgctaatattgctttggtgcaggtgttgctaattagctattggattagcctgtatcatattcttttctctcacctatgcataatatttgtgcaaaatgcaaatggaagctctaagctgaaatgtgtaagtgccaaccttaaacactggtttgactttgaaacaatgagaattttgaactgggcagtgattatgacttagttgtagtttcgggctcagttagattcctggttctcctcccgacagtgatggtttactctcaaagaggaagttaaactcgtttggggtctggccaagtgactaggtgagaagaaagccagaagtcatttctttttttttaattttaaaatttttaattttttgtgggtacatagtagatgtatatatttatgaggtacatgagatattttgatacaggcatataatgtgtaataatcacatcagggtaaatgggttgtcacctca

SEQ ID NO: 572660 - DNA, 598 bp, Homo sapiens
ggtggtaatgcaggagggaccctctactccaattggatttcaaaatgagaagctgaagctgtatggatcactatatcctttttttaaaattgtgttaaaatacacataccataaaatttgccatcttaaccaattttaagtgtacagttcaactgtgttaaatatattcacattgtcatgctatcaatctcaagaactttttttcttttgccaaactgaaactctatacccattaaacaaccctcattcccatcctcccagcccctgaaactatactcttttaagaaaaccctgtttaatttccctttagtgctgtctcatcattgccatcagttttccgcctctgggaagtcacatcacctgttctgtcaccctgccctctctagctcttagctttgccacactcatctccattcttttcctaaacatcaggctcctcmatattcctaatcctaatcctactcaacattctctatctcctcctcagcatttgtattggccagtgtagctctttctcttttaaaaaaattttttagattgattcttggttggcattttatttattttattactttttttttgagacagggtcagccag

SEQ ID NO: 572661 - DNA, 462 bp, Homo sapiens
attgaattcacttatttctaaaggcttacattttatatccaggcacgcaggcatgtaatctgaagaaaatcaaataaaacaaggggttatattctgtatgttatgttaccttaatatctgcagaaagagtcttatttcaacatatgaacaacccaagaatttattttgaaattcaatgtggkcagatatttttctcacatatttctagggtgtttttaaagtagttggttcatatataactgaaatggaatttagagtgcatcatgtgcaattcactcatttttcagttaaaaaaaaaagtagagtgcagtaattttaagaaataagtccaaaatcacatggtgagatagtggcagaaaaaaaaaatatctctcttaaccttcatttctgtgctatgtggctttatatcacacttttcagcactttcaagatatatatttagaggataaatcttttaaaaac

SEQ ID NO: 572662 - DNA, 462 bp, Homo sapiens
attgaattcacttatttctaaaggcttacattttatatccaggcacgcaggcatgtaatctgaagaaaatcaaataaaacaaggggttatattctgtatgttatgttaccttaatatctgcagaaagagtcttatttcaacatatgaacaacccaagaatttattttgaaattcaatgtgggcagatatttttctcacatatttctagggtgtttttaaagtagttggttcatakataactgaaatggaatttagagtgcatcatgtgcaattcactcatttttcagttaaaaaaaaaagtagagtgcagtaattttaagaaataagtccaaaatcacatggtgagatagtggcagaaaaaaaaaatatctctcttaaccttcatttctgtgctatgtggctttatatcacacttttcagcactttcaagatatatatttagaggataaatcttttaaaaac

SEQ ID NO: 572663 - DNA, 460 bp, Homo sapiens
tgaattcacttatttctaaaggcttacattttatatccaggcacgcaggcatgtaatctgaagaaaatcaaataaaacaaggggttatattctgtatgttatgttaccttaatatctgcagaaagagtcttatttcaacatatgaacaacccaagaatttattttgaaattcaatgtgggcagatatttttctcacatatttctagggtgtttttaaagtagttggttcatatataactgaaatggaatttagagtgcatcatgtgcaattcactcatttttcagttaaaaaaaaaagtagagtgcagtaattttaagaaataagtccaaaatcacatggtgagatagtggcagaaaaaaaaaatatctctcttaaccttcatttctgtgctatgtggctttatatcacacttttcagcacttycaagatatatatttagaggataaatcttttaaaaac

SEQ ID NO: 572664 - DNA, 501 bp, Homo sapiens
gtggcacgcacctgtagtcccagctactctggaggctgaggcaggagaatcgcttgaacccaggaggctgaggttgagaccacaccactgcactccagctgggtgacagwgcgagactccatctcaaaaaaaaaaaaaaaaagcttacttattttatacaaatttttcatgaaaaatacatttatacatgatatatatcatatacacataatgatatcaatgagtcccaccctgaaacatgagaatttttttcatttccaccttaaaggactttctgagtggcagtcctgacaaaccatgatataaagagtatatacaaagtgtcattctttgtcaccaacattttcaaattaattgcagcaaaaatataataggcatattattaatcataccagaggaacggtgataatgatgatttttttaaaattcctgtgtgttataagtaaatggactatatactgcatgtctgtactctgttgcttctgaaagtattctataagt

SEQ ID NO: 572665 - DNA, 465 bp, Homo sapiens
ttcatagcacagcatattcatgtgtaacttgcttaattatttcttgaatggcgtgctgagatttgtatttctgaggtctttgttctgtagaacattcgaacacttctctctctgtctttcttatacatgaagwcattcttttgtcctattatcaactcaagattgtgaaagtgtcatttcctttcacaaagttcttttttacaatcaagattattaactccatatattaatgctctttaaaaaggataaaagttttattttctaacaagtaatactgcactttttcaagagatgtgctctaaagaaactcgttagggaaagattgcgaagaatacacacatttaaattgagcaaatgctatcctttcacataatgagagagagatcccacctgcgactagcttttaaaagacatattgcgcaaactacaccattatgattccaagcaaattttcataggaaaaat

SEQ ID NO: 572666 - DNA, 341 bp, Homo sapiens
tgttgttctttctcttaggggagcatcaacattgggaaggaaatattcaacttaggaacacagtgaccctttacaagtagctggaaggagcacaaagaaagaagattcagaaacactttttctggcaccaagtgcagaaaaaaaaaaaaaaaagcttagttaaatttcagatttatagcccaacttaataactcccttaaaaaraaataatgtgttgaatatgtactagaagccagaattgattaaaataactttaaatgcttaaactgtttttgtagtcccacttactgtgagaaagattctcgcacctgaaattaagctaaagaaccaacttttaattg

SEQ ID NO: 572667 - DNA, 465 bp, Homo sapiens
ttcatagcacagcatattcatgtgtaacttgcttaattatttcttgaatggcgtgctgagatttgtatttctgaggtctttgttctgtagaacattcgaacacttctctctctgtctttcttatacatgaagacattcttttgtcctattatcaactcaagattgtgaaagtgtcatttcctttcacaaagttcttttttacaatcaagattattaactycatatattaatgctctttaaaaaggataaaagttttattttctaacaagtaatactgcactttttcaagagatgtgctctaaagaaactcgttagggaaagattgcgaagaatacacacatttaaattgagcaaatgctatcctttcacataatgagagagagatcccacctgcgactagcttttaaaagacatattgcgcaaactacaccattatgattccaagcaaattttcataggaaaaat

SEQ ID NO: 572668 - DNA, 465 bp, Homo sapiens
ttcatagcacagcatattcatgtgtaacttgcttaattatttcttgaatggcgtgctgagatttgtatttctgaggtctttgttctgtagaacattcgaacacttctctctctgtctttcttatacatgaagacattcttttgtcctattatcaactcaagattgtgaaagtgtcatttcctttcacaaagttcttttttacaatcaagattattaactccatatattaatgctctttaaaaaggataaaagttttattttctaacaagtaatactgcactttttcaagagatgtgctmtaaagaaactcgttagggaaagattgcgaagaatacacacatttaaattgagcaaatgctatcctttcacataatgagagagagatcccacctgcgactagcttttaaaagacatattgcgcaaactacaccattatgattccaagcaaattttcataggaaaaat

SEQ ID NO: 572669 - DNA, 485 bp, Homo sapiens
agatacactaaccacgcacatggagaaatatatttattcctgataacaytgattgtagacacatggcttaagtcaacaacagcagcaggcttacttcccctgaattcgttacactaccagtgtgtatgaagataatctcagactacaccttcccctacctactactaaccatctttcacagcagagagagaaatgaaatttcacccttccttttggtaggcagataaccaaaggaaagagagatgtaactgatatggtttggctgtgtcccacccaaaatctcatcttgcattgtaatccccataatccccacatgtcaagggagagaccaggtggagataattgaatcataggggcagtttcccccttgctgttcttgtgatagtgagtgaattctgatgagatctgatggttttataaggagcttttcccctttcgctcctctcacttctctctcctgctgccttgtgaaaaaagatgtgtgt

SEQ ID NO: 572670 - DNA, 485 bp, Homo sapiens
agatacactaaccacgcacatggagaaatatatttattcctgataacactgaytgtagacacatggcttaagtcaacaacagcagcaggcttacttcccctgaattcgttacactaccagtgtgtatgaagataatctcagactacaccttcccctacctactactaaccatctttcacagcagagagagaaatgaaatttcacccttccttttggtaggcagataaccaaaggaaagagagatgtaactgatatggtttggctgtgtcccacccaaaatctcatcttgcattgtaatccccataatccccacatgtcaagggagagaccaggtggagataattgaatcataggggcagtttcccccttgctgttcttgtgatagtgagtgaattctgatgagatctgatggttttataaggagcttttcccctttcgctcctctcacttctctctcctgctgccttgtgaaaaaagatgtgtgt

SEQ ID NO: 572671 - DNA, 485 bp, Homo sapiens
agatacactaaccacgcacatggagaaatatatttattcctgataacactgattgtagacacatggcttaagtcaacaacagcagcaggcttacttcccctgaattcgttacactaccagtgtgtakgaagataatctcagactacaccttcccctacctactactaaccatctttcacagcagagagagaaatgaaatttcacccttccttttggtaggcagataaccaaaggaaagagagatgtaactgatatggtttggctgtgtcccacccaaaatctcatcttgcattgtaatccccataatccccacatgtcaagggagagaccaggtggagataattgaatcataggggcagtttcccccttgctgttcttgtgatagtgagtgaattctgatgagatctgatggttttataaggagcttttcccctttcgctcctctcacttctctctcctgctgccttgtgaaaaaagatgtgtgt

SEQ ID NO: 572672 - DNA, 372 bp, Homo sapiens
caagaaatcctgagttgcccaccagacattgacattttatagatgagaaccatttcacamtttaagatttttaactacacacagctcactatttaaggccattttaaccattctaaagcctatggacatcaatttattataaagttacatttgagaagacacaacattattttcaaactaaaacgtttaaactagccttatttgtttaatttatgagtgagagtataaaccaatttggtttataaaccaatttgatagcatcctatacataacacccatcacaatacctgtgtatacacataaacaaacatatcaaacaaagtgacctacacaatacaactggatccaagttgtttacaaaattggaacctg

SEQ ID NO: 572673 - DNA, 533 bp, Homo sapiens
aaaaaaataaatcagaagaaactagagtatcaatagttgtctatcttatttattgttaaatatgtttaacacatttcttaataataaaaatgatattagtaactcagtacaaaaattgccattattggatataaaactttaacatttccacaggtatacatttcattaatttagtaaataaatagtggtgcttactatgagccaggttatcaaaaaaacaatgaatgccactcctgttaattattaaagttattgttacttacctggtgacaaagtttgcacacaaatgtacacaattaatatggtagtgaagtagggaagaggggtgggggaggcacagctcccataggagaatggaaagaaaggaaggtaacattcagacacgtgttgggtatttttctacacttcatttcatttactcttcaaccttcccatcacccctccaaggtttttttcytaattgaaaaacctctggcttgaaattacgtaattctcttagcagttaagttatgtagctagtatttgaaattatg

SEQ ID NO: 572674 - DNA, 617 bp, Homo sapiens
ctcaatatatttatataaatataagcatacatatataactttgggttgtttttgattaatatatgttaaagctatagatattaaatatagattaatagatattaaacatatgtatcatttcttctgaacaaaaagaggcttacttttgttttatgatttccctcaaacatgtggtaggactacatagaaaggtatcaaaaagccaaaatgccaatagttgcttctgttttaacagcagaaggtgagataaaatgagatatgagtttgctgatacagaatgaacaaggaagaagtagcttcctggtgctcttaggagaataaataatgttttgaaacactgagtgcaaaaacacaaagaacaagctggaataaagagtgccttggccatcwgtttggctgttagagtgaggcatgattcaataaagcttttacacttaaaattaaataaaaattattggctctatttagtattgttagtatattacatgcatacacacacacaaagtaaacattaaaaagaatctagttctttcttcaggcaaagatgaacacaggaggattgttcctcaattttttttttcccaagacaggatctcactctgtcacccaggctggag

SEQ ID NO: 572675 - DNA, 593 bp, Homo sapiens
aaattattaccctcttggctctatggagagggctatatgtgcatcatatcattaaatctccaaacaaccctatgaggctgtgattttataaagaatctgaagctcagaaagatgaatcwcttattaggcactctagaggattctaagttacacccagctaaatatgcatagttgtgtaactgcccattgggttcaccttgcccgctgcctagacagagtcgatttatcaagacaggagaattgctatagaaaaagagtaattcacacaaagccagctgtgcaggagaccagagttatattattactcaaatcagcctccctgagcatttggggaatcagagtttttaaggactacttggtgggttgggggaagccagtgagccaagagtgctgataggtcaggtcagagatgaaatcttagggagttgaagctgccttcttgcactgagtcagttcctgggtggtggccacaagatcagatgagccaccttatcgatctgggtgttgtcagctgattcatcaagtgcagggtctgcaaaatgtctcaagcgctgatcctagaagcagtttagggagaatcagaatcttgtagc

SEQ ID NO: 572676 - DNA, 593 bp, Homo sapiens
aaattattaccctcttggctctatggagagggctatatgtgcatcatatcattaaatctccaaacaaccctatgaggctgtgattttataaagaatctgaagctcagaaagatgaatctcttattaggcactctagaggattctaagttacacccagctaaatatgcatagttgtgtaactgcccattgggttcaccttgcccgctgcctagacagagtcgatttatcaagacaggagaattgcwatagaaaaagagtaattcacacaaagccagctgtgcaggagaccagagttatattattactcaaatcagcctccctgagcatttggggaatcagagtttttaaggactacttggtgggttgggggaagccagtgagccaagagtgctgataggtcaggtcagagatgaaatcttagggagttgaagctgccttcttgcactgagtcagttcctgggtggtggccacaagatcagatgagccaccttatcgatctgggtgttgtcagctgattcatcaagtgcagggtctgcaaaatgtctcaagcgctgatcctagaagcagtttagggagaatcagaatcttgtagc

SEQ ID NO: 572677 - DNA, 584 bp, Homo sapiens
agattgcaattcaataatattaggggacaataacagcccattctcagtaatggacagatcagccagacagaaaatcaacaaagaaacatcagaattaaactacccactagactcagtaggcccaactgacacttacagaacattttacccaactgctgcagaaaacacatttttttcatcagcacataaaacattttccagaatagaccatatctctggccacaaaagaagtctgaacaaattcataaatataaaaatcacatgatgtactttctctgaccacaatggaataaaactagtaatytataacaaataaagcctcagaaactacccaaacacatggcaattaaacattatgttcctaaagaaccagagggtcaatgaagaaaatttttaaaaatttgaaatgtgtttaaacaaataaaaatgaaaataccacataccaaaatgtgtgggatacacaaaagcagtactaagagggaaatttatagcatcaaatgactatatcaaaaaagtagtaagctttaaataatcaacctaataatgcagctcaaggaactagaaaagcaagaacacacctaagg

SEQ ID NO: 572678 - DNA, 584 bp, Homo sapiens
agattgcaattcaataatattaggggacaataacagcccattctcagtaatggacagatcagccagacagaaaatcaacaaagaaacatcagaattaaactacccactagactcagtaggcccaactgacacttacagaacattttacccaactgctgcagaaaacacatttttttcatcagcacataaaacattttccagaatagaccatatctctggccacaaaagaagtctgaacaaattcataaatataaaaatcacatgatgtactttctctgaccacaatggaataaaactagtaatttataacaaataaagcctcagaaactacccaaacacatggcaattaaacattatgttcctaaagaaccagagggtcaatgaagaaaatttttaaaaatttgaaatgtstttaaacaaataaaaatgaaaataccacataccaaaatgtgtgggatacacaaaagcagtactaagagggaaatttatagcatcaaatgactatatcaaaaaagtagtaagctttaaataatcaacctaataatgcagctcaaggaactagaaaagcaagaacacacctaagg

SEQ ID NO: 572679 - DNA, 584 bp, Homo sapiens
agattgcaattcaataatattaggggacaataacagcccattctcagtaatggacagatcagccagacagaaaatcaacaaagaaacatcagaattaaactacccactagactcagtaggcccaactgacacttacagaacattttacccaactgctgcagaaaacacatttttttcatcagcacataaaacattttccagaatagaccatatctctggccacaaaagaagtctgaacaaattcataaatataaaaatcacatgatgtactttctctgaccacaatggaataaaactagtaatttataacaaataaagcctcagaaactacccaaacacatggcaattaaacattatgttcctaaagaaccagagggtcaatgaagaaaatttttaaaaatttgaaatgtgtttaaacaaataaaaatgaaaataccacataccaaaatgtrtgggatacacaaaagcagtactaagagggaaatttatagcatcaaatgactatatcaaaaaagtagtaagctttaaataatcaacctaataatgcagctcaaggaactagaaaagcaagaacacacctaagg

SEQ ID NO: 572680 - DNA, 631 bp, Homo sapiens
cctctttatttttttgtctcattttggctgtttgataattgtaactgtaataggttcactgcctgaggcacacagcaagtcaatacaccaagatattggtgtattctctgctgtagcagagaaagaggattaacactagggtcaccaaatgaggagcggggaaggaacctcaaatctgtctccccaaggagtttggtgctagagtttttaagggttgtggagtgtgccaaagtgtggagattgctgattggtcaaagagtacaaggtgaagtcatgggacagagaggtgaagaagctgtattctcatgcagctctcattactctgtgggggtcttcaaactggttgctagaatttgggatctgaaaaacatcttaaacaatccttaaacaaaagacttatgattctaatgtcagggatcctgtctataggtacaatagggatgcaaatcaatttttatagtcttacaaccctaatgtcagaaatcctacctataggaataatggagatgcaaatgatcaggatctattgctgtgtgacttttggcaacaaggaaatgggctaaagtgcaacttgattaatgcttaattrtaactatatttctgtccagaatctggcatgtattataattct

SEQ ID NO: 572681 - DNA, 400 bp, Homo sapiens
gtttcagctgtggatttcagtaaatctaaaataacaactccaaggtcacattggttcaggctggtaatctcagctctttgggaggctgaagcgggaggattgcctgaggctaggagttcaaaaccagcttgggcaatatagtgagaccccccccccacccatctctacaaaaataaaaaataaatcagacaggaatggtggtgcacacytgtagtcctacctactcgggaggctgaagtgggagaattgattgagcctgggagtttgatgctgcagtgagctatgatcatgctactgaactccagcctggatgacagagtgagactcgctctctctctctttctctgtctctctcgctcaaaaagaacaatgtgttggattctacttcatagaggaaggt

SEQ ID NO: 572682 - DNA, 400 bp, Homo sapiens
gtttcagctgtggatttcagtaaatctaaaataacaactccaaggtcacattggttcaggctggtaatctcagctctttgggaggctgaagcgggaggattgcctgaggctaggagttcaaaaccagcttgggcaatatagtgagaccccccccccacccatctctacaaaaataaaaaataaatcagacaggaatggtggtgcacacttgtagtcctacctactygggaggctgaagtgggagaattgattgagcctgggagtttgatgctgcagtgagctatgatcatgctactgaactccagcctggatgacagagtgagactcgctctctctctctttctctgtctctctcgctcaaaaagaacaatgtgttggattctacttcatagaggaaggt

SEQ ID NO: 572683 - DNA, 400 bp, Homo sapiens
gtttcagctgtggatttcagtaaatctaaaataacaactccaaggtcacattggttcaggctggtaatctcagctctttgggaggctgaagcgggaggattgcctgaggctaggagttcaaaaccagcttgggcaatatagtgagaccccccccccacccatctctacaaaaataaaaaataaatcagacaggaatggtggtgcacacttgtagtcctacctactcgggaggctgaagtgggagaattgattgagcctgggagtttgatgctgcagygagctatgatcatgctactgaactccagcctggatgacagagtgagactcgctctctctctctttctctgtctctctcgctcaaaaagaacaatgtgttggattctacttcatagaggaaggt

SEQ ID NO: 572684 - DNA, 610 bp, Homo sapiens
tttccaacctttccacttatatgttttcttttctgattgctctgattaggaaaacaaagtcagcgctgaatagcaatggcaagagtgagtgtccttttcctgtacttgacgttattgggaatgtttctagtgtttcaccattaaatataatgttacttacagtttttgcaggatttcccagatcagtttataaccattctattctattcctaatttacttataatttttatcataagttaatgttaaattttattaaatatgttttctttcatttatttataatttttttttctgagatggagtcttgctctgtcactaaggctggagtgcagtggtgcaatctcggctcactgcaacatccatctcccggttttaagtgattctcctgcctcagcctcccaagtagctgggattacaggcacgtgycaccatacccagctaatttttgtattcttagtagagatagggtttcaccatgttgaccaggctggtctcgaactcttgaccttgcgatctgcccccctcagcctcccaaagtgcagggtcccaaaggcatgagccactgcacctggcctacattttattaaatgcattttttatgtttactga

SEQ ID NO: 572685 - DNA, 533 bp, Homo sapiens
aacatggtgaaaccctgtctctaataaaaatacaaaaatatacaaaaatatagagaggtgtgttggcacgcacctgtaatcccaactactcaggaggctgaggcatgagaattgcttgaacctgggaggaggaggttgcggtgagccaagatcatgccactgcactccagcctgggtaacagtgagactccatctcaaaaaaaaaawaattaattaattaattaaaaaaaaaaagaaagaaagaaaaagaaaaaaaacacctctaagagaaatctttgtctgtaataacaaatacattttttaaagaaaatactgttttatcaaatgtctaaaaattaaacattcttccttagcatcatatttctgtcattttcagattagaaagcataaataacagcaaaacagaaaggggatggtggccaagtgaaatgaaaatagaagaaccaaagcaagaaagtaagagcctaatatgctatcaacacattatgagtaatatcactattgtaattcattcatttcaaatgttgaaatct

SEQ ID NO: 572686 - DNA, 618 bp, Homo sapiens
gctgttagcactggcaataatacacgggcacaaaagtattctttcattttgaaactttgcagttttgggaatgacttgacaataactccaaatggrtgttgggggcaaaattttgagtgtgttttgaataatgaaagagaagtggggaagtaagcaccatggagtacacagctccacacaaggttcaatgcgcagggagaaaggaggctttatggaagagatcacaggctcaaaggaggggatgcgggcacatttattgggtgaaagaatgaattctgtaaagggagtaaaacaacacagatgacacggaggagatcacatattttagcctggtcctatagaaagtgggagatgaaatttaaaatgcacgtaatggaactggatttaaaaaaaaaagggacacatttgtatccttggattaaagcaattaaagatgattgctgaggttggcaaatttgcagtgagaaagaggcataaattgaaccatgtccacattcagttttcctctatcctccatataataaaagatacacttggctgccttgaaagacacattggtgggtgtattgctcgcatcaactctggcaaatcatccaaccatctaaataaccaattggc

SEQ ID NO: 572687 - DNA, 618 bp, Homo sapiens
gcactggcaataatacacgggcacaaaagtattctttcattttgaaactttgcagttttgggaatgacttgacaataactccaaatgggtgttgggggcaaaattttgagtgtgttttgaataatgaaagagaagtggggaagtaagcaccatggagtacacagctccacacaaggttcaatgcgcagggagaaaggaggctttatggaagagatcacaggctcaaaggaggggatgcgggcacatttattgggtgaaagaatgaattctgtaaagggagtaaaacaacacagatgacacggaggagatcacatattttagcctggtcctatagaaagtgggagatgaaatttaaaatgcacgtaatggaactggatttaaaaaaaaaagggacacatttgtatccttggattaaagcaattaargatgattgctgaggttggcaaatttgcagtgagaaagaggcataaattgaaccatgtccacattcagttttcctctatcctccatataataaaagatacacttggctgccttgaaagacacattggtgggtgtattgctcgcatcaactctggcaaatcatccaaccatctaaataaccaattggcaaatatt

SEQ ID NO: 572688 - DNA, 618 bp, Homo sapiens
gcactggcaataatacacgggcacaaaagtattctttcattttgaaactttgcagttttgggaatgacttgacaataactccaaatgggtgttgggggcaaaattttgagtgtgttttgaataatgaaagagaagtggggaagtaagcaccatggagtacacagctccacacaaggttcaatgcgcagggagaaaggaggctttatggaagagatcacaggctcaaaggaggggatgcgggcacatttattgggtgaaagaatgaattctgtaaagggagtaaaacaacacagatgacacggaggagatcacatattttagcctggtcctatagaaagtgggagatgaaatttaaaatgcacgtaatggaactggatttaaaaaaaaaagggacacatttgtatccttggattaaagcaattaaagatgattgctgaggttggcaaatttgcagtgagaaagaggcataaattgaaccatgtccacattcagttttcctctakcctccatataataaaagatacacttggctgccttgaaagacacattggtgggtgtattgctcgcatcaactctggcaaatcatccaaccatctaaataaccaattggcaaatatt

SEQ ID NO: 572689 - DNA, 575 bp, Homo sapiens
gcaaaagtttttagtttgatgtagttccacttgtctgtatttgcttttgttgcttgtgcttttggtgtcatatccaagaaaacattccctagacaaatgtcataaagcttttcccttatattttcttttacaagtttaatggattcagatcttacattcaaatctccatttgagttgatgtttgtatataagggttgaatttgttgttgttgttgttgttgttgtttrtgaatcctcagcttttccaatgtcatttgttgaggagactactctttctctattgtgtattcttggcatctttgttgaaggccagctaactatataggtgtggatttatttccgggctctctcttctgtcctattggtttatatgtctgtctttatgccagtatcattctgttttaatttttgttgctttgtaatgtattttgaaattaagaagtataatgcctccagctttgcttttctttctcaaaacttctttggctgttcatggcattttgcgggaggggaggaggttccatgtgaattttacaattacttttcaaattatgtaaaaaaaaaaaagtcattga

SEQ ID NO: 572690 - DNA, 575 bp, Homo sapiens
gcaaaagtttttagtttgatgtagttccacttgtctgtatttgcttttgttgcttgtgcttttggtgtcatatccaagaaaacattccctagacaaatgtcataaagcttttcccttatattttcttttacaagtttaatggattcagatcttacattcaaatctccatttgagttgatgtttgtatataagggttgaatttgttgttgttgttgttgttgttgtttgtgaatcctcagcttttccaatgtcatttgttgaggagactactctttctcyattgtgtattcttggcatctttgttgaaggccagctaactatataggtgtggatttatttccgggctctctcttctgtcctattggtttatatgtctgtctttatgccagtatcattctgttttaatttttgttgctttgtaatgtattttgaaattaagaagtataatgcctccagctttgcttttctttctcaaaacttctttggctgttcatggcattttgcgggaggggaggaggttccatgtgaattttacaattacttttcaaattatgtaaaaaaaaaaaagtcattga

SEQ ID NO: 572691 - DNA, 575 bp, Homo sapiens
gcaaaagtttttagtttgatgtagttccacttgtctgtatttgcttttgttgcttgtgcttttggtgtcatatccaagaaaacattccctagacaaatgtcataaagcttttcccttatattttcttttacaagtttaatggattcagatcttacattcaaatctccatttgagttgatgtttgtatataagggttgaatttgttgttgttgttgttgttgttgtttgtgaatcctcagcttttccaatgtcatttgttgaggagactactctttctctattgtgtattcttggcatctttgttgaaggccagctaactatataggtgtggatttatttccgggctctctcttctgtyctattggtttatatgtctgtctttatgccagtatcattctgttttaatttttgttgctttgtaatgtattttgaaattaagaagtataatgcctccagctttgcttttctttctcaaaacttctttggctgttcatggcattttgcgggaggggaggaggttccatgtgaattttacaattacttttcaaattatgtaaaaaaaaaaaagtcattga

SEQ ID NO: 572692 - DNA, 575 bp, Homo sapiens
gcaaaagtttttagtttgatgtagttccacttgtctgtatttgcttttgttgcttgtgcttttggtgtcatatccaagaaaacattccctagacaaatgtcataaagcttttcccttatattttcttttacaagtttaatggattcagatcttacattcaaatctccatttgagttgatgtttgtatataagggttgaatttgttgttgttgttgttgttgttgtttgtgaatcctcagcttttccaatgtcatttgttgaggagactactctttctctattgtgtattcttggcatctttgttgaaggccagctaactatataggtgtggatttatttccgggctctctcttctgtcctattggtttatatgtctgtctttatgccagtatcattctgttttaatttttgttgctttgtaatgtattttgaaattaagaagtataatgcctccagctttgcttttctttctcaaaacttctttggctgttcatggcattttgcgggaggggaggaggttccatrtgaattttacaattacttttcaaattatgtaaaaaaaaaaaagtcattga

SEQ ID NO: 572693 - DNA, 583 bp, Homo sapiens
ttttcaatatgttactttatattttgactttcttctatgaataccttgttattctttgtttattttttgttttacatatgttaaattttaatctaattataacttgcacataatttagacacccaaatggtatgttgtaaaaaatagtagttgcctatctgcccttctcttttattttctacttccaaggacaaattacttgtaactctttttgttgatttttttgatatccacctctatctctatgaataaaattcttatattgtcaattttggttgtctaaatttargtactcaattttttcatgccgtcatggaatatgagtgactctgtgtcataatctgcagccctcattacacacatgaacacttcctgtgtcttatcctaccaaattaggatataattcttcatatcctaactttgcttaggtcagtaatcattgttttcatcatgtctgtgtaaataatattcacagctgagccatgtaatactatgttgatatttccttcactacataatattttattttatctttaaatttgtcttgtttcttaattgcttgtttttttttctatgtgcttat

SEQ ID NO: 572694 - DNA, 583 bp, Homo sapiens
ttttcaatatgttactttatattttgactttcttctatgaataccttgttattctttgtttattttttgttttacatatgttaaattttaatctaattataacttgcacataatttagacacccaaatggtatgttgtaaaaaatagtagttgcctatctgcccttctcttttattttctacttccaaggacaaattacttgtaactctttttgttgatttttttgatatccacctctatctctatgaataaaattcttatattgtcaattttggttgtctaaatttaggtactcaattttttcatgccgtcatggaatatgagtgactctgtgtcataatctgcagccctcattacacacatgaacacttcctgtgtcttatcctaccaaattargatataattcttcatatcctaactttgcttaggtcagtaatcattgttttcatcatgtctgtgtaaataatattcacagctgagccatgtaatactatgttgatatttccttcactacataatattttattttatctttaaatttgtcttgtttcttaattgcttgtttttttttctatgtgcttat

SEQ ID NO: 572695 - DNA, 583 bp, Homo sapiens
ttttcaatatgttactttatattttgactttcttctatgaataccttgttattctttgtttattttttgttttacatatgttaaattttaatctaattataacttgcacataatttagacacccaaatggtatgttgtaaaaaatagtagttgcctatctgcccttctcttttattttctacttccaaggacaaattacttgtaactctttttgttgatttttttgatatccacctctatctctatgaataaaattcttatattgtcaattttggttgtctaaatttaggtactcaattttttcatgccgtcatggaatatgagtgactctgtgtcataatctgcagccctcattacacacatgaacacttcctgtgtcttatcctaccaaattaggatataattcttcatatcctaactttgcttargtcagtaatcattgttttcatcatgtctgtgtaaataatattcacagctgagccatgtaatactatgttgatatttccttcactacataatattttattttatctttaaatttgtcttgtttcttaattgcttgtttttttttctatgtgcttat

SEQ ID NO: 572696 - DNA, 526 bp, Homo sapiens
tgaggcctttgggaggtatttgggtcatgaggctggatccctcacgaatgaaattagtggccttataaaagggaccccagagagctttcttgtcccctctggcatgtaagggacacaagaagacagtcgtctaagaaccaggaagtgatccctcactagacaccagatctcctggaaccttgatcttgggcttcctaacctccaaaactctgagaagaaaatttatgttgtttatcagccctccagtctacggtattctgttatggcagccttaatggactaaggcaaagtgagtcaaaaactattccattcaaagacttgaagttttgatgtgatagcaacacaaaggaagcatggaaaggtgtaaataattcaaaattwaatcactgtttatcagtgtaaaagtgccattggattgctattctggtactaaaggtaactaagacttacgctgtttctctgggcttcctataaaagaatgattagttagttaccttttttttttgagacagagtctctatctctc

SEQ ID NO: 572697 - DNA, 526 bp, Homo sapiens
tgaggcctttgggaggtatttgggtcatgaggctggatccctcacgaatgaaattagtggccttataaaagggaccccagagagctttcttgtcccctctggcatgtaagggacacaagaagacagtcgtctaagaaccaggaagtgatccctcactagacaccagatctcctggaaccttgatcttgggcttcctaacctccaaaactctgagaagaaaatttatgttgtttatcagccctccagtctacggtattctgttatggcagccttaatggactaaggcaaagtgagtcaaaaactattccattcaaagacttgaagttttgatgtgatagcaacacaaaggaagcatggaaaggtgtaaataattcaaaatttaatcactgtttatcagtgtaaaagtgccattggattgctattctggtactaaaggtaactaagacttacgctgyttctctgggcttcctataaaagaatgattagttagttaccttttttttttgagacagagtctctatctctc

SEQ ID NO: 572698 - DNA, 526 bp, Homo sapiens
tgaggcctttgggaggtatttgggtcatgaggctggatccctcacgaatgaaattagtggccttataaaagggaccccagagagctttcttgtcccctctggcatgtaagggacacaagaagacagtcgtctaagaaccaggaagtgatccctcactagacaccagatctcctggaaccttgatcttgggcttcctaacctccaaaactctgagaagaaaatttatgttgtttatcagccctccagtctacggtattctgttatggcagccttaatggactaaggcaaagtgagtcaaaaactattccattcaaagacttgaagttttgatgtgatagcaacacaaaggaagcatggaaaggtgtaaataattcaaaatttaatcactgtttatcagtgtaaaagtgccattggattgctattctggtactaaaggtaactaagacttacgctgtttctctgggcwtcctataaaagaatgattagttagttaccttttttttttgagacagagtctctatctctc

SEQ ID NO: 572699 - DNA, 577 bp, Homo sapiens
ataaataaattctattatttcagatasattgtgaagaaaaaataaacaaaacaaaaaggagagaaaaagcttgggctaggaaagaagtgggtgtgagggaggctgtattagaaacgtgatccaaggaaagaaaaactgaacggagttcacggagatgagaagaagctttgtgaagatctgatgtaatcacattctgggcagacagaacaacaaatattaaaaaagcatcctggcatgaggaaagcagtttggaaatgcaggcatgagacagatcatatgagacaggaaattatgttttattttattccaggtgaaatggggagatcctagagaatgttcagcaatctgatttgtgtattaaaaatatgattctgtctgttgtgttcagaatggacctagatggataagagggaccataaatgatcacagatgtgtttcatttggctttcacttagttaaaaaatgaagcaacacttaaatgttgttaaatttctaagacaaattaaacctctgacttcccttgaaatatcggaagatctgacattactgggctcacaacatggcaaccacctgttgg

SEQ ID NO: 572700 - DNA, 342 bp, Homo sapiens
ctaccttttcataaggaagcttacaaattgtatggcttttttcatgtttaaatttacaatagtccaatttatttacattcctcttagttgcaaaataattcttcctccccaaagacttctcaagaaatctcatcaaatttcaatatcaggctcaatgatcagtatctggtctaagatagatgtagctcttatgattcatctcctatcgatttagtgactcgtaaactaaaaggataagttacctgacctgaacatggatactcccattccaaaagagaaggagtagaaggtcacattactctgcaaacacaaagtttttcwtgattaaagatgaattctgct

SEQ ID NO: 572701 - DNA, 592 bp, Homo sapiens
ggtcagaataataggtgttgtgtagagctggtacagaatttcatggctaaatttgaaaatgaatcttaatgatcaaacagcctaaactgagttaataaaaataactcctcagaccattagtggagttcacattttgggtagaaatttaagactcaggcttaactacttcgtggtagagaaattttacgtataagttctcaccatctagcttataccttggtacagaggtgttttagtctgctatcctgctgctaataaagacatacctgagacagggtaatttatcaacgaagggggtttaaatgactcacagttcttcagggccctggaggtctcaggaaacttacaatcatgatgtaagaggaaacaaacacatacttctttacatggcagcaacaggaagtgttgagcaaaaggggggaragccccttataaaaccatcagatctcataagaactcattcactatcatcagaacagcagcatgcgagtaactgcctccatgattcaattatctccacctggtccctcccatgacacgtgggaattatggaaactacaagatgagatttgggtggggatgcagccaaacc

SEQ ID NO: 572702 - DNA, 589 bp, Homo sapiens
tataaatatatatatatatatatttgcaatataaaatgttttatgtaatttgtatttgtttttgtaatttgtattatacatggtttacatgtgtaatactattggaaacttaaaaatcattaaatattacatgatgagtgtgcaaaagacctgcctttgtaaagttgctcagcatgtgtgacactaaatgttataggtgagcatccttcagtcaacacaagatggttcccaaaatcaaagcccttatacagatttatatttatattttgttaaacatatccagtacgtcgtattacattattgccttgggcacacataaagaatatcaaaatggttggacagcttaaacggccatttatctgttttcatatctataaaacttattttatccttccatttccatttctgagatatttgggaagtctttattacaattaactattgcttagtcttccctttgarctttaagctaaaagttttgttgaaagcagggttagtcattatacctctcctatatgtagaagacatattattattctttgaagggcaaccattagactcacattagttctctttctgtatttgaaaa

SEQ ID NO: 572703 - DNA, 463 bp, Homo sapiens
tgtgtcacattttctttatccagtctatcattgatgggcatttgggttggttccaagtctttactattgtgaatagtgttgcaataaacrtaggtgtacattataaatcattctactataattgacgtcatttttaaaatagaagcccatagacctaccctacttctttctcaattcacatctctgtatttataccttggattaaagtaacatagcaacagtaatttgctctttacaaagagctacctactattttctattaattttataaaaaagtttttaaaaggcttataaaaggagctggtatgacatttttattaaaaataatatgtttaattcatttcttaaatatatataaatatatacatatatatacatatatatatatgcgcgtgtgtgtgtgtgtgtgagtgtattgcccaacttgtagaagaaagttaaacatacttcatgtatttagccc

SEQ ID NO: 572704 - DNA, 578 bp, Homo sapiens
cggcctgagctctatgttggcccctttttggcatggttgggatgcagggcaccaagtcccaagactgcacgaagcagcaaggctctggacccaggtcatgaacccagctcacgaagtcattcattcctcctaggactctgcgcctgtgatgagaggggctgctgtaaagacctctgaaatgtcttgcagacattttccccattgccttggccattaacatttggctcatcattacttcgcwaatttctacagctggcttgaatttctccttggaattttttttttttttctattgcatggtcaggctgcaaatttttttgaacttttatgctctgcttcccttttaaatataagttccaattccataccatactttgtgaaaacataaaactgaatgcttttactagcacccaaatcacatcttgaatgctttgctgcttggcaatttgttctaccagataccctaattcatctccctcaagttcaaagttccacatatctctaggacaggggcaaaatgccaccagtctctttgctaaaacgtagcaagagtcaactttattcgagttcccaactag

SEQ ID NO: 572705 - DNA, 574 bp, Homo sapiens
agctgcagggtgatgaggaaatgtgtactagtttcctagggctgctgtgaaacaataggaatgttttgtttcacagttctgaaggatatataagtctgaaatcaaagtgtcagtagggctgtgatccctgcaaaacctgtaggaaagaatgcttccatgcctctttctagcttctggtggcagctgtcaatccatggcagcccttgacttgtcaatgaatcactccagtctctgactccatcacatcatcacgtggtgttctccctgtgtgtctgtctcttcttttttttttttctttttgaaacaaggtctggctctgtcatccaggttggagtgcaatggtgcgatctcagcttgctgcagcctccacctcccaggcttaagtgatcctcccacctcagcttttggagtagctgagattataggtgtgcactaccatgcctggctagtttttaaattttttctagagatgasgttttaccatgtttcccatgctggtcttgaactcctgagctcaagcaatcctcctgcatcagcctcccaaagtgctgggattacagatgtgagccactgc

SEQ ID NO: 572706 - DNA, 617 bp, Homo sapiens
gggggatttattagctcagaaagctgggacatccagaaaggtatctgctttcagacatggcaagaaccaggaaatcaaatgacttcattagggctctctctttctgtgttaacctctgcttatttctgcttggctcccttctttggacagcctgtttcacatagtaggttagatagctaaccacacccccagactcctatgctcccattttagcagctctagtagaaaagaatctgtctttcttgatagccccaccagtaagaactgactgacccatttgggtcatatgctccttcttgaatcagccttggtggttgggggatgaaatactctgattggatgtacctgggtcacatgccgcccttgtcactgggagaataaagtggatgtcagctccatttgaaccccatggaatgggttacctacagraaaagttgtagagaagggattccactagatgaaacatcagatttcctcaaatagaatgtcttcaagcccattatacagaggagaaaatggaggatcagactggttatataactcaccaaggtttacaaaactaggaaatcacagagcttggacttgaagccacatttgtccaacacaaaagtgcgtgt

SEQ ID NO: 572707 - DNA, 617 bp, Homo sapiens
gggggatttattagctcagaaagctgggacatccagaaaggtatctgctttcagacatggcaagaaccaggaaatcaaatgacttcattagggctctctctttctgtgttaacctctgcttatttctgcttggctcccttctttggacagcctgtttcacatagtaggttagatagctaaccacacccccagactcctatgctcccattttagcagctctagtagaaaagaatctgtctttcttgatagccccaccagtaagaactgactgacccatttgggtcatatgctccttcttgaatcagccttggtggttgggggatgaaatactctgattggatgtacctgggtcacatgccgcccttgtcactgggagaataaagtggatgtcagctccatttgaaccccatggaatgggttacctacagaaaaagttgtagagaagggattccactagatgaaacatcagatttcctcaaatagaatgtcttcaagcccattatacagakgagaaaatggaggatcagactggttatataactcaccaaggtttacaaaactaggaaatcacagagcttggacttgaagccacatttgtccaacacaaaagtgcgtgt

SEQ ID NO: 572708 - DNA, 618 bp, Homo sapiens
tatttactattgacaatttttgaacaattatcttgtatgaacatgttctgtggaatgagacgatggaaaaatgaggaaaatgttactgtggaaatgacaacactggttattctcagaaagcttctttgagaaacagggagtttatttatggctaatttagcgaatttgatattgattctgaagtataccatctgcccagatcatggggtagcacatattttatataaccccaaattattcaagtgatgggctttaaagtttaaaagaaagttaggttaagcaatttatgagctctaaaattaaaatctatgtattcgcaaaacaaatgaatttcccaaataagttrgacatacatttaagagacttgtcatgatggttgacaatacatgagcgtccaagaaaaatatatcgaagtttgaatatttcaaactcccagaatattcaaaaggcttttgccagcctgctctaaagctgttgcgttaatgcctgcccctccttcacctgtttctctcttaaatttgatgtgatctatctatgtatgtctatatattcagcaatacaaataaaataattgaaatttacattttaatgtgttgtcttcatgtgtcttgataatat

SEQ ID NO: 572709 - DNA, 594 bp, Homo sapiens
atggaatacacttagtgaatataaataaaagttaaaagagtaaattttgtaatggacaaagagcaaatgtaaggttagtcagagtccaggataacatcatttgaataatcttggatgtgatatctgtgcgattctttgcgggagagaaattttaaagattatggtaatagttaataccactataatattcaatataacctgaacttaaatctgtgcttttccctaagaggaagttacagggaacaattttattaagattttcatacaataaaactgtctattttcatttttagtaataatgaaaatggtaactgacatgtactgagtgctttccacgtgtgtgtcaagcctgtgctgagcattatatgcattgtcgtgtaactgctcagattaaatgtaagtctagcacaaaatgtttgtccatataagtcaaaaaatgttggccgagcacacccctataatctcaacacyttgggaggctgaggctggaggccggcttgaagccaggagtttaaagaccagtctgggcaacaaagcaagaccacatctctaccaaaagaattttaaaaataagctgggcatggtggtgtgcaa

SEQ ID NO: 572710 - DNA, 524 bp, Homo sapiens
caatatttaaacactactagaacctagaactttcccatacaaacaataaaatgtaagactaaaacttaaatgactttattgtttcaataaatataagactaaagttcttaataaagtcactaacagatatcttagttggcagatttactagaagagttctgtacagggtttatatgtagatttgttcagttacaagtttgaaacgttgcagaatttcacattccactctttatacaagcttctattttctgactaagaactgccaccactttcttagatgtctttatgttttcctcattcctgtcaatggcttgaagaattggcattcttctggggaaacatttttcatgagagaaaaagatttttgttattttatgagcatgagaaaattagctatgtgagatgtggatgctgcataccaccatacacsttacaggaagtcaatattcattataacaaatttagaattatttttcattgatgaatctcatattaaaaattaagtgttcaatccataagtgtcc

SEQ ID NO: 572711 - DNA, 601 bp, Homo sapiens
gctttatattaactatccactaggctatatttaattattaaagttcactctatagatttatctaaatatttgagctgcacagaacttttttccaatattttcttctttaaataatattgaaaaatatgtcctgtcaactagatagaatttttaagrcattttcatggcccactttcactgtataattaaatatttttatttaaggaaaacattattagatgctcctccctcaccctaaagatctaaattccagtatttaaaattatttaatattatttagccactcatatatgtcaggcactctactagaagtaaatgtgtgacgtgttaaatatgtacattcatacatacatatgcaagaatatgcaaaaatatattcaataaaaatatactcagttgataagattgccatcttcattgaatttttaagaagaaaattgcaggaaaattagtagatatcagaaaattggatttttcagcatctctattttaagttgaaaatgaccttttaaatagaagatccagtatcaatatattatattcagcctgattttctacaacttttacttatacacacttattttaattaaatttgacacct

SEQ ID NO: 572712 - DNA, 545 bp, Homo sapiens
atacctgagactgggtaatctataaaggaaagagatttaactgaatcacagttcctcatgtctggggaggcctcaggaaacttacaatcatggtggaaggcgaaggggaagcaaggcccttctccacatggaggcagagaccttctttctcgcactatgagagagaagaatgaaggaggaacttccaaacacttataaaaccctccgatcttgtgagaactcactaactaccatgagaacagcatggaggaaaccacccacgtgatccagtcacctccctccctcaacacgtggcgatcacaggtccctccctccacatgtggagattgtggggatgtggggattacaatttgagatgagatttgggtggggayacagagccaaaccctatcaatgggattcagttgcttcaccaggttcaattttccacaaactaaataaccggttcattggttacgtgacttcctagctaattatttctgcattgtttaggcacaatcctgaaggatctaaaaaatagcagatgcaaggcccgctgctcatgc

SEQ ID NO: 572713 - DNA, 533 bp, Homo sapiens
actccatagaacatattttggctagttttagggacctttaagcccttcctaggacctggcaaaatccttcctgtcctgtcttttctcgtcactggggagaacactgcagggaatgttgatacagggtcatgtgcatgccacgatcctccaaaacagattccccaccaccccaaccccaattagcaagactggacagaatcactctgctaagattccacctttcatattttgatcaggtggttgaagagtagcacttttgctgaatagctctagtgtatggccaccagaaaaaaaaaaaaggttataacaccttgaattattcacatccaatacagatattattctggcaaataatttagtacatcggaaagtatagaaaattataatctcctcatcacatgattcggaggacagcctagtcattggaaacttattcctggccagttttttttttttttttttttttttgggctgaaaaaataaagctatttttttttcatgaggctgcagtttgkgattaccaatgaagtaaa

SEQ ID NO: 572714 - DNA, 616 bp, Homo sapiens
aatagaaaagcttaaagaaagaattggtcttagagcaggtcatttcatcttgttcttttctctaaaagtgtgtcttggktttattgccctttgatttcccatatttcagtgccaaatttcaagacaggcatttttttcttgctgaactaatgaggacatttaaacaaatttattgttgttgttattattaaacatttttaatttttaacttttgtagctatatagtaggtgtatatatttatggggtacatgagatgttttaatataggtagacagagggcatttatttataattaatccttatactgtggctggagtcctttgaggtcccaattttatgagagtctcctattagacttcccatgttacatatacccttagctgtgtcctctgctttccagtcttaatgaagaaaggaaatcaatgtataaattagtcctcacatgtcaactcacagatacagttgagaagatgttattcataagaaggatgaaatatgtatctggttcatcatgttgctggaaatgagagtccctaaaaacaatgttttggaaggaattaactaatcatttaagaataactaataataactaatcatttaagaaactgccgtttc

SEQ ID NO: 572715 - DNA, 616 bp, Homo sapiens
aatagaaaagcttaaagaaagaattggtcttagagcaggtcatttcatcttgttcttttctctaaaagtgtgtcttgggtttattgccctttgatttcccatatttcagtgccaaatttcaagacaggcatttttttcttgctgaactaatgaggrcatttaaacaaatttattgttgttgttattattaaacatttttaatttttaacttttgtagctatatagtaggtgtatatatttatggggtacatgagatgttttaatataggtagacagagggcatttatttataattaatccttatactgtggctggagtcctttgaggtcccaattttatgagagtctcctattagacttcccatgttacatatacccttagctgtgtcctctgctttccagtcttaatgaagaaaggaaatcaatgtataaattagtcctcacatgtcaactcacagatacagttgagaagatgttattcataagaaggatgaaatatgtatctggttcatcatgttgctggaaatgagagtccctaaaaacaatgttttggaaggaattaactaatcatttaagaataactaataataactaatcatttaagaaactgccgtttc

SEQ ID NO: 572716 - DNA, 563 bp, Homo sapiens
tttaagtggagcatttacattcaacgttagtakcgagatgtttggtatttcatttatcttgctatttgttgcctgtataccttggttttttaattgtattattgttttgtaggtactgtgagatttatgctttatggagattctgttttggtgtgtttccaggattcgttccaagatttagagctccttttagcagttcttctagtgctgacttggtagtggcgaattctcttagcatttgtttgtctgaaaaagatgatatctttcttgcatttatgaagcttagactcactggatacgaaaatcttggctgatcattgttttgtttaaggaggctaatgataggtccccaatttctcccagcttgtagggtttctgctgagaagtctgctgttaatctgataggttttcctttataggttatgtggtgcttttgccttacaactcttaaatttctttactttgtcttgactttatttatttattttattttttgtgacagggtctggctctatcacccaggctagagtgcagtggcttgatttcagctcacagtaacctct

SEQ ID NO: 572717 - DNA, 498 bp, Homo sapiens
cagcctgggcaacagcacaagactctgtctcaacaaaatgtgatcataataatataaatatatcataaatatgtgagctaattgtataataattataatgctctaatagataaagatcatakataccaaaagctatatcattcaaaaagcagtccagttagccagagatagttctgggctgcagctaatattaccactggggggcaagtgtctcttgaggacctgaatttatataacctggcccccatggtattcttgggtcctttgtgaatctttaaaaatctccactcagctccttcttctgcaaatgaaacaccattaatagcaccagctccgtctccaggccacgtcacctggttcctcacacactctcgatgaggtgtatagagctagagacccacaaaaaggacttctaataaggtttcgggcattgcatagaatagaggaggcatcaccttcccatctcatacacacgaactcttaatgaagagggaattc

SEQ ID NO: 572718 - DNA, 498 bp, Homo sapiens
cagcctgggcaacagcacaagactctgtctcaacaaaatgtgatcataataatataaatatatcataaatatgtgagctaattgtataataattataatgctctaatagataaagatcatatataccaaaagctakatcattcaaaaagcagtccagttagccagagatagttctgggctgcagctaatattaccactggggggcaagtgtctcttgaggacctgaatttatataacctggcccccatggtattcttgggtcctttgtgaatctttaaaaatctccactcagctccttcttctgcaaatgaaacaccattaatagcaccagctccgtctccaggccacgtcacctggttcctcacacactctcgatgaggtgtatagagctagagacccacaaaaaggacttctaataaggtttcgggcattgcatagaatagaggaggcatcaccttcccatctcatacacacgaactcttaatgaagagggaattc

SEQ ID NO: 572719 - DNA, 513 bp, Homo sapiens
ggagttcaagaccaggttggacaacatagtgagactccattttcacaaaaacaaacaaacaaacaaacaaasagaaaaaaaaaacaagaaaaaggagccaggtgtgatggtggacacttggagtaccagctactcggaaggctgaggaggatggatctcttgagcctaggaggtccaggctgcagtgagccatgatcacaccactgcactccaccttgggttatagagcgagacctagtctctaaagaaatttaaaaaaatagtgggaaaggacaaagctctagttatggcacaaaaagggaggggtcagagtcctgcattggatgagttttcttatctttagggaagtagttctccaagcgtcatctctggaccgatagcagcagtgtcactggagaatatactagaaatacaaattcttgggccacaccgtgaacctactgaatcagaatctcgggggatggggccccgcaaactgtgttttaacaagccctccaggtgattgggaaggta

SEQ ID NO: 572720 - DNA, 615 bp, Homo sapiens
ttcctttcaatacaataaatgatgctactattattatcctactaatgttttaaatttgaagagtgcttcacagttcacagaatattttaccataaataacggaatactttattaaattcaatgttgaaacagcatcaaattcagattcaacaggcatttatacactccctaactcatttgaatgtttttccctcacctataattccacaaataccactcaagacaatgagtgagctccactgtttgaataaaagaaagaatggaaaagatgttcacaataattacccacttcactccatcctttataattttcaaaaatctccacatatattatcatattgggtctttacaaaactcactgaaatagaaaaaaatagaaacaattattcctgtatttcagatgatcaactcaaggctccaaaaagttgagacagaacttgaatgatggtctcctggcttgtaatcttctacacaaygtgccatcaaatggatcatttgggggtgatatattcacaagaatttggccaagttggcaaatactcgtttttgttttggttttttaatctctattgtagaagtcggcacgacatgttcccccatctagggaggaccaat

SEQ ID NO: 572721 - DNA, 604 bp, Homo sapiens
cagtgatacagctgaaagaaaacaatttgactctataaagcactgagatgtttttgacttgaaacaagcaccaaagtctcagtcgtttatccagaatcacagcctccctgagatgaaaggagcctaagagatcatcaagtcagtgtgacatgatttgcaaggataccaggtattgtttctcttaaagagttatgtacatgggttttttgtgtgtttgtttgttttgttttgtttttgagaaagagtctcattctgtcacccakgctgcagtgtagtggtgcagtcatggcttactgcaacctctgcctcccaggttcgagccattctcctgccttagcctcccgagctgctggaattacaggtgtgcaccaccatgccaagctaatttttgtatttttagtggagaccgggttacaccatgttagccagactggtctcaaactcctgacctcaggtaatctgcctgcctcggctcctaaagtgctgggattacaggcatgagtcactgtgccaggcctgtttgtttgtttgtttgtttgtttgattgtttgtttgttttgggacagagtctcactctgttgcccaggctggagtgcagtggcac

SEQ ID NO: 572722 - DNA, 604 bp, Homo sapiens
cagtgatacagctgaaagaaaacaatttgactctataaagcactgagatgtttttgacttgaaacaagcaccaaagtctcagtcgtttatccagaatcacagcctccctgagatgaaaggagcctaagagatcatcaagtcagtgtgacatgatttgcaaggataccaggtattgtttctcttaaagagttatgtacatgggttttttgtgtgtttgtttgttttgttttgtttttgagaaagagtctcattctgtcacccatgctgcagtgtagtggtgcagtcatggcttactgcaacctctgcctcccaggttcgagccattctcctgccttagcctcccgagctgctggaattacaggtgtgcaccaccatgccaagctaatttttgtatttttagtggagaccgggttacaccatgttagccagactggtctcaaactcctgacctcaggtaatctgcctgcctyggctcctaaagtgctgggattacaggcatgagtcactgtgccaggcctgtttgtttgtttgtttgtttgtttgattgtttgtttgttttgggacagagtctcactctgttgcccaggctggagtgcagtggcac

SEQ ID NO: 572723 - DNA, 464 bp, Homo sapiens
acctctttttcttcccagtcttgggtatgtttttatcagcagcatgaaaacagattaatatagcatgttagaaatatacttgtattgtttaaatattggcgctcttcattcctgcagcatatctagcccactctggctgatctagtatacaacccgcagycctatatcctgtggccctgggcaggttaacacgacttgcagtttctttgttctcatgaactggtgttcatgtcataccctcatgcatgcattaccctctctctgcacacaacgtgggcctctaagaagcaatgcttttctgtggaagaaggaagagggggcattcagacttaaccctttctgcctaaaaggcccttctgaaattatatgaaagagagagagagaaaaaaaaaaaaacattttgcatgctgttcatttagaagggaggcctaattctttcaccttcctataatctccagagcagt

SEQ ID NO: 572724 - DNA, 601 bp, Homo sapiens
agcctggccaacatggtgaaaccccgtctctattaaaaatataaaaattagctggccattggtgggtgcctgtagtcccagctactagggaggctgaggcaggagaactgcttgaaccctggaggcagaggctgcagtgagccgagattgtgccattgcactccagcctgggtgacagagcaagaccctgtctcgaaaaaaaaaaaataccataacattttttcttcttatttttatataaaataaggctgtattcataaaggatacagggattaaagcaaaccaaaagagaagagtgaggrtaagtttaattgtgtgataaggatttaggtaagacagcctaggcaacatggcaaaacctcatctctaccaaaaaatacaaaaatgagctgggcacggtggtgggtgcctatagtcccagctactaaggagactgaggtgagaggatcatcacttgagcccaggagtttgaggctgcggtgagctatgattgcaccactgtactccagcctgggcaacagagcaaaacccggtctcaaaaaacaaaaaatacaattaataaataaaaagtaaaaaattcaggattaaggtaagaggtgcc

SEQ ID NO: 572725 - DNA, 601 bp, Homo sapiens
agcctggccaacatggtgaaaccccgtctctattaaaaatataaaaattagctggccattggtgggtgcctgtagtcccagctactagggaggctgaggcaggagaactgcttgaaccctggaggcagaggctgcagtgagccgagattgtgccattgcactccagcctgggtgacagagcaagaccctgtctcgaaaaaaaaaaaataccataacattttttcttcttatttttatataaaataaggctgtattcataaaggatacagggattaaagcaaaccaaaagagaagagtgagggtaagtttaattgtgtgataaggatttaggtaagacagcctaggcaacatggcaaaacctcatctctaccaaaaaatacaaaaatgagctgggcacggtggtgggtgcctatagtcccagctactmaggagactgaggtgagaggatcatcacttgagcccaggagtttgaggctgcggtgagctatgattgcaccactgtactccagcctgggcaacagagcaaaacccggtctcaaaaaacaaaaaatacaattaataaataaaaagtaaaaaattcaggattaaggtaagaggtgcc

SEQ ID NO: 572726 - DNA, 601 bp, Homo sapiens
agcctggccaacatggtgaaaccccgtctctattaaaaatataaaaattagctggccattggtgggtgcctgtagtcccagctactagggaggctgaggcaggagaactgcttgaaccctggaggcagaggctgcagtgagccgagattgtgccattgcactccagcctgggtgacagagcaagaccctgtctcgaaaaaaaaaaaataccataacattttttcttcttatttttatataaaataaggctgtattcataaaggatacagggattaaagcaaaccaaaagagaagagtgagggtaagtttaattgtgtgataaggatttaggtaagacagcctaggcaacatggcaaaacctcatctctaccaaaaaatacaaaaatgagctgggcacggtggtgggtgcctatagtcccagctactaaggagactgaggtgagaggatcatcacttgagcccaggagtttgaggctgcggtgagctatgattgcaccactgtactccagcctgggcaacagagcaaaacccggtctcaaaaaacaaaaaatacaattaataaataaraagtaaaaaattcaggattaaggtaagaggtgcc

SEQ ID NO: 572727 - DNA, 513 bp, Homo sapiens
taacagatagacagatatacrcacataaaaatatatcaatgcataagtctatagatatgaaggtctgtatctttcctgcctatataaaatttaatcaaatcattagcagttaaatagtgaattttcaacacattcccaaatagttttaacttacttaatatgttgtgttggtggtaattttcttgttgttgttttttaaactgaacttgattgacctgattttatgtagatatgcaaagataccacttactcatgcagaccttgttgtgtaaataacccaatcttctgtctttgcaaagacaatctttccctaagagttataatctcctctcaacacatcgattatatggatcaaaggccctctgacttatatcagcctgggccaaaatagtcattaccaaagattttccactttccctctttaatagactaagctttagaatttgggtaatggtttggatgtcaaacaaaacctgagaacttgtttaggttcagaagaaagtgagagtgata

SEQ ID NO: 572728 - DNA, 586 bp, Homo sapiens
attttgtggggctctttttaactcctccagaaagatgtttagcacattaactyactttttttatttttttaattttaaaacttaatttttgtgggttcatagtaggtgaatatatttatgggatgcatgagatgttttgatgcaggcacgcaatgtgaaataagcacatcatagagaatggggtagcacagtaactgttgacttttcttgaataagggcattcaagtcataattaaaactaaattaccctctaaacacacctttagttgcatccccaagtatgagttttcttcagtcagttcaaaatagtttccaacttccacttgatttcttctttagtgcagtggtacaatcttggctcactgtagcctcgacctcccaggctcaagccatcctcccgcttcagccccacaagtcgctgggactacaggtgcataccaccatggctggataatttttgtatttttaatagagacaggattttgccatgttgcccaggctggtcttgaactcctgagctcaggcaatccacctgcctcagcctcccaaagtgctgggattacaggtgtcagccatcacacctggc

SEQ ID NO: 572729 - DNA, 448 bp, Homo sapiens
acccactctctttagactgttgccatctaaggtgcacacgstggatttccacatgctgcaggaattgaagaacctcttagaaacctggtcttcataaacttaaggcttatctgggttagctgcaagagacagcaagagaacccatgcagatctttcatatgctcccatctgactcattccctgtcctcttctccccacgaccattcctgccccaacttggcccagaaaccaaatgtgaattttctatttcccacctcagcactagtccatgccaggacaccagctgacaatttcttggttttattgtcaatagctgtaccatgtgatcaattactgtcttcacttagaacgaagccagagcccaagaatatttatattctaccaatacgtgcctgttacaagagaaggaaatatgagttattaagtttaactttttatgtgaattcag

SEQ ID NO: 572730 - DNA, 448 bp, Homo sapiens
acccactctctttagactgttgccatctaaggtgcacacgctggatttccacatgctgcaggaattgaagaacctcttagaaacctggtcttcataaacttaaggcttatctgggttagctgcaagagacagcaagagaacccatgcagatctttcatatgctcccatctgactcattccctgtcctyttctccccacgaccattcctgccccaacttggcccagaaaccaaatgtgaattttctatttcccacctcagcactagtccatgccaggacaccagctgacaatttcttggttttattgtcaatagctgtaccatgtgatcaattactgtcttcacttagaacgaagccagagcccaagaatatttatattctaccaatacgtgcctgttacaagagaaggaaatatgagttattaagtttaactttttatgtgaattcag

SEQ ID NO: 572731 - DNA, 435 bp, Homo sapiens
cgatgccagtaccttctcattcccatgatgaaaagcttgtactggctcttgacttcatagagcctctrcccgcaacgtcacccactgaatggtggagagagttgaggaacttggtgggcaggcaaactccacacttagtgctgtctgaggactcggctctccaaggtagtaacatgctggcaacagatgtcttgataagaaggagttgggtgcaatggcccatggctgtaatcccagcactttgggaggttgaggcaggaggatcacttaagcccaggagttcaagaccagtctgggccacatagtgagatcctgtctttacttaaaaaaaaaaaaaaaaaagtctgggtgtcgtggcttatgcctgcaattccagcactttgggaggctaaggcaggtggatcacttgaggtcaggagttcgagaccagcctgg

SEQ ID NO: 572732 - DNA, 413 bp, Homo sapiens
aggctctgctatgtagtatgagaagtttgaaaaggcacaatctgttttaacgtcatatttgcgctatatttacttgaggccaagatgctgaatgaaaaatakctgaacagtcaattatgcggttgtttgtaattatctcaattttgagtttatataagcaatgttttgaatttaatgtcaactttggtatgcaataccctagacataaaaatgcactgacacattaagaggaaactaagaatgaagatgaaaagggtagcattaaaccagctcaaatattttctaaaactgtgacttagagtctaactttgatgaggactatcttttggaatagatagtttcaacaatgaacagactcgttctcatgatttttcaccatctgtttgcagtcacaaatctgtgaaaaaaattcc

SEQ ID NO: 572733 - DNA, 304 bp, Homo sapiens
ctagaagagaaatttctgtaaggagaaatgctttggagattaaaacgtaaaggagataaccaaattttactaaacctctatccatcatgaccacatttcctttcattctaaaataaaaatattttggaaatgttgaccccctgcccaccatttttgcctgagaagttttaaatgcgaagaacttgctcctcacttttgaagcacggtgcyttctttaggaaccaatctgtatcacatgcattctattggtttgtattttattacatatcattctattacattttaaaatgcatttctgagccca

SEQ ID NO: 572734 - DNA, 607 bp, Homo sapiens
gctagtctcgaactcctggcctcaggtcatccacctgctttggcctcccaaagtgctgggattacaggtgtgagccacggtgcctagccaaaaataagtataatttttaaatatccatttaggagcctatttgcatgtctctatatatcataaagccacataaaaacaagggtgtcaggatattgattgcctttaggttgggtggaggcagataggaagggaccagaggaaccataaaattggaggctgatgactgtctcactgtaggtttcttttttctttttgtaaggaaacaaaccacttttaaaacrtgggcaaaacatttgaatagacttatcaccaaagacatgcagatggcatgcagcctccagtttacaggaagtgaacaggagaacaccccaggtgatccattgatgcaaacagggagatctagaatgtgggtatactaaggacaactgatctggtttttcaatgtaagagtgtgttttatttattttttatttttctaccaataggaaattattttttatgtatttatttatttatttttcaactttcgttacaggttcagcaggtacacgtgcaagtttgttgcaaaggtatgttt

SEQ ID NO: 572735 - DNA, 568 bp, Homo sapiens
ttcaaacacacatgctctacaatttgtgyagttagtgcaattatcacagggtcctgaggcgacatacatcctcctcagctgatgggattaagagattaaagacaggcataggaaaccacaaggatatttactggggaagtgataagtgtccatgaaatctttacaatttaagcttagagactgcagtaaagacagacataggaaattataaaagtattaatttggggaactaacaaatgtctatgaaatctttacaattcatgttcttctgccatggcttcagccggtccctctgtttggggtccctaacttcccacaacagagaagtctgtcctcattgtctctccttctctaccttccatttagtttacaactcactgctccgtcaccttatcttttccacaattccactgaaacttttttgatacacatcaccatcttctccaaaaggcctataatgaatgatcacctgtaatcaaagctggcctctattagatttgactccctctttcttaaaactcctccatgcacattctttgtttgtttgtttgtttttgagacggagttt

SEQ ID NO: 572736 - DNA, 604 bp, Homo sapiens
gaacatgcggtgtttggttttttgtccttgggatagttgactgagaatgatgaattaaaataaaaatgcatgcactttcaaatgtagttagtgcaacatattgaacttaaattccagttttcctggaattacttrtgtcttgagctaaaggctgtatttgatataacagggaaggaaagaaattatttttcctataaaattagtttaaaaacacatataattaaacaaaataaaaatattattccatcttttaaagaacatttactaattcacagatattacccgaagtttagaaagtcacctaagaacaattgtttaaaaattatttagggaaaatgaagcaaaattgttgtttcaatctgagattttaacagccagtgcactcctgttcctcagctgaatatccccttcattctgaatgtctgcagtagtattgaattggggagcagttagattccagggacatattcactcctgttttgttctccccccaatctcagcctttcggtgactgtttgggcaaagcctcccttgtggtagaagatgcctcacttctggggagaagaggctcctcatcttgcagacaagaagcagcacccactgg

SEQ ID NO: 572737 - DNA, 523 bp, Homo sapiens
atttttgttacaactaatatgcaaaatrcaaactggctatcactaccattctgataatggaattagctctcctgcatacctgatgacctaatgcttaacctaatcttcctctttcccactttgatttggaaacttgttacaatagagttctttacctcaaagtcttaaggaattcaagacaagactagagtatgttaagatactacaaaaaaatgtacatagcaagagctttcttgagtaagcaaattttatacatataaaaataatttacatgcaaatgactaagaggaaatgttaagtgactctggtgtaaataattagttttctgattctgccagagcatattaagaaaaattcactttggcaaaattatatggatttaaagaagtaacaagtgggtttctctaaagcacagtttggctttttactagaatatcaagtcacttttttgggtgagaagagtacaatgggaatgggcagctggtgaaaataaacaattaaaattacttaaaacttcaacaaa

SEQ ID NO: 572738 - DNA, 523 bp, Homo sapiens
atttttgttacaactaatatgcaaaatgcaaactggctatcactaccattctgataatggaattagctctcctgcatacctgatgacctaatgcttaacctaatcttcctctttcmcactttgatttggaaacttgttacaatagagttctttacctcaaagtcttaaggaattcaagacaagactagagtatgttaagatactacaaaaaaatgtacatagcaagagctttcttgagtaagcaaattttatacatataaaaataatttacatgcaaatgactaagaggaaatgttaagtgactctggtgtaaataattagttttctgattctgccagagcatattaagaaaaattcactttggcaaaattatatggatttaaagaagtaacaagtgggtttctctaaagcacagtttggctttttactagaatatcaagtcacttttttgggtgagaagagtacaatgggaatgggcagctggtgaaaataaacaattaaaattacttaaaacttcaacaaa

SEQ ID NO: 572739 - DNA, 523 bp, Homo sapiens
atttttgttacaactaatatgcaaaatgcaaactggctatcactaccattctgataatggaattagctctcctgcatacctgatgacctaatgcttaacctaatcttcctctttcccactttgatttggaaacttgttacaatagagttctttacctcaaagtcttaaggaattcaagacaagactagagtatgttaagatacyacaaaaaaatgtacatagcaagagctttcttgagtaagcaaattttatacatataaaaataatttacatgcaaatgactaagaggaaatgttaagtgactctggtgtaaataattagttttctgattctgccagagcatattaagaaaaattcactttggcaaaattatatggatttaaagaagtaacaagtgggtttctctaaagcacagtttggctttttactagaatatcaagtcacttttttgggtgagaagagtacaatgggaatgggcagctggtgaaaataaacaattaaaattacttaaaacttcaacaaa

SEQ ID NO: 572740 - DNA, 523 bp, Homo sapiens
atttttgttacaactaatatgcaaaatgcaaactggctatcactaccattctgataatggaattagctctcctgcatacctgatgacctaatgcttaacctaatcttcctctttcccactttgatttggaaacttgttacaatagagttctttacctcaaagtcttaaggaattcaagacaagactagagtatgttaagatactacaaaaaaatgtacatagcaagagctttcttgagtaagcaaattttatacatataaaaataatttacatgcaaatgactaagaggaaatgttaagtgactctggtgtaaataattagttttctgattctgccagagcatattaagaaaaattcactttggcaaaattatatggatttaaagaagtaacaagtgggtttctctaaagcacagtttggctttttactagaatatcaagtcacttttttgggtgagragagtacaatgggaatgggcagctggtgaaaataaacaattaaaattacttaaaacttcaacaaa

SEQ ID NO: 572741 - DNA, 540 bp, Homo sapiens
tgcaaactataagccttggtggcttccaygtggtgttaagcctgcaggtgaccaaagtgcaagagtgaaggaagcttggcattctctgcctaaatttcagaggatgtatgagaaaggctggatgcccagggagaagcctatgcacagctggagccctcaaagaggacctcttctaggacagtgccaagtggtaatgtgggattggaggccccacactgtgggggctgcctagtggagctgtgggagggggggctgctgccctccagatcaaagaatgatagagccaccagcagctcctgtcttcagtgtagaaaagctgtgggagcagagctgcccaaagccttgggagcccaccctatgcatcctggtaatgctctatgttcccaggatgtgggacatggtttcaaaggagattattttggaacatcgagatttaatgactgccctgctgggatttgaacttgtgtggggcctgtagtccctttcttttggccaatttatctcatttgtaatgggaatgtttaccaaagacctgtatcc

SEQ ID NO: 572742 - DNA, 540 bp, Homo sapiens
tgcaaactataagccttggtggcttccatktggtgttaagcctgcaggtgaccaaagtgcaagagtgaaggaagcttggcattctctgcctaaatttcagaggatgtatgagaaaggctggatgcccagggagaagcctatgcacagctggagccctcaaagaggacctcttctaggacagtgccaagtggtaatgtgggattggaggccccacactgtgggggctgcctagtggagctgtgggagggggggctgctgccctccagatcaaagaatgatagagccaccagcagctcctgtcttcagtgtagaaaagctgtgggagcagagctgcccaaagccttgggagcccaccctatgcatcctggtaatgctctatgttcccaggatgtgggacatggtttcaaaggagattattttggaacatcgagatttaatgactgccctgctgggatttgaacttgtgtggggcctgtagtccctttcttttggccaatttatctcatttgtaatgggaatgtttaccaaagacctgtatcc

SEQ ID NO: 572743 - DNA, 562 bp, Homo sapiens
cttgccttgtctcagaagaaactgcactttcgagtgatgccaaaacaggttgagacttttgggggactattgagaagggatgattgtattttgcaatgtgrgaagaacatgagatttgaagggccagggatggaatgaaatagtttggatgttataccctttaagtctcatgttgaattgtaattcccactgttggaggtggggtctgttgggaggtgatggggtcatgagggctgatttctcatgtttagcaccatcatcttggcactgtccttgcaagagtaagtgagttctcatgacatctggctatttaaaagtgtgtggcacctctccctgcttgctcctgctctggccatgtgacataccttcttttgcttcaccttctaccatgtgtaaaagctccctgaggacccttcttgaagccaagcaactgccaatgcaaagctttctgtacagcctgcagaactgggagccaagtcaaccttttatttcggtataaattacttagagctcaggtgttcctttatagaactgtgatagtacacttatatcaagaatgtca

SEQ ID NO: 572744 - DNA, 562 bp, Homo sapiens
cttgccttgtctcagaagaaactgcactttcgagtgatgccaaaacaggttgagacttttgggggactattgagaagggatgattgtattttgcaatgtgagaagaacatgagatttgaagggccagggatggaatgaaatagtttggatgttataccmtttaagtctcatgttgaattgtaattcccactgttggaggtggggtctgttgggaggtgatggggtcatgagggctgatttctcatgtttagcaccatcatcttggcactgtccttgcaagagtaagtgagttctcatgacatctggctatttaaaagtgtgtggcacctctccctgcttgctcctgctctggccatgtgacataccttcttttgcttcaccttctaccatgtgtaaaagctccctgaggacccttcttgaagccaagcaactgccaatgcaaagctttctgtacagcctgcagaactgggagccaagtcaaccttttatttcggtataaattacttagagctcaggtgttcctttatagaactgtgatagtacacttatatcaagaatgtca

SEQ ID NO: 572745 - DNA, 562 bp, Homo sapiens
cttgccttgtctcagaagaaactgcactttcgagtgatgccaaaacaggttgagacttttgggggactattgagaagggatgattgtattttgcaatgtgagaagaacatgagatttgaagggccagggatggaatgaaatagtttggatgttataccctttaagtctcatgttgaattgtaattcccactgttggaggtggggtctgttgggaggtgatggggtcatgagggctgatttctcatgtttagcaccatcatcttggcactgtccttgcaagagtragtgagttctcatgacatctggctatttaaaagtgtgtggcacctctccctgcttgctcctgctctggccatgtgacataccttcttttgcttcaccttctaccatgtgtaaaagctccctgaggacccttcttgaagccaagcaactgccaatgcaaagctttctgtacagcctgcagaactgggagccaagtcaaccttttatttcggtataaattacttagagctcaggtgttcctttatagaactgtgatagtacacttatatcaagaatgtca

SEQ ID NO: 572746 - DNA, 562 bp, Homo sapiens
cttgccttgtctcagaagaaactgcactttcgagtgatgccaaaacaggttgagacttttgggggactattgagaagggatgattgtattttgcaatgtgagaagaacatgagatttgaagggccagggatggaatgaaatagtttggatgttataccctttaagtctcatgttgaattgtaattcccactgttggaggtggggtctgttgggaggtgatggggtcatgagggctgatttctcatgtttagcaccatcatcttggcactgtccttgcaagagtaagtgagttctcatgacatctggctatttaaaagtgtgtggcacctctccctgcttgctcctgctctggccatgtgacataccttcttttgcttcaccttctaccatgtgtaaaagctccctgaggacccttcttgaagccaagcaactgccaatgcaaagcttyctgtacagcctgcagaactgggagccaagtcaaccttttatttcggtataaattacttagagctcaggtgttcctttatagaactgtgatagtacacttatatcaagaatgtca

SEQ ID NO: 572747 - DNA, 566 bp, Homo sapiens
tttgacattatttgggagactggaaataatgctaagtaatatcagattgtcaaagtcaaataaatatagagacaaacatctgaaattaaaatgttttatttgagatacaagtattacaatttcacacatacatgcagaatgggtgtctttagtatgtccaaaacataaagagaaagttagaggttttataaaaakgggagacagagagaaaaacggtatgtatttctctttgagaaagttcattggcaccagtaaggtttttgagagctggcaggctctgataggtgagggacagtggtgggtaaagctagtcttagtgttcaagaggttgttgcagtaaccatttgataaaactggcttcagcttaaagcaggtaatttcagcagccaggcatgaagagaattacgcttttggagtggtgtttttgccctgaatgcctcctccccctggcttcttgatggttttatttggtgtgacaagaatgacccaattcatatgatcaatttttacatttacccctttccaccaagatctttctcttaaagcatcaaccatgtttatagttg

SEQ ID NO: 572748 - DNA, 566 bp, Homo sapiens
tttgacattatttgggagactggaaataatgctaagtaatatcagattgtcaaagtcaaataaatatagagacaaacatctgaaattaaaatgttttatttgagatacaagtattacaatttcacacatacatgcagaatgggtgtctttagtatgtccaaaacataaagagaaagttagaggttttataaaaaggggagacagagagaaaaacggtatgtatttctctttgagaaagttcaytggcaccagtaaggtttttgagagctggcaggctctgataggtgagggacagtggtgggtaaagctagtcttagtgttcaagaggttgttgcagtaaccatttgataaaactggcttcagcttaaagcaggtaatttcagcagccaggcatgaagagaattacgcttttggagtggtgtttttgccctgaatgcctcctccccctggcttcttgatggttttatttggtgtgacaagaatgacccaattcatatgatcaatttttacatttacccctttccaccaagatctttctcttaaagcatcaaccatgtttatagttg

SEQ ID NO: 572749 - DNA, 585 bp, Homo sapiens
cagcttgccaaacccaccccttggataaaaggaaacacgatcatgacatcagctgctgaaaggggcacaccaaagcctgggaacagatttagagaggtagtcatmtcttgccctctgtccccttcctagtgcactgctgcagacccagcagtggtcatcctgttggggcccaaggaacgtgggctgaaagaggctgcttcttaggtttctccagcagctctgcccctgctgaagactagtacacactgggacagggcgcttttggcactttgtcacttctgcacctgtcgaggacaagtacacagaggagaagaccctgcagccagctgttactcttaagcactgtctactggagtgaagccttgattacaccaccaaacaaaaatacatcaccacaccacgccaccacaggagcctatctgcaaccaaggaacttgtacagagccttggtcctctgaaagtacccagaaatgaagcaaattgatcctatacaacacacaccacagtcatacccttaagaaaaagaaagaatgaaaaattaataaaaaaactccttccaaatgatagcaagttcaacaaaagaag

SEQ ID NO: 572750 - DNA, 585 bp, Homo sapiens
cagcttgccaaacccaccccttggataaaaggaaacacgatcatgacatcagctgctgaaaggggcacaccaaagcctgggaacagatttagagaggtagtcatctcttgccctctgtccccttcctagtgcactgctgcagacccagcagtggtcatcctgttggggcccaaggaacgtgggctgaaagaggctgcttcttaggtttctccagcagctctgcccctgctgaagactagtacacactgggacagggcgcttttggcactttgtcacttctgcacctgtcgaggacaagtacacagaggagaagaccctgcagccagctgttactcttaagcactgtctactggagtgaagccttgattacaccaccaaacaaaaatacatcaccacaccacrccaccacaggagcctatctgcaaccaaggaacttgtacagagccttggtcctctgaaagtacccagaaatgaagcaaattgatcctatacaacacacaccacagtcatacccttaagaaaaagaaagaatgaaaaattaataaaaaaactccttccaaatgatagcaagttcaacaaaagaag

SEQ ID NO: 572751 - DNA, 633 bp, Homo sapiens
aagcacatctgtgtgtgttaaggcacttcccacagcatctgcgacacagaacagtggcagctgtgctcttcgtggtccctgcacacaggcccacagcagtatattgtgtgtttttttttatataaaaggctttgaaaatgccccacagcttcctcagtaactgactgtcaagaggggcagccttcaaaagtagaattctggcaaaggtcttcaaaagacacgaagttctggcaacgggcccatttccctcccgccttgctcttctggatgcatccattctctcccacagcatagtcgttttcttccactccactgtagagactgtccttctagtgrcaacagtgacttgaatgatatgcggaaatttcttcccaagcctgttggagaagcgtcctctgcctgcttctttttggccacctcctgccatggtaagagcagagggcctccagggctgctctgtcacccccaacagcatggacctcactgcagtcactccggaagcttccctctaaaggaagcttgtgcaggaaacatcatgcatcgagcagcatggagacaggggctggccagctgggcaggtctcacactcctgacactcagactccacgatactcctctgtccccacccagggc

SEQ ID NO: 572752 - DNA, 633 bp, Homo sapiens
aagcacatctgtgtgtgttaaggcacttcccacagcatctgcgacacagaacagtggcagctgtgctcttcgtggtccctgcacacaggcccacagcagtatattgtgtgtttttttttatataaaaggctttgaaaatgccccacagcttcctcagtaactgactgtcaagaggggcagccttcaaaagtagaattctggcaaaggtcttcaaaagacacgaagttctggcaacgggcccatttccctcccgccttgctcttctggatgcatccattctctcccacagcatagtcgttttcttccactccactgtagagactgtccttctagtggcaacagtgacttgartgatatgcggaaatttcttcccaagcctgttggagaagcgtcctctgcctgcttctttttggccacctcctgccatggtaagagcagagggcctccagggctgctctgtcacccccaacagcatggacctcactgcagtcactccggaagcttccctctaaaggaagcttgtgcaggaaacatcatgcatcgagcagcatggagacaggggctggccagctgggcaggtctcacactcctgacactcagactccacgatactcctctgtccccacccagggc

SEQ ID NO: 572753 - DNA, 633 bp, Homo sapiens
aagcacatctgtgtgtgttaaggcacttcccacagcatctgcgacacagaacagtggcagctgtgctcttcgtggtccctgcacacaggcccacagcagtatattgtgtgtttttttttatataaaaggctttgaaaatgccccacagcttcctcagtaactgactgtcaagaggggcagccttcaaaagtagaattctggcaaaggtcttcaaaagacacgaagttctggcaacgggcccatttccctcccgccttgctcttctggatgcatccattctctcccacagcatagtcgttttcttccactccactgtagagactgtccttctagtggcaacagtgacttgaatgatatgcggaaatttcttcccaagcctgttggagaagcgtcctctgcctgcttctttttggccacctcctgccatggtaagagcagagggcctccagggctgctctgtcacccccaacagcatggacctcactgcagtcactccggaagcttccctctaaaggaagcttgtgcaggaaacatcatgcatsgagcagcatggagacaggggctggccagctgggcaggtctcacactcctgacactcagactccacgatactcctctgtccccacccagggc

SEQ ID NO: 572754 - DNA, 633 bp, Homo sapiens
aagcacatctgtgtgtgttaaggcacttcccacagcatctgcgacacagaacagtggcagctgtgctcttcgtggtccctgcacacaggcccacagcagtatattgtgtgtttttttttatataaaaggctttgaaaatgccccacagcttcctcagtaactgactgtcaagaggggcagccttcaaaagtagaattctggcaaaggtcttcaaaagacacgaagttctggcaacgggcccatttccctcccgccttgctcttctggatgcatccattctctcccacagcatagtcgttttcttccactccactgtagagactgtccttctagtggcaacagtgacttgaatgatatgcggaaatttcttcccaagcctgttggagaagcgtcctctgcctgcttctttttggccacctcctgccatggtaagagcagagggcctccagggctgctctgtcacccccaacagcatggacctcactgcagtcactccggaagcttccctctaaaggaagcttgtgcaggaaacatcatgcatcgagcagcatggrgacaggggctggccagctgggcaggtctcacactcctgacactcagactccacgatactcctctgtccccacccagggc

SEQ ID NO: 572755 - DNA, 506 bp, Homo sapiens
agccctggaattctatgtggaaagctaggaaggrggagagctgaaatgaagatgtaatcaccctttccaaagaggtcagtccggtactaagctgtgctcctgggcaagctctccaggctgagggaacaggagcaggggttatgttgggtgaaggtgaaagtgagggacctcccaggaggtgtagaatattccactagggacacctcatacccttcgaggattagaccttgaggcctggagatccccaggcaattagtattgaaggtcgaaaggcccagtgacaggaataggaaggcccactgtgtcattcacaaagcacttccaaacccatcatcacaggtgaccctcacaacaaccctgtgagacctgcagggcaggggctctcacaaaggaggagtcaggaatgtcaagactttaacaccttctccaagtcaggatcaggaaatgctgtcccagccctgacctatattccctatgcttcctcccacaaaacagcttagggtgac

SEQ ID NO: 572756 - DNA, 506 bp, Homo sapiens
agccctggaattctatgtggaaagctaggaagggggagagctgaaatgaagatgtaatcaccctttccaaagaggtcagtccggtactaagctgtgctcctgggcaagctctccaggctgagggaacaggagcagggkttatgttgggtgaaggtgaaagtgagggacctcccaggaggtgtagaatattccactagggacacctcatacccttcgaggattagaccttgaggcctggagatccccaggcaattagtattgaaggtcgaaaggcccagtgacaggaataggaaggcccactgtgtcattcacaaagcacttccaaacccatcatcacaggtgaccctcacaacaaccctgtgagacctgcagggcaggggctctcacaaaggaggagtcaggaatgtcaagactttaacaccttctccaagtcaggatcaggaaatgctgtcccagccctgacctatattccctatgcttcctcccacaaaacagcttagggtgac

SEQ ID NO: 572757 - DNA, 380 bp, Homo sapiens
tgtagcgttatccacagtgagaaaccattttttttttgttttagtaacaccaggygttttctcctggcttccttccttcctcctatttctctcttactccttctgccctctgtgttttatattccttaggtgcatcctactttctgtgtttttttgggaaatcctcgacagttgcaggaaaattgtgttattgtttttgtttactggtatctctctttcatggttctccatcaattgtaaacatctattggtttctcccaagtcactcagaatgttttaattaggtacacctgtttttctttatatatctctttctggagtatagggttacatactgatgaacccagtgtaactcaagaacgcatctaatatcccaataa

SEQ ID NO: 572758 - DNA, 380 bp, Homo sapiens
tgtagcgttatccacagtgagaaaccattttttttttgttttagtaacaccaggtgttttctcctggcttccttccttcctcctatttctctcttactccttctgccctctgtgttttatattccttaggtgcatcctactttctgtgtttttttgggaaatcctsgacagttgcaggaaaattgtgttattgtttttgtttactggtatctctctttcatggttctccatcaattgtaaacatctattggtttctcccaagtcactcagaatgttttaattaggtacacctgtttttctttatatatctctttctggagtatagggttacatactgatgaacccagtgtaactcaagaacgcatctaatatcccaataa

SEQ ID NO: 572759 - DNA, 380 bp, Homo sapiens
tgtagcgttatccacagtgagaaaccattttttttttgttttagtaacaccaggtgttttctcctggcttccttccttcctcctatttctctcttactccttctgccctctgtgttttatattccttaggtgcatcctactttctgtgtttttttgggaaatcctcgacagttgcaggaaaattgtgttattgtttttgtttactggtatctctctttcatggttctccatcaattgtaaacatctattggtttctcccaagtcactmagaatgttttaattaggtacacctgtttttctttatatatctctttctggagtatagggttacatactgatgaacccagtgtaactcaagaacgcatctaatatcccaataa

SEQ ID NO: 572760 - DNA, 380 bp, Homo sapiens
tgtagcgttatccacagtgagaaaccattttttttttgttttagtaacaccaggtgttttctcctggcttccttccttcctcctatttctctcttactccttctgccctctgtgttttatattccttaggtgcatcctactttctgtgtttttttgggaaatcctcgacagttgcaggaaaattgtgttattgtttttgtttactggtatctctctttcatggttctccatcaattgtaaacatctattggtttctcccaagtcactcagwatgttttaattaggtacacctgtttttctttatatatctctttctggagtatagggttacatactgatgaacccagtgtaactcaagaacgcatctaatatcccaataa

SEQ ID NO: 572761 - DNA, 308 bp, Homo sapiens
gtgtgcatgtatccatagcatctgtgtgtgtgtacattttatagatttttgtctttgtatgaagaaatatactgaatatccaaataakcataatttctatacaagtgaggtatgtggcttaaaatctagtgaacaaaatataactatacattcatgatttggaaaacttttaacatgattttgaggaattactcaattgttaattgtttctgccttctctaacaaaatgactaatatttggactgaaaagaaaaaaagaaaacctcggtaagtggaatttctgtgggtggtagctctggaatatccca

SEQ ID NO: 572762 - DNA, 308 bp, Homo sapiens
gtgtgcatgtatccatagcatctgtgtgtgtgtacattttatagatttttgtctttgtatgaagaaatatactgaatatccaaataatcataatttctatacaagtgaggtatgtggsttaaaatctagtgaacaaaatataactatacattcatgatttggaaaacttttaacatgattttgaggaattactcaattgttaattgtttctgccttctctaacaaaatgactaatatttggactgaaaagaaaaaaagaaaacctcggtaagtggaatttctgtgggtggtagctctggaatatccca

SEQ ID NO: 572763 - DNA, 308 bp, Homo sapiens
gtgtgcatgtatccatagcatctgtgtgtgtgtacattttatagatttttgtctttgtatgaagaaatatactgaatatccaaataatcataatttctatacaagtgaggtatgtggcttaaaatctagtgaacaaaatataactatacattcatgatttggaaamcttttaacatgattttgaggaattactcaattgttaattgtttctgccttctctaacaaaatgactaatatttggactgaaaagaaaaaaagaaaacctcggtaagtggaatttctgtgggtggtagctctggaatatccca

SEQ ID NO: 572764 - DNA, 359 bp, Homo sapiens
gggtctattttctgcttaggtgcagcagtccatctggtgcttgagtgtcaacctaaggcctgatgtctatgttggaccttgggttcacctgaggcctgatatccacctggggcctcaatgtccaaatggggcctgatgcccatctgggcsctgggtgtccacctgcagcatggatgtccactggtactttatgtccaccaggggcctaatgtccacctaaaacctggtgttcacctggggtctgatgttcagctgaagaccggatgtccacctggagccgaggaatccacccagggactggtgttgaactggggcctgatgaccacccggggacaaggtacacaccaggcttgttgtcc

SEQ ID NO: 572765 - DNA, 359 bp, Homo sapiens
gggtctattttctgcttaggtgcagcagtccatctggtgcttgagtgtcaacctaaggcctgatgtctatgttggaccttgggttcacctgaggcctgatatccacctggggcctcaatgtccaaatggggcctgatgcccatctgggcgctgggtgtccacctgcagcatggatgtccactggtactttatgtccaccaggggcctaatgtccacctaaracctggtgttcacctggggtctgatgttcagctgaagaccggatgtccacctggagccgaggaatccacccagggactggtgttgaactggggcctgatgaccacccggggacaaggtacacaccaggcttgttgtcc

SEQ ID NO: 572766 - DNA, 359 bp, Homo sapiens
gggtctattttctgcttaggtgcagcagtccatctggtgcttgagtgtcaacctaaggcctgatgtctatgttggaccttgggttcacctgaggcctgatatccacctggggcctcaatgtccaaatggggcctgatgcccatctgggcgctgggtgtccacctgcagcatggatgtccactggtactttatgtccaccaggggcctaatgtccacctaaaacctggtgttcacctggggtctgatgttcagctgaagaccggatgtccacctggagccgaggaatccacccagggactggtgttgaactggggcctgatgaccaccyggggacaaggtacacaccaggcttgttgtcc

SEQ ID NO: 572767 - DNA, 410 bp, Homo sapiens
gcgatttcctaggcaacaagggagggaggaacttggaggtgggggcgggggcggtggagaagacacagttgccccaggctgtgcgcaggcggcctggtgctcccttcctctgtgaggcctccgttttcagagtaacagtgaccgctaggtgatgcccgacgccygccagtgagcgtgtcagcccggaatgaattgggatcccctggggagggggtggggggaaggatggaggctcccacagcacagtgggtcaccgcgccctccaaggcgatccccacaactaatcgaccagggctcctggggggacgcagcctaagtcccccacccatcggatcatctggaacttccgtccagagacgagagaccgactgggaatcctctcagtcaaggtccaaaccgaaaagaatcac

SEQ ID NO: 572768 - DNA, 377 bp, Homo sapiens
ctaagtgattaccaaactctaggtgaataattcaacccaggtggtcattaggacccagctggataccagtccccaggttaacacaaggcccccagtgggcacctaggcaccagctggacatsaggccctatgtaaacacccgggtctcaggtgaacaccatgccccaggtggacatcaggccctaggtggacacggggccacaggtggacatctagccgctgggcaacatccagccccaggtggacataaccatttccatggataaaccattcccaggtggatagcaggcctcaagaggatggcagtcaccaggtagacatcaggcctcagatagacaccaaggtcccagatgtacagcaggccccaaccaaacccc

SEQ ID NO: 572769 - DNA, 377 bp, Homo sapiens
ctaagtgattaccaaactctaggtgaataattcaacccaggtggtcattaggacccagctggataccagtccccaggttaacacaaggcccccagtgggcacctaggcaccagctggacatgaggccctatgtaaacacccgggtctcaggtgaacaccatgccccaggtggacatcaggccctaggtggacayggggccacaggtggacatctagccgctgggcaacatccagccccaggtggacataaccatttccatggataaaccattcccaggtggatagcaggcctcaagaggatggcagtcaccaggtagacatcaggcctcagatagacaccaaggtcccagatgtacagcaggccccaaccaaacccc

SEQ ID NO: 572770 - DNA, 377 bp, Homo sapiens
ctaagtgattaccaaactctaggtgaataattcaacccaggtggtcattaggacccagctggataccagtccccaggttaacacaaggcccccagtgggcacctaggcaccagctggacatgaggccctatgtaaacacccgggtctcaggtgaacaccatgccccaggtggacatcaggccctaggtggacacggggccacaggtggacatctagccgctgggcaacatccagccccaggtggacataaccrtttccatggataaaccattcccaggtggatagcaggcctcaagaggatggcagtcaccaggtagacatcaggcctcagatagacaccaaggtcccagatgtacagcaggccccaaccaaacccc

SEQ ID NO: 572771 - DNA, 223 bp, Homo sapiens
tgttggttgatatagacagcaggacggtggccatggaagtcggaatccgctaaggagtgtgtaacaactcacctgccgaatcaactagccctgaaaatggatggcgctggagcgtcgggcccatacccggccgtcgccggcagtctagagtggacgggagcggcgggggcggcgcgcgcgcgcgcgcgtgtggtgtgcgtckgagggcggcggcggcggcggc

SEQ ID NO: 572772 - DNA, 440 bp, Homo sapiens
  misc_feature 173: n = A,T,C or G
aaaaaagaaagaaaagaagaagaagaagaaaaaagaacgggcccaaatactgcattgtcgctcaacgttctcccaaaaggccagaaaccccctgactcaggtcaaggaggtggtgtttsgttttctctctccctctctctctccctcctctctctctctctctctctcccccncccccctccccatctctctctctctctctctcctcttttctccccccgaacttttatttgtcgttcaagcatacatgagcaagattgtgacataggtaaagttgtgacgggggtgttcagtgtgcagatgatttcatcacccgggtagtcagtgctgtgtccgacagtattcgtgttttgttttttcctgaagctgtctctccttccacccctcctccctcaagcaggcttccgcgtccccggtccccctcgttctgcccatgcaag

SEQ ID NO: 572773 - DNA, 447 bp, Homo sapiens
ctaacacaacatttatttagccacaaataaaagaagaccagtgatgtagcctgtacacaaaaaagtaagaacactctggttagtctggggcaggggtaggggaaagagatctacaaaattaaaattttattggagagcatcactaattagaatcagaacaattactgctttaaagtagttaagaacagagcacaaggaacccagagaagaagcagatatgattcagagcagagctcacagagcagatggtatctgagctgagactgatagaataacattaataaggacattcacagccatttattatcacttaactgcaatgtattttgtataagttatttctactcttcatatcaaccatggaaaataatacttattcttttcttttgaagytaaggaagtggtaagtggtctaagaagataaattaacatactaacaccaaatag

SEQ ID NO: 572774 - DNA, 489 bp, Homo sapiens
gaattctcttgagcaatctattttcttgatttttaaaagtcaatgtactctcaaagaaacaaaactattattcgtggattctgttatttgaaaayatttactgatcatttaccttacaccaaatgatctccagctcgtggaaaaatatgtaaagttgcccagctgcattaagcttaaactcttctgaaggagaaaagaagcaatggagtagggacattaaagcaggagtgtggtgatatggctgagacttctacttgcacactgtggtagctgtgtggagaatggattgaaaaaagggcaatgacagaagcttaaattagtatcaaatatggcaatcctgtaaatttaggtgtccttgaaataagaatgtataatagttctcattatttccccaagaaatctctgcatttggccttgtgagggaagcgctatagttaccaagtggtgggggtgggaaggtgaatttgaaacaacatttggaattactac

SEQ ID NO: 572775 - DNA, 489 bp, Homo sapiens
gaattctcttgagcaatctattttcttgatttttaaaagtcaatgtactctcaaagaaacaaaactattattcgtggattctgttatttgaaaacatttactgatcrtttaccttacaccaaatgatctccagctcgtggaaaaatatgtaaagttgcccagctgcattaagcttaaactcttctgaaggagaaaagaagcaatggagtagggacattaaagcaggagtgtggtgatatggctgagacttctacttgcacactgtggtagctgtgtggagaatggattgaaaaaagggcaatgacagaagcttaaattagtatcaaatatggcaatcctgtaaatttaggtgtccttgaaataagaatgtataatagttctcattatttccccaagaaatctctgcatttggccttgtgagggaagcgctatagttaccaagtggtgggggtgggaaggtgaatttgaaacaacatttggaattactac

SEQ ID NO: 572776 - DNA, 475 bp, Homo sapiens
atgtactctcaaagaaacaaaactattattcgtggattctgttatttgaaaacatttactgatcatttaccttacaccaaatgatctccagctcgtggaaaaatatgtaaagttgcccagctgcattaagcttaaactcttctgaaggagaaaagaarcaatggagtagggacattaaagcaggagtgtggtgatatggctgagacttctacttgcacactgtggtagctgtgtggagaatggattgaaaaaagggcaatgacagaagcttaaattagtatcaaatatggcaatcctgtaaatttaggtgtccttgaaataagaatgtataatagttctcattatttccccaagaaatctctgcatttggccttgtgagggaagcgctatagttaccaagtggtgggggtgggaaggtgaatttgaaacaacatttggaattactacactttaaaggtaaagctggcaggaattc

SEQ ID NO: 572777 - DNA, 489 bp, Homo sapiens
gaattctcttgagcaatctattttcttgatttttaaaagtcaatgtactctcaaagaaacaaaactattattcgtggattctgttatttgaaaacatttactgatcatttaccttacaccaaatgatctccagctcgtggaaaaatatgtaaagttgcccagctgcattaagcttaaactcttctgaaggagaaaagaagcaatggagtagggacattaaagcaggagtgtggtgatatggctgagacttctacttgcacactgtggtagctgtgtggagaatggattgaaaaaagggcaatgacagaagcttaaattagtatcaaatatggcaatcctrtaaatttaggtgtccttgaaataagaatgtataatagttctcattatttccccaagaaatctctgcatttggccttgtgagggaagcgctatagttaccaagtggtgggggtgggaaggtgaatttgaaacaacatttggaattactac

SEQ ID NO: 572778 - DNA, 412 bp, Homo sapiens
atgtgtgtgtgtgtgtgtgtgtgtgtgtgtgtgtctgtctgtgtgtgtttgtgtgtgtgtgaagcagggagagagagcaagagtgaaagtgagcaagagagagaggagagagagagagagaatcagacagatacagaaaragattgacagagctgcagagacagaattaaaaggggacaccaagaatattgagctgagaaactataaaatgggagtagccgttaaacagaatggggaagagcaaatttggggagtttcagtggctcaatatagacatattaattttgagattcctaactgacatccacgtggataagtcagggagtgttgggtgtagtgtccagtgtttaggtgtaataagaaatatcaggaaattaatgacacaaacattagtaagaaagcaaagataaga

SEQ ID NO: 572779 - DNA, 412 bp, Homo sapiens
atgtgtgtgtgtgtgtgtgtgtgtgtgtgtgtgtctgtctgtgtgtgtttgtgtgtgtgtgaagcagggagagagagcaagagtgaaagtgagcaagagagagaggagagagagagagagaatcagacagatacagaaaaagattgacagagctrcagagacagaattaaaaggggacaccaagaatattgagctgagaaactataaaatgggagtagccgttaaacagaatggggaagagcaaatttggggagtttcagtggctcaatatagacatattaattttgagattcctaactgacatccacgtggataagtcagggagtgttgggtgtagtgtccagtgtttaggtgtaataagaaatatcaggaaattaatgacacaaacattagtaagaaagcaaagataaga

SEQ ID NO: 572780 - DNA, 412 bp, Homo sapiens
atgtgtgtgtgtgtgtgtgtgtgtgtgtgtgtgtctgtctgtgtgtgtttgtgtgtgtgtgaagcagggagagagagcaagagtgaaagtgagcaagagagagaggagagagagagagagaatcagacagatacagaaaaagattgacagagctgcagagacagaattaaaaggggacaccaagaatattgagctgagaaactataaaatgggagtagccgttaaacagaatggkgaagagcaaatttggggagtttcagtggctcaatatagacatattaattttgagattcctaactgacatccacgtggataagtcagggagtgttgggtgtagtgtccagtgtttaggtgtaataagaaatatcaggaaattaatgacacaaacattagtaagaaagcaaagataaga

SEQ ID NO: 572781 - DNA, 547 bp, Homo sapiens
gcaggaattccatacacgtcagatctgaaaatgtgtgtgtgtgtgtgtgtgtgtgtgtgtgtgtctgtctgtgtgtgtttgtgtgtgtgtgaagcagggagagagagcaagagtgaaagtgagcaagagagagaggagagagagagagagaatcagacagatacagaaaaagattgacagagctgcagagacagaattaaaaggggacaccaagaatattgagctgagaaactataaaatgggagtagccgttaaacagaatggggaagagcaaatttggggagtttcagtggctcaatatagacatattaattttgagattcctaactgacatccacgtggataagtcagggagtgttgggtgtagtgtccagtgtttaggtgtaataagaaatatcaggaaattaatgacacamacattagtaagaaagcaaagataagaagtcgaagtcctgagcctaatggtcctctaatatttaaaaaatagaaaagatgaaacctgcaataaaggactaggggtaattatccaaaacatggtgggggggaa

SEQ ID NO: 572782 - DNA, 385 bp, Homo sapiens
tctaatgtgtatatataactgrtatatatgacatattatatctggtatatatgtatacgtatcagttatatatatatatatatatataacttatgatatataataaacaacataggccgggcgcggtggctcacacctgtaatcccagcactttgggaggcggaggcgggcagatcacttgaggtcaggagttcgagaccagcctggccaacgtggtgaaaccccctctctactaaatatacaaaaattagccaggcacgctggcacctgcctgtaatccaagctacttgggaggctgaggtaggagaattgcttgaacccggcaggcagaggttgcagtgagccaagattgtgccattggacaccagcctgggcaaagaagtga

SEQ ID NO: 572783 - DNA, 385 bp, Homo sapiens
tctaatgtgtatatataactgatatatatgacatattatatctggtatatatrtatacgtatcagttatatatatatatatatatataacttatgatatataataaacaacataggccgggcgcggtggctcacacctgtaatcccagcactttgggaggcggaggcgggcagatcacttgaggtcaggagttcgagaccagcctggccaacgtggtgaaaccccctctctactaaatatacaaaaattagccaggcacgctggcacctgcctgtaatccaagctacttgggaggctgaggtaggagaattgcttgaacccggcaggcagaggttgcagtgagccaagattgtgccattggacaccagcctgggcaaagaagtga

SEQ ID NO: 572784 - DNA, 583 bp, Homo sapiens
cgcctcccgggttcgagcgcttctcctgcctcagcctcccgattagcggggattacagggaggcacccccacgcctggcttggctgatgtttgtgtttttagtaggcacgccgtgtctctccatgttgctcaggctggtctccaactcccgacctcctgtgatgcgcccacctcggcctctcgaagtgctgggatgacgggcgtgagccaccgtgcccggcctgttgactcatttcgcttttttatttctttcgtttccacgcgtttacttatatgtattaatgtaaacgtttctgtacgcttatatgcaaacaacgacaacgtgtatctctgcrttgaatactcttgcgtatggtaaatacgtatcggttgtatggaaatagacttctgtatgatagatgtaggtgtttgtgtcatacaaataaatacacatcgctctataaagaagggatcgtcgataaagacgtttattttacgtatgaaaagcgtcgtatttatgtgtgtaaatgaacgagcgtacgtagttatctctgttttctttcttcctctccttcgtgtttttcttccttcctttcttcctttc

SEQ ID NO: 572785 - DNA, 405 bp, Homo sapiens
ctggcggccgctttgagatcgtgctctcggcttccggagctgcggtggcagctgcagagggagggccccgtccccgctgtgagataggcagagctccggaaagcccgcggtcgtcagcccggctggcccggtggcgccagagctgtggcgcgtcgcttgtgagtcacagctctggcgtgcaggtttatgtgggggagaggctgtcgctgcgcttctgggcccgaggcgggcgtggggctgcccgggccggtcgaccagcgcgccgtagctccagaggcccgacccgcgacccgcggggaccccccgcgcgtggcgcgggaggctggggacccccttccccggcccggtcgcgggtccgcgctcatcctggccgtstgaggcggcggccgaattcgtttccgagtc

SEQ ID NO: 572786 - DNA, 368 bp, Homo sapiens
tttgggccgccgggttattgctgacacgctgtcctctggcgacctgtcgctggagaggttgggcctccggatgcgcgcggggctctggcctaccggtgacccggctagccggccgcgctcctgcttgagccgcctgccggggcccgcgggcctgcygctctctcgcgcgtccgagcgtcccgactcccggtgccggcccgggtccgggtctctgacccacccgggggcggcggggaaggcggcgagggccaccgtgcccccgtgcgctctccgctgcgggcgcccggggcggccgcgacaaccccaccccgctggctccgtgccgtgcgtgtcaggcgttctcgtctccgcggggttgtccgccgccc

SEQ ID NO: 572787 - DNA, 368 bp, Homo sapiens
tttgggccgccgggttattgctgacacgctgtcctctggcgacctgtcgctggagaggttgggcctccggatgcgcgcggggctctggcctaccggtgacccggctagccggccgcgctcctgcttgagccgcctgccggggcccgcgggcctgctgctctctcgcgcgtccgagcgtcccgactcccggtgccggcccgggtccgggtctctgacccacccgggggcggcggggaaggcggcgagggccaccgtgcccccgtgcgctctccgctgcgggcgcccggggcggccgcgacaaccccaccccgctggctccgtgccgtgcgtgtsaggcgttctcgtctccgcggggttgtccgccgccc

SEQ ID NO: 572788 - DNA, 487 bp, Homo sapiens
aaaagattggaagagagctcttctgacaaaatagaaattattccaagaggaagcagaataccagaaaggaaggaagaacagaaatgtcaattatgtaggtaaatataatatttacctaaatacctaaaaataaatatttacctaaatactacctaaatacctaaaaataaatatttacctaaatacctaaaatttactaaaaatatttttgagagctgaaaaaaagttatagtatcgtctcatggaatttttttatctatctagatataataagtacttatacaataaaagcaggagagtagagaggcctgcagggcgaaagaatgtctacatcacatctgaagtcgcaaaatagtcattytaggcagactataaaaagttgagcacttttattgcaactcctaaagttatcactgatagataaatacagtttattttttaaggaaagggaaaataatataggtcagaaatttggatcaaaaagaag

SEQ ID NO: 572789 - DNA, 606 bp, Homo sapiens
tgcgcttggtgtactgcattcttgagataacatcgccggtaggaatgaggaccactggctggtcttgctactgagttttttccagctgagcaaaatgtttaacasagaagttgaaagcctgcagactaaagaaccataaaatgacggtctgtttatgttttgatgatttacttagcctatttttcccctcctgttagtgctgcaggttttatagaacttatgtctgatggtttatcaggcgtagatttacctttattgtgtaactaatcactttccacatatctgggagactctttccctttcatcatcatcaccttgatactaaaatatgtttgatttagagtctttattaggactgtgtgacaacagttattttccctcaccacctatgattagctggcattatgtagttgggcacctgcagtgcatgtgagggggcagctatgtgaatttctctctttccctcttcaccacgcaagacactgtgatcaatcaaaagttgactaaatttactcatgtgactgctggcaaataattccccttcccactctataatagactaattccatttcttacacacacaaaaagatgaggagtttatccaca

SEQ ID NO: 572790 - DNA, 606 bp, Homo sapiens
tgcgcttggtgtactgcattcttgagataacatcgccggtaggaatgaggaccactggctggtcttgctactgagttttttccagctgagcaaaatgtttaacacagaagttgaaagcctgcagactaaagaaccataaaatgacggtctgtttatgttttgatgatttacttagcctatttttcccctcctgttagtgctgcaggttttatagaacttatgtctgatggtttatcaggcgtagatttacctttattgtrtaactaatcactttccacatatctgggagactctttccctttcatcatcatcaccttgatactaaaatatgtttgatttagagtctttattaggactgtgtgacaacagttattttccctcaccacctatgattagctggcattatgtagttgggcacctgcagtgcatgtgagggggcagctatgtgaatttctctctttccctcttcaccacgcaagacactgtgatcaatcaaaagttgactaaatttactcatgtgactgctggcaaataattccccttcccactctataatagactaattccatttcttacacacacaaaaagatgaggagtttatccaca

SEQ ID NO: 572791 - DNA, 504 bp, Homo sapiens
gaattgtctgtttgaaagacacatctctctgtttctccaggattagtccctggtggcttacttagtttatttggtgaggtctgttttcctatatggcattgatgctgttagatgttctttggtgtctgggcactgaagagttaggtattgattgtagtcttcactgcctatgcttgtttctacccatccttcttgggaaggctttctakatatttgaaagggtgtggtggtctaagctgtgtctgctttatggggcaccccaagcaccgctaacactgtgggtcttgccaactcatataggtaccaccttgatggtgcttggacaagttccggaaaattctctggattacacgcagagactcttgtgttctttccttactttctcttaaacaaacagtatctctctctgttctgaaccacctaaagctgggtgtggagtcacactggcacccctgtggacaccaccactgtgactgcgctgggtcagacctgaaaccaccacag

SEQ ID NO: 572792 - DNA, 504 bp, Homo sapiens
gaattgtctgtttgaaagacacatctctctgtttctccaggattagtccctggtggcttacttagtttatttggtgaggtctgttttcctatatggcattgatgctgttagatgttctttggtgtctgggcactgaagagttaggtattgattgtagtcttcactgcctatgcttgtttctacccatccttcttgggaaggctttctatatatttgaaagggtgtggtggtctaagctgtgtctgctttatggggcaccccaagcaccgctaacactgtgggtcttgccaactcatakaggtaccaccttgatggtgcttggacaagttccggaaaattctctggattacacgcagagactcttgtgttctttccttactttctcttaaacaaacagtatctctctctgttctgaaccacctaaagctgggtgtggagtcacactggcacccctgtggacaccaccactgtgactgcgctgggtcagacctgaaaccaccacag

SEQ ID NO: 572793 - DNA, 504 bp, Homo sapiens
gaattgtctgtttgaaagacacatctctctgtttctccaggattagtccctggtggcttacttagtttatttggtgaggtctgttttcctatatggcattgatgctgttagatgttctttggtgtctgggcactgaagagttaggtattgattgtagtcttcactgcctatgcttgtttctacccatccttcttgggaaggctttctatatatttgaaagggtgtggtggtctaagctgtgtctgctttatggggcaccccaagcaccgctaacactgtgggtcttgccaactcatataggtaccaccttgatggtgcttggacaagttccggaaaattctctggattacasgcagagactcttgtgttctttccttactttctcttaaacaaacagtatctctctctgttctgaaccacctaaagctgggtgtggagtcacactggcacccctgtggacaccaccactgtgactgcgctgggtcagacctgaaaccaccacag

SEQ ID NO: 572794 - DNA, 504 bp, Homo sapiens
gaattgtctgtttgaaagacacatctctctgtttctccaggattagtccctggtggcttacttagtttatttggtgaggtctgttttcctatatggcattgatgctgttagatgttctttggtgtctgggcactgaagagttaggtattgattgtagtcttcactgcctatgcttgtttctacccatccttcttgggaaggctttctatatatttgaaagggtgtggtggtctaagctgtgtctgctttatggggcaccccaagcaccgctaacactgtgggtcttgccaactcatataggtaccaccttgatggtgcttggacaagttccggaaaattctctggattacacgcagagactcttgtgttctttccttactttctcttaaacaaacagtatctctctctgttctgaaccacctaaagctgggtgtggagtcacactggcacccctgtggacaccaccactgtgactgcrctgggtcagacctgaaaccaccacag

SEQ ID NO: 572795 - DNA, 466 bp, Homo sapiens
tcaaaactttcctgatcgaaactattgtcagctcttgtgatctcctggagtggcctacctcatctatactttcttcctccaatcagttctccatgcccagccagagtgagcttttcctgaatggtggcctaagcaagccaagctcatgcttgtcttakaacaaagacaaaatgggccgggcatggtggctcatgcctgtaatcccagcactttgggaggcaaagagggcagatcgcttgaggtcagaagtttgaaaccagcctggccaacgtggtagaaccccatctctactaagaccacaaaaattagctcggtgtggtggctcatacccgtattcccagcactttgggagactgaagcgggtggatcacttgaggtcaggaggtcaagaatagcctgtccaacatggtgaaaccccatgtttctaaaactattaaaaatacaaaactagccaggcatggtgaca

SEQ ID NO: 572796 - DNA, 442 bp, Homo sapiens
gtccaaaatttagagggcagtcaaatcttaaagctccaaaatgatctcctttgaatccatgtctcacatccaggtcattctgatgcaagaggtgcgttcctattgtcttgggtagctctgcccctgtggctttgcagggtacagactcccacccgaatgctttaatgggctgctgttgagtgtccatggctttttcaggcacatagtgcaagctgtcgtggatctaccattctgaggtctagagaatggtggccctcttcttacagctccacaaggcagttccccagtggggactctgtgggagctccagtcccacattttccctctgcatatccctagcaggggttctccatgagggccttgcccctgaagcaaactttttcttggacatccatgcatttccayacaacctctaaaatctgggtggaggttcccaaaccac

SEQ ID NO: 572797 - DNA, 444 bp, Homo sapiens
gggcttgggcagctctgcccctgaggctttgcacagtacacactccctcctggctgctttcacaggctggccttaagtgtctgtggcttttccaagtgcacactacaaggtgtcagtggatctaccattctggactctgaaggacacagaccctcttctcatgattccactatgtgacaccccactatggactctgtgtgggagccccaaccccacattttccttycccactgtgccagcagaggttctccatgagggccccacccctgcagcaaacttctgcctgggcagtcaggcatttccatacatcttctgaaacctatgtgagggttcccaaacctcagttcttgacttttatgcacccacaggctcaataccacatggaaactgccaaggcttggggctcgtacccacagctggagtggctggaatgcagtgcaccaa

SEQ ID NO: 572798 - DNA, 444 bp, Homo sapiens
gggcttgggcagctctgcccctgaggctttgcacagtacacactccctcctggctgctttcacaggctggccttaagtgtctgtggcttttccaagtgcacactacaaggtgtcagtggatctaccattctggactctgaaggacacagaccctcttctcatgattccactatgtgacaccccactatggactctgtgtgggagccccaaccccacattttcctttcccactgtgccagcagaggttctccatgagggccccacccctgcagcaaacttctgcctgggcagtcaggcatttccatacatcttctgaaacctatgtgagggttcccaaacctcagttcttgacttttatgcacccacaggctcaataccacatggaaactgccaaggcttggggctygtacccacagctggagtggctggaatgcagtgcaccaa

SEQ ID NO: 572799 - DNA, 544 bp, Homo sapiens
ttcctccacatccaggtgaggagtaactgaagtcacttcacaaatttctccacactttakaggcaaaaatgttggcacttgctgaccaaagactgcataagttttcacattctgtgacctatgttttaatcttaacgttcattgttttgttccacaaagtagaaaacaaaatataagaggaggaggtggaaatcagtggtaccaagcaaaatgtctgcaaggcctgagacagcaaatcttgccatgtcatactcttagctattatctatagaggctgcgcaatgactttccgctttgcttctcttgttcatgttcaaagcctttgttcagtaaacaggtgttgctgatcttggaagaggaataataggggctggagcctctaacacaatcatgtaaaacactgatgatattttggcttaaaaataaagcatccccagtgacagagcctgctgaaatcagtagaatttatgaacttacttatttatttgccttctgtctgaacaagaatcttaccatggaattaaaattcagcagacagaaaccc

SEQ ID NO: 572800 - DNA, 544 bp, Homo sapiens
ttcctccacatccaggtgaggagtaactgaagtcacttcacaaatttctccacactttataggcaaaaatgttggcacttgctgaccaaagactgcataagttttcacattctgtgacctatgttttaatcttaacgttcattgttttgttccacaaagtagaaaacaaaatakaagaggaggaggtggaaatcagtggtaccaagcaaaatgtctgcaaggcctgagacagcaaatcttgccatgtcatactcttagctattatctatagaggctgcgcaatgactttccgctttgcttctcttgttcatgttcaaagcctttgttcagtaaacaggtgttgctgatcttggaagaggaataataggggctggagcctctaacacaatcatgtaaaacactgatgatattttggcttaaaaataaagcatccccagtgacagagcctgctgaaatcagtagaatttatgaacttacttatttatttgccttctgtctgaacaagaatcttaccatggaattaaaattcagcagacagaaaccc

SEQ ID NO: 572801 - DNA, 518 bp, Homo sapiens
gagaatcgctttagccccagagtcagaggttgcagtgagccgagactgtgccactgcactctagcctggctgacagagtgagaccctgtctcaaaaataataataataataatagtacgtacctcaaagggctgttgtgtagtttaaatgaatcaatacatacagcatttagaattgtacctggcagataggaagcattcatttggaaagaagagttgagagttgagcagatctcagattttgcaagatcttgaatctgaaataaagcagtctaatgtcattctataagcaaaaatactttccatttgcagctcaaagattttgatcagaaatctgtattttagaagcttaacatcacagcagggtgagtctgggttgaaagtgggagacactggaggcagagacactggtttagaggcagacatgataatctcactgtgggcaattttargcacccaaccatggtaatggccaaggaagaaacatgctggagacgccctggagaaggtgctctggac

SEQ ID NO: 572802 - DNA, 643 bp, Homo sapiens
tacctacaatgaagtatctcttccacacacatactcccagatgtgcaaaacttcttacatctcctattagacatggtaaaacattcactcttctcgtatgtactgtgtaagaatgactaaaattgattacacaacacctaaatatttaaaaaaaatctgccagatttagggatattttaatggcacctaaaagactgtcatgaatgccaggatccatggagcaaattattaaactctatgagctcaaaacattttaacacctgtgtgatccccatacccccttgatccaggttgtgataaagatgtgaagtgcacagagctgaaacccgagtagccattggaggctgtcctgccatggtaacataatttactgtgtcattaccattgttatcgcatcctccgcttcaaagcacatggtatccaggtgataaattactgaatctgacatttctyaatattcataaagtactttgataaaaagaacttggtttccttatctaaatgtgcaatttcaagacaataggctctctgaagaggattaaattcctgagagtttagttaaatgagagataattagaaattttaggctctttctgatatgggacaattccagaagcagtagcagtaactctatcctgtttat

SEQ ID NO: 572803 - DNA, 433 bp, Homo sapiens
acagtatcacaatcaggtttctgttatttttggttgggtactcactaataaattcactagatggtgagcgccttgaaggcaagagctatgtctttattccaatttcttaagaaatattatagtaaatatagtggaaataggctctgacttccaaatttgttggatataaaaccttcagaaagttatgaaacctctctatgcttccactgycatatcataaaaacacgaaaaatactcatcttgcagttcagatttaagaattagcaataacattcatataacatgagtacaaggcctgagagaaagcccaatagatggacccttatgttgtttggtgttatttgaatctctagaacctagcccagcacttggctcataggttatagtcacaaatttatatttactgcattaaatcagaaggaaaaacatcact

SEQ ID NO: 572804 - DNA, 593 bp, Homo sapiens
tgcagcaaaccaccatggcacacgtatacccatgtaacaaacctgcacattcttgtacgtgtatcccttttttttttttagaagaaataaaggaaaactaaaataaaaaaattaaatatggtactgaagcaaataaaccactaatagctgaaaaaaaaatttagtctgacaatgtttgttttttcaccgagtttacttcattgacttarattgttagaatggatcagttttattgtgtcctaccatcttactttatgctttttattttgctaactatgtatttttcatttttttattttcttgctctttttttttatgtatttacttttccgcagctgtcatgatcagttaacttctcattgtgaaagatgaggatttatctctttgttagttttctttccttctatcttcctatctccactactacatgaaagattacaacaccataatcctccccaaataatcagattttaattgtgtttagatcacaggtcagggtttacctcattgtgaccactgaaacttatttacacctgaaccacatagtatactatcattatttttattttccacaacaacattttcacacaaag

SEQ ID NO: 572805 - DNA, 593 bp, Homo sapiens
tgcagcaaaccaccatggcacacgtatacccatgtaacaaacctgcacattcttgtacgtgtatcccttttttttttttagaagaaataaaggaaaactaaaataaaaaaattaaatatggtactgaagcaaataaaccactaatagctgaaaaaaaaatttagtctgacaatgtttgttttttcaccgagtttacttcattgacttaaattgttagaatggatcagttttattgtgtcctaccatcttactttatgctttttattttgctaactatgtatttttcatttttttattttcttgctctttttttttatgtatttacttttccgcagctgtcatgatcagttaacttctcattgtgaaagatgaggatttatctctttgttagttttctttccttctatcttcctatctccactactacatgaaagattacaacaccataatcctccccaaataatcagattttaattgtgtttagatcacaggtcagggtttacctcattgtraccactgaaacttatttacacctgaaccacatagtatactatcattatttttattttccacaacaacattttcacacaaag

SEQ ID NO: 572806 - DNA, 451 bp, Homo sapiens
tgttcattttgttttctgtgtgtktattgctaaataaatctaatactttttatttctatacattttctctcattctaacatactatatagccctactcattagtgatgtaaggagtctttcatgtgcttatcactactaatcattaggggaatacacatctcaacaccaatgagacattgcttcacacataatatgatggctactattaagaaaaaaaaaagcaccacaaaatttcaagtgtcagctaggtcgtggaaaaatagggcatcttgtgccctgttggtgggaatgtaaaatggtgcaggtgctatggaaaacagtatggtgggtcttcaaaaaattaaaaagagaattaccgtgtgacttagccattcctcttctgggtatatgcccacatggtctgaaagtagagtgttgaagagatacttgcatattatgtacatagtagca

SEQ ID NO: 572807 - DNA, 451 bp, Homo sapiens
tgttcattttgttttctgtgtgtgtattgctaaataaatctaatactttttatttctatacattttctctcattctaacatactatatagccctactcattagtgatgtaaggagtctttcatgtrcttatcactactaatcattaggggaatacacatctcaacaccaatgagacattgcttcacacataatatgatggctactattaagaaaaaaaaaagcaccacaaaatttcaagtgtcagctaggtcgtggaaaaatagggcatcttgtgccctgttggtgggaatgtaaaatggtgcaggtgctatggaaaacagtatggtgggtcttcaaaaaattaaaaagagaattaccgtgtgacttagccattcctcttctgggtatatgcccacatggtctgaaagtagagtgttgaagagatacttgcatattatgtacatagtagca

SEQ ID NO: 572808 - DNA, 451 bp, Homo sapiens
tgttcattttgttttctgtgtgtgtattgctaaataaatctaatactttttatttctatacattttctctcattctaacatactatatagccctactcattagtgatgtaaggagtctttcatgtgcttatcactactaatcattaggggaatacacatctcaacamcaatgagacattgcttcacacataatatgatggctactattaagaaaaaaaaaagcaccacaaaatttcaagtgtcagctaggtcgtggaaaaatagggcatcttgtgccctgttggtgggaatgtaaaatggtgcaggtgctatggaaaacagtatggtgggtcttcaaaaaattaaaaagagaattaccgtgtgacttagccattcctcttctgggtatatgcccacatggtctgaaagtagagtgttgaagagatacttgcatattatgtacatagtagca

SEQ ID NO: 572809 - DNA, 284 bp, Homo sapiens
gttactatttcaaattatgttgtttacaatttttttgtttgtttgtttattgtctgtctcctttataagtctctaaaattgtragggcaaaaaccttgtccatatttttctttgtggtatttccagcatataattcagtgactgctaaatagtaaatgctcagtaaaggttggttgaataaacaccaacttcataagtgataatagccaagttttccagagctgactatgcgtcaggtactgatctgatccttacataaataatcttatttgcagcccccatat

SEQ ID NO: 572810 - DNA, 284 bp, Homo sapiens
gttactatttcaaattatgttgtttacaatttttttgtttgtttgtttattgtctgtctcctttataagtctctaaaattgtaagggcaaaaaccttgtccatatttttctttgtggtatttccagcatataattcagtgactgctaratagtaaatgctcagtaaaggttggttgaataaacaccaacttcataagtgataatagccaagttttccagagctgactatgcgtcaggtactgatctgatccttacataaataatcttatttgcagcccccatat

SEQ ID NO: 572811 - DNA, 567 bp, Homo sapiens
ttgaagggtgcatcatttactttggtgttwtaggggttttgggcacatgatccagacaaatctatggattccctgataatagaggctcattagaaacaaaggggtcatggcagagcgttgttcaatgcttcccctccttctcatacgcctcctattaatttccacttttgcattagcagagctggctgggacgcaggctccatttagctaaacgatgaaacacaaacgtttattgagactgtgcttcgaatcaacagggttttcctcagattgagttgccgccaattatcctccatgcaattatggtgatcccagaagcaagcagatggggaagagttttgttttcaaatggaggagaaaccaatatgtaggaagaaaaggcagcttgttcatttgaacagactccaggtggctggtcgccaaaaggcaaagagctggggagccgggtctggccctggatcagtccgactgcccacagaccagagaaaccaccgaaacaacagggttctgcctccactcatctcttttgccatctgccacgttggccgcgagagtggaggccacggg

SEQ ID NO: 572812 - DNA, 567 bp, Homo sapiens
ttgaagggtgcatcatttactttggtgttatakgggttttgggcacatgatccagacaaatctatggattccctgataatagaggctcattagaaacaaaggggtcatggcagagcgttgttcaatgcttcccctccttctcatacgcctcctattaatttccacttttgcattagcagagctggctgggacgcaggctccatttagctaaacgatgaaacacaaacgtttattgagactgtgcttcgaatcaacagggttttcctcagattgagttgccgccaattatcctccatgcaattatggtgatcccagaagcaagcagatggggaagagttttgttttcaaatggaggagaaaccaatatgtaggaagaaaaggcagcttgttcatttgaacagactccaggtggctggtcgccaaaaggcaaagagctggggagccgggtctggccctggatcagtccgactgcccacagaccagagaaaccaccgaaacaacagggttctgcctccactcatctcttttgccatctgccacgttggccgcgagagtggaggccacggg

SEQ ID NO: 572813 - DNA, 538 bp, Homo sapiens
taaacatggtgccatcttcaattatgtgaattcgtgcccttgactccaagtgttatagtgcataggtttggctccacatgctatatatttaaatgtataagtctccatttctgctgcttagattttgatcttcagcttgtgtatcttgagttccgcctgacctccttctcagaytcactcctctctcatcttagatctgtgctcctttatgctgcatagcttattatgtcattggtaactgtcttttgtgccagtccctagcttctgctcaaccccacatgttttgcttggccttctcttaagtggtatccaatccttccctgagccctggaatacctgttgacaggcagggagcagcagtagtgctatataagtacttacgcatatgtttcttgctaacttaagcctgttcgagcactacactataatcttgcttctgacaagagaatcctgcaatggcaacatgaatactatttaaaaactcacacacacacacacacacacacacacacacacacacacacccctaacaaaacat

SEQ ID NO: 572814 - DNA, 637 bp, Homo sapiens
ccaaggtaattatttttataaatagaagaccaagaaatttttcttttttaaatactttgtaatgagaagtgaagtaacattgaaatttcacacagaggtttgccatttatcttttgacaaaatattaaaaacagttgttaaaatttaagttaaatatttctattttataaaaagatacatattttaagtttgctaaatttttgtgaaggaaatgacttccagcagtatgctatctgaaatatatatatatttatatgtatgtgtatatatatatacacacacatacattaaatatctctctcaaagaaaagggtgaaatttaaaacataagtgagaaagtaaaaggtaatttttaaaaawtctctctattcagagagcatttcagaaatggatatttagaagttttcattgctttgtaattttattgctgaaagtttattgctttgtcatttattgctgaaaataatgtcacatgtaaaatctcttgtatctacaaaattggatgtacttacaaaattgaaaaactaaattttctcacctgtttaaaaatcttccaaatgattttgttcagtgagtttgaacccattagtttaaaaaaaatcagaaaattatcacattccaatttgtttgttaaggg

SEQ ID NO: 572815 - DNA, 637 bp, Homo sapiens
ccaaggtaattatttttataaatagaagaccaagaaatttttcttttttaaatactttgtaatgagaagtgaagtaacattgaaatttcacacagaggtttgccatttatcttttgacaaaatattaaaaacagttgttaaaatttaagttaaatatttctattttataaaaagatacatattttaagtttgctaaatttttgtgaaggaaatgacttccagcagtatgctatctgaaatatatatatatttatatgtatgtgtatatatatatacacacacatacattaaatatctctctcaaagaaaagggtgaaatttaaaacataagtgagaaagtaaaaggtaatttttaaaaattctctctattcagagagcatttcagaaatggatatttagaagttttcattgctttgtaattttattgctgaaagtttattgctttgtcatttattgctgaaaataatgtcacatrtaaaatctcttgtatctacaaaattggatgtacttacaaaattgaaaaactaaattttctcacctgtttaaaaatcttccaaatgattttgttcagtgagtttgaacccattagtttaaaaaaaatcagaaaattatcacattccaatttgtttgttaaggg

SEQ ID NO: 572816 - DNA, 530 bp, Homo sapiens
gctctgtcgcccaggctggaatgcaatggcacagtcttggctcactgtaacctctgcctcccggggtcaggcgattctcctgcctcagcctctcaagcagctgggattacaggcacacaccaccacacctggctaatttttgtatttttagtagagatggggtttcaccatgttggtcaggctggtctcgaactcctgacctcgtgatccaccctcattggcctcccaaagtgctgggattacaggtgtgagccacggagcctggccgtcaaactatttttaaaaactgaagaactatatattcttcctaactgttctatgagcattgccctgataccaaaaccgggcatggacacaacaataaaaaaaactactggctaatatccatgatgaacaaaaatgcaaaaatcctcaataaaatgttagccagctgaattcaagaacacatcaataagataatataccatgatcaagtgggatttatcccatagatagaagtatgrttgaacatatgaaacatcaataaatct

SEQ ID NO: 572817 - DNA, 524 bp, Homo sapiens
gctctgtcgcccaggctggaatgcaatggcacagtcttggctctgtgtcacctgygcctcccggggtcaggcgattctcgcgcctcagcctctcaagcagctgggattacaggcacacccccccacacgtggctaatttgtgtatttttagtagagatggggtttccccatgttggtcaggggtggtctcgaactcctgacctcgtgatcccccctcattggcctcccaaagtgctgggattacaggtgtgagccacggagcctggccgtcaaactatttttaaaaactgaagaactatatattcttcctaactgttctatgagcattgccatgataccaaaaccgggcatggacacaacaataaaaaaaactactggctaatatccatgatgaacaaaaatgcaaaaatcctcaataaaatgttagccagctgaattcaagaacacatcactaagataatataccatgatcaagtggggatttatcccatatatagaagtatggtgtgaacatatgaaacatc

SEQ ID NO: 572818 - DNA, 524 bp, Homo sapiens
gctctgtcgcccaggctggaatgcaatggcacagtcttggctctgtgtcacctgcgcctcccggggtcaggcgattctcgcgcctcagcctctcaagcagctgggattacaggcacacccccccacacgtggctaatttktgtatttttagtagagatggggtttccccatgttggtcaggggtggtctcgaactcctgacctcgtgatcccccctcattggcctcccaaagtgctgggattacaggtgtgagccacggagcctggccgtcaaactatttttaaaaactgaagaactatatattcttcctaactgttctatgagcattgccatgataccaaaaccgggcatggacacaacaataaaaaaaactactggctaatatccatgatgaacaaaaatgcaaaaatcctcaataaaatgttagccagctgaattcaagaacacatcactaagataatataccatgatcaagtggggatttatcccatatatagaagtatggtgtgaacatatgaaacatc

SEQ ID NO: 572819 - DNA, 524 bp, Homo sapiens
gctctgtcgcccaggctggaatgcaatggcacagtcttggctctgtgtcacctgcgcctcccggggtcaggcgattctcgcgcctcagcctctcaagcagctgggattacaggcacacccccccacacgtggctaatttgtgtatttttagtagagatggggtttcmccatgttggtcaggggtggtctcgaactcctgacctcgtgatcccccctcattggcctcccaaagtgctgggattacaggtgtgagccacggagcctggccgtcaaactatttttaaaaactgaagaactatatattcttcctaactgttctatgagcattgccatgataccaaaaccgggcatggacacaacaataaaaaaaactactggctaatatccatgatgaacaaaaatgcaaaaatcctcaataaaatgttagccagctgaattcaagaacacatcactaagataatataccatgatcaagtggggatttatcccatatatagaagtatggtgtgaacatatgaaacatc

SEQ ID NO: 572820 - DNA, 384 bp, Homo sapiens
atgttaattgtgggcttttcataaataccatttataaaatttgaactcacagaagcaaagaatagagactgggactggaggaggatagggagatgttcaaagattgcagagtttcagttagaatgaacaagtttggagatctatgtacaacatggtgattatagttaataataatgctttgtatatttaaacattgctaagatttgattaaatgttctcaccgcagacaaactgatacatacataagatgttgatatcttaattggcttgatgtaatcattttacattatatatgtctatcaaatcatcacattagayactataaatatataccatttttatttattaatgttacctaaataaagctggaggaaaataaaaaaa

SEQ ID NO: 572821 - DNA, 628 bp, Homo sapiens
ctttgaataattaaaaactgagaacagatataaaaccattgctttaaaattgttcagtgtgatacagagaaatatttcttctttgatcactataaccaaactccctcaaaataaattgcctgtgttaatttaaaaaaaatcttgtcatgtattttacaggatatttggacaatagcagccgaaggcttttttaaaaaaactgtatacattggataagagaaatgacttcaacatatggctagttttgcagctataacttagcagatggttaatactgtttgaaaaactaaaataaaatttgttagcatcttaatataccacgtgatcttatttaccttttaaattactgctgtatctttctataatgtaaattgctttaattatggcaaaataaccaaaataatagaaaatacttgttaaatataagaaaaggaagtaaaaaaataacaatttactacaagaataatacttttttattccataaagtcttcaaataaaagtatagtaaaacactaatctaattacctcgytgtaagttctactaaataatgtccaccatgtcttgcatgtgtaactcttactctaatgccagctcaaacattagtgttaattattctaggtccgcaag

SEQ ID NO: 572822 - DNA, 484 bp, Homo sapiens
ttgggatccaatttttggggtatactgtctgcttgcatgtacgtactcaccccattgcttgctgaataattgtacgtttaaatccagttgtattaattatgttggaggtaagtagaattcattcatctctgctaatgaaagaatatagcttaattctataatttagtattaatttttgagctttagttcaggaatattcaattaaacagccactaatactatttgaagtttccaaggttttatttatttattattcctagaatttaattaatttagtagagggtctayctaaggcttcttttttatttattatgtcaacctttattttagattcagcaggtacatgtgcaggtttgttacatgggtttactacatgatactgaggtttaagatatgattgattctgtcacccgggtactgagcatagtaccaatagttaatttttcaacctttgtccaccgtctttctctccccactctaacag

SEQ ID NO: 572823 - DNA, 484 bp, Homo sapiens
ttgggatccaatttttggggtatactgtctgcttgcatgtacgtactcaccccattgcttgctgaataattgtacgtttaaatccagttgtattaattatgttggaggtaagtagaattcattcatctctgctaatgaaagaatatagcttaattctataatttagtattaatttttgagctttagttcaggaatattcaattaaacagccactaatactatttgaagtttccaaggttttatttatttattattcctagaatttaattaatttagtagagggtctatctaaggcttcttttttatttattatgtcaacytttattttagattcagcaggtacatgtgcaggtttgttacatgggtttactacatgatactgaggtttaagatatgattgattctgtcacccgggtactgagcatagtaccaatagttaatttttcaacctttgtccaccgtctttctctccccactctaacag

SEQ ID NO: 572824 - DNA, 484 bp, Homo sapiens
ttgggatccaatttttggggtatactgtctgcttgcatgtacgtactcaccccattgcttgctgaataattgtacgtttaaatccagttgtattaattatgttggaggtaagtagaattcattcatctctgctaatgaaagaatatagcttaattctataatttagtattaatttttgagctttagttcaggaatattcaattaaacagccactaatactatttgaagtttccaaggttttatttatttattattcctagaatttaattaatttagtagagggtctatctaaggcttcttttttatttattatgtcaacctttattttagattcagcaggtacatgtgcaggtttgtyacatgggtttactacatgatactgaggtttaagatatgattgattctgtcacccgggtactgagcatagtaccaatagttaatttttcaacctttgtccaccgtctttctctccccactctaacag

SEQ ID NO: 572825 - DNA, 467 bp, Homo sapiens
taagtgtatattatttactgtgtattttccaatgaaaaaataattgttaggatggaaaagtccatttttaatcttttataatcttagtgcctttggggaaaagacaaaaactattcaaagataaatatgttttttacrttatgcaaaaacaaacattgtatgaatacaattcttcctcaggtatgttcatttgatgaaatagtattgagtgttttctgcttctttctggaaacatcatggttcagctgcccttattctcttgcacagcaattacttcatctaattatatttactgtatctatttcttttatggattacaataagattagcaatgttgtaagcaaggggactgcctaatcttcttgtcaacagttatgacaacaaatggttttccctcctttgccctcaagtaggtgttagtacatggcctttcacccctttaatgctgccattaacattcatgaacc

SEQ ID NO: 572826 - DNA, 467 bp, Homo sapiens
taagtgtatattatttactgtgtattttccaatgaaaaaataattgttaggatggaaaagtccatttttaatcttttataatcttagtgcctttggggaaaagacaaaaactattcaaagataaatatgttttttacattatgcaaaaacaaacattgtatgaatacaattcttcctcaggtatgttcatttgatgaaatagtattgagtgttttctgcttctttctggaaacatcatggttcagctgcccttattctcytgcacagcaattacttcatctaattatatttactgtatctatttcttttatggattacaataagattagcaatgttgtaagcaaggggactgcctaatcttcttgtcaacagttatgacaacaaatggttttccctcctttgccctcaagtaggtgttagtacatggcctttcacccctttaatgctgccattaacattcatgaacc

SEQ ID NO: 572827 - DNA, 246 bp, Homo sapiens
gtagctacatcagtggtcataggattctgttggcatcttcatggaaatattagcatgagagcatgagtctactgaaagtttctattgacagtttctccttttttttyttttttttttttttttttttttgagacagcatctctctctgttgcccaggctggagtgaagtaatgtgatctcagctcactcaacttctgccttccaggttcaagcaattctcgtgcctcggccacccaaatagctggg

SEQ ID NO: 572828 - DNA, 584 bp, Homo sapiens
aatattttccaactatgtatctggcaaagaaaaaatatccagaatctataaggaatttaaataaatcaataagaaataaaaaaaacaaataaccccattaaaaatgggtcgagtatagaaacagacacttctcaaaagaagacataaaagtggccaacaaacacataaaaaagtgctcaatatcactaatcatgagagaaatgcaaatcaaaaccacgaggtaccatctcatagtagtcagaatgccttttgtttaaaaagtcaaaaagtaagatgttggtgaggttgtcgagaaaaagaaacacttatacactgttgatcggagtgtaaattagttcagcccctgtgaaaagtagtttggagatttctcaaaaactaaaagtagaactatgatttaagccaatctcatcacatactcaaaggaaaataaagatacatgcactcatatatgtttattgaaatactactcacaatagcaaatatattmaattaatgtagatgtccatcagtggtgcaccggataaagaatatatggtacacatacaccatggaattctatgcagtcataaaaaagtgaaatcatg

SEQ ID NO: 572829 - DNA, 526 bp, Homo sapiens
aacaacaactctttatgaaaatctagcatgcgttttaggatcctgttggccacatgacatacacagttttcttgcttctcagggaatatgccatcatgtaaattcaacctacatgtaaagttgttttctcaggtttggccatatgtggctttgaaattgaaatatgttttcatttagttccccaaaarctctgcaataatgaacacatttctaatgtgctgaagaaaatgggcccaagtggccactgaaataggctatggaaaaaagggaaaataattaagacttaaatttaggaacatatttaattatttatcagaagaatgacttggtgggataacagtgttgtgaagttacaaatattatggttgtttacttattttcatagagtctatgttgtagaaaaatactggaccaggtataaattcaaatctgctttgcaatgtgaactctaaaactatttttctttgaaatagagttcctcctgaaatgattaaatatgagtgaacttttcagttaccacattttt

SEQ ID NO: 572830 - DNA, 422 bp, Homo sapiens
ctgctgtttctgtcctctttcaggggaccacgtgctattttctgccmcctttccagtcccctatcattccctgacactcttgacctcaagctcatcaacaaggaaataaacttacaaatttgtttagaaaataaactgcttgtatttcctaagtttttctgtcctgaatatgaacagctttttgttcttatgttttggtttttgtaacacacatatctataaagatatgtgtgtgtatgtatatgtatatacttttttaaaacattttgctagatggaaattaatcacagaaatggccaagatggataatggaataaaatgggtgaaagactgtggcactcaaaaccagatgaaactcacggctgtcaatgtcttgtgaataaactgaaaactaatttttaatccaatcagtgctattgcct

SEQ ID NO: 572831 - DNA, 552 bp, Homo sapiens
gataatgatttagaatctgatggtgtgtatatctatctacacacacacacacacacacacacacacacacacacacacaactctgactcaaaaggagatgactgctgtttctgtcctctttcaggggaccacgtgctattttctgccccctttccagtcccctatcattccctgacactcttgacctcaagctcatcaacaaggaaataaacttacaaatttgtttagaaaataaactgcttgtatttcctaagtttttctgtcctgaatatgaacagctttttgttcttatgttttggtttttgtaacacacatatctataaagatatgtgtgtgtatgtatatgtatayacttttttaaaacattttgctagatggaaattaatcacagaaatggccaagatggataatggaataaaatgggtgaaagactgtggcactcaaaaccagatgaaactcacggctgtcaatgtcttgtgaataaactgaaaactaatttttaatccaatcagtgctattgcctgactgagtgaccaagtgggagtccccgta

SEQ ID NO: 572832 - DNA, 508 bp, Homo sapiens
ccgagatcacgccactgcactccagcctgggcaactaagcgagactccatctcaaaaaaaaaaaaaaaaaaaagaaagaaaaagaaaacacacagatatctaatgagataaatctataaagacaataggaaaaagctgaggatgataataatggttgctgttgattcaggatccaatatattcaaagagctttctatatatcacctcatttaatcctctcaataatttttgaccccattagggggtcaaattcttgaccgcattagaggccgagaagaaatcaagtgcccaaatagagaaagaataaaaggagaaaccaaagagaaataagagaaatgtgtggtataagaaggcgaatgcctagaacatgtgccacttctctctttttcaggcytgtgacaagcatgttaatcaatcacagcatcctagatgtaacttgaatttttttctccacacaacactccaagcacccattactatgtggtagaagcaagcactcaattttaaa

SEQ ID NO: 572833 - DNA, 508 bp, Homo sapiens
ccgagatcacgccactgcactccagcctgggcaactaagcgagactccatctcaaaaaaaaaaaaaaaaaaaagaaagaaaaagaaaacacacagatatctaatgagataaatctataaagacaataggaaaaagctgaggatgataataatggttgctgttgattcaggatccaatatattcaaagagctttctatatatcacctcatttaatcctctcaataatttttgaccccattagggggtcaaattcttgaccgcattagaggccgagaagaaatcaagtgcccaaatagagaaagaataaaaggagaaaccaaagagaaataagagaaatgtgtggtataagaaggcgaatgcctagaacatgtgccacttctctctttttcaggcttgtgacaagcatgttaatcaatcacagcatcctagatgtaacttgaattttyttctccacacaacactccaagcacccattactatgtggtagaagcaagcactcaattttaaa

SEQ ID NO: 572834 - DNA, 508 bp, Homo sapiens
ccgagatcacgccactgcactccagcctgggcaactaagcgagactccatctcaaaaaaaaaaaaaaaaaaaagaaagaaaaagaaaacacacagatatctaatgagataaatctataaagacaataggaaaaagctgaggatgataataatggttgctgttgattcaggatccaatatattcaaagagctttctatatatcacctcatttaatcctctcaataatttttgaccccattagggggtcaaattcttgaccgcattagaggccgagaagaaatcaagtgcccaaatagagaaagaataaaaggagaaaccaaagagaaataagagaaatgtgtggtataagaaggcgaatgcctagaacatgtgccacttctctctttttcaggcttgtgacaagcatgttaatcaatcacagcatcctagatgtaacttgaatttttttctccacacaacactccaagcamccattactatgtggtagaagcaagcactcaattttaaa

SEQ ID NO: 572835 - DNA, 508 bp, Homo sapiens
ccgagatcacgccactgcactccagcctgggcaactaagcgagactccatctcaaaaaaaaaaaaaaaaaaaagaaagaaaaagaaaacacacagatatctaatgagataaatctataaagacaataggaaaaagctgaggatgataataatggttgctgttgattcaggatccaatatattcaaagagctttctatatatcacctcatttaatcctctcaataatttttgaccccattagggggtcaaattcttgaccgcattagaggccgagaagaaatcaagtgcccaaatagagaaagaataaaaggagaaaccaaagagaaataagagaaatgtgtggtataagaaggcgaatgcctagaacatgtgccacttctctctttttcaggcttgtgacaagcatgttaatcaatcacagcatcctagatgtaacttgaatttttttctccacacaacactccaagcacccattactawgtggtagaagcaagcactcaattttaaa

SEQ ID NO: 572836 - DNA, 540 bp, Homo sapiens
agatctgcctggatgttttcagagtggagaggaccagggccacagggagctcaggtcagcaggttgcttcctgcttgcaaccaatatatccaataagctcattcaataaatgcaagtgtagagactgttttgaaactggcttttctggcaattacttttaattctgcccacaggcctttggaacagagaaatgtctttcaaatctttcacttcatggagtgggtaagcagttgtattatttctgggggtagtcacttcccctccatgacatgcgaatattgctagaaatattagagtttccratttctctaggagaaatctgggcattttctggaatggggaaagatgagacatgctggcctcaatgcaaattgtctatgaggcagactttcagaaccgttttggtagctctgatttttgacaaaatccattgctaggttattctgcaagttatgggaatgtttctgggtttttctaagtgtttgggcaactccttattcttgggcaattttctaattttatttattattattttgttgt

SEQ ID NO: 572837 - DNA, 581 bp, Homo sapiens
gcgttgataactagacaacagttttctggttagagttgtgaaaactggaaaagtaaatactgttcctccacgcatttaatgaaggtgacaccatctcctcatatttctgtttcttcctttttcatagatgtcagcagcaaggttggctgtccataaattttagtttctaaaacacagagcacagcctttgccagggaccaaagtgagtaatgtttccttgggttttaaagcttcccagtgtggactataaaactacaattataaatatatgcttttatagcaacttattttttgacaattgcttagggaataacccacattgtaaaagcagcagcatattttgctattcattcatgttattaatttaacatgatttaattaacgtttatgaagttcctacatatctgtcactacactaagccataaatctacagaaattagaggttagaccttgtctgttcagtaaagtcagagatggccttcctgagaaaactacttttaacagacctgaaggatgtgcaggatttaggtacactacaaagtagaaagaacattcccygcagtgaggccatcatgtggca

SEQ ID NO: 572838 - DNA, 578 bp, Homo sapiens
gtctcaaaacaaataataaaataaaattaaattaaaattgtaagtacctttatattagtattgattttaaatatcattttatattcttctgagaagtcctcagtcaatctttggagtgcatataacatattgtagaaaccaaattcacttctgtggaaattaactataaactgacaataataaagagatgtagacaagtagaataaggctgttagaaccagaaaaaattgtagagattctttcattaaaccatctctttttaaccacataaagttgytaaaggataaaatatctacataattaaaaaaataccatcataaatttgttctttaggtattttaaggtagaaaataagaaacttaataaaaatcaaacaaataaaaatataattcaatttatagtgaacaaaaatattttaaaggcaaactcaaaaaaagcatttccaacaattttagaacatgataaattatactgttacctgtgctgccattatatcaaagtaaccagtcaattcagtcataattgaatcataatgacaaaagagctaatttattttcttcattttttcattgtaaatt

SEQ ID NO: 572839 - DNA, 530 bp, Homo sapiens
tttaaagtcactattttgaccatactcaattacataaaagaaaatacttctccacttaatgaaagatgggaaatatgagcaaagaaataataatgattaaaaagaccaaatgtatcttgatttttaaaaatgcaatagtgaaaaaaaaaacagaaaacaaaatgactaaatagaattaacagcagaatggagtcagcagaggaacaagtcagtaaacctcaaaatagatcaacagaaatgctgaaaagtaaataaacagagcctccaaatattgttagatactaaataacctaacataagtgtcattggttgtccatcagggaaaaagagggaaaggcataaatatatttaaaamgtaatggttgaaattttctaaaatttgaataaagatttatattacagatttaatgaagaatacttaaaatgaaaaatatctgggtaagcataacattctgttttaattatttattttattctttccttaatttcttaatactgcatattactgtttaaagtaaaactgtaatcat

SEQ ID NO: 572840 - DNA, 420 bp, Homo sapiens
taatcatttgtactttttccttgttacaacacttcttaagtaacttcttatacaaagtctataaacagtctcaggacaataacaactccattctagaaagaatatcccaacatttcttctrtctcaaccccaactgcatctgcctgtcaacttccagcttaccaaagctctgtatcttctgacagtgacaaaggctccttctatggttggtgtgagcagactttgatgtctgcagggcagacacccaggaataatcaactgggccttcagtggcccccttttgcagggtcaacgttagccttagcttttagtcaatggtctaagacttctacttaccagttaaagtcattcaattagttttcaatttaaaaaatacttcatgtttgaagaatccagcaaaaatcattcaaatctaaggtt

SEQ ID NO: 572841 - DNA, 420 bp, Homo sapiens
taatcatttgtactttttccttgttacaacacttcttaagtaacttcttatacaaagtctataaacagtctcaggacaataacaactccattctagaaagaatatcccaacatttcttctatctcwaccccaactgcatctgcctgtcaacttccagcttaccaaagctctgtatcttctgacagtgacaaaggctccttctatggttggtgtgagcagactttgatgtctgcagggcagacacccaggaataatcaactgggccttcagtggcccccttttgcagggtcaacgttagccttagcttttagtcaatggtctaagacttctacttaccagttaaagtcattcaattagttttcaatttaaaaaatacttcatgtttgaagaatccagcaaaaatcattcaaatctaaggtt

SEQ ID NO: 572842 - DNA, 585 bp, Homo sapiens
tcatatatggaatcaatataatgacaattgttttaaaatttcagatgttttactttcctggcacatcccaggttttagagcaggcagcctgagatttcaaaagggaggcaattctctaagaaataatatgagaggcacaagtgaattttaaatattttggtaactacattttaataagtacaccgggcatgcttccctgtgcctgtaggtcgaactattagggagactraggtgggaggatcacttgagaccaggagtttgagaccagcccaggcagcatagagaaagccatctcttccaaaaaaaaaaaaaaaaaaaaaaaaaaaaaattgaaaaattagccaggcctggtggtgcatgacttcagtcccagctactcagaaggctggagctggaggatcacctgagcctgggaggtcaaggctgcaatgaaccatgatcacacaactgcactccagcctggctgacggagcaaaaccctgtctcaaaaaactgatctctggaaaggcattttgtttttctgcaatgtagccaagcagctaagtatgtattgaagccatcctttaatttttaacagggcaagaa

SEQ ID NO: 572843 - DNA, 585 bp, Homo sapiens
tcatatatggaatcaatataatgacaattgttttaaaatttcagatgttttactttcctggcacatcccaggttttagagcaggcagcctgagatttcaaaagggaggcaattctctaagaaataatatgagaggcacaagtgaattttaaatattttggtaactacattttaataagtacaccgggcatgcttccctgtgcctgtaggtcgaactattagggagactgaggtgggaggatcacttgagaccaggagtttgagaccagcccaggcagcatagagaaagccatctcttccaaaaaaaaaaaaaaaaaaaaaaaaaaaaawttgaaaaattagccaggcctggtggtgcatgacttcagtcccagctactcagaaggctggagctggaggatcacctgagcctgggaggtcaaggctgcaatgaaccatgatcacacaactgcactccagcctggctgacggagcaaaaccctgtctcaaaaaactgatctctggaaaggcattttgtttttctgcaatgtagccaagcagctaagtatgtattgaagccatcctttaatttttaacagggcaagaa

SEQ ID NO: 572844 - DNA, 585 bp, Homo sapiens
tcatatatggaatcaatataatgacaattgttttaaaatttcagatgttttactttcctggcacatcccaggttttagagcaggcagcctgagatttcaaaagggaggcaattctctaagaaataatatgagaggcacaagtgaattttaaatattttggtaactacattttaataagtacaccgggcatgcttccctgtgcctgtaggtcgaactattagggagactgaggtgggaggatcacttgagaccaggagtttgagaccagcccaggcagcatagagaaagccatctcttccaaaaaaaaaaaaaaaaaaaaaaaaaaaaaattgaaaaattagccaggcctggtggtgcatgacttcagtcccagctactcagaaggctggagctggaggatcacctgagcctgggaggtcaaggctgcaatgaaccatgatcacacaactgcactccagcctggctgacrgagcaaaaccctgtctcaaaaaactgatctctggaaaggcattttgtttttctgcaatgtagccaagcagctaagtatgtattgaagccatcctttaatttttaacagggcaagaa

SEQ ID NO: 572845 - DNA, 585 bp, Homo sapiens
tcatatatggaatcaatataatgacaattgttttaaaatttcagatgttttactttcctggcacatcccaggttttagagcaggcagcctgagatttcaaaagggaggcaattctctaagaaataatatgagaggcacaagtgaattttaaatattttggtaactacattttaataagtacaccgggcatgcttccctgtgcctgtaggtcgaactattagggagactgaggtgggaggatcacttgagaccaggagtttgagaccagcccaggcagcatagagaaagccatctcttccaaaaaaaaaaaaaaaaaaaaaaaaaaaaaattgaaaaattagccaggcctggtggtgcatgacttcagtcccagctactcagaaggctggagctggaggatcacctgagcctgggaggtcaaggctgcaatgaaccatgatcacacaactgcactccagcctggctgacggagcaaaaccctgtctcaaaaaactgatctctggaaaggcawtttgtttttctgcaatgtagccaagcagctaagtatgtattgaagccatcctttaatttttaacagggcaagaa

SEQ ID NO: 572846 - DNA, 426 bp, Homo sapiens
cgagcttacagtggcgtgaaagcaggaatacagaggcaggacaaagacaggattgcacatgaccgttgccaagcaacccacatgtccattatctaggtttccctgggcatgggcttatcctataaccctcactatggttcccaaacagctgtagttcagcctactcaggcttctcatgactttcattgtacttcttcgataaaacacaatacttgaagtcactagttacagagaacaagaatctataaactcattccataaaacaaagggaatttgtttttcttttccctgtgttgggrgagtgttgggagaacctccagagcacattacataatattatcaagaattttcctgggtctgggctgtgcctattgctgcctctgggacaaatcagcctaatacaagaaaacttatttctctttcctt

SEQ ID NO: 572847 - DNA, 569 bp, Homo sapiens
gtgggctagcttgaagcgagcttacagtggcgtgaaagcaggaatacagaggcaggacaaagacaggattgcacatgaccgttgccaagcaacccacatgtccattatctaggtttccctgggcatgggcttatcctataaccctcactatggttcccaaacagctgtagttcagcctactcaggcttctcatgactttcattgtacttcttcgataaaacacaatacttgaagtcactagttacagagaacaagaatctataaactcattccataaaacaaagggaatttgtttttcttttccctgtgttgggagagtgttgggagaacctccagagcacattacataatattatcaagaattttcctgggtctgggctgtgcctattgctgcctctgggacaaatcagcctaatacaagaaaacttatttctctttccttttaatttcatttttctttaatttccttccttagtcctgcagcyctgtgaccaaaggactgggagtgcacagttacacatctgttcacttgtcatgagactgttttcctttacccccatgaacatact

SEQ ID NO: 572848 - DNA, 355 bp, Homo sapiens
gaatgtttgtccctcacatgggattccagaacactgctgcgagggtctaaatgtctgtccctcacataggtttccagcacaatggtaccaggttctgaatgtttgtccctaacatrggattccagagcactcctgctgtgctctgaatgcttctccctcacataggattccagaacactgctacgagggtctaaatgcttatccctcatataggataccagaacactcctgctgaggtctgaatgtttgttccttacataggattccagaacactcctgccgtggtctgaatgtttgtccctcacataggattccagaacattcgtgctggggtctcaatgtttcccttaactta

SEQ ID NO: 572849 - DNA, 355 bp, Homo sapiens
gaatgtttgtccctcacatgggattccagaacactgctgcgagggtctaaatgtctgtccctcacataggtttccagcacaatggtaccaggttctgaatgtttgtccctaacatgggattccagagcactcctgctgtgctctgaatgcttctccctcacataggattccagaacactgctacgagggtctaaatgcttatccctcatataggatwccagaacactcctgctgaggtctgaatgtttgttccttacataggattccagaacactcctgccgtggtctgaatgtttgtccctcacataggattccagaacattcgtgctggggtctcaatgtttcccttaactta

SEQ ID NO: 572850 - DNA, 355 bp, Homo sapiens
gaatgtttgtccctcacatgggattccagaacactgctgcgagggtctaaatgtctgtccctcacataggtttccagcacaatggtaccaggttctgaatgtttgtccctaacatgggattccagagcactcctgctgtgctctgaatgcttctccctcacataggattccagaacactgctacgagggtctaaatgcttatccctcatataggataccagaacactcctgctgaggtctgaatgtttgttccttacatargattccagaacactcctgccgtggtctgaatgtttgtccctcacataggattccagaacattcgtgctggggtctcaatgtttcccttaactta

SEQ ID NO: 572851 - DNA, 531 bp, Homo sapiens
ttcaagctgaacctttgctcattttaacaagtaaaaacacattcctgggtgaaatgtcattgcatgctaataagacatgaaacatatgcaaaaatatgtacagctactgcacatgtgcacccagaagaccactcaaagcatgccttctataacacttctttccaccttcttatgaataatcatgtaaaactcccagaaggagggtttctccagcaacaattaatgctgtctcactcttatgagcaggctgccctggaatctctttctcagactgtaccgtctattctgcacttgattttcaacgtattcttttcttttttgtgtgcaataaattactctatgctgtacttcttttgctgcatgtttcctgtttaaattcttttaagctaagaagataagaaccaaggtattacatcagccatcaacatttcttttgccatggcccggagagaggtttgtctgcttcattaatttcagtttcccttttcttgcartgaatactatggcacttccagactacctggttaacta

SEQ ID NO: 572852 - DNA, 390 bp, Homo sapiens
tggggtgtcactggaatggcaagatgcagatataaatgctgacaagacccaatttaaacccagagatgataaggtstgaacacatttggattattataggaatcaacgcaaagtttaataacataaaatccacccactcggaagttttttcaacattcctgtaaatagcttttgagttagctggaatcaaaatcataaatctttttaaaatgatgacagtgagaattcagcacatcagaacctgtggatgagaccaaagccaccaccagaagcaagttcacaaccttcttaattatagaccagagtgaaaataaatgaagccagtgctccagtcaagagggcagaagagagagcaaccatatacctaaagatgttgatacacatagcatg

SEQ ID NO: 572853 - DNA, 390 bp, Homo sapiens
tggggtgtcactggaatggcaagatgcagatataaatgctgacaagacccaatttaaacccagagatgataaggtgtgaacacatttggattattataggaatcaacgcaaagtttaataacataaaatccamccactcggaagttttttcaacattcctgtaaatagcttttgagttagctggaatcaaaatcataaatctttttaaaatgatgacagtgagaattcagcacatcagaacctgtggatgagaccaaagccaccaccagaagcaagttcacaaccttcttaattatagaccagagtgaaaataaatgaagccagtgctccagtcaagagggcagaagagagagcaaccatatacctaaagatgttgatacacatagcatg

SEQ ID NO: 572854 - DNA, 370 bp, Homo sapiens
ccagcagtctcagagcctgtgccttggcccacccatgtggcaggggcccgggtaagagccacataaaggaatgggacataatcaagagaaaagcagccacagatgggaaataacaagctccataaagatgatggggagaactaatatcactgtgagggcttgttagractctaattctcccgaataaagtgttcaaagcaagtgaaaacagaggttgtttaaaaggaaacaaaccaagccaggtgcagtggcttactcctgtaatcccagcactttgggaagccaaggcaggtggatcacttcacgccacgagttcgagaccagcctggccaacatggagaaaccctgtctctactaaaactacaaaaag

SEQ ID NO: 572855 - DNA, 370 bp, Homo sapiens
ccagcagtctcagagcctgtgccttggcccacccatgtggcaggggcccgggtaagagccacataaaggaatgggacataatcaagagaaaagcagccacagatgggaaataacaagctccataaagatgatggggagaactaatatcactgtgagggcttgttaggactckaattctcccgaataaagtgttcaaagcaagtgaaaacagaggttgtttaaaaggaaacaaaccaagccaggtgcagtggcttactcctgtaatcccagcactttgggaagccaaggcaggtggatcacttcacgccacgagttcgagaccagcctggccaacatggagaaaccctgtctctactaaaactacaaaaag

SEQ ID NO: 572856 - DNA, 618 bp, Homo sapiens
taaggtaaagattgatggtgtgtggaataaatattttgtgacatgatttgatgaagtaggttttaatgaccttattgaataacatgttaaattggaaggaaatcagtaaaaagcttatatgtagactttatccagcacatcttgaaagatctgatgacttcagaacacactgtggttatttaaagataatccacatcacttatatgtactactttgtcstgaactcagaactacccaggagtggccacccctactcttacagacttgcttgcaggacagggagagacagaaagtgctaaggcttcccccacccagtatttggaatcatttagtgtagcaccccatattaagatttgagatatgagtggtgtgactttcttttgtagagtgggtgaaagaatattgttgatgcccaaaggctctcaggcagtttcagaattagtacatatggaaattgaggatgtagaaactcatttttgtgaaactgtccctgctctagtacctttgggaagtccatttgaagactgctggaatagatcatggactcaataaataccttttcataggagcacagagggatgaacaaggcagactgaaggagagaataggaatgctccc

SEQ ID NO: 572857 - DNA, 618 bp, Homo sapiens
taaggtaaagattgatggtgtgtggaataaatattttgtgacatgatttgatgaagtaggttttaatgaccttattgaataacatgttaaattggaaggaaatcagtaaaaagcttatatgtagactttatccagcacatcttgaaagatctgatgacttcagaacacactgtggttatttaaagataatccacatcacttatatgtactactttgtcgtgaactcagaactacccaggastggccacccctactcttacagacttgcttgcaggacagggagagacagaaagtgctaaggcttcccccacccagtatttggaatcatttagtgtagcaccccatattaagatttgagatatgagtggtgtgactttcttttgtagagtgggtgaaagaatattgttgatgcccaaaggctctcaggcagtttcagaattagtacatatggaaattgaggatgtagaaactcatttttgtgaaactgtccctgctctagtacctttgggaagtccatttgaagactgctggaatagatcatggactcaataaataccttttcataggagcacagagggatgaacaaggcagactgaaggagagaataggaatgctccc

SEQ ID NO: 572858 - DNA, 618 bp, Homo sapiens
taaggtaaagattgatggtgtgtggaataaatattttgtgacatgatttgatgaagtaggttttaatgaccttattgaataacatgttaaattggaaggaaatcagtaaaaagcttatatgtagactttatccagcacatcttgaaagatctgatgacttcagaacacactgtggttatttaaagataatccacatcacttatatgtactactttgtcgtgaactcagaactacccaggagtggccacccctactcttacagacttgcttgcaggacagggagagacagaaagtgctaaggcttcccccamccagtatttggaatcatttagtgtagcaccccatattaagatttgagatatgagtggtgtgactttcttttgtagagtgggtgaaagaatattgttgatgcccaaaggctctcaggcagtttcagaattagtacatatggaaattgaggatgtagaaactcatttttgtgaaactgtccctgctctagtacctttgggaagtccatttgaagactgctggaatagatcatggactcaataaataccttttcataggagcacagagggatgaacaaggcagactgaaggagagaataggaatgctccc

SEQ ID NO: 572859 - DNA, 618 bp, Homo sapiens
taaggtaaagattgatggtgtgtggaataaatattttgtgacatgatttgatgaagtaggttttaatgaccttattgaataacatgttaaattggaaggaaatcagtaaaaagcttatatgtagactttatccagcacatcttgaaagatctgatgacttcagaacacactgtggttatttaaagataatccacatcacttatatgtactactttgtcgtgaactcagaactacccaggagtggccacccctactcttacagacttgcttgcaggacagggagagacagaaagtgctaaggcttcccccacccagtatttggaatcatttagtgtagcacmccatattaagatttgagatatgagtggtgtgactttcttttgtagagtgggtgaaagaatattgttgatgcccaaaggctctcaggcagtttcagaattagtacatatggaaattgaggatgtagaaactcatttttgtgaaactgtccctgctctagtacctttgggaagtccatttgaagactgctggaatagatcatggactcaataaataccttttcataggagcacagagggatgaacaaggcagactgaaggagagaataggaatgctccc

SEQ ID NO: 572860 - DNA, 513 bp, Homo sapiens
tattttgttctacaggttacacaaccttaatgggcaccagtttcctcccagcaaatatgagcacagatgggtttttcttacwccaaagactttccatcatactctgctcttaggctatccttggatttattttctacccacgccatttgttcttcccatccagggttgggatctcgatatgtgggctaggataccaaagggtttgggtgctcaccttctaatggccaccaggtctctgtaagcaaacactcttttttcatgtagccaacataaagggagacagagattcccagccacaacactggaatcttcatgggggctgtgtgcaggtttcttcatcttctccaccctatagagccctggagaagatgccatctccattacagcggggctttcccaggacatggaggtaattaggcatgatcttggtcattcttttggaagagtcagggatatctccatattcctgaatatcctaggcaagatggcaataaattcattaataatattatc

SEQ ID NO: 572861 - DNA, 594 bp, Homo sapiens
cctaaatcttttattattattatttcaataggtttttggggaacaggtggtgtttgtttacatgaataagttctttagtggaaatttctgagattttggtgcacccatcacctgagcagtgtacactgcacccaaagtgtagtcttgtatccctcaccctctttccaccctttctcctgagtccccaaagtccattgtattattcttctgcctttgtatcctcataacttaactcccacttatgagtgagaacatacaatgtttggttttccattcctgagttacttcacttagaataatggtctctaattccatccaggttgctgcaaatgccattatttcgttctttcttatggctgagtagtattcaatggtgtatatatatatttgagatatatatgtgtgtgtgtgtgtgtgtgtgtgtgtrtgtgtattatcacattttatttatccacttgttgattgacgggcatttgggccagttccatatttttgcaattgtgaattgtgctcttacaaatatgcatgtgcaagtatctttttcatataatgacttcttttcctctgggtagatacccagtagtgggattgctg

SEQ ID NO: 572862 - DNA, 529 bp, Homo sapiens
ggaactgcaccacaccctgacccttgtccttaggggagcccgaagcaaccagtggcattagtagatgcagtgatggtggtggttgttaggaatccatgacctcaggaacaatgtgagttaccaatagcgtgtctggcattggtgggttcttggtctcactgacttcaagaatgaagccacggaccctcacggttaagtgctacagttcttaaaggtggtgtgtctggagttttttccttctgatgtttggatgcgttaagagttttttctttctggtgggttcatggtctcgccagcctcaggaatgaaactgcagaccttcccagtgagtgttacacctcataaaggcagcgtgaacctaaagagcaaaaaaaaaaaaaaaaaaaggaagcttccacactgtggaagaagaycctagggagttgccactgctggctggcgcagcctgcttttattcccttatctggccccacccacatcctgctgattggtccattttacagagagctgattggtccgttttgacaga

SEQ ID NO: 572863 - DNA, 529 bp, Homo sapiens
ggaactgcaccacaccctgacccttgtccttaggggagcccgaagcaaccagtggcattagtagatgcagtgatggtggtggttgttaggaatccatgacctcaggaacaatgtgagttaccaatagcgtgtctggcattggtgggttcttggtctcactgacttcaagaatgaagccacggaccctcacggttaagtgctacagttcttaaaggtggtgtgtctggagttttttccttctgatgtttggatgcgttaagagttttttctttctggtgggttcatggtctcgccagcctcaggaatgaaactgcagaccttcccagtgagtgttacacctcataaaggcagcgtgaacctaaagagcaaaaaaaaaaaaaaaaaaaggaagcttccacactgtggaagaagatcctagggagttgccactgctggctggygcagcctgcttttattcccttatctggccccacccacatcctgctgattggtccattttacagagagctgattggtccgttttgacaga

SEQ ID NO: 572864 - DNA, 392 bp, Homo sapiens
agatctggattccaattccatttttgccactttttagccatttgactctgggcaaataaactcttatcagtaacctcacctgcaaaatggggcttatttattctcatggaactgcatttcagagtaaccaaacagcaccaatgatggacaattcttcaaagaattctagcattaaaagcaaaaggacccccaccattttaaatccctaaaaatataactgactcatgcaaaattatcaacaggtaatttggggcttaggtcaggagttcttaacctgggggtcccacagaggcttagcagagggtgcatggataaaaggaaggaaacacatgaacatgaatgaaaaaaatgacacayagttatttttactaatttttaactaaaattttgta

SEQ ID NO: 572865 - DNA, 426 bp, Homo sapiens
acatacaacatgaagactgcaggtaaaactgtactgtatttgggattcctgccaaatgagtatactttagttgcccttgtcacaaaaacaaacacccaaaaaagtgagtaactatgtgagatgatgaatatgtgaatttgcttcattatagtaactattttactattgttgtatatatgtcttaacaccatgttgtatacctcaaatacacacaataaaatttatttaaaaaccaacgaaaaagcacattcccttcataaatgagattcttttcaaaataagtttgagaatatacattgtgaaatatactactaaaaaccaccccctaactaatctccccacaacccacgagctctgatttgatagcttaagacaggataaatgactcccattatgacamtgagccccacttttatggggacctcc

SEQ ID NO: 572866 - DNA, 454 bp, Homo sapiens
ctctttttagtacctgtttttttcttcctctttgcccgtgtattttcaggtgttcagataaacaacstggatttgcacctgggtgctttgtcttaaagggaggcccctccctccctgacccatctttctcaaacctactgttgtcctggcactgccgctacaaagatcactggttttaccagacaccacaccttcaagctagagccattatgagggatgcaggcaggtgcaggagcccctgccccacactgagtttccctgtcaaagtgggtcccgtacagagagcaatggccatggccatgggctgcgtggaccagcaatcaattgtaaaacaggaaacagagcttaatgaccataattactagctagagggaggcaccaaagcatggacttttgaataaaatgggctaaaatcccatctctgcccctgactagttgtgcaatcttgaacagg

SEQ ID NO: 572867 - DNA, 647 bp, Homo sapiens
actaagtttttgtcttaacttgtgtgggccacggttcccagatatttgtgcagacttgattctatacgtgtgtgtgtgtgtgtgtgtgtgtgtgtgtgtgtgtttgggtgagattaacaaattggtggattttgataaaacaggttactctgcataatgtgggtagcctcatccaatgagttgaaggcctgcagagatcaaaaggctgaccacccctagaagacaagaaggaattctgccagtcgacagcatttggacgtgaactgcaacattaggtcttccttgggtctccagcctgccagcccaccctacagattttggacttgccagactccataattgcwtgagccaataccttaaaataagtttctctccttatatactcactctattggttctatttcccaggagaaccctgagtaatagagggtcctggaagatctagtcccaggcaaagggaattttgttttctctctcacatatctcacctgtctattctccaagcacactcattatctccattccttgaagataatggattcccagaactggccacataaaaggaatatacttcagagacagaattggtgctgtcattttttttattattattaaatcactgctaatcctctagagacagtgcttcc

SEQ ID NO: 572868 - DNA, 478 bp, Homo sapiens
gtcttagggctcaggtgtgcagggagatccacaccttcctgcagtaagaatctggtacatgcacggggctgcctggtttcctctgagcaacagtcataggtgtgttagactattgcaggtgacctaaagatgccttaacatagcataagcataaccagaaaatgttcctgtatgggacaacatcctagcaagaaacagaatttacccagggtggtcaattgaaggatctattgactgagtcattggcagggttaaaggaacaaacaagaygtttcaagtacccagggaccagcagcaaagcaaaggtgaagaggcaaggagagtagtgtttctagagcccagtgagagtggggcctcaggaaaggggtcaagcaggacggaggtagagatgcagagggaagtggccaccaccagaggcacagcaccaagaaaagggggaacttggaaaggcaccctgacctctctcctccaaccttct

SEQ ID NO: 572869 - DNA, 474 bp, Homo sapiens
caggaaaggggtcaagcaggacggaggtagagatgcagagggaagtggccaccaccagaggcacagcaccaagaaaagggggaacttggaaaggcaccctgacctctctcctccaaccttctgatctcctaacttgactctaagccagtgtgagagggagtgcagatggtgcatctgtaagagtcatcttcccaaggctcagagaaaggcagtgtggatcgaggtggagtggggaggctcagtgaagaatttccagcacagctcctaaaactggcaaacagtttcccatttattcatagaattcaacttatcctgcacggcaccagaataatagcagctacccctgaggagctcactatgccccagacattgttctaaggactcatrtactaactcatttaattctcagaaccaccctttgaggtaagtcttattactgcccttgtgccgatagaagtggtgaagcagggcttt

SEQ ID NO: 572870 - DNA, 519 bp, Homo sapiens
acgaaaggattcctttgggggatggggaaggaggtaggaagcactcagcagatagaggcatgagtgaacaccggtaggtctgaatttgttcagggttttggaggaagctcaagcagttcactgtgaaaacatcctaacacgagcatcagggagatgcaggggcaaggccagagatggccttgcgtgctgcacttcagctyagattccattcctgcagcagctgcctgcatcccctggcttcagtcaggcgagtagtgggatttaagacatgggccacccagcctggaccctggcttaagatcctgtgtctctcatgtaacctctgtgctttaactttctcctctattgaatggggataataagagtccctgctccatgctgtgtaagacacgatgaggaaatgcaggtggggcactgtggatgatgactggcccgggtggggaggggctcagcatgtgggaatgataacggtgacacacacagaggttgggggacatccgggagactattgcatagttt

SEQ ID NO: 572871 - DNA, 519 bp, Homo sapiens
acgaaaggattcctttgggggatggggaaggaggtaggaagcactcagcagatagaggcatgagtgaacaccggtaggtctgaatttgttcagggttttggaggaagctcaagcagttcactgtgaaaacatcctaacacgagcatcagggagatgcaggggcaaggccagagatggccttgcgtgctgcacttcagcttagattccattcctgcagcagctgcctgcatcccctggcttcagtcaggcgagkagtgggatttaagacatgggccacccagcctggaccctggcttaagatcctgtgtctctcatgtaacctctgtgctttaactttctcctctattgaatggggataataagagtccctgctccatgctgtgtaagacacgatgaggaaatgcaggtggggcactgtggatgatgactggcccgggtggggaggggctcagcatgtgggaatgataacggtgacacacacagaggttgggggacatccgggagactattgcatagttt

SEQ ID NO: 572872 - DNA, 519 bp, Homo sapiens
acgaaaggattcctttgggggatggggaaggaggtaggaagcactcagcagatagaggcatgagtgaacaccggtaggtctgaatttgttcagggttttggaggaagctcaagcagttcactgtgaaaacatcctaacacgagcatcagggagatgcaggggcaaggccagagatggccttgcgtgctgcacttcagcttagattccattcctgcagcagctgcctgcatcccctggcttcagtcaggcgagtagtgggatttaaracatgggccacccagcctggaccctggcttaagatcctgtgtctctcatgtaacctctgtgctttaactttctcctctattgaatggggataataagagtccctgctccatgctgtgtaagacacgatgaggaaatgcaggtggggcactgtggatgatgactggcccgggtggggaggggctcagcatgtgggaatgataacggtgacacacacagaggttgggggacatccgggagactattgcatagttt

SEQ ID NO: 572873 - DNA, 557 bp, Homo sapiens
ggaagcctctcttgccttgcaccccagatgagctctctcctgactcctggaaaagacaggaagaagatggcagggatgcagggttctgaaagctgttctcagtgagctgggtcttggggacttttgcattaaaaactggcacttcaactagtgtgtctcctgctgccagggagcggaaatgtcacctcagcttagggacagacagatggctaaccaagatggtttctcatcactattggcttagttcattcctgtgcatagtagcagtagactctttggataaatractgtgtatttgagaaaaaaatgatacatatttgatatttaacttataaaataaaaggaatgacttctcaacctttcaaaagaatagtcttgctagaaatagtaacttggcttaaatatagagtcccagctgggatgtcttcatcatatgattacttaactagagacattctgttaggaaatgggcatacagtgtcagcaaataacccctcccagagtacagattgcacagagaaaattctatttctcacaaagctctataatgaccatgt

SEQ ID NO: 572874 - DNA, 550 bp, Homo sapiens
tcgcctacaggcaaatagagcgcttcgtgccatagggacagcaaggaaatacacatgtacacatggacacaggcatctagcaccgaggctgtcacgaacttcctcgcagccgtattttacaagtttccattcaacgggacaaatcgaacctcagcacctttaatgaagacaatcttgagtaaatatttggctttataaatttgaggaacatatcttctcagtaatgtttagccrcccagacatcttgggaccagcttaatggtctccacatgccttctccatggggtccagctctgggagcctcctccgcccccaacaaagctgactagccaaggcagaaactgcagggggtctccgaggtgcagcacggccagacctccgcataccatcttctgatcaaggggcatccatctgtgggacgataatttaaaccatctccttgtccacaaacacagagaataaaaagaacagtgggactctgccccccagtagatcctgggctgggaaaacacaactttgttcttccctaagaacctatattttcacaaac

SEQ ID NO: 572875 - DNA, 519 bp, Homo sapiens
ccctggtggggatttcaataagcctctgcagcagctcctgggsggaggtgggttgtcactgccacttcattcatcaagaaaggcttgaaccggtggagccacttgcccaggcagccgagtttacaagtgaggaactgcaccttcatcgtgcctgatgcaaaagcatattcctccttctcaactgcctgcctggtttgaaagagcttatattccagtttctcaaataacatttgagtgtgagagagcctgaccccagaacgtcatggaggagcacagtgtggtttgaaagagcttctattccagtttctcaaataagatttgagtgtgagagagcctgaccccagaacgtcatgaaggagcaaagtgtgtagtccaggtgaaggatggggaggagacacagggagaaggaagggccagtgttggccaagggtatcaaagaagacttcctggaggaggtggggtagcaaagacaggcaaacaggtgatattcaaactttcttatacaaaaggatattattt

SEQ ID NO: 572876 - DNA, 588 bp, Homo sapiens
acataatatgctttccggctctaagaaaagagaattcagaaatgtgaatttggtcgggaaagaagtagggggaggacaattcttacattagtaaagtcacttaattaatagtcaaagtatgctaataatagcaataatagcatattagaactataatagaactaataatagtaatagtataatagtgtaaaataatatctaatagtataatgataatgacaacagcagcaacgggtaagagcttccctgagtactcacaccaagctggctagacgttcaagcacttgagcattcctatgtgtttcattggtttacaattctacatcatgagcacttggaccgttccattttgcagtcggrgcaaagggaaccaaacaacttggctttgatcagccaatcaagcaagagcagagtcaagagaggattacgacagtgtggctccagacagattcctgcccccagtgtcgtgtctcacttctcacaattcaaaccctcctggagcttgtttcaactcaggatgccccagttctccaagtccctccatcactggttgttaaggaacagagaggggttgatctgaaacccgca

SEQ ID NO: 572877 - DNA, 558 bp, Homo sapiens
gattatgataatagcaacaacaattcccaattgttaagcatgctgagtgcttagtttattgctttaagtgaggcggtcttatgtgattcccatcatcgacatgagaattctgaggctcaagagtttaaggtattttccaaaagacaaaaacaaaacaaaamaaaatcctcatctaggaagttgtgggacaaggattcattgttgaacttcgtgtcactccatgaactcctaaccactgtgatacatttcttctttctgggctggagaaggctttgattaaagtccttcccctgtttcttcctatgtatgtaatatctgacaaactacctcaggctttctatgtggatcaagttagatcagggtttgtcaacctcagtgctattgacattgtaggctggataattatttgtggtgggggcactgtcttgtgcattgtaagatgtttagaaccatccctggctcctaccgactagatgtcaataacagccccctcccagttgtgacaaccaaaaaatgtctgcagacgtcaccaagtgtttctcaagaaaatcaccctta

SEQ ID NO: 572878 - DNA, 582 bp, Homo sapiens
tctgaggctcaagagtttaaggtattttccaaaagacaaaaacaaaacaaaacaaaatcctcatctaggaagttgtgggacaaggattcattgttgaacttcgtgtcactccatgaactcctaaccactgtgatacatttcttctttctgggctggagaaggctttgattaaagtccttcccctgtttcttcctatgtatgtaatatctgacaaactacctcaggctttctatgtggatcaagttagatcagggtttgtcaacctcagtgctattgacattgtaggctggataattatttgtggtgggggcactgtcttgtgcattgtaagatgtttagaaccatccctggctcctaccgactagatgtcaataacagccccctcccagttgtgacaaccaaaaaatgtctgcagacgtcaccaagtgtttctcaagaaaatcacccttaaccctgacttagatgctgttcttgaaagccccttgcacaccctaaaacaattccacttgtgcctgtggattatttcaggggatgwtatttttatttttatccaattcaagagggaagcaggacctagtaaaa

SEQ ID NO: 572879 - DNA, 488 bp, Homo sapiens
gcttaattatttgaattattctgagtctatctaagagaaaatctcattttgcagccgctgtatcttcagcaaccaacacttgataatctccctgcttaacaaagaaatggcaaactatggctcagagctatagacaggcagcaaataggggatgtgaccttggttttttatttacagtgagattatttaaacagaactattcatttatattagtacattatttattacaattttaatttatraagttatcaattattagtaagctcctggactgattaacagtgcatacattatctggttcatgtcatgagattgagggaggtgtgaagcttaggaaacaccaccctcagttgaaagctctgtgtacagagagctgcactaggcagtcttgggcatgtatgtactcaagaagttcttgataaattctcagcagcccccatggacaggtgctagtgcattattttactggggaaaggaatgattgttct

SEQ ID NO: 572880 - DNA, 494 bp, Homo sapiens
aaccctacttgcacccttattaygagtcaggcacttgctgaacactttgtaggcatcatctcaatgaacgctcatgcacttgggaggcagggagtagagcaaggtgagccctgttgccaagtggaccagaacatctagaaccacacagccaggcatgagtttcagctacatcacttacaaccaggagatcttgggcaacattacttaccttccctattcctcaatttccccttctataaaaagtgagcatcatgataccccataagattgttgtgaagagctaattgacattccacatggaaagcatttaaaaacacacctagaacatggtgatatggtttggccatgtccccacccaaatctcatctcgaattgtatctcccgtaatccccacatatcatgggaggaaactggtgggaggtaattgaatcatcagggcaggtttttgtgctgttctcatgatagtgaataagtctcacaagatctaatggttt

SEQ ID NO: 572881 - DNA, 611 bp, Homo sapiens
aagttagtatactcagccttctgcaccatgctttttcacttagcagtatatttttgaaagcactccatattgcttcatacagatcttcttccttttcttattgcagytcatgatactccactgtgtgtatttactgtagttcattcagccatttttctgcatagaggtatgaatgttgtgtcaaaatattttgcatttaaaaccaatgttgaggccaggcacggtggctcacatatgtaatcccagcactttgggaggctgaggcaggtggatcatgaggtcaggagatctagaccctcctggctaacatggtgaaactccatctctactaaaaatacaaaaaaattagccaggcatggtggtgggcacctgtagtcccagctactcgggaggccgaggcaggagaatggtgtgaacccgggaggcggagcttgcagtgagccgagatcgcgccactgcactccagcctgggcgacagagcgagactctgtctcaaaaaaaaaaaaaaaaaaaaaaaccaatgttgcaataaatgatcttgtgtgtatgtgttttctgattgccagaggtgtatcttcagagtagattcctagaagtaagatgaaagagtc

SEQ ID NO: 572882 - DNA, 611 bp, Homo sapiens
aagttagtatactcagccttctgcaccatgctttttcacttagcagtatatttttgaaagcactccatattgcttcatacagatcttcttccttttcttattgcagttcatgatactccactgtgtgtatttactgtagttcattcarccatttttctgcatagaggtatgaatgttgtgtcaaaatattttgcatttaaaaccaatgttgaggccaggcacggtggctcacatatgtaatcccagcactttgggaggctgaggcaggtggatcatgaggtcaggagatctagaccctcctggctaacatggtgaaactccatctctactaaaaatacaaaaaaattagccaggcatggtggtgggcacctgtagtcccagctactcgggaggccgaggcaggagaatggtgtgaacccgggaggcggagcttgcagtgagccgagatcgcgccactgcactccagcctgggcgacagagcgagactctgtctcaaaaaaaaaaaaaaaaaaaaaaaccaatgttgcaataaatgatcttgtgtgtatgtgttttctgattgccagaggtgtatcttcagagtagattcctagaagtaagatgaaagagtc

SEQ ID NO: 572883 - DNA, 656 bp, Homo sapiens
tacttacagcctgtgtgttggtaggcaagttaactaacctctgtgtgcctcagtttcctcctctctaaagcagatgtaattgtagtacctgcttcgatggggttgtgaggattcagtgggctaatatttatttgcagggtgctcataacagtgtctggtgcactgaaacttctctgtcaatattgaatattactaacagggctgtttttaaacacccrtcaaaccttcaataagcattgaattgtatcttcgcagtaaacagacattgtgtgttgtgtaaaacaactaccaagtttattctcaaaattctattattcccattgtactatgattttgtttaaaaagcagtgtctttgtataatgacaggagtatttgtagcacagaggttactaatggcgtggctctggggtgtaagacttagtcacattaaagggtactgcttggtgccgtggagcgcagcagccgtattccctcccttccgatctttgccatcacagatcaaagtcctggggagagaagatccacctcactccctgttcaccaagatatggcacgtgttatatttccttacttcagattttaaattcgaagcaaatttcctaagggctaaaagcaattgctcatgagaaagtctgagcagcagacgttccccaaa

SEQ ID NO: 572884 - DNA, 532 bp, Homo sapiens
gtgagactcttgatgttatagtaacagtgaggattccaacaccccagggaacaccagctgtgtgatgttcctgaaacaggaaccagggaaagaaagcctacatatccccaacttcacactccttgtctctgcmttgaagtccttgcactccgaggtagcgttttacatctggctttttttttttaaccttgatttttactggctatctggagaacctctcaaagcaatattcagattcctataaggaccagacgtaaagttgtctctttaataggtagaccaatgtcgtgaagcactggttaggtttgcacacagcatcttttagatcacagagagtgggaaattactagtccactcaggtagagccgagactcctgcaggtggaatcactgcataccaaaaagcgtgccttccgattagtggaagtttaatcaattgccagtgctgtcacagcttaatcatccagggaagaccttatctctgggcatgtgctccttccttggctctcccttattttcccttggcacatgtg

SEQ ID NO: 572885 - DNA, 532 bp, Homo sapiens
gtgagactcttgatgttatagtaacagtgaggattccaacaccccagggaacaccagctgtgtgatgttcctgaaacaggaaccagggaaagaaagcctacatatccccaacttcacactccttgtctctgcattgaagtccttgcactccgaggtagcgttttacatctggctttttttttttaaccttgatttttactggctatctggagaacctctcaaagcaatattcagattcctataaggaccagacgtaaagttgtctctttaataggtagaccaatgtcgtgaagcactggttaggtttgcacacagcatcttttagatcacagagagtgggaaattactagtccactcaggtagagccgagactcctgcaggtggaatcactgcataccaaaaagcgtgccttccgattagtggaagtttaatcaattgcsagtgctgtcacagcttaatcatccagggaagaccttatctctgggcatgtgctccttccttggctctcccttattttcccttggcacatgtg

SEQ ID NO: 572886 - DNA, 453 bp, Homo sapiens
aagaaacaggaagagaagaaagtgtccttttgtgctagatgcattttgagaacacctttctaataccactgtacaaaagtattagtcaaggagtccagttatcttgattacataagctagaaaatcttccaaacctgtttgaacagaagaaaggagctgagacatagcccccagtggatgcccctggccgaggtgtcactcatcactctcacagtttgatctcaggacatcatttcctccctccttttmttctgttctgtgggattctttgaagagtgttgagaagcctttacatctgattttgctccacaagccaaggctcctcttcagaccaggtgggttttcttttcatcctgctttgatccttcccagggagggcagagaaggaattctgctgcctggaactgctgctctccttctctgcccgtgggcccctgggcccctgctggatgc

SEQ ID NO: 572887 - DNA, 589 bp, Homo sapiens
cacgcttctttgaaattgttcagcaagaaacaggaagagaagaaagtgtccttttgtgctagatgcattttgagaacacctttctaataccactgtacaaaagtattagtcaaggagtccagttatcttgattacataagctagaaaatcttccaaacctgtttgaacagaagaaaggagctgagacatagcccccagtggatgcccctggccgaggtgtcactcatcactctcacagtttgatctcaggacatcatttcctccctccttttcttctgttctgtgggattctttgaagagtgttgagaagcctttacatctgattttgctccacaagccaaggctcctcttcagaccaggtgggttttcttttcatcctgctttgatccttcccagggagggcagagaaggaattctgctgcctggaactgctgctctccttctctgcccstgggcccctgggcccctgctggatgcttggggatgtttcctattagtgggcagagcttcccctccgccctttgaacttcatttccttaggagccgggaggacctgccctggctgcctgtgcggtgcatttgcattgac

SEQ ID NO: 572888 - DNA, 525 bp, Homo sapiens
cccaggttcaagtgattctcctggctcagcctcccaagtagctgggattacarggttgtgccgttgcacccagctgatttttgtatttttggtagagacggggtttcaccatgttggccaggctggtcttgaactcctgacctcagtgatccacccatcttggcctcccaaagtgctaggattacaggtgtgagttaccgtgcccagctgagcccttgtttttaaaaggcagagtcaccaccatcaaatgacccatgctgcagggcagagctgcctgccaggtgagcatgagtggcccttggcatgccaccactgaatccttcaagcttggtgccacattcctaaagctttctttctaaagttatgtcttggatcacgggggttgggggtttatgctactacaaaggaagagatagttgagacaagcactccccacctccctaaaattctatgaatattcatacatacactccttctaattgccactcataggttcttgtcaaattgcccccaaatttattcttc

SEQ ID NO: 572889 - DNA, 593 bp, Homo sapiens
ggggttgggggtttatgctactacaaaggaagagatagttgagacaagcactccccacctccctaaaattctatgaatattcatacatacactccttctaattgccactcataggttcttgtcaaattgcccccaaatttattcttctaccaatacctattgggctccttttgtgtttcaggtatgctaggtayataccatcaaagcaggctggacaaagattcttgcccttatgaagcttgtgtgccccagttgggattttttcacgtaatttctttggtggcagtaatgcaaaatttccacctgatccattggaaaaaatagaatgtctacttgtaggtaaattctcctcttttctctctctgtattaatatttctacttctttttctttctctgtctcctccagagtgcctctggctctctaaatatgtatgaacacgtaccgtacacacacacacacacacacacacgtgcaagcatacatgtgtgatttcagcttaaaaattacttttgagaagcacatctaatacaaaagaggatgtctctaaaatagccgcctgtgagttgaaattcatcttcaattacattttta

SEQ ID NO: 572890 - DNA, 516 bp, Homo sapiens
tcaggaagccagggccagggcaaagttgtgattttcatgtttctggtgagagaggaattacataaaggaaagaaatacctttttctaatttagttcagtgaggaagtgtgacatctggaagcaaagcacaagggaactgtccgaggtgggagrgaagcagggtctcaggggccccaagtgctccagagaacatagccaggcatcctatttctgtcccatacttggctattctgtccattttttctaaaagatcttctctagcactcataaagcatataacaaagtagagaaatacaagagacaaatataaatcaaggccaaagaaaacagaagtggggttgagaccaggaggaaataattcaaacactgctaatcatccatgtttatcaacagtgaataaaatctaaaaatgcaactcccgaggcttcctggcagcatgagtgaaaagggaaacttgagcaaacacctgcttctccctgtctggaggagaaagaccagagatgtggtcgtggtgaa

SEQ ID NO: 572891 - DNA, 516 bp, Homo sapiens
tcaggaagccagggccagggcaaagttgtgattttcatgtttctggtgagagaggaattacataaaggaaagaaatacctttttctaatttagttcagtgaggaagtgtgacatctggaagcaaagcacaagggaactgtccgaggtgggagggaagcagggtctcaggggccccaagtgctccagagaacatagccaggcatcctatttctgtcccatacttggctattctgtccattttttctaaaagatcttctctarcactcataaagcatataacaaagtagagaaatacaagagacaaatataaatcaaggccaaagaaaacagaagtggggttgagaccaggaggaaataattcaaacactgctaatcatccatgtttatcaacagtgaataaaatctaaaaatgcaactcccgaggcttcctggcagcatgagtgaaaagggaaacttgagcaaacacctgcttctccctgtctggaggagaaagaccagagatgtggtcgtggtgaa

SEQ ID NO: 572892 - DNA, 558 bp, Homo sapiens
aacactttgtgtcttttcttgggggatcatgttggtgttactcatcaagtagatgccgttcaacagaaacctgattggcgctaatttaaagatagcggctaattagtctttatagcaggataaaactaatttgaagcatgctaatgagagtgaagttttatagcagggaaggcaaaatattaatttagaatccaggaggacgggtgatgraggatgttttaatttttaaaattttaaatttaaattctgttaaattgcaggtagaatgacaatcactgtggtgggtttggaggttgtgcctgcattttgttccacaggtatttattgtttctgatctatgctgatgatttgcccagcaccagacaggcaacaataacgaaaccaacattgtgattgctcttgcagctctgtcatctaataggtctcatagtctaatagaagaatcaaatgcgaagtgagtaagtatacagtaacaatgttagattgataaaggacgacacacacacacacacacacacacacacacacacaccccaggataacagagagagaacaata

SEQ ID NO: 572893 - DNA, 546 bp, Homo sapiens
  misc_feature 352, 353: n = A,T,C or G
aattatggaggtaaaaagataaatagaaatagatataaacacacaccccactagcaaaattcaatagtaagatcaaagctaaactctctccttcacagagttcctgttaagattttttccccctcttctgcaccataatctgagtcttggatactttgcttcctattcagcctcaagatcaaacagctcacacacatctgctggggtaaggtttgggttttgtttcgttttttttttaaaggcattcaataattggtgacggtaagatgagaagargagtttgaacatcaacataaaggcaacagcaaaatacatcatcacagtcattgtgccatggagatgaggggttggnngggagacgtgcctgcatgagggtgcaaatgtttgtaaaagctaactccaacatattccaaggagaacattctctgattatttgccctagcatttagaaataaccttttaaaaaaataggaattgttttatttcatttttttccaaatggaattctgcttctggcctgttttgagagcaaagaggtcagaggcc

SEQ ID NO: 572894 - DNA, 495 bp, Homo sapiens
cacattcagtggctgctggggggttcccctgtgtgtgtgtgggcagctcatggtccaaggccagcgaaggcccataaaaatgtcaggcctgtgcaaaggacagagctctttggccttctttctcccctggctagaggttttcttcctagttatgtctccttaaaagaagcccttccttttctccacctggggatcctgcccctccagtgttctcaccaacaagtayacagagcagaggtcagaggagacacggcacagacgtcagtggcatttcagagcataaaactcttctcaaaagaaggtttaatccaatcccttctcacagatggggaaactgaagcctgggatgagagacttgcctaagaccatgcagaaaactggcaagagagagagggatagagcctagttccccaatcccagacaggggctcttcgcttcatccacattacctctgcctgtctcttccaagaaagaagagagtgaaggcttaactga

SEQ ID NO: 572895 - DNA, 462 bp, Homo sapiens
agtcactgttctaggcactgggagacagcagtgaataacataaagaagttcaagccctcatggatcttatagcccgctggggaagacaaactataagtgtcattagataagcaaacaggatatcagactgttatacgtgctgttaaaaaaaaatgaagcaaaaacagagggtagggagggtcagagcagaagggactattttattttgggtagtcagggaagacctcygtgctaaggaatctaaaagaaacaagagaatgggccctgcagacatgagggcactccaggcagagggaagggcaggtgcaaaagccctgagataggaacttgcctccagtatgcaaggcccagtgtggttgagtggaagaggcactggagcaaagagtagagatgagttgaaggagacagagaaggtccagctatcacagggccttgtaggccactataatgaatggtgctttt

SEQ ID NO: 572896 - DNA, 462 bp, Homo sapiens
agtcactgttctaggcactgggagacagcagtgaataacataaagaagttcaagccctcatggatcttatagcccgctggggaagacaaactataagtgtcattagataagcaaacaggatatcagactgttatacgtgctgttaaaaaaaaatgaagcaaaaacagagggtagggagggtcagagcagaagggactattttattttgggtagtcagggaagacctctgtgctaaggaatctaaaagaaacaagagaatgggccctgcagacatgagggcactccaggcagagggaagggcaggtgcaaaagccctgagataggaacttgcctccagtatgcaaggcccagtgtggytgagtggaagaggcactggagcaaagagtagagatgagttgaaggagacagagaaggtccagctatcacagggccttgtaggccactataatgaatggtgctttt

SEQ ID NO: 572897 - DNA, 462 bp, Homo sapiens
agtcactgttctaggcactgggagacagcagtgaataacataaagaagttcaagccctcatggatcttatagcccgctggggaagacaaactataagtgtcattagataagcaaacaggatatcagactgttatacgtgctgttaaaaaaaaatgaagcaaaaacagagggtagggagggtcagagcagaagggactattttattttgggtagtcagggaagacctctgtgctaaggaatctaaaagaaacaagagaatgggccctgcagacatgagggcactccaggcagagggaagggcaggtgcaaaagccctgagataggaacttgcctccagtatgcaaggcccagtgtggttgagtggaagaggcactggagcaaagagtagagatgagttgarggagacagagaaggtccagctatcacagggccttgtaggccactataatgaatggtgctttt

SEQ ID NO: 572898 - DNA, 523 bp, Homo sapiens
ttacatccctttgtttctgagatttaatgaaagaattttatgtaagttaaagaaaggaattcttgttagatttatatatcaaagtaaaccacagacctcagttatttcgcccaacttggccaccccaccccatctgatgtcagagtctttctctaatactgtcttgagtcaactgtgtgccaagatagtgcctgctggaaactggatggaattctcatttaattatcacaacagccctatgagagatgtgaactctctrttttcaaatcatgaaactaagtcaagagagctcaagaaatttgtccgctatcacaaagctaaataggactgtgggacagaaagactcctaagcccaaggactttttaaatattagaacttctccttcctatggtcatctagtcactgctcaaaccctccctacacactgctttccagttggaggcagtttttgttgttttatagtgttcttccctgtcctgagccttcttgtaaagtccacctgtaagttcaaccacaagcatg

SEQ ID NO: 572899 - DNA, 585 bp, Homo sapiens
  misc_feature 563, 564, 565, 566, 567, 568, 570, 574, 576, 577: n = A,T,C or G
gaataattatttctacaaaggccttttggattggctttaatggagctctgttccccaaggaatctcatgtaagaccttttaaagcctagaccaaccatgagtttatcctcaaatatctgtgagttgggtgctcctctcctcttaagctcctaagataaacttggagctcctggacctgctagaaagtgacatttttttaattgaccacaggtcaggaatcttgtacggggactgcatagacaaggacatgaggccagtttccccattggactttattgactctgcaagtygagattgactccttaaagggaagtatacccttccagtcaaagccttggtaaaattaccagtttctccaattgcatcctgttgcaaaagaaaaatgggtttttattgcactgatgcaaacaactatattgccgtaagaatgctcacaggtaggttataaattctggaacgacagccagagagaaacaaacatgctctaatttttgatcataggagtataccttctttaattattaaaggctgtaaatagttcaaactaagttcccttgcctatnnnnnncnaggngnnggtccacg

SEQ ID NO: 572900 - DNA, 494 bp, Homo sapiens
tacaacagaataggcaaatatcaaaaaacatgcttagcaaaagaaggtagacacaaaaaaatacttacattatgacccacttatatgaagttctactataaggaaaactagtctgtgatgacagaaaaaagatcactgtttacctgagtcagggggttgagggatagagggaaggctgattgcaaaagggctgtattagccttttctcacactgctatgaagaactactgtgtaatttataagggaaagaggtttaattgtctcacagttccgtgttatttaggaggcctcacaaaacttacaatcgtggcagaaggcaaaggagaagcaggcatcttcctcacaggatggagtgagtgcaagcaggggaaatgccagatgctcataaaaccatcagatcttgtgagactcactcactgtcacaagaagagcatgaggaaagctgcccccatgrtccaattacctccacctggtcccacccttgacacatgggg

SEQ ID NO: 572901 - DNA, 617 bp, Homo sapiens
attaacaatactgtcccattgtcttatgaaatagtggtccataattagacacctaccaaaattaacaactatatatgtaaagacaaataacataatgccagaaacacccaaaagatggcatggaaggatttttattttatacatttttggaaaagaaaaatgtctatttctcaaacacacatgcgtcagtagattgtagccacctgccagtaaggaatttaagaattttaagaaatttggctaataatttacaaagctgagtacagttgtctcatgtgctactctgatgggggagagaagggcaaaarataaggtttatgtgtccagtttcccttgtatcattggtcaagagcatctgtgatattgatcttacttttctggtttattgaatgataccttgtaggaagtaattagtgttaagatgtgaggagaaaaagagacaacatctgtctcttcaattcttgaagtgtgaaccaactgagaaataaattaaagaagtaaattagacaaagatttaaaaatacaagttttatgcttggtaaagcagattgaagaatgctgttcaaactctgcccaacatagatctttctaatactgccttttcctcctggattaaa

SEQ ID NO: 572902 - DNA, 440 bp, Homo sapiens
ttggaaacctgatttgttctttgccaatgaaaagggtgccaactttcatgaagtcactacagacaacaaattgytaagaattttcaaaaatggaaatgttctttattcaataaggtgagtcgtggacttaaattgccgatttcagtgaaatagaatatcatggtgtattgttggttggtttgtttggtgaaagttttgacatttttgaacaagtgctatcattgttgcacttcagttcctctaatagactgtttcccaaatatgtctgatcaataataacagacccaagttccagattcaggaactatataagtaattcttggaaatccactttttaaacaaatgtccctggtgattcttaatatcagccaggttgtcaggaatcttaaaggcaaagtgaaaggcagctgaatcatgcattgtgataatacttttatgta

SEQ ID NO: 572903 - DNA, 514 bp, Homo sapiens
tgcctacatttagaagttgttggaaaaaattccagacaaaggcaaagatggcaaattaaaatcaacacgattcaacctcgaaagagaaagsactgtgaaggagttctgtgtaacaaaatcaaatgctgcaaagaaagttgtgtaaggtacttgaaaaaagcaattgttattgttaacgaagacaaatgtgattagaataatgatggtcaaagctggaatctaaaaaggttttttgtttttaggtgagtgatgaggaagtgggagcagcaagtgaaatcgtttattccaagaatgttagttattaaagaaagatgagaaaaagtacagtgcttgagggttggttagatcactgggcttatgttttgaataaggaaagcttactggggctattttgcaggacacaaaagctgacatagtaagacctcccatgtgtctgcctttctcagaacatttctcaacatgagaaaagagagcctcttttctttcccctttgtttcttaattcctctataaga

SEQ ID NO: 572904 - DNA, 514 bp, Homo sapiens
tgcctacatttagaagttgttggaaaaaattccagacaaaggcaaagatggcaaattaaaatcaacacgattcaacctcgaaagagaaagcactgtgaaggagttctgtgtaacaaaatcaaatgctgcaaagaaagttktgtaaggtacttgaaaaaagcaattgttattgttaacgaagacaaatgtgattagaataatgatggtcaaagctggaatctaaaaaggttttttgtttttaggtgagtgatgaggaagtgggagcagcaagtgaaatcgtttattccaagaatgttagttattaaagaaagatgagaaaaagtacagtgcttgagggttggttagatcactgggcttatgttttgaataaggaaagcttactggggctattttgcaggacacaaaagctgacatagtaagacctcccatgtgtctgcctttctcagaacatttctcaacatgagaaaagagagcctcttttctttcccctttgtttcttaattcctctataaga

SEQ ID NO: 572905 - DNA, 496 bp, Homo sapiens
ccccaggttaaatcagacagggttggayttctcctcattgcatggcatcatcggaatgaatcaccctaacaaagcgacatgcttgtgtccctctgtggaaaattgcatttcatgcattgtgagaaaaaaactacatccagatttcatgtgagtgtttatcttgcagaaattcttggatacagttctgcttcatgattcattttccactctttattcatgttgagtcctctctagtgctggaatcatagcgaccagaggccatctctcttcaaatgtaaaaagtggttgattttcaaacagatgataaatgtgaaatcatctaaactactaagtaataaaaattaactggtagtttatcacctttctaattttggtttttttttttagagtttcattgtccacgttctagagcagcagttcacagttgcagttttaccacacccggagtaactaacacatattatcccagtgggcaccacaggctttatttgaattc

SEQ ID NO: 572906 - DNA, 366 bp, Homo sapiens
attcttgggtgtttctcggagagggggatgtggcagggtcataggataatagtggagagaaggtcagcagataaacacgtgaacaaaaaggtctctggttttcctaggcagaggtccctgcggccttccgcagtgtttrcgtccctgggtacttgagattagggagtggtgatgactcttaacgagcatgctgccttcaagcatctgtttaacaaagcacatcttgcaccgcccttaatccatttaaccctgagtggacacagcacgtttcagagagcacggggttgggggtaaggttatagattaacagcatcccaaggcagaagaatttttcttagtacagaacaaaatggagtctcctgtgtc

SEQ ID NO: 572907 - DNA, 366 bp, Homo sapiens
attcttgggtgtttctcggagagggggatgtggcagggtcataggataatagtggagagaaggtcagcagataaacacgtgaacaaaaaggtctctggttttcctaggcagaggtccctgcggccttccgcagtgtttaygtccctgggtacttgagattagggagtggtgatgactcttaacgagcatgctgccttcaagcatctgtttaacaaagcacatcttgcaccgcccttaatccatttaaccctgagtggacacagcacgtttcagagagcacggggttgggggtaaggttatagattaacagcatcccaaggcagaagaatttttcttagtacagaacaaaatggagtctcctgtgtc

SEQ ID NO: 572908 - DNA, 366 bp, Homo sapiens
attcttgggtgtttctcggagagggggatgtggcagggtcataggataatagtggagagaaggtcagcagataaacacgtgaacaaaaaggtctctggttttcctaggcagaggtccctgcggccttccgcagtgtttacgtccctgggtacttgagattagggagtggtgatgactcttaacgagcatgctgccttcaagcatctgtttaacaaagcacatcttgcaccgcccttaatccatttaaccctgagtggacacagcacgtttcagagagcacggggttgrgggtaaggttatagattaacagcatcccaaggcagaagaatttttcttagtacagaacaaaatggagtctcctgtgtc

SEQ ID NO: 572909 - DNA, 591 bp, Homo sapiens
  misc_feature 560, 561, 562, 563, 564, 565, 566, 567, 568, 569, 570, 571,572, 573, 574, 575, 576, 577, 578, 579, 580, 581, 582, 583,584, 585, 586, 587, 588, 589, 590, 591: n = A,T,C or G
ctatattagttctaatcagcaatgtacatattattccacttttgtgttcttatatttttctgtcctcttttatatagctctagatattagagccctaaaccccacacattctgtctgctattcagcatctttaatttccccctctgcactgatctccatccctttgcttccattatccttgtaaaggagaaccaactttagattagaaatggtaaagtaaatattgacaaaggaaagcaggtccaagataggcggactatctgctggcccagamaaattacatcataggatcctgagaaaactgacatttgagattcctgaatcactatctttgacaaatcataaagggaaggagcagaatcaacagctgctgggaatgtgcaaacatcactgcaaataccaaaaagaggaagaaagtggattgtacacactattaactagtaattttgatatcagtctaaagaaaaattaaagaatgggtcattaaatagtgggttgtaaggagttccaaaggaacatggtgtgatgtttagaagccagcgtgggttcactcaaagccnnnnnnnnnnnnnnnnnnnnnnnnnnnnnnnn

SEQ ID NO: 572910 - DNA, 486 bp, Homo sapiens
gaattcaaataacagtgttaggacatttggatggtaaacttatggatgtttctaactaagagcaaactaaacaaaagtgagaaatcaccatgacaactgaagagagaagcaactggattccagatttgccagcagctctctccaaaacccagtgaaaagtcagagaaagcatttaaatggaaaacaagtcatgtaaattcaggcgaatgaatctttgaaagacaagaaatgatccaggtgattggagtatactatctcatgctaagtgggaaagtacatgtaatattagacttcaaaaggcacaacgtgtgtttttcaatacattttcttgcttactccatacttcagtactcattttgaattttgtattccttcgtcagtccagtttctttccttcctgccatatcaaatctatttttgccctgtgaaatataagcctctcccagagcagtatgtgaatgcrttgtctttaaagtctagtgaagc

SEQ ID NO: 572911 - DNA, 568 bp, Homo sapiens
ttttaaaacaagacccaacaatatgctgcctacaaaaaactcaattcacctataaaaacacacatakactgaaaatgaagggatggaaaaagatattctatgcaaatgtgaatgaataaagagcaggagtaactatacttttatcagttaaacagatttcaagataaaaatggtggaaagagacaaagaaggtgattatataaggataaaggagtcaattcagcaagagaatacagcaattgtctatgtatatgcactcaatgcagcatccagttatattaagcaaatattattagagctaaagagagagagagacccactacaataatagctggtgacttcaacaccctactttcagcagtgaacacatcatccagacagaaatccaacaacagaaatatcaatctgcactatagaccaaatgggcctaatagacatctacagaacatttcattcaacagccgcagaacataccttcttctcctcagcaatgggacattttgaggagtagaccatgtggtaggccacaaacaaatctcaaacactttaaaaaaatgagatcatatga

SEQ ID NO: 572912 - DNA, 568 bp, Homo sapiens
ttttaaaacaagacccaacaatatgctgcctacaaaaaactcaattcacctataaaaacacacatatactgaaaatgaagggatggaaaaagatattctatgcaaatgtraatgaataaagagcaggagtaactatacttttatcagttaaacagatttcaagataaaaatggtggaaagagacaaagaaggtgattatataaggataaaggagtcaattcagcaagagaatacagcaattgtctatgtatatgcactcaatgcagcatccagttatattaagcaaatattattagagctaaagagagagagagacccactacaataatagctggtgacttcaacaccctactttcagcagtgaacacatcatccagacagaaatccaacaacagaaatatcaatctgcactatagaccaaatgggcctaatagacatctacagaacatttcattcaacagccgcagaacataccttcttctcctcagcaatgggacattttgaggagtagaccatgtggtaggccacaaacaaatctcaaacactttaaaaaaatgagatcatatga

SEQ ID NO: 572913 - DNA, 568 bp, Homo sapiens
ttttaaaacaagacccaacaatatgctgcctacaaaaaactcaattcacctataaaaacacacatatactgaaaatgaagggatggaaaaagatattctatgcaaatgtgaatgaataaagagcaggagtaactatacttttatcagttaaacagatttcaagataaaaatggtggaaagagacaaagaaggtgattatataaggataaaggagtcaattcagcaagagaatacagcaattgtctatgtatatgcactcaatgcagcatccagttatattaagcaaatattattagagctaaagagagagagagacccamtacaataatagctggtgacttcaacaccctactttcagcagtgaacacatcatccagacagaaatccaacaacagaaatatcaatctgcactatagaccaaatgggcctaatagacatctacagaacatttcattcaacagccgcagaacataccttcttctcctcagcaatgggacattttgaggagtagaccatgtggtaggccacaaacaaatctcaaacactttaaaaaaatgagatcatatga

SEQ ID NO: 572914 - DNA, 427 bp, Homo sapiens
catcttccacaaggtttgaactaatttacattcccaccaacagtgtaaaagccttyctatttctccacagcctcaccactatctgtggtgtcttgactctttaataactgccattctgactgacatgagatggtatttcaatgaggttttggtttgcatttctctaatgatcagtgatgttgcgcttttttttttaatgtttgttgactgcatgaatgtcttcttttgcgaagtgtctgttcatgtcaataccattcaggacataggcacgggcaaaaatttcatgatcaaattgcgaaaagcaattgcaacaaaagcaaaaattgaaaaatgggatctaattaaactaaagagcttctgaaagcaaaagaaactaccatcaaggtgaaaaggcaacctacagaatgggagaaatattttgcaatct

SEQ ID NO: 572915 - DNA, 427 bp, Homo sapiens
catcttccacaaggtttgaactaatttacattcccaccaacagtgtaaaagcctttctatttctccacagcctcaccactatctgtggtgtcttgactytttaataactgccattctgactgacatgagatggtatttcaatgaggttttggtttgcatttctctaatgatcagtgatgttgcgcttttttttttaatgtttgttgactgcatgaatgtcttcttttgcgaagtgtctgttcatgtcaataccattcaggacataggcacgggcaaaaatttcatgatcaaattgcgaaaagcaattgcaacaaaagcaaaaattgaaaaatgggatctaattaaactaaagagcttctgaaagcaaaagaaactaccatcaaggtgaaaaggcaacctacagaatgggagaaatattttgcaatct

SEQ ID NO: 572916 - DNA, 427 bp, Homo sapiens
catcttccacaaggtttgaactaatttacattcccaccaacagtgtaaaagcctttctatttctccacagcctcaccactatctgtggtgtcttgactctttaataactgccattctgactgacatgagatggtatttcaatgaggttttggtttgcatttctctaatgatcagtgatgttgcgcttttttttttaatgtttgttgactgcatgaatgtcttcttttgcgaagtgtctgttcatgtcaataccattcaggacataggcacgggcaaaaatttcatgatcaaattgcgaaaagcaattgcaacaaaagcaaaaattgamaaatgggatctaattaaactaaagagcttctgaaagcaaaagaaactaccatcaaggtgaaaaggcaacctacagaatgggagaaatattttgcaatct

SEQ ID NO: 572917 - DNA, 516 bp, Homo sapiens
ttttcccactcaactagatggcagggatgtgtcaccactgtaaccagagtttgtgaaacagcatccttttcagattaggcattccatatacatctggagaacaaaaaaaattatttgcagttttgccttggaaatgacactaaacttttactgaatgtctacaatgaagaagatattatgcctactttacaaattaggaatccaagacaaggaagaatcaaacaatacagtcaagaacattgtcagtattaaatgataggggtggaaatttgaatacaaatgatattttcttatcttcccacttggaagctaatggaataagagagtctcaaccttttacaattcagttcaggatggtcttatctaagatgttctatccagcacagtgtctccccatcatttccagactytcctcatcagtaaaaaaacgagagagcaagtgcagagtatataaaaggaggagaagaattaacttttatgtatcttatttggcttgcctggaacttagtataaact
